United States Patent Application Publication US 2011/0183924 A1 - sequence listing, part 61

SEQ ID NO: 203969 - DNA, 648 bp, Homo sapiens
caatatcctacttcatctgacattcaaaatatattatgaaacaaaacaggtatcccactgaaagcctaatatgatgtctcaagcatttcactctaagagaagacaatatagatcgcctttgtcttctgtggtccttttaagaagtacattctctcatatccagagacacatatacactgacttaaatatagagaaaaaaaaatcagggttatataaaatcattaaaaatcattaactattttcaaaacagagccccaagaaagtaaaattttctctgggtataactccttgtgaaaatgcaaggccgagaaactggcaagcatgtaatcaaagaccccacccaaacacatttgaaaccctgcatatgtttttctgtgatgggttcacggcatctatattaaacattatggtaggtgctgatcttccttggctgtagtgtgaagagataaacagtgtcaaagctcaaagaagccaagggcaatacatgaccagtataagccatgactgctttccaacagaaaatatttgattcgtgcttttcaagttgaaaacatctgagcaagtttaagataagatctaaagctcaactatgggttagtcttacattgcacaataaagtagttattaaccacatgtgactactgagca

SEQ ID NO: 203970 - DNA, 512 bp, Homo sapiens
catggtcccgggtcactgcagctccacctcctgggtgcaagtgattctcctgcctcagcctcctgagtagctgggatttcaggtgcatgccaccacgcccggctaatttttatatttttagtagaggcggggtttcaccataatggccaggatggtctccatctcccgaccctatgatccacccaccttagcctcccaaagtgttgggactacaggcatgagccaccacgtccggcccatttaactgctataatactttcctgttggtggttttaccagtgcaaactgagcagcttaaaacaccaaccagttattatctgttttcatgagccaagggtctgggcagggtttaactgggtcttctattcagggtcacaatacggcaaccagagtgtcagttggagctggggtctcattggatgctcagtgtcttcttccaagcttattcagtctgtgaactgaattcaattacttacaattgttgaatgaaggccctcaactcctagagctgc

SEQ ID NO: 203971 - DNA, 430 bp, Homo sapiens
aggcagatgtcaagtgcgagcatatttccaggcacatcataaacctatgataaatggctgccatttctattattagcatggggctggggccatagcaaagcccaaccatgggaggaacagcagaagcagggagagagcaaaggtctgaagaggcatctggggaagctgtgggagcccttgcgtggccctttccatgtcccctttgtcgcacagcttccctgggcctctgttcccagagtgccctcccacccccttgacaccccagctgagttcaccaacctcacacgctccccacttcctccccagggagggtcgctctggggagttttgagcaagctctgggaacgcagtttgaggctgaaacaagagcattgcagggaaaagggaagagaggaaaaaaaaaagacctgcccagcctagaatcccaagc

SEQ ID NO: 203972 - DNA, 481 bp, Homo sapiens
ggctcacattatatggctactggacagcactgatataaattatgcttttcatagttttatcataaaggggaccagaagatgggatggtagctggtggtgaagtggggtaaagagaaacttttttcccctgaaatgggagaattgcagcatgtttgtatgtgggaataatatagtcaaaagtagaagttgatgatgcagcagaagagacaggggacaaatgatgtcctggagtaggtgagtgcatttgggttccagcgcataggtggagggtggccgaagggttatggactgttcatacagagtgacaggagaggaagcagaatgtgaggtttgcaaacaaaggtgagtatttatggacatgggagtgcttggaagttcctcttttgtaatcttagtgacatagggagccagtcttcagctgagaaaagaggatgggggaggaggttctcttctgacatacactatagaccacagaatttgg

SEQ ID NO: 203973 - DNA, 857 bp, Homo sapiens
ctttggccttctgaatatgacttgcagctgggtagggaagtagtgcaatattatccacagattgaagattctttcaaacaacagaaataatcaagaattcactgtggaggattttcccctccagagagtaacagatagattgatgcgtagatctaggtatgcttattaacaaaccattcctgtttcatgggatgtacatgtggcagcatctggattatttaatgtgttaatatagtcagtttgtatatgaataatttaaaacagtagcaagagataaaagtagctcatctgaagaagggttgtttgagagctttttttctgtcaagtataattttactctcaggttaaatgaaatttattaagatgcaatttgctcctgggaggtatttgtgagtttaaccacagtctgtcttggaagatattatgacagtaagtaaatgtcacctggataatactgatccattcacagaagggagaaaaagtgtgttgggtcaattaaggtggtttaaaaatgtgttgactctgaagaagaaaagtatctaaagtacacaactctaacaaatctcaaggccagtgggactttacagactgagcccaattgtgttgagtctgtgtattgtatatacttaacacaagcaaacacagactttttctacaaatgaaaacatgtctgctgagcagttgactcagtcatctggaataaatgttctttatttgtgtttccatgggtaaaatcaagttaatgaactgaaccatcacaatttctcttatttaatttttaaaactctagattaccctgtcttctatctctatgtaattcctgtgttagagcaaacataggaaattgtcaatatggc

SEQ ID NO: 203974 - DNA, 441 bp, Homo sapiens
gtcaccgtctttggagactgtgctgtagtttccagaccccaccaccgcctcctgacagcctagttgccgtatgagcagacctgttacccttacaggaccactagggcacctctcaggggtctagcaggcttaggtttggggacatggaattgatagcaagatctaaggcaaggagcagggatgtggacggctggatctaggcctctgatccatacctgctctccctaaaatatagaggtactagcgatggaggccaggcgccgtggctaatgcctgttatcccagcactttgggaagttgaggcaggtggatcacctgaggtcgggagtttgagactaagctggccaacgtggtgaaaccccgtctctataaaaatacaaaaattagcctgtcatggtggtgcatgcctgtagtccttgctactggggaggctggggcagg

SEQ ID NO: 203975 - DNA, 393 bp, Homo sapiens
cgtcttataaacaatagatatttatttctcacagctctggagtctagaagtcctagatcagggtgctggtatggtaaggttctggtgagggccctcttcacgattgcagatgaacaatttctagtgtatcttcacatggtggaaagaagatgagagagctctctggcatcctttttataagggcactcatctcactcatgagggcttataacctaattacttcccaaaggtcctacctgggttaggtctacctgggtagacctaaccatgcagcacagaccaattagccaaatgcaaaatagactagattcttaccacaagtatcctataaacactgcaactattctttccagaaggaccctaatcttatgtgagaacacctactgtggggga

SEQ ID NO: 203976 - DNA, 778 bp, Homo sapiens
ctcgtcagaaatgtgtgtgcgtgccagctgccctgtgctcagccaccttaggagacccattgctctgtcgccatagtcttcatgtcccgtgttccagatacccctctcattcctatgatctggaaacttccacgtcatgagggtgggaggggtgaggaaggtaccagaatgctcctagccaatcagggcttctagcttgccacacaaggtttctagtttcatttgacatttgtggacattttaacaagattctgttttgagcccaccaagttgcttttcccatcttttcactctgccctaatatagcatggaatgctgcttggtgctgttcccttgtcttcctggttgttctccctgcttctttctttctccctttcctttcctctctctgtttttctctgttgctttctcagttttgcttatgccctccccctccccacctcctttccttctcccatttttaaaatgcatggacatcttagttttttgagcatgttttgatctgcaggctaaggtggtttaaaactctgagaggcttaattatttatcttggtttctgggatggaagcagaacccatagtctatttactctctcccagggagaaaaaggaaccttgccaaattgagggtgagagggggtggtgcttgctcccctagagttccttctgacccagaaggaacagacagaccctgaggccactagcccccatgaatctcagcctctgggaggcagggaggactgagcatgctcccttacacccctcccctccttccctgc

SEQ ID NO: 203977 - DNA, 393 bp, Homo sapiens
gctaaggagccttctcttacttccttttggtagaaattatcattactttacatgggaagaaagtctgtttgggtacatttcacgcacctgttcttcccttctgaattctatgggatctatggatttattcaatgaacatgtctgtgataccaggccctgagctggggtcagctgaggatttccctgtgatcaagtaacgaaagggtcctgtcctgaaggagcagatggtatacacaggaacgccatcatgatccagggtcggggatgctgcagggggtgagttgagcccgcctgctggtgcctgggagggtcaaagaaggtgacctctaaacttgaaggagggacaagcaggtatggaattggccaggtaagggttagtggaggcagatgaga

SEQ ID NO: 203978 - DNA, 156 bp, Homo sapiens
tataatgagccatgatggagccactgtactccagcatgggtgaaaaagcgagaggctgtctctaaaaaaataaagtgcagattcactgggccagacaaaggcgtgaattactattttccctaaccccccttacatgaaaattgtgtacttctcagt

SEQ ID NO: 203979 - DNA, 265 bp, Homo sapiens
tggggtccccagccgcctccccttccctggcacatcctgccatgaaaccttatgctgtcccatctcttaaaatttccctgggagcaaatttctcatttcatcaaagctctcaatttccttactctgccaactttcttaaaatagtctatatgggatctcttcgtgggctcatggcctcaccctggggagggcggtgggggttgcaggtgctgcccctgagctcatttcccccaaagtgacaccttttcagacaagaggtgcacag

SEQ ID NO: 203980 - DNA, 690 bp, Homo sapiens
aagatggtgaaattttacaataaattaagaagctttttagctttttaaaagttaaattaaaagctttacgataccacaagctagttcaaaaacataggaaattgtgcattcaggtccaaaattatgatttttgtatcatgcaaaacaatgaacgaagaaaattacacaactacaaagaactgaggttttgaagtgcccataacgtgcattaaaattttagttcattaacccttcccagctcaatgttacttttacaaagcacagtgtactgtcatgtaaatcaaaagctaaccagttcaaagaagcaaacactttaagttagaggtgaactgcatggcagaattccttgatggcagccagtacttaaaaaacagttaatatacccatgcctcccaccagacttgagacctcaagattggcacctagcattctaacccctttaactatttggacacctcatatctcctgggtaatgtaacagcctttatcatctctgaacacaatgaggagaaaaggagcttctatcctctccccagcaaggaaaaattttaaagtaagatgttgttcacgtatgatttgaagtctggtttttatcttctggtgcaagagggtgagcaaagctgttacaaactccctggagagcaaaaagatctataagttccctttaagcaagcccaccaaccaagcaac

SEQ ID NO: 203981 - DNA, 524 bp, Homo sapiens
caaggaaagcaaaacctagataagaaagtagtactgtacagtttctctccctgtgtcatcaattttttactttaactcattcccatcagcatataaaaatactgtaattcctctcatcttgaaaaaaaaggtttctcttgaccccacacttcactccagctgcccagctactcctttcacctagtttattcacagaactccaaaaaactatttcagacctcttttcttctcaaacactcaatgctaccttccaatggcctcttatttccaacagcctcactctcaccagataagtgtgcatattattttgccgggaaaaatgaaagcaatcagaagagaactttcaattattcccattccattatccacctacccatctgcactggtgccctgtatcctgccttcgttactgttcttatgaatgaacggtccatgcttctacttaagggcaacttctctactccttacactattcctcatcacccaactaaaaatattaacacaaattacaactactccctcac

SEQ ID NO: 203982 - DNA, 397 bp, Homo sapiens
ttcttgtgagaattgaatgaggtatttgatgtgtgtcacatagtaagtactcaatcaaacataagtatgaccattattattttaaacaaagctaattttctgttaactaatgttatttcctggtctgggcttggtggctccacctgtaatcctagcacttagggaggctgaggcaggtggatcacttgagtccaggagttcgagaccaacctagccaacatggcaaaaccctgcctctactaaaaatacaaaattagccgggtgtggtggtgcacgtgtataatctactcgggaggctgaggcatgagaatcacttgaacccgggaggcattggttgcagtgagctgagagcacaccactgcactccagcctgggcgacagagcaagactccatctc

SEQ ID NO: 203983 - DNA, 844 bp, Homo sapiens
gaattcgagacagacttgctgaagaggagaaagcatgggaggagttgcaggactgagtattaacttgatgacttggaacaagcaaggactgagttacagggactgggtcctttctctggcctgtcttgaaaatgtttcctggcctcccagagtctatttccccttctccaaaacacaagagttgaccagataacttctgagatagatccctttgagttagagaatcacatttctagcttgactgcctgggaagcccagtacagggctaggctccttcagaaggcccccgcatctcaggttagaaaaaagctggggcaagagcggacccctgaatggcttgagcaaccagtatttggtctccctgccaggctagctagagtttgtttgcaggcttcaagagccttagggaattataacatcttcattttgcagagaaggcagctaaagccatgagaaggaaggtcacgtggtgagaagagagctctgaaaatcccggacagggaagagccagcaggacacagcaggagacaaagagagaaaaatactgaaccaggcaaaaatgaaaagaaggcaggagtagggctgagaaaggtgatcagggacaaggggcaagagagatacttggatgaaagtagggaggtacaaattccagtggtggggcagggcagtgtcctcaggtagcactgcatttcagacctgctattgtaccttgcagaccagcttctcctttccctcagatgtcttaaattgttaggacttggccgggcgtggtggctcacgcctgtaatcccagcacttggggaggccaaggtggatcacgaggtcaggagatcgagaccatcct

SEQ ID NO: 203984 - DNA, 452 bp, Homo sapiens
atagtattggggggtacttttgtttatttgtctttgtaatgagacagtgtctggggtgtaaataagtaaaataatactagcatgtagttaagaaatacacaggatggccgggcgcagtggctcacgcctgtaataccagcactttgggaggctgagtgcaggtagatcagctgaggtgggaggactacttgagtccaggaatttaagaccaatctgtgtaacataaggagatcctgtctctacaaaaaatacaaaaattagctaggtatggtggtgtgtacctgtagtcccagttactcaggaggctgagggcagaggatcacttgagcccaggaggttgatgcttcagtgagccatgattgtgccatgcactccaacctgagtgacagaacgagtccctgtcccaaatacacacatgcacatgcaacaagaatataaaacattttttatta

SEQ ID NO: 203985 - DNA, 513 bp, Homo sapiens
aaaaaaaaaaaaggaaaagaaaagaaagtgagtaaaggcttttgggttataaagagaaagggagaaggatgatccagactagaaagaagattattcctttcttagctcaacctttttgctccaaaaaaaagaggaggaaggggccaaacatagattatcctgcaccagagggccagctccttaaatctgagtctcatcccaaccaccatcatttgtaaaaaccaagggtgcattcattacctgcagtgcgtggatccctgtggtgccatcattatcatttgaagctccatctctgaagcctctagctttgtaaggacctacagaccacttcccaagtcattgcaggtttatttttgtcgcatttgagcataacctcagatttggcatacaatacgaatgtcaccttgaacagcttctccttgaatgggggcctactctccccaggtgcagtgagcaccgtcgtctttacatgagtgggcctacaccaccctgctgagtaaatccatctgttct

SEQ ID NO: 203986 - DNA, 111 bp, Homo sapiens
ggtgctgggcagggagaaagggctctgtctaatcccagccttaggcacctgcccacagccacggccatgctgagcagattagagggtagtagaggcctgttagcagccaaa

SEQ ID NO: 203987 - DNA, 343 bp, Homo sapiens
ggttcaagccattctcctgccgcagcctcccatgtagcttcttaagatgtgaagatttttaaattaagatgactcttgggatgaaccatttggtgttggttaaagacttttactgacatatttttaataatctttttaacttttattttcaggtcaatggcacatgcgtaggtttgttatgtaggtaaactagtgtcacagggatttgttgtgcagattatttcaccacccagctattaagcctagtacccattaattgtttttcctgatcttctgcttcctcccaccatccaccctcccagaggccccagtgtctgttgtttccctctatgtgttcatgtgt

SEQ ID NO: 203988 - DNA, 311 bp, Homo sapiens
ttactgtgaagggaaaagagagtgagtggagtactttttaaagacatggccaaaggacccaatagaaatgaaatgataatataaaaggagaagtaggtagacatggctcagtgtcagctggaacccaattaagatttacatttaaaatatagggttaaatttccaccactcatttttgctattatcaacttcacctaatagcattcaccctttttaaagaggcttatagatgcatgggagaaaaatgaatatcgctttgaaaagtgtatttgtatttcaaatcattaaaacagagtctggcaccaggagaa

SEQ ID NO: 203989 - DNA, 401 bp, Homo sapiens
tgtttctatcctgggatttcactcttttctccaaagtgatcttatctataaattatttctgaactatgcttaaatatgctgcttaaaactacccaaagtctttctattgttgtcattttagattctaaaattgctatgaggccttgctagatttagccactgatttcctctcccagcttcatctcataaaggtctcccatctgctttccgtattccggctgtggcagaataaagttggctacagcttcttggtcacagctctattaagattgaaatatatttcttctcctcttgcatatgaactcactctaaggaggcttagcaatagaatgcagcagaaatgaccttacctaagcccctgcgctagtctttaaaaagactggcagcatgtgttttctgtc

SEQ ID NO: 203990 - DNA, 409 bp, Homo sapiens
atacagtccattcccaagagggaaagtgtaacttgtctaaggttataaaattagaggttggcagagaactcactatgtggaatgctgttagcagttttatttaatcttcacatagatgaataaatgaaacctaagaggttgaagaatttctctaaagttagtaagtggtactgggattcacacttagtttttgctaggccaaatttctgctttcaactacatcataatggttttccgtgctttgcaatgtctcagaatgggaatgcaaagaaaagcaagatattgtgatttttcattagtgcttggcatatagtaggcatttacatcagtgaagtgttagcaatatcatggtgtgcagtggaaggacttgagctagaccctgaaggaagggctgtataattttgattct

SEQ ID NO: 203991 - DNA, 555 bp, Homo sapiens
tattaaatttgtttaacacctaatttgacatcaacaatctggctacatttgaaccaatatccagacacaaaagcaatttggctgagacaagttagtttctgataaatgcttcagtgtgtgtgtatagatttttctcctttaccattttacacagataatctgaatcagaaaatactgcaactccttcctccttttgtctgccttttgttctccaaaagtaagtggaaattacatttccaagaaaggaaatgaaataattgcaggcccaaggtctgcaaaatatgtgttgaattgacagtgaaaaggatccatgtgttgacagacacagttgttagatgccataaaggcagatgtgaagctcaatttatttctcatcttgcttgttcaatgactgcttaagagacacattccagtttaatttatctacttaaagctctaatacaaatactgtggactgctgtattaacttctaaactttgaaacctaatgctcgattattcggttcttgacattctttagctaaataaaataactgatgccgtgtattttcatatt

SEQ ID NO: 203992 - DNA, 670 bp, Homo sapiens
tccgagtggaacagcgatcagtcagcggtgaccatacagggggctctcttagctggctgtgtctgcccaggtcaggagcacattgcatctaggcaccatgctgagggctgatggggcatgggcgtatcagagatagcctgcctctctgcctctttccagatcgctcattagactgttggccaggacatgctgagcccatagccctgtgacatgtcacccccttgggtggccatcagtcctgcccatgaatcagtaggttcccattcagggctgtcttgcaacaatttggaacccacctaactggattaaatgtcaaggaaataatgagagaccttgccagccatctgacatccaggttcactgtgtctgttgccttttcctggttgacagccttttgtagcctgttggaaataggttggcatggtgctcttagtgtcatggagatcaggcttaggttgtgaatgggtctagatctgagtcacagcatctccacttatgggctctgtagccttgggaaagtcacttaacctgtctgagcttcccttttcctcagctggaaaatgagaataataatatttctttatccccccaagatggctatgaggcatagggagataatttgatctttaatgatctggaaatcattcgataaagctgctaatgtagtgat

SEQ ID NO: 203993 - DNA, 436 bp, Homo sapiens
acgctgcactccagcctgggtgacagagcgagactctgtctcaaaaaaaccccaaaaaacaaaaccaaaaaacccccccaaaacacaaaactatacaatcaccacctggtgccttgactaatgagtgatgacctgctctttgaaaaacagaacacaattaccttattcaatgataagctggctgttgtgaatgcgcctcttaggtcagtaagacctcaggttggggtgaacttggatgaggcatcatcctaaactttagtttccacctctgtaagataggagtacccactgacctagcagtgaggttccagaagctataaaagatgagattcaaagtgcctggcacataattgatactcaacaaatgggattctcttccctgggggcaaaatatgcttcgcatagtggggggggcaggtatagacaaaatctaccc

SEQ ID NO: 203994 - DNA, 304 bp, Homo sapiens
ttaaatccaaagaataaaattgtgatatatatggctgctcttcaattttgctgtttattattttttaaattattatattcaaagaaaccctttccaaatagtttctgtattcatctccatgctatagaatatttcatttttaaaataaaaatgtaatagtgatcagttatttaaagtatttgtgtggttttatatcgaatgtggataattaacatatagcatgtttcatataaatatgtatgtatgtgttagagcttataatgaaagaaatagtgataaattgaataaaacagtctagcttttt

SEQ ID NO: 203995 - DNA, 359 bp, Homo sapiens
tctggaccgacacataagtgcaatgtatgttttcatatgggattcctataccttaaaagaaaaagaggcattgtttggacagttggtgaaatttaaatggggtctagcaaagatatcacatctggcccaacagctgcaatcagggctacttcttagtccacagttacccttcaaattgtttttgtttgtttgtttacaggtgacaaaatggtgaattaaatggagacatgatggggttcaccacccctgtattctttatgtttttaagggtggcactcatttctgccagaccctctgtgatgcaatattgtttttgctttactattttgcgtgtgtgtgtgtgtgtgtgtgtgtaagag

SEQ ID NO: 203996 - DNA, 302 bp, Homo sapiens
cttggttggctgtgcatttgaaacgaggcagagaagctgcttggaagctccatgaatgtgggctgggtttgtcaatttctgacctttgctttatgataagcagttgtgcttaggtgctcttccctcactacccatttggttcagtttcttttactttctttctttttttttctgttcaccctcccaccctgtttcagtttctttagagaagagctctctgatttttcttttcttttgcttgaggaataacctgtgtgttgtgtgtatgagttgtgagaatttaattgtcgtatcaatgcgca

SEQ ID NO: 203997 - DNA, 265 bp, Homo sapiens
agttggcttcaaatttgcaaaatgcccgtctccagctttgtcttttgcctcaggtctgtgtcccttgaacactccgtgctgcatcctcgtttaacatttttgcctcttcatgcagcagcctccctgtggcactctggggaagtccagtaaattctaatagagcctttatcagtgttcggtagacagatcttgatttcatcaaatatctttcctgagctgccaccagaggtgagaaccagccccctctctccctgaaccacggcgc

SEQ ID NO: 203998 - DNA, 531 bp, Homo sapiens
gagtgttagtagcccacgtctccttcttgctttagagaattaattctctttggaattggatcatctacccacaaaacacctacccaaattcctgttagaaagaagatcagctgagaaccaactgacttggtgtaattcttcggcaccaacactgaagcatgagggacggaagggatcaatgcaaatttaaatccaaaggatttacctttaatcagattaccaggagaaaataagagttgagcagccctttagcttactacacttgattttgtggcctctcccagctgtgtgggtaatgccagcctggggccgttctctttcctgtctgcagaaggcggtgggtgtggcaggaatgtccctaaatatcccctcctctgggagagttgaaggttcagtgccaggatgactggtgacttaaactgagtatcccccagacttccccaggatgattttgttgctctccagtcagtaataggtgactagatcccagtggttcattaagctgagaaaaagtagaggaggcataagtta

SEQ ID NO: 203999 - DNA, 250 bp, Homo sapiens
aaaacgcttagcctagccacacccccacggtaaacagcagtgtttagcctttagcaagaaacgaaagatgaactaagcttaaacaggttgggagatgtcagtatgaagtttagaaacttctattctgaaagaatctcggagcagttgtaaatggagggaaaattgtatgtacacttggttttcaactcttcagcatgagcagctgttttaacagttgagttgctagccactgtcaggaatagaatatttt

SEQ ID NO: 204000 - DNA, 585 bp, Homo sapiens
ttaaagtgttggactagccaggtgtggtgactcgcgcctgtaatcccagcactgtgggaggcccagacagaaggatcatttaagcccagacattcgagaccaccctggataacataatgagatcctcgtctctacaaaaataaaaataaaaaataaattgcactaaaatacttgattattgaagtttgaaatccacttctacgggcacgaagccacttagctccaaagccaaggagcgctttggagaagaggtcccaactggtgcagatccaaggtttcccatgggtggggaggcaggatggggggggcgcctgcaaagaggtgagggctgtacgatctccaaggaatttgggagcaggggtcccgcttttctccgccgggcgcccccagccagctggttgccgagcccacgccccatctgcacaccaggacccggatgtgcagcgcgcggggtgtctgggcccgtggagcctgcaccgcgctgcgctgcaaggcgcctcactgtacgcactggcggccgttgcggcggagcaaccatcccctgcccgacgccgccgggagtctggagacgcacctggcggccgc

SEQ ID NO: 204001 - DNA, 337 bp, Homo sapiens
atacaaaaatcaatgaaaagtggcagaaataaatacttttttatcagtaattacattaaatgtaaatttaataaactttccaattaaatggtagatacttgcagattggatcaaaaaataatccaagtatgggctttctacaaaacactcattttagacgtaaagacacacataagttgaaggtaaaaggatggaaaaagatatttcaggcaaatagtaatcaaaagagaacaggaggggctatactaataccaaacaaaatagactcaaatacaaaaacttttttaaagagacgaggatattatataatgataaaagtgtcagtcacctaagatgt

SEQ ID NO: 204002 - DNA, 472 bp, Homo sapiens
agggaagtcagttgccatgtcatgaggtcatgtaagcagccagtggagaagtccatgtggaaaagtccatgtagtgagaaactgaggcctcctgtcgacagccagcatgaactcattacgcatatgagagtgaaacatcatggaagtggatcctctagccccagatgaaatgttgagctggttggctcctgtcacatggtatagagcagagtccatttgcaatacacaagaagagaagcataacatcaacctggtgacaaatagagattgtgtgtttactacagtctgaagaaactttgtcctcttcccacttttttccagaatgggcagaaggagtcactgaacaaaaacgaatctaagcatcaattctggctttagaactgccttgtcctgcctagagaagacctaagggcagggaaaatctcccagtatcggatgagaccttaataaaccctacaagccaattagggtt

SEQ ID NO: 204003 - DNA, 366 bp, Homo sapiens
agggaagtcagttgccatgtcatgaggtcatgtaagcagccagtggagaagtccatgtggaaaagtccatgtagtgagaaactgaggcctcctgtcgacagccagcatgaactcattacgcatatgagagtgaaacatcatggaagtggatcctctagccccagatgaaatgttgagctggttggctcctgtcacatggtatagagcagagtccatttgcaatacacaagaagagaagcataacatcaacctggtgacaaatagagattgtgtgtttactacagtctgaagaaactttgtcctgtgagtatattagagtctaatgagggcaataaataaatagcaatactcaaaacagccacatgg

SEQ ID NO: 204004 - DNA, 408 bp, Homo sapiens
gtgatctgcgtcttccccgaaatgacctaccatagcatttctgccactcccagtcactgcttggcagcacccatgagaagcatagactcaatgtgtatgcagagctggatgcaaggagcacagcagctgaagccatcagttttcaccccacagctgaagatctgtcagtgaatatgctcaaggttgccactataattttgggtcacagggtagtgcttatactgatgcaaacaagatccaaagggatgcctggttcaaaaggtgggaggctttctgcaagtgaaagatgaggaaaaactttaaaaagtttattttaggctcttgatcctcattgttatgatgcatccttgtaaatttgtcccaagaaaactttattaaaattcatttatttaatgagattaaccacag

SEQ ID NO: 204005 - DNA, 687 bp, Homo sapiens
tctactcactgacattagagcttcctggtggggtggtacttgaactctgagtaggaaccaagtgggcaggaggggggtacagagcaggggctgagaggttggctcaggttggctctctgggagcctgactgtaagtctatagttttattttattttgctgttgtgagaaatctttgataagttagaacagtggttctcaaaatgtgatcttgggacccatcagggttcccgagacctttgtagggtgcctatgaagtaaaacatcttgtcataacaatattaattatttgcctttttcgctctcattctttcttaggtggaatgttctagaaggcatatgatgtgatcttgcaacagattgaatgcagaaacagagatgagcgtccagccatcttccattaagccagattttaagagactttcaaaaatgtgtaacaatgctactcttctcacaaattatttttggtttgggaaaatatattttaaaatatgtttgcattaatatagagttggctattttacttgctaaattcataaatattttgtaaatacccaggtttaatttatgtaataatatggtaactacagataactataacccatataagcaaaagctctttggggtctccattaattttaagaatcaaaaggagacatgagaccaaatttaagaactgctgggtcaga

SEQ ID NO: 204006 - DNA, 434 bp, Homo sapiens
atgcagatctaggccataggaactagtcttgaggccactgggccaacatcaactgtgagaccaactgattgtgagatgcagcctgcttttcagaaatgtgaaaatgtgaaattgatgcaatatggtagttgcaaagcaactgtctgtgagtatggggaccagttcttattagaaaagcctaagaacaatgtagccagatggtgctggaagcctgcaagaaagtgaatctggactctgaatgttagattcaggcgatgtggcttgctaaatgcagttttgtcacctgttagatggctagagcctgggggatcacagttaagggtctgagaggctgaggcaggagaatcgcttgaacctgggaggcagaggttgcggtgagccgagatcgcgccattgcactccagcctgagcatcaagagtgaaactccatctca

SEQ ID NO: 204007 - DNA, 416 bp, Homo sapiens
tactttggtacaacacattgcatatataatactgttttttaacagttatacacaaatcaaaataagagacttcttcagacaaatgttcaaaattattttctttgtcctgtgtaatcaacccattttttcttaaaacatcccatgtagctgatttccccagaaaaaaagaatattataaatcactattgtcttcgttttcaaagggggaagggcaaggaataataagagggttcagaaagttctaagaaatctgtcttggatttcaaactaagcctaacagaatgaattgtataaatacagaatgtgttgtgtttcacagttttattctctgtttcctacccaatctcaccttccttcagggtacattttaaacttattcctcagttttgtaggtcctttcagtatagggtaaggga

SEQ ID NO: 204008 - DNA, 199 bp, Homo sapiens
tggtgccatcagacacagtggtccaggagctgcaatgcgttgctgatgaggatggtcacacatagctctgccctcatggagcgtcccagggtgaaatgagacctcccctgagaaccgactcccagggtaggggaaatcagtctgcaggcaaagaggaattcaaatttagcctgaagcacaggttttctgtgcttctagg

SEQ ID NO: 204009 - DNA, 242 bp, Homo sapiens
cttgcctccttccctgctttctaaccacacatcttcctatcataaaccactaagcaccacctactgtgtgccaccgtgcattaggttaggctgtccttgacagcccaaaggtgaataagacatggctctgccctcaatgagtttacagtctggcaacaagcctgcatcaattaagatacgtttggttacaagtaacagaaggcccagccatcagtggttgatttcagaaagtctgaaggtgg

SEQ ID NO: 204010 - DNA, 1007 bp, Homo sapiens
gtgactttctagagatagagcagatggaatcaatctggctgagacctattcctggaggtgaggaagatgacagaaatagaggaattttaagagctaggtgcagtggttcacgactctagtcccagctactcaggagactgaggtgggaagatctcttgagtttttgagtttgaagccatgatgagctatgattctgctattgtactccagcctggctgccagagtgagaccccatttcttaaaagaaaaaaaaaaaaaggaagagagagagagaaaaactttgaaaggttcttgagaggtacagctcctgagagttgtcactttgagaacaattgatgagggaagctaccgcagccccggatgtagagttatttattctaccactggagattcctaatgaacagaattgtctctgccattgcaacatgagctccctttaatggggtgctcatcaaaaatcttttgattttctttcttactgcaaagaggtattataatttcccacctggcaatctatagatgttagaaggtgagatgagaactattgaacaatttattcatacgacccttatatttttatgtggttctcagagtgccattgaagtttgtgaactttgaaaaaaggccttatctcaacaggtgacccttgaaaaacatgggggttgatgcacacattcgttatatagtaaaaaactacatgtgatgtttgacttccccaaaacttaactaccagtagcttaccgttgactgggagtcttactgatagcataaacagtcaattaacacatatttcatatgtcatgttcattatagcttattgtatactatgttcttacaataaattaagctggagaaaagaaatgttattaagagaatctcaaggaaaagaaatatatttactattcattaaatggaagtggatcatcataaaattcttcatccttgtcatcttcaccttgagtaggctgaggagtgggaggaaaataaggggctggtcaaaaacagca

SEQ ID NO: 204011 - DNA, 824 bp, Homo sapiens
gaatgttggtaactggtttttggattccccacatggctacttatagatgagaaaatgcaggagaatcaccctattcctattgatggggtcaccacctggagctggtccaccaggctctttgttcgcactcccacactgtgcaaatgctgcccattctccaaaaagcacgtgcccagcccccaatcccctctatatctcagctgaagcatcacctccattaatgaagcctagtcctttcctgcctcgtgtgttgctttgttgctgctcacacctttagacaagacttgctgccactgactcccaccagtccctgttccctggaagaaatcaaggaagcccaccttgatctcatttgagctcctaattttacagaaatagggacaaaggttcaaagggagcctcacaggtcgcatggtcaactacgcaacctgcatttaaggcctctggtagtcagagcaatgaaccacctataaagaactggaaggttgagggaagccggagaaagaaaacggactacattccacctctttctaaatcaaattccaaaaccatatttcattacaacatctacaagaaatccctaaaatgtcaagttccttcacaatcttaataggtaaaattaccaaagtaaaaatgaagggaggaaaagacgatagagaagataatataaatatctttaagtaccatgtgatttcaaaaagaacaggtttttgaatcataaaagtagatactagaacagtacaccaccactcccctctgtccctcggattattaggagtttgcaggagctcgcagcagacagtgatcgtggggtttcaggcaaa

SEQ ID NO: 204012 - DNA, 381 bp, Homo sapiens
caaacaccgcaatctggagaaggagaagaaaagaagaaggagaaggaagaagaaaagaaaggaggaggaggagaagaggaaagaaggaggaagaaggagaagaagaaagaaaggagaagaactaagaagaaaaaggagaggaagaagaagaaggaagaaggggaagaagaaggagaaggagaagaagaaagaaaagacgatagagaagataatataaatatctttaagtaccatgtgatttcaaaaagaacaggtttttgaatcataaaagtagatactagaacagtacaccaccactcccctctgtccctcggattattaggagtttgcaaaagaacagatgcggggagattgcgtgtttgaggatcctctagaccacag

SEQ ID NO: 204013 - DNA, 475 bp, Homo sapiens
cacacatacacactgtgctaagcattgttctctgtgtacctctcaaccctgctgcagaaaacagtcttggatgctgctgagagagtttctagcccacagagcagggtccctgatgtctcctgagtggaaaacacagcaagatacccaaactttcaggagggatgcttcatttgtccccagtgaggcatgccgagatggaagctgggggaggccctatgcagaggcaagcccctcctcctccctgtccctggattggctattttcagaatggaccccagcaggttgctagaagtaaggctgcctgatcagtgacacagggctatcacctgttaggaccaaagtctacaccaataagggtagagaccgtagatcatctccaggcaaaaactcaagtggtctcatgggaacacagctctggacatcatgagaatgttggacccaggttttgtgaactctaacgctattttcagccatc

SEQ ID NO: 204014 - DNA, 420 bp, Homo sapiens
acagctgccccactccaggctgaacctccccattggtagcagctttgtgtcactctggagtggagtttccagaggcaactgacagtccatatgccactgccactgcaccagtacttgcccttgctgctatgggcctgaggaagcaacaaatagcctcagttctttacttgcatctccagcatgccacagtcaccctatggggaagaggccagattgcctgacaccctctgctctgcaccaggcagggtccccgtggcatgtactagcaatgcactcactctacccccagctgatcattctgattggcagtggctgcatttctctgaagtggaactccaagaaacaaatgaaagacccactgccgttgccactgccaagtcccttctcctgttgcacccaagctgcagagggaaaacaaac

SEQ ID NO: 204015 - DNA, 835 bp, Homo sapiens
atttactttagccaacagccatgactgctaccatacaggttcaaaaaaagttatatgaatacatgggatggaatcttataagttcattttactatatgtaagcattgcttgactttagaagcaaaagtaataatgtattttaaaaaatcattaatctagctacatggagaaggaaaacactattatacaatgcaaaatgactattctaatccatttcaaaaacgctcattaaggggaagaaaaactaaaaacagaaataaatctataagactaaaggcacaaaaatagaagtgatttttcttgtaaaagatatgaactaactttcctgaagttctcttattgtaacaaaaactgtcctctgagattaagtcacctatcaatttcctaaaaatggctgaatcgtttttaaaatccccatttactcacaactctccagccccaccaagattccatttagagaaatgatttttaaaattttctcagtagtatttattctactattttccctcaattctgttctcttaaaaatatccattagagtcaagaaaaacagcagtcaggggaatacacttcttcctccccaggagaaatgcagttccacaaagggacagctggatgcccgcagtaatgatcggtagaaaagaaatgctctccctcaattgtttctccactcccacccagaattctgctgagttgcctatgctctgacttctgcctcctgccactgagctgagggtccccagtggttccccagcccaataaagagaaggcgaggcagccaaagccactgaagttgctggactttgccttccctgtctcatggaaggcatgaagg

SEQ ID NO: 204016 - DNA, 401 bp, Homo sapiens
gcctgactctaatggatatttttaagagaacagaattgagggaaaatagtagtatttattctactattttccctcaattctgttctcttaaaaatatccattagagtcaagaaaaacagcagtcaggggaatacacttcttcctccccaggagaaatgcagttccacaaagggacagctggatgcccgcagtaatgatcggtagaaaagaaatgctctccctcaattgtttctccactcccacccagaattctgctgagttgcctatgctctgacttctgcctcctgccactgagctgagggtccccagtggttccccagcccaataaagagaaggcgaggcagccaaagccactgaagttgctggactttgccttccctgtctcatggaaggcatgaagg

SEQ ID NO: 204017 - DNA, 1448 bp, Homo sapiens
tggattagaatatctgccctcctaaaggcaggcaggatggcggtcaggatttagaacaggccccggatctagactttctgagtccaggtcccagccctgcctcttccagttgtggcccttcaagatgctgactgcccctgggcctgagtttgcaactgtaaaatggggtgaactgtaactaaagctcctgtctcatagtgtaggtgaaagggtgggatgagaaggttgatcccatcttgggtccttgcgtggcttctgggaggtggtggataaacctcttccttcccttggggctttgaactccctgagtgagtcagataggtgagatgccaggtgtggaatcccagcactgaataggtgctcagcaaacaccaacatcaatgatcgtgagtcataaagggcctgcaaatttcattcagactccagactccctgctcccttcaccctggtgggctggaccacagctgtgcctgaatccgtgcagtggcggtgtgcttactgcctcccggaagagcgtcttccgcagcccagcagctctggctcaaccacgctggttaatggggaagaaaatgaggcacagagagggccagtgagccatctaaggtcacacagcaggtttgagacagagtcagggcaaggacccagcactcccctgccctcgctcttctcacccagtaaggagacgcaccctgcattgtctgcttagggccgacctgtcctgcaaacacaaatccctgaccttgggggaattcacagtctgatgcaggaggcagccaggttacagctgtcacaagctcaggtgacatgaatgctcatggaggaagcccagggcatcggatgggctcctgaagtcatctgatgcaccctgggggatcagggacaacagaggacctgccagaacagtcttgtaggaaaagccgtgtggatttcccagcacagagagcagcgccagcaccatttcagccccgactctctgaggcctcagtcatagaaccagccagttccctctggaaggaagtgtgctgggaaggtggccactcagacagtgtgggaccccctatggagcagactggctggatctatgggcgagggaaagtttcttccaccctaggatgagtgaaaggttggtggggaatggagcacaagtcatcaaggtcagggaccacgttttctgaaggcctcgggcctcagaggctctggaaggccgtggaggcaggatggcccaggagctggggatggccagaacacctagagcctccagggcctgccctgaggactatggcgaggagtagcatcagctccgggtgctgaaggaaccccctgggccttgtgcaggacactcttgacgggatggctgggcgacggagcagggtggcatcatccatcaaattcaacacaagccccacgtggaattctaaattttctagacaccatgttaaaagagtaaa

SEQ ID NO: 204018 - DNA, 477 bp, Homo sapiens
agaaatcccagaaacctttctgtaaatgaaggtcgagttttgcatcagagaaaacgtgtttgattgaggccagggtggtggagaacggaagtgacgacagacagaagccagcagaagtaaggcacgaggctccacagaatcacgggatggttgcagccagattctaacatcagaggggcaggatttgaagtggagaggctgatctgatgaggaggaaggacaaactaacttatttatttatttgtttgtttatttatgttagagacaaggtctcactctgttgcctagcctggagtgcagtggttcgtgcaatcatagctcactgcagccttgaactcctgggctcaagccatcctcccacctcagcctctcgagtagctgggactacaagctcatgtttttaaaactggctaatttttttttaatttttcttatagacacgggatcttgctatgttgcccaggctggtcttaaact

SEQ ID NO: 204019 - DNA, 125 bp, Homo sapiens
actgaacagcataaaaatgtatcttatttctgaagaactaacttgctaatgccggatattttccttgatatttgttaattgctactgttttttcaaaagttacattcttcatacccaagataagg

SEQ ID NO: 204020 - DNA, 652 bp, Homo sapiens
ctgctgcatatggcctgggcatccccttggtgataagtgacttcttgctctgagtcttgttcctgcttttgtcatgtgatgtgcctgctcccccttcaccttctgtcatgactataagcttccggaggcctccccagaaaccaagcagatgccagtaccatgcttcctgtaaagcctacagagccatgagccaattaaacctcttttctttacagattacccagtcttgtggatcacttgagcccaggagttcaagaccagcctgaacaacatagcaagatcctgtctctaaaacagattatctgggcgtggtgggaagctgaggtgggaggttgcttgagcccaggagtccgaggctgcagtgtgctatgattgtgccactgcactgcactccagcctgggtgatagaacaagaccctgttcccccctcaaaaaaagttaacacctatgcagtgcttaggcctagtgtgtgcccagcagtgttcaagtcctttaactgtactaatacatttcatctttgtaacaactgtctgagataggcactgttattacctttggttcatggatgagaaacaagtcacagagagatgttaagtgacttgcccaagtaagttgtgaagccaggaatcaaattcatgcagggtagctccag

SEQ ID NO: 204021 - DNA, 292 bp, Homo sapiens
ggactcgagctcggtccccagttacaacagctccagcctgggtgatagaacaagaccctgttcccccctcaaaaaaagttaacacctatgcagtgcttaggcctagtgtgtgcccagcagtgttcaagtcctttaactgtactaatacatttcatctttgtaacaactgtctgagataggcactgttattacctttggttcatggatgagaaacaagtcacagagagatgttaagtgacttgcccaagtaagttgtgaagccaggaatcaaattcatgcagggtagctccag

SEQ ID NO: 204022 - DNA, 578 bp, Homo sapiens
tgaggtgacttagaggatcccgcgcgttgttgttactatttaatcctccagatctattctgcatcctttacctgtgcctaggaggctgcgtcatgtactacataaactgtgctctttgttctctggctttaaatcgggtcaataaatgagaagcaacaaccagggtctctctggactcccacaattactctctccctttgcccttgctgggccaaatatggtgcaacttcctatcattgctagtccctaggtgctgcactattccttgctggattcccgtaacccttcccataccattgtaaatacctgcttcattacactctttgacctaattaagagtgttacttgtttcctatcaggatactaatagagagggacacctaactcagtctggggaagcctgggaagaattctcagaggagatgatgcttcagctacgtttttagtaagtaagtataatagagactgagcctcactctgtggcccaggctggaatgcagtggcacgatcttggctcactgcaacctccacctcccaggttcaagcgattctcctggctcagcctcccgagtagctgg

SEQ ID NO: 204023 - DNA, 582 bp, Homo sapiens
aagatattttgctaagtaaaataagccagacacaaaagacaaatgttatatgattccacttacatgaggtacctagagtatcagattcataatgatagaaagcagaatggtagttgccaggagctgggaagaggagagaatagggagttattgtttaatgggtacggagtttcagtttaggatgatgaaaaaagttctggaactggtgttggagatggtggtattggttgtgcgacagtgttaatgtgcctaatgccactgaattgttacttaaaaacagttaaagtggcaaattttatatatttactacaaaaaagacatttaaaagttcagttaccgtatctttaaaataaggttgataataccaaccagatggttctttataaggattaaataaactcacatgtgaactagtcaggtgcatagcagatacccttccccaatccccccattttttggggcagaaatttttatgtctttatgacctcaagataggaaagcacaactcaaaagattcataatttgactacctcaagacaatattactaattattatccccaaaagactacagaaacaaactt

SEQ ID NO: 204024 - DNA, 414 bp, Homo sapiens
cccaaatggaatcccccaaatggaatccccccgtctcccgggaggtctaccatattgatgccgatacttagtgcggacacccgatcggcatagcgcactacagcccagaactcctgggctcaagcaattctcctgcctcagcctcccgagtagcaaggactacaggcacatgccaccatgcccggctaataattttcgtatttttaatagagacggggtttctccatgttggccaggctggtgtcaaaactcttgacctcaggtgatccacctgctttggtctcccaaagtgctgggattacaggcgtgagcgaccctgcctggccacatgctgactctcaggccagtgctctgtccacgtttgcacctgctctcacccaaaccttctcattgtcttcagacagagccacagcc

SEQ ID NO: 204025 - DNA, 552 bp, Homo sapiens
gaaatgaaccatctggtgtgccaggccacaccttccaacacttggctctgctgggaccacaaggatgggctttctcatctcaccgtacatttagatggccatattgggtttcggatagtctcccattcttaaccatggtcttcaacagtttttgttttaaaagtgaatactcttatggtaaaaaagataaatgtgaaatagaaaatactgtagatctacagatcaaagttatatttgaaaaccacatttaattgtatattcacatatttttgtaattcacaaaaaatatacccatctgtaacttttcaacattcttgagtgttttgaaaattaacaatttgttctaaaacttgagagttacatagttttgaaatatttcaaagttcagttcaaacacacacaaaactcctggataccacctggagctaaattcaataccaatcgaattttttaggtttgcaaaattgaactaaagaagtaccactgagttgagggcatgtcaagatctagcattaaaccaattcagatttgtacttggaccagcatattcca

SEQ ID NO: 204026 - DNA, 90 bp, Homo sapiens
gtaatctcattctttctacctcaagggataaaaatcagttcttttttgctttattttgtttgtttagttcacctcgttcccctcctatag

SEQ ID NO: 204027 - DNA, 401 bp, Homo sapiens
tctgagcatatgttttttgtttttctttgtgatagaaataacaatatataaataatatcagataatgtataaagagacacagcgtccttgcttatcatttgctagttatcaggtcaaatggtctttatctgtgtgtagacatagatcgtgacatcacatatttcgtgtgtccattatgcttctattttttctatcttatatgggctttccattcaatatcttctcagtagaggccaaatttcaatgtgaagaacaacacaataattggagaggggtgttggttgaatatgtgtgttaggatatttcaactgctctgccttcataaaggaataaacactagattacaatgcttattaattaggaagtcaatcgaagacttagaaaaaaagttcagttccaat

SEQ ID NO: 204028 - DNA, 631 bp, Homo sapiens
tccttaactatgaagctgatcgtttaactttcctgctcaaaattatttagttataccacgttatgcaaaaaaacaaaggccagtttcctaaaggtctgtttacaatctggtcttcgcctgtttttttttttttttttttttttttttttcctgctaaacctacacactgaagaaagttttgtcaagcatctgtgctgtatcatattaagattccacctggaatgtttttttacccctgtctactgaacaattccttttcatccttcaagcatagtcttatggttcattttattcttttagtgaatacttctatgatagtctttcttctctatttgtctttctttccctgttacttatagtaattacttttattactctcaaatctgtattttagatattctctattgttctcataactgtttctctagtgaaacttccttgagtgtgtatatgttgtctgtctttatatatccatgatccaaggttgggacagggtacttggcataaagtaggctcttagtacattttttgaatgaatgaaatactctgaaaggtaaataataatcaattttagcataaatgaacctcatcatgaggacatagtagataaaatcataatagtagtttagtt

SEQ ID NO: 204029 - DNA, 435 bp, Homo sapiens
cggacgcgtgggcccacgcgtccgggcccagagaggggccagtgcttgtctgaggccacacagctaggggcaaagtcaagactgaacccaggagctcctgcctcccagcctaagtacctttctgtttaccaggcaacctcccttgtaaaagtcccacatctgcatgtcatttgcatcgatcacacaaagccccacatgaaatgtggctggatgctttccaaaatatgacccaaagcaagtgtgtgaactgacttatattgatcgctgtactagccagagatgggcttatctgcttggaattttcaaaagtgtttcttttttaagtgaatgatttgattggcttttgccatttaaaaatatatccagagacatgtgatcaaatgctttcctcttcttaggccagatttcatccaaataaaagggaacctggcttgt

SEQ ID NO: 204030 - DNA, 487 bp, Homo sapiens
ttatggaacaaattatctggtccataaccacaaattagctggttccataacagcttatggaacaaattatggtaatatgaattaccataagaataactttttataattctacaaaagaaagaatcaaaaaggtaaggtgaagaactgctgtagattaaccaactggatacttactaaacataatttcacatggggaaaataattacttcttccaactttaaaagtctttacaaatatgcaaaatcactgtaaaaactaccttcctgcctttgttcttcctatttagcggagatacttccatgtagctatcacctcatgaacccaatttttgtggaaggatcttgggctgaactcttgttctgctttatgcattgccaatacaagtatctagaaatctccaagaccgaaactaaaatcagagagcaaatttcattttctttatattggcttgaatttgtacaagcagccagttactgagcaaaaatcc

SEQ ID NO: 204031 - DNA, 507 bp, Homo sapiens
aaatcacataatgagggcccatgagagaaatgccttgtgtgaagtccacctctgacaactgtgcaggacttgatgacacatcctttgatatcatccttacccctggcttcaccttactgtcttatttgtattttcggtttgcaccaatggcctccttaatgtttgagggagctgtgctacatagaactctaaaagctgctagcaataatttttcaagcaaggcaaagcataatgaaaaaaattaatatgcttttcaaattctattatctctaattcccacctcactatgctcttcacttgaaaacgtggaaagtaaaaagataatttatcttcctcctgcggcatgttggcaagcattcacccagcccctcttcactactcccaaataaggacttgctgatatttttagcaaaacaatttatgggtccatttttcaaaaatcaagctagttcactcctgtgcgtgctcatgcgcgcacacacacactcacactcacatactgcttga

SEQ ID NO: 204032 - DNA, 463 bp, Homo sapiens
actgagaaggattatattaatcccagctgataggggaaagagtcaaacttcccataaatgcagtctgatacaaagccaggaagaatgttgagatctaatgaattaagatacagtagtgctttctgccatcaaggaaaaaaagcaaccatgattctttctgttaaaagtgacaggaaggccggatgtagtggcctataatcccagcaatttgggaggtgggaggcaggaggatcatttgaggccaggagtttgagaccagcctgggcaacatggcaagactccatatctacagaaaatttaaaaattagccaggtgtggtggtgcatgtcggtagtcccagctactgaggaggctaaggtgagaggattgcttgagccctggaagtcgaggctggggtgagccacagttgtgccactgtactctagccttggtgacagaatgagactctggagactctgtctca

SEQ ID NO: 204033 - DNA, 352 bp, Homo sapiens
gatacgactctgcgagtccaattttgaccgtggtcagacgacttcattagaaaataaaaattcaaagactacaacccacaggaaccatgaaaacaaaaacatcaccatttgccaaaacccgtttgtctggatcgagcaagtttatactaacaaactaaagaatgagaaaaaatttatcttgcagactgtaaaagttcctctacttaaaaatggaagtattttcatttttaattacctttgatttgaattcttctctacaaagaaatctacattattaaattgtagttggccttttaatagatgaaagatatcttgagctgacctgttcctggttagctgattatagaactgg

SEQ ID NO: 204034 - DNA, 500 bp, Homo sapiens
ctagaggtccccccagtttcagcctgactctctccttagagcttccccaccattcagtccaggaattcctcaccctcgaaggcccagagtattttcttctaagagtttcatacttttagtttttcgatttggatcagtaatccattttgagttaatttttgtgtgtggtgtgaagaagggttcagtttcatttttttgtttgtggctattcttttgttcccaacaccatttgataaaaaagactattctgtctccattgagctgatttggcactcttgtcaaaaatcaatttacctgtaaatgtaagagtttatttctgggctcttaattaggttccattgatctttgtatctatccttttgctggtactacgatgtcttaatttctgtggcttcatagtaagttttgaaattgagaaggaagtcctctagcttcgttctttttaaagattgtttggctattctatgttccttgcatttccatatgaattttaggatccg

SEQ ID NO: 204035 - DNA, 486 bp, Homo sapiens
caagcagtttacctgcctcagcctcccaaagtgctgggattacaggcatgagccaccatgcccagcctattcctatattttcttctaagagtttcatacttttagtttttcgatttggatcagtaatccattttgagttaatttttgtgtgtggtgtgaagaagggttcagtttcatttttttgtttgtggctattcttttgttcccaacaccatttgataaaaaagactattctgtctccattgagctgatttggcactcttgtcaaaaatcaatttacctgtaaatgtaagagtttatttctgggctcttaattaggttccattgatctttgtatctatccttttgctggtactacgatgtcttaatttctgtggcttcatagtaagttttgaaattgagaaggaagtcctctagcttcgttctttttaaagattgtttggctattctatgttccttgcatttccatatgaattttaggatccg

SEQ ID NO: 204036 - DNA, 509 bp, Homo sapiens
acaatttcccatcttaacacaaatgcaaatatagcagatgatttaaactcttcatgaagagcaagcacatagatgggaaactaacaacagtgtcttagggcagggactgcctgagtgccaggaaaccaggtggggctgtcagcctcactgtgaggctgcctgagatgctttttcaccacgcatcctcagcaacttcgcttcactttgtccaaactgttgtggcatcaagaactacaggatacggccaggtggggtggctcacacctgtaatgccatcactttgggaggctgaggctggtggatcactgaggtcaggagttcaagaccagcctgggcaacatggcaaaatcccctccctactaaaaatacaaaaattagtaggacgtggtggcccacacctataatcccagctactcgggaggctgaggcaaaggaatcgcttgagccccagaagtggaagttgcaataagctgagatcatgccactacactccagccttggtgacaaga

SEQ ID NO: 204037 - DNA, 623 bp, Homo sapiens
aatagaataatggcaatttgcaattaagaattagaattattttttaaataaactatagaactaaaatcataatatccaaaattaagaatgcaatgaatagttttaacagtagattggacataaaactggtgaactggaaagcaatgcaatagaaaaatacccaaactgaaggaaagaaactaaaaagaaaaaaatgattttaagaaattaagagaaataagggatatattcaaaatgtctaaacaatatataattgcattaccagggaggagagagaatgaaatccgatagtcaaagagataatgactaaacattccaactgatgaagacatctacccacacattcagaattcacaacttcagcagataatatagggatccttgatcaaagaaaatcacacctagatacatcatcgatgtcagctttctaaaaatcaaggacaagaagaaaatattaaaatcagccaaacaaacaacacatttctttggaatgagaaaaaaaagaaaaaaattaatagctgacttctcaaaagaaatcttagaagcagataacaagccagtgactttcaaatttattttttttactatgacctacaataagtatattttatatgggcctcccg

SEQ ID NO: 204038 - DNA, 527 bp, Homo sapiens
ttgaagccgctagaaactgaacaaagactgggttggccgaaatacagctctgaagcctcataaaattcaaaaaagaattactcctcttacgcggatacagtcagttttttccaccgaaggaattgctgcggcacattactgttccttgtgttgagaatatgctgtaagagctgtgtcgagataccagtttttatattcttgtaccttcgactgctgcagaactccccaagcaagaagttcttccacagtgtccccaaattgtggaagaggctcgctcgcttctgaggaaacgttagggaacaagaaatgggatggcgaatctggactcaaaagtcttgctgtcccagatccagcagggcactacattcattactggagtagagaagcacagcaattatttgttgtacagaaaggctgtcggtgtcatccattttgcttaagtaatccccattacaagtgtttatttcttgtacttaccctcaagtatgtacaaatgcaaatatctaccctgtattacaataatcttt

SEQ ID NO: 204039 - DNA, 456 bp, Homo sapiens
taccctaacccctagttcttcttcctagcctttttctttttgctcccctattttcacaatttttttcattcttttcattgtcgtacagtcttagttccaagttttcttatgttatttccactgtgtgtctctcctggtctgatgagccagggttaaaattgaccttcacctctttttcagtcagggtgatcactttgcattcagcatgcatgttggtgagttcctaatacaagggctgcatccttttttacctaagaatcattttaaaagcaagaagtgaatagatcacattgtttttcatttaaaattaaagtagcatttaagcccaatggggaaacacatatacttacaacttggataaatttctttgttgagtagaaaaatgccttgagaaaattagtactgcctctcaaataccaaaatataatagctgggtatatttgagaagtagccact

SEQ ID NO: 204040 - DNA, 598 bp, Homo sapiens
gacagctttagaccttaaacacagtgtttaatgagtataagcaaaatagcttccacatgatttaattacttgttttattgggtacttaatatatattaaatacagacctcgaagaaatgaatttttaaaaatctatccattcaggaaaagtatgggtaacaattaaggccacatcaaagagtttgaatgtgaaaaaatgaatcagttaagggtaagtgacataattagaatcatattttagtcagaactgtaaagggtggatcagaaggacataagattactggaagagagatcacaagtggttacagaaatcatctgggtcagattattccaaagtggggtgtgtgtagcccaggcaagatgacccactggaaagagttttaaaatcagtattgagatacaattcacataccataaaaacacccctgcatgtctaacagtgctgaactcgtttatgagttttcaaaaattttaatagctccttaggcactgggaaaaaatttaaagctttcttcttcttcttttttttaatctaagcactacaaaatgttaaggtttactaatatttattactgggattgacagtggaaaatgtagt

SEQ ID NO: 204041 - DNA, 654 bp, Homo sapiens
agtgcttttgtaccttgttttctagaaaatgtattagtcttgacttctaaaagtcaaaaatgactttataatggaaaaacaattcatcaacatttaagagggttttttttaggtattctttaagatcttacaatctaaaaatggattatataagtttaatagaggattatggcagttagaaaaatggtagtttgaggtatcattctgaatcaaaatatttgctaaaatctgtctttagtatgtcagttaaggtgaactacatttaaatataagtagtatatttatgttacacattaacttaaaaatgagtaattagatttttaaatgtttgttaactatacatgaatgacataccaaatgaaatcttaaggagagagagcacattcagtgtgacgtcatgaatgaaataaaacttgtgcagtgatttagatggtttgattaatatctgagcacagtgggctgagagaagataagacatttataaacctttatttgaagttcagaactttaaatctggataattaaggaaaggagctaaatggcagaaaatcttgaaatagcgatgagtctgaataatttatacattatttaattttcctctaaaatggttatcaagaattgaaaacagtctcaaactctcacagtccccatttg

SEQ ID NO: 204042 - DNA, 443 bp, Homo sapiens
gggctttgacgtttgcagcaccagcaaagccgtctcagtaaacccgtccacgcacatcctctctccctcgcggtacagcagtgtttccggggctgcacggcagcgccctggcccgttgttctttattgttgtccccattgcacttaaaaacatttgggattggctgcagtgcaagtgatttcctagcaggacggagcagagccctctggcgccacattcctcttggcagaagcctcgctctgcgtggcactgcatctccccatctttgtgtcctggtgtcaaagcatttggcccccaaggccctgcagggactcgctgctatttgcatttcagtgcaggtagcctgtttacttggcggcttaggagcctgctgatttgggccaggaaatcaaaggaacctggaagtggagaatagtgttttcaattccgtgaaagagctcttg

SEQ ID NO: 204043 - DNA, 207 bp, Homo sapiens
actccctgtgccttcctagactttcacagcccacagaacactcttccgggctgttctcttggtctgtgctctcctgttgttttctgatgtccatgtgtgagtctcacttccccaacaccgtgttatgctctgaaggtgaggtgggctaggggctgtgtcttgaaactgctgggttcccaacgctcaccctagcagagatccctgtct

SEQ ID NO: 204044 - DNA, 1265 bp, Homo sapiens
gcaagtccatctttatggaagccagcacaaggaactgtgtgcaaataatgaagacgcttgcttggatcctgtttcaaaattctagaccagggctaccttacacagaattggtcatgttactgccaggagatttctgtgtaacttcatttattggctacagttttggcatttgaagatgtggtactcagatggggttttgtccaccattgtcaagattgtaatcttaaaaatcataccagtcattgataatttagtttatcctgaggcagtcgacttgcagaggcacagtctacaaagcctaggatgttgccactcaatggtttacattttgggacatcttttaagttgtttgtagcactgcagttcaaagtgttaatatttagagggacttctagattttatacctaatgcagtagaaccttgaagtatatttaagcttttttgttaagcttgaacagttggcaagaataatgtgagttcctatctgaaatagaatggtacattaccacttttaagttttaaaaattgatagatgttcagatgtatctcaaactcagttttatttttattccaaatattgtgaatgagaagccattgtcctaaactttggccatttttgtgctataaacatgcatttttaagttataaggtgaatcaaacaatatgtaatacagtattaggatgtaatctttgcttttgtagtactgttaaaatagagaattatgttgtttgcaccgtcttaattaaaattcttgatttttactagttgctttgcaaaaaacaaatgtttggctgcattgctaatatttgtaagtataagttgcttcaaggttgtgctgatgagtagataggatgtagtgatcttagtagtgattgaaagggagggtatttattatacaaactgtgaactgcaatgacatccttagttttggatgatgtgtattcttgtttttctttgcagcattttaatgaagattgctttgaagtgtttacgcagtagcacattagtataaaatttagtttagcacagtggacaaaaagtagttaaattaataacttaaaatcagtctctaatttatacatctgaagtatagcattcctgtatgcacacagtaaataatgggtagcctgggctctgtgttactttcttgtatttttatccaagttgtcagcttcttattgctgtgttgttgtgctaaactttgaaccttatttcttttattaaaaatcagtacactttctataatttagtaagatactggcca

SEQ ID NO: 204045 - DNA, 388 bp, Homo sapiens
gatcctttgttggttccaaaaatctggagggaaattttactggcctatgaaatctaaaaatctgggaccactggtctgttccacgaatttccaggagagcttggacccagagactgcttcattcacatcccatctatccataccccacacattcatccttcagtctcacttttatgcacacaacatgaacgttgagcatttagtactctcagttttaagaaattaaaaacatggttcgggtttttttttttttttctttgagacagggtctcattctgtagcccaggctaaagaacagtgccatgatttcagctcactgcagcctccacctccctggctcaagtgatccccccacctcagccccccaagcagctgggagtataggcac

SEQ ID NO: 204046 - DNA, 315 bp, Homo sapiens
gatagagacacgtttgagatctattttggaggatttgttaggttgagtctttagactggtaagaattacccttggagcaataaaatctcgattctccaagattgcctttaaggctttgatttattaagtctgcagtgaagcttgatattcttgactttccaggcagttttgatgattattttgaaaaaaaggtcaaggaaaatatctgcagctaaaaaagaaaagtagatttaagagtttgtattttttattacccagaataatttacattgtatttgttcagtaaaaataggagttttcatgctgttccaattt

SEQ ID NO: 204047 - DNA, 187 bp, Homo sapiens
tgtatacgattattacaacgaagtagtctgggggtgccttttcatcaaaggtggttagaatatctgaagtacatacagaatggtttttagtgtcagacacctaggcaagtacattagttccaccacatactatgtgccattaggcaaattactaaatggctctgaacctgtttcctcattggtaaga

SEQ ID NO: 204048 - DNA, 366 bp, Homo sapiens
aagatggggctatctgaattttaacaaggcctccaggtttgcatgctcaagattgagaaccactggcaaaagcaaacaatttgaatctgaagtcagcccacctgcatttgaatacaggccctgccacttaataactgtgatttagagcaagttagttacttaacagctaggttgaccaattgtccgagtttgcctggcactatcctgatttcagcactgaaagtactacattatcgctgtggctcacgcctataatcccagcttctcaagctgtccctgtggaatcctcaatatcggtacattcatccctatctagcatccccttcctccctcacccatcctgcaccctcagaattcattctcaga

SEQ ID NO: 204049 - DNA, 367 bp, Homo sapiens
gatagtgatgaaaatgaaattagttacattgataacttactgttatctaacccacagtttgtatttaaacttactccattttcccattaaagactttgaaagtaatttcttcccccagatgagtttccagtctaattgtatgcattgcacttagttttggtttcattagtcacctttagtctagaatgattcctcagactttatttcttttttgctctcgatatctttctagagtattgagaaattatttgtaaaatgttcttatttttttgtttccttaatatttattcatgattaaattcaagctatgcattgtcagcagagatgccataaaagtagggaggcatccttctcagtgcatcatagg

SEQ ID NO: 204050 - DNA, 371 bp, Homo sapiens
atcgttatgagttcaggtgcactaaatacataggaacacccagagaaaatgagcccgaaacaatggttctttttattttggaagtttcagacaaactctttggaaaattgaagaaatctatggatccttttcctgggaagactgtacagacatacgtattcgtgtggtttctgtgggtgtagggactggccctggtcatgtgtcaggaagccccaatccagaagatcgtcttcattttaccttggccggtgatctgactctgttctcgcgcccatctgtggttgattctctgtcgccttggaatggagcatcagatcttgaaggtcgctcattgcttttccacgcatagaactgagccacatggcaagagc

SEQ ID NO: 204051 - DNA, 482 bp, Homo sapiens
ttccaattctgtgaagaaagtcattggtagcttcctggggatgtacaagcccttactcttaagcataatctactgattgcagcctgaattacaccaccaaaaaatacttcctgctttcattgcctgtgaaacccagtgcagtgttctagcaacaaataaaaatcctgtgaagagccttggccctctaaaagcatccagaaacaaagccaatcaactatactcaacttacactacagtcaaaccctcaaggtaaataaagaccataaaaagccccatccaaatcacagcaacttcaaaagataaaggaacaccagccctcacagatgagagggaactagcacaaggactccggcaattctaaaagccagagtgttttcttacctccaaacaattgcacaagctccccagaagtggctgttaaccagattgaaatggctgaaatgacagacatagaattcagaatctagatagcaaggaagcta

SEQ ID NO: 204052 - DNA, 269 bp, Homo sapiens
tgcaggctggataaatgaggcagatcagaaaaagaccttcaatcccagaacacgaatttatcctgagggctaagacccaaccaatgccaatttcaatgagctgatgggaaggaatcatgccacaaaccaggcaatcaggctagcttagggaactgcaggagagagaaacaagacatttgcaaagtggagtcactacaagccaggagactgaagcaaacaacgagccagggagaagttatttgtagtcatgtcaggatgagggagtcacc

SEQ ID NO: 204053 - DNA, 479 bp, Homo sapiens
atggaggtgggtaaaatggtaagaaagatagcagagttgtaagttctaatcttttgtaataggaagtcaatctctaatgtaggagcataagtatatttggaaacattaaggtaataccaaaataaatagctacgattgaaaaacagatgatgacaggtgattttcaaaggaagggattttcaaatggtgtacaacctcctcgtggaggtgtcatgaaatctgcatttaagagagatgcagtaggaagctaactggaagatctgtgagccagcctcattggctaattgcatctctgtgatcagaggcaagcgggcttttttactgggagatcaaatgtcccaagcagcagtaacctaggatcttttccttggggctgtacactttccccagagaagaatcctcaagttttatgcctggaggtgtatgtccagctgttagtgctggaacatgtggccaaatggagtccggggagacttacc

SEQ ID NO: 204054 - DNA, 433 bp, Homo sapiens
cctcaagatgggggcttcgacatgggctttatggagtcataagtggagtccgtaaagaggtatctttactataaagctattgtgtaagctagtcatattaagttgttggctcaggagtttgatagttcttgggcagtgagagtgagtagtagaatgtttagtgagcctagggtgttgtgagtgtaaatcagtgcgatgagtaggggaagggagcctactagggtgtagaataggaagtatgtgccatcttgagcctgtgtctgtgtgtatgagtgtgtgtgcctgtgcctgtgtgtggctgtgtgtgtctttgtgtgtttctgtgtgagtatgtgtgtctatgatggtggggatgatgaggctattgtttttagtgaattcctcgataatggcccatttgggcaaaaagccggttagcgggggcagacctcct

SEQ ID NO: 204055 - DNA, 873 bp, Homo sapiens
cagagtcgagtcccacctcctaccaaaatctcatacaaaaacagcatctgctgccccgaagctggccagacattgcgaaagagggaagaatgataaagcagaattgcagatccaaaggaggtaaccatttctgaggcatctgagacacgttggaagtctgcactctggaaattatacacaaatgggcacactcatggacaagatgggaaaataaatgcctcaagaagctgcacagattgccccaagactctcaggaggtgctgctatcaccacagagcagcccgattgcggctggcgtgtgcctgagctggctgtccctctggccacatgtccggtgctacagggtcttcaagggtgtgtggggctgggcagcatccgccaggcccaggccccgggaactgaaggtgtttcctccacgtcagcctctgcacctcctaagcacacacctgctgcaggtgccgggagtcagtgcctgagacacctgaggacgcctcctccttgaaggctggagtcgactgactgcatcttgtactgattttgcggggatttctggtctttttttatccaatgcacgctggtccccgccgctgctggagtgaggctggttgtctctgagtgggctctgcaccctcacagcaggcatcctgacccctttctttcccactccaagctcacatgctggatcccgcaccacagacagccccgaggccggctcacaagaccagatggccagctcgccatttctactttcggtgtccaggagtttttcttttgtctttacttgtttattgaggaatgaagagtcaatgaagactgatcaagacactgccttgaaagggtttcatgggcaaagaacaaaagcaaatcaaaggg

SEQ ID NO: 204056 - DNA, 459 bp, Homo sapiens
ctatttgtggtttcaggtgtctactaggggtttggaacatatttctcaggggtaagggggcactatatatttcactttccacacctcataaattctatatggtcctccctattctactattctaggcagcgaatcaagagaaagataaaccaacaaataaatgattaaacaggttcgaacaatgcttctcattgtgttgtaaagaaaaaacaattttaggagatgacaagagagaaagaaacagggtgaaggaagataatctgttgagatgaggtctctgggaaagagaaatgaagatcttatagagagagctcttcatgatgaagggacatgtgttcctcgagtagaaagagacgacccctccccctccccaatgaaaatggtcaattgtccactctggaaaggatctccaaatccaaagtggtcatatcttcttcttcttttttttttttttttttt

SEQ ID NO: 204057 - DNA, 404 bp, Homo sapiens
ttgttttaactctgccaaccccagcaagtcagctataacaatccctgacaaaagaaattgaaccaagacacacaaagttttagtaacttacctaaggtcacacaagagcctatgaaggaatcatgagaccagactcttaactgaaatacagtgctggttttttggctctggggctggagaaggacccagctttcctgaagcatgtggctacctgatgcctgaacaaaatcaggggtctatgacccaagaataggtggggatggcttctagaggggaaactaccatgacttctatagcctgctgcactgggaccaatgtatctttaaatctgagaattgactgagttggtaaaaaccactttatttatagttagaagctctccctgaggtcgtggttaggagatc

SEQ ID NO: 204058 - DNA, 522 bp, Homo sapiens
ctgggatcacaggcgtacgctaccacaccctggctaatttttgtattttcagtagagacagggcctcaccatgttgcgcaggctggtctcgaactctcttgggctcaagtgatcctcccacctcggcctcccaaagtgctggagttacaggcttgagccactgctcctggccagcttctactttaaacctcagctatttatcaaggaaaaaagaatttcccttctttctacatgaaattcatcactcagtgttcccactcacccatgctcctgtctgtttaaatgtcacttcctcagaaccccaatctgagctaatgcctattttctgtttttcgttcattctaaaatttgtcatcatatatttgtacatttcttgatttcctactccactgttactggacccaccaaggcaggaactgtgtctctttaccactacagttcctgtatcttttaggtgcgtagtatttcttggtgagtcagtcagtctccagacaggtgcagcgtagaatgggtaccgagctc

SEQ ID NO: 204059 - DNA, 476 bp, Homo sapiens
ttggggaaatctcataggttcgcaggatggacacttgaaaacaatctatggaattaagcaaaactttaatattaggcattaagtattattgttcttttagttcactgagtagttgtggcactcagataatattaatgcaatagccacttggtaaaaccaaagaaataaacaaattcacctgtatgacctgtatgacaacataagtgatcatgtcctagtatgactgaatgcaggaattagtaattgaactgaaatcaggatactgttagttctggggaagaaagaaggggaacaggatcaaggatgtgcacatgagactttaactgaaaatatgactaatgtttggaaaagacaaagttgggtggtggatacatagatgttcgttatattttcccttacatttttctatatgtgtgaagtctttcctaattaaaaaattagtaattgattgcctgcgaacctatgcgtcactaaag

SEQ ID NO: 204060 - DNA, 641 bp, Homo sapiens
tgtaaactagctgtcatttagcagccctgtgatatactgctggccgagtttcgtaagaaagcttctatgtttgtatagattttagattatcattcgctttatttaagaaacattcattaagtactttcagtgtgtcaggaaccttggtagccaaaggacaaatgacataaaaaccacacagatggcctctttcttgagcagcttttgttggaaataatttatgactaatattatgatggagtgagatggtgtcttactagtaagaccagaaatacttaaattctaattcaaccaattcttgagatcccttagggagctaggtataccaaaattcaagttagaatttgttggcttaggcataggcccctgcctcacaatccagagaactaggttattctatatggaatatgcctttttcctttaccagctaaacctgactttcctttctacgtgttagcttaaattcaagtcgtctcaaattttactactctactaaggcaaaaaactactggtactaaaagaaaatgagcaagaaatgtccaacaagctagatcttgttgaatagttagcaattcagatgtcttactacctaccaacaaactgtccccctccattaccttggcccagtttctatatttgga

SEQ ID NO: 204061 - DNA, 608 bp, Homo sapiens
atctaaagtagtcaaactcttataaacagaaagcagaatggtgattgccagggatcgggatgaggaagaaaatggaaattgttgttcagtgtttacagggtttcagttttgcaagataaaaagttctaaagatctgttgtccaacaatatgcatgcagataacatcatattaaacatggttaagatagtaaattttatactatgtaattttttaaccacaattttaaacatcactgtagatgttgtagttgtgtttggggtccacgggtggggaggagcttgggaaggaatggcatgagggaagtgagagaccacaattaaggagcaacacaggagatgagggtggcttggactagatagccaggtagaaggagaggaagggatgaaccgggggttcgtttcagagtcaaaatcaagatttgctaataaattaaatatgggaataaagaaagaaaagaatcaagagtggctcctagtatttgtttgagcaaatgggtggaatatattgatatatacttaaaaagaatgactggggaaaggaagaagttggccaggatgtacaaccaagtattcacgtttgaatttatttaatttaagataggtattag

SEQ ID NO: 204062 - DNA, 388 bp, Homo sapiens
ccggaaaaattggtatcaaagaaaaatttaaagtatctatatttacataaatatatatagtcatagaatattaagcaaaaagtaaattattaatagttcatgacagaaaaattgcaggcagggcatgatggctcatgcttgtaatctctgcactttgggaggcccaggcaaaaggaatgcttgtgtccaaaagtttgggaccagactgggcaacctagtgagaaaaaacctcataaaaaaaacagaaatcagccaggcatattggcatgtgcctatagtctcagttactgagttgggaggatcgcttgaggccaaaaggccaaggatgcagtaagccataatgacatgactacactccagcctgggtgacagagtgggaacctaagga

SEQ ID NO: 204063 - DNA, 677 bp, Homo sapiens
cactgaaccctgacacactgcatcaccactttacagataaaaaaagactcttacataaaacatctgatttgcatcccttcaacaatcactaatattgttaaaggggattttatctctttaacaacattagggagacaagacaggaatttcccctacttaacaagaaaatttaagaactaggaacagtagtgagctccccagcactggacagattcaaacacagatgcacactgaagaggggcattaaaaaggacatctaagcttcagatgggtcattaaaaaaaaacagatgccttttaaggtatcttccaagagtttctgtggttccataacctgcctcaaaaatcaagcaaggctgggccatgagcaaaaagagcaaaactccatctcaaaagaaaggaaagcaaacaaaacctcacagcacccgtcagaaagttcccaattccttgtatgtatctgtgggcacctgcctatttgcaggagcctgctatatagtcatcaagtcaagacaagcatctctgctctcaatggcctatctagggcaggggagatcattcataaacatgtaaacaatgaaacactgaatttggtactggtactgtccagcagggccgtgtggtaagcagccttgaggagggttgccgagggagtctgagaagatgcctgtggagttgaga

SEQ ID NO: 204064 - DNA, 434 bp, Homo sapiens
ctggtaaatcctttaccaactgtgaagactgccctggctagtagcacccgtggcacattctacatcattggaaagaccaaaagatcttatcaagataggaaatacaactaaagaaaagtggaggcattttgagcatagtttgacgatgatggccctgtaatgtgggtatctcataagtggctggctctgcctggctgcccaacacaatcttgctaactaaggtgatgctggccaagccttctcctgtttgcagtactgtttcttctctccttcagtcttacagcatttcagtcatgtttggctgcattttctttcttctctccaattatttgaaatgaagtgaaactaatagttgatattaaagactttgattttttttcctatatttttaagcaacataatctttttcctaaatgacatcctacccagaactt

SEQ ID NO: 204065 - DNA, 339 bp, Homo sapiens
aaaccccaaatcctcattataccaaggagccatattttggggtgaagttgcctgcaccccttcattactaacaagttatgctactgaactccctttcaaaagcttgagttaacgattaacaccctgcccttcacaagacatactcatcaacccagagaatggtggagctggcctggcactcagtgacccggaggcttttcaaactgctggggagagctagctctccatactcaccccagggttttcttatacaaagatgcatttcattctgcatgtagaatatttaagatatccaaagaagctgttaccactttttatctttttatgagatctggaaaa

SEQ ID NO: 204066 - DNA, 568 bp, Homo sapiens
gacggctgcacggaatgggcagtgtcactcgggagaagatggaacacggcagagacagcatggcccgaggacagcgtgggagccacaggcttccagaagagcaatggggcgagcggtttccctgcctccctctggggtcagcagaaaaggaacagtggccctggagactatgcttcatgctccctgctgcttttgtggctggaacttcatacggccacagggagaagcttctgttcccaaagcattatgctaacagtaccgtgacaaccagaaatacctctccagttaaaactccaccagcgccaccagccaccaagatgcagactaacccaaggtgctcctgtgtcctcatctcactgcagcccacagtgcttgactgggacacacggtttgggaaatctgtgtgttttgtgtctgcgctccccttgttatagaagtagtgtgtgtgttgtgtattgtgtatctgttctgtgtgtgttgtgtgttggtgaagctgctgtcataggtttatctgacaccaccgtatcccgttccgcctggctggtgctgaagagcaggctttttatga

SEQ ID NO: 204067 - DNA, 230 bp, Homo sapiens
ttttcccaatagctctagtaccccagggaccaaactcttcttgcccaagttttattagtggcgccagttcaggacccgaggccaggcttggcaggatgatctttagagaggagctttgaacataggccagagactcctggtttccattggatgtcttctatcgagtgcagatacatagagctctggcttttttgttgttaatttctctttttatttatttttacctataa

SEQ ID NO: 204068 - DNA, 468 bp, Homo sapiens
  misc_feature (396)..(396): n is a, c, g, or t
  misc_feature (398)..(398): n is a, c, g, or t
  misc_feature (409)..(409): n is a, c, g, or t
aaattttgaggtgtgagtaaaattaaagagtctcccaaccagtgaaggatgaggagagaagcaatactgtaggagttttaagatctccacaggagcactactaaagcccatccacagtgaagcaagagaatcatctttaaagggctttggagacactatgatgaatgtggactcagcaaagaggcaggcaagcaaagtcccagggataaccacagtcctatgcaaaatgacagagaaaaagccagtagagaccattaagtacccaatagtaccttcccattaaggcacttgaagtatggctctacctctgggacttggtatgaacatatattatcagaagcctagtaggtctattttaaaatgttataatagcttgacatagatctctcaaatctntntgcatatcaantcatagaggtacagccatagctcatgtgccttaatgggaaggtaatattggctacatag

SEQ ID NO: 204069 - DNA, 427 bp, Homo sapiens
tgtattctgaatcatttaggaggtgaaaggcatgatgactggaatcgcttaggagtggcgggagagaaaataaacgtggcaaaatcttcctgttgaatttacccggttgtgtaggggtcagggctcacttgactattttctcccacttttttgtgtttggagacaatttttttaaagcgtgttcatcggctactgacacatcatgctaattgaagtgttgggtgcaggtttaaaaagtttcgagggaattggtgtgtccgtgaacaatccacgacaaacgtggtggggcccgcgggagcgctgcggcccaagacagtgtgacaagcgggaagatcacgagtccgcaagacaccaagcctccagaaatgctccagaaacgctccagaaagcctttaaagaacggatttgaacccagccacctccttaa

SEQ ID NO: 204070 - DNA, 293 bp, Homo sapiens
aagttgattgagctttgactaggttactaaattaaaatttttaatgcattgctatctcattgtatcattatttgctataataaatctctggattttattttcgaatatttgaaaactggagtatattttatttcttcttacctgaacaaaaaaatgtggaaaaaatggtttgggttttgtttttgtgtttgttttgttttttgtttttttttttcatgctacatttttatagtaactacctgtattagacgtttttccccagtgttttaagtatttatgtaaaactccacatg

SEQ ID NO: 204071 - DNA, 648 bp, Homo sapiens
agaggcaggatatgataaagtttgaaagtgtaagccttgaagtaaaattgacagggttcagatttagctgtgtgagcactaggcaagtggaattagtaattaccatcttcaaagaggtttagggttgatattacataattcatgtaaagtccttagctttctggcatacaatgctgagtaaagtaagtgttacctgttagagtaataatagttattattaccattgtttaattattctttctacattaacttgagattttcacctgtgagtgatttgcagttgtatacttttgctaatgtcccattttaagccatgccgataaagacaaggttgttatagaggaagtgagaggtaggcatcaaagtgtgccttctctgattctagcagcagaatcttataaccaggttaaatatttcaggaatgcattcccagcactgtcagcagatgagtagatacacttgggaatgagtacattttaatgaagttatttcccagccagtgcattggtttgtctttgttataacatgctgaatttcttcactctcctttcaatttttgactgtgaggccatgtggtgactattagtagagagaagaaggtgagtggctatgcgtatttgtaatgtacgtataaacccaagatgagag

SEQ ID NO: 204072 - DNA, 162 bp, Homo sapiens
aggatgtataaaataaattatctagtggatgaaggtgagattgggattgtgagagtactggaaaccaagtggaaattctaaactaacagttctgttactctggtaaatattaagtatgcaatagatctcagcccatgagaaacacaggatgaaattgaggag

SEQ ID NO: 204073 - DNA, 363 bp, Homo sapiens
caaccctctctattcctgataagcttcttgctagagggctcattttttttccctgaactgttctctgggcgtcactgggaattgtctcaccccccaaccccagttcaagacatcttctacagctctgccaaaaggatctctctaaataacgatttcgaccccatccctcccctctgggaaatcccctgggagctccccactgcctgtggcttgagcccgagtccccacaccgggcagataccctttggcttggcctgtgcgcccctgcggcacactagctgtttggagcaatgctgcgtttctcggaacgtggcagcatctgcacatattcacacacctccacgcatcctaggatcactcttc

SEQ ID NO: 204074 - DNA, 470 bp, Homo sapiens
gagaatggcacatttgaacgcctgaagctgagaaatcaccatattctcatgcatagcactggagtgggccacagtgttctttttaaaatttgttgagatgccccttgaaagaatgctgtgtattcccatcacacattcttaaactgatatttaaatgtttttctcagctgggcatggtggcctatacctgtaattccagcacttcaggaggccaaggaggaaggatcacttaagcgctttgtagagtgaggcctccatctctacaaatatatttttttaattagctgggtgtgattgtgcatgcctgtagccccagctactcaggaggctgaggcgggggaatcgcttgaacccgggaggcggagattgcagtgagctgagatcgcgccactgtactccagcctggtgacagagcgagactccgtctcaaaacaaaaacaaaaacaccgctgggaatagacagatcaagg

SEQ ID NO: 204075 - DNA, 354 bp, Homo sapiens
ttttagcataattgtggaatataaagaggttttgtctatgtgggttatatatatttattgtaaaataaactagatagaattttaaaatatttaattatttattaaataataataaatcaatatattaatataaatagcacatattgtatgaaaaacaaccagatattataaaacaaagatttaataggaatagtgtcacttttttgcatttttacaaatcttttaaatgtctgtctgaataatagatagctggattctcatatatgctttaatattctctatctgttgtaatattatataccatatagtttctggaaacattaattttctactaatgagagaatgagagagaag

SEQ ID NO: 204076 - DNA, 479 bp, Homo sapiens
cttaatcatatctaggaatataaaccggtatagagtatataatatttcgtatgggatttttctacgtatttataaattagggaaaattaggtttcaagaactgcttttctttctttgtttccacttaatgatgaaacagaatatggctactatttgctcgtcaattaggtaattggtttagcatgttcagtagaagcagacacatttgattaatgcacatgaaaaactttaatgtgaacctactcacaatgattttccagataaatccttctttgttgcactggtaaatctgtgctagtgatttatatgatatttatgattgcagcagtgattctgttactatccttttgggaaacagaaaattaaatcatgatttgagggaaaaaatgattctgacttaatcagttaaattgccatacaattctggaatagacagaataattgcatgtcagattaaatttgaagtgatagatttgtat

SEQ ID NO: 204077 - DNA, 250 bp, Homo sapiens
cgagatcacgccactgcactccagcctgggcaaaagagcgagactccgtcccccccgccaaaaaaaaaagttacatagaggcatatgatatgaaaatgaccaacttctatgtccttccacagccctgaagaacactgccagaactcttttccatctaaatgtgccctgtagttactcaagttttttgagaccatatgaccttctccttcaccaaaagaaaaacagagacatggccgggtactgtggctca

SEQ ID NO: 204078 - DNA, 475 bp, Homo sapiens
ttctaaatactccccactttggccttaactcagaccttcctcacttcttttttattttattttattttatatgtatttatttattaatgcatttttgagttagggtcttgctttgtcacgcaggctggagtgcagtggcgccatctgggctcactgcaacatcccgtccccgggctcaggcaaccctcccacttcagcctcctaggtagctagggctacaggcgcttgccaccatgcccagttaatttttatttatgtttttatttattttatttttttagtagagacaggatttcaccatgttccccaggctacttttttagaatgctctttgatctttccgccttcggtctgattccttttaatccattctccacctcactggtaaaaatttttgtgctatatgtagtcatgctccttctttatttaaaattccactagtggctccccataacattcattataaaggtcaaaa

SEQ ID NO: 204079 - DNA, 522 bp, Homo sapiens
catcttggattgcaggaagacatggtctatgaattacagaaaaccacacacagagataagatgaaaagttaggaagacaagatacaaagagagatgcgataagaatggatgtcaaaaaaaaatgcaatccaagaattaaaatccctcatggaggtggaaagaagcaaaattgacagtgtagaaaatggaaacgttgatttggaggtgaaccttgagaggtcttttacaggaaaagagcatagagttagacatgataagtgaaaataaatagttaactaagaaaagtgatagattctgataaatataaacaatgggaattcagtttaagacttaacagtattactaatcaagaaaccagaacaacagaaataagtgataatgactttattgaagaaaacattttcaggctggaaaaagactggagtatatagattgactgggctcacaaattccaggtaaaatcaattttaaaacacccacacctagacacatattgaccacattttataattacaaagacca

SEQ ID NO: 204080 - DNA, 381 bp, Homo sapiens
cgcaggccaacaggatcctcccgatatcaaccctgcacctctccttcataaattattcagcttcctacactattaaagtttaccacaaccaccaccccatcatactctttcacccacagcaccaatcctgttggctggcgcaatcctgttggctggcgacctacctgaaacaacctccatggacatgcccctttatctcctatttcatccctaccccctataacaactctgtgagtgctctgagaggtgggggacagctcacggtcacacatccactgaggatgcaatcccaggtatgtcagctacaggaccggttgtctgaccccacccaacagaacacaggggagcagttcaggatgaccctatgcagttggcggccca

SEQ ID NO: 204081 - DNA, 342 bp, Homo sapiens
agcaacataccttgttctgtgatttctcacgccatcaaaaccaaagatcagggctggctgttctgggttttgcaaggttcacctgctggaagttaagtgaagtcagtcattttttttgtcttgttcatacaaaatccacagtacctagcacggtacctggcacatagtatgtgctcaaaaagtatttgtactttttgagtactaaaatctcagcacaggcaaacagagagaggggagaagacacagattccagaggtcagtagatcaaggctactataaccaacatgatttagggagactctgtggttcaaaatgattccccagcggccaggtctgggctct

SEQ ID NO: 204082 - DNA, 1026 bp, Homo sapiens
gtactgcttggccatccagcagctttatgacacacacaagaacccccaggggcttgtctgtgctgtttcgctggctgctcccacagccacaggccctagacccatcctcttggaggtccttctagcgctgcctatgtggagattcttccccactcatcttgggggtttggatttgttgcataaagcagctgatgtgtttcccacagggtcctgccagctaagccaagggcccatgcattggcactggggtctagcagagagaggggagcaggatggcccggcctacctcaggcagcctaacctatgagcccatcctgagtactcctgatggagatggggaggtgcccagacagacagcaagtggggcccagccgcctcatcagaatcagggccaggctccacctgggaacaggcccgtagcctacagcccacggcccctgagagcagggtcatcacactccaatgagtcatgtgcattttgaatttcagttgctgcccagcccctttgccaggccctaatgtcttccagatctctggtggagaatgtgcccctgctcatcaacagatagctggctgggctggctccttcctgcctggtgcctcccccggctgcctttagcaagtgctgactgcactgagtccactgggaccttttccttttgggtttcgaggctcctcccactcacccccaccctagtgctggaagaagtgagtctgcagctgaagggttgctggggagtcagtctttcctcttacttaggaggggaccaggcatacacacactgtcacaggtcagccaggccagtcagggaccagtgactcaccttcctcctcagcctcctggcagccggccagccctaccccggccctgccgggacgaaggaggccacccactgtctagacagataacactgtgggtatacttatctgcagggcaagctcatgagaaaaatttttttcagggaattttgttttggggtctcctgagagttcccctgtggcccagtgtcttctgttttcttcttt

SEQ ID NO: 204083 - DNA, 595 bp, Homo sapiens
aaaagaggaaaaatagaaactgccagtcctcttaggaattaggcccagaactggcaaagcaagattgtggcatatcttgctggttcaagcaatgagaggtcagccgagattcaaaggactccatagattccacctttcgatgggggagtgacatacaagtacatatatagaaggcaggaattgatggtgggccccttggagataagctaccacaaaccacaaggaaattttttagttaatatagctttgtaaacacataatatagttttaaatagatgaggttccattatttttagtaggttaaaatccatgcactaaaaaatatgtctaaatgtatagaaagccaatttcagacataaattcaggtgcagcaggaacacagaaagttgtattagattctgaagttgtctccatggaaaaaataatacagaccaaatacctgagtcactttaaactagtctggaagaaaaatatgcaatatgggtcaatgttgtatcggcaaggaggtaccactggtctttttaaccctaatatctataatgtgttttaatatttgtcttcttttgtggtcaataaaactatgtgataaagttta

SEQ ID NO: 204084 - DNA, 478 bp, Homo sapiens
atccagtagttaggacaaatgaaccaaaatttgaaatagaaaacagataaagcattccatctcaagtatagacaggtgaactaaaagagctataattacaataatagtgcctttcaaagtataacttcttgtttccaaaacactttcacttgtatatgtatcattgagttcttatgaaattaagcatcaattctttgaagtttgaaatatatatatatatatatatatatactccagacaaatataaaaaggaacacttgacactgtgaagagtaaatttatagactccattagccaaggaatggtggaaatgagaggtggaacaatgtagaaagagaaatcaaaggcagcaaacaggcttcagcctgggtcagctctgatctttggatagtggccactgaagtgctagactgagaaaatcttaggtcatgcctagcctcagtggttagtaataaattagccatgcctgttacaatca

SEQ ID NO: 204085 - DNA, 459 bp, Homo sapiens
gtcctttcacataataaattctgccctcctcaatgtgtctgcatgcttaatttttcctggtcacgagagaagaacccagatgtagctgaactaaggagcaaaaacccgacatctatacctgctacagcacagatgcagcatgaaaaattatgctaagtgaaataagccagtcccagcagaccacttgctttttatttcagaggcttataggcaaatctatacaaagaagctgggtggttccctagggctgagggaggaagggaaaactagtgaagatggctaaatgatgtggggtttgtttttagggtgatgaaaatgttctaaaattaattgtaatgatgacggcataactctgaaaatactaaagttaatgaattgtatactttaaatgaatgaattgcatggtgtgttcattatttctcaataaacctgttacccccccaccccgaattaatttgg

SEQ ID NO: 204086 - DNA, 410 bp, Homo sapiens
aggatgttaggcatggtttgtgtgcaggctattataggtacttcctttccaaaaaggtgatatttagtgctacaaattagttatcatatcagtattagaagctttgttaggaattccaaataatacgcaattgtgattatacacaaggtgtttgcaagccccatcttgtaggtattattaagccacagaatattttatacattttaataattaatagtcaaacaccttgctaaatactactccttttgaggagaagtagtagagaaagaatacaattggctgtttatatttttgtcttattcataaagagaataaaattatgtaaaagtatttataaggaatttatcatcccaaatgcattttaatagttgtagataaatacttctgttttgagaaggcttcagagctgt

SEQ ID NO: 204087 - DNA, 543 bp, Homo sapiens
cctatgcgtccccatgttcccactcttttaaacttccaaatactttgcaataaggtccttttgagtagaaatactgggttctcattaagcaaccctttacctcacttctggagcacaaaactgtaaacatggtttcgtaaatggcaaccattcattattcaataaatatttacccaacagtgatcctatgctaaggtgctaggtgccaggaatgcaaaagtgaacaatacaaacatggctcctcctctctgattttaaaattctattcaattgtcccttaaatgtttattaatacattcttatggtctgatcattattcagggaggtcaagttcctcagtagagggcctgatggaaaataggtgatgaataatcatgattactggagcagggaatacatacacatgtccacaacatgtaaattctcaactcagcttgacctcaggagcacaaacattattatagccctgtcacctgaaactcaagtgtgtcccacagattctgggcaggcaggaagtattgaatgcccatttgtgttctctga

SEQ ID NO: 204088 - DNA, 116 bp, Homo sapiens
ttaagaagagagagagaagggaaaatttccaggacctttgtcttgtggcactagctttgttttaggacagcataagacctgcaaatatctccaccttaagaaaaatgaactaagat

SEQ ID NO: 204089 - DNA, 348 bp, Homo sapiens
agcaacattttaagtccttgctaaggattaactcacttattcctcaagtcaccgctattcactaggtactacgttatcccacatagggaaactgaggcacggagagatgacgtaacctgcctcagcagcagaggcgaatttgctctgagccaccacactatactgcttaataccaagttgtttcctctgcttttccataatttccaatttttctacacagggcctgaagcacaattttttttttcttttgagacagtctctctgtcgcccaggttggagtgcagtgatgtgatctcagctcactgcaacctcttcccaggttcaagcaattctcctgcctcagcctcc

SEQ ID NO: 204090 - DNA, 706 bp, Homo sapiens
gtgatgaaactgccatttaagagaggtgttgtgtttccatagaaatgcccaataaacttctgggcaagatagattttaaaaagcaagaggatgaaaactacccacctactacaatgtcctaaaaagcaaaatataggtccttgtggtgttatgatttataatggttttcaaccaggttcctggtccataactcccacagcccttgttacagtcttttgtgataatgttgggtcaggaaacagaatctctttcctgccttcctttcacctggcccgaggcaggaatctaatctttccccacctttcagattgtgggtctcaaaccctcccctgagagggctaagcactgtaggaaggaacgtttccaaaaaacccaagaaagctgggtacagggagtttccggatagctgaacacctggaggttcctggagggtggcacacaagggaggggttggaaactccgcacctctttccccatgccttgccctgtgcgtctcttcatctgtgtcctttgcaaaatatcctttataataaaccagtaaacataagtgtttccctgagttctgtgagccactccagcaaattaatcaaaccctaagagggggttatgggaacctcgacttgaagtcaatcaatcagaagttccagaggctcaggtttgcatgtctgcagggggcagggcagtttcagagacttgagtttccaac

SEQ ID NO: 204091 - DNA, 199 bp, Homo sapiens
tgattagttgccctctcaaccataagcagcctataaacagggcctggctccatccttgttacttccccattgcactgaattcagtatttttccctcaaggtagatagttgtggggcagcatccctaaaaatgtccagttatataatggcatccagtaaatgttttcttaattacttacctccattaacaagctttatgc

SEQ ID NO: 204092 - DNA, 489 bp, Homo sapiens
agatggggttaagaactagagaagaatgagcatcacccagaaatcttaggcttataactagaaattattttaggttatctccctttaagaggaagatctccctttaggggggattatgttgagtgaaggtattaagattgttcatgttgaagaatgcatgtccacatagtgtacgtttgcctacccagtgttatctttttcccctctgagaatagcacttcacctttcctttgggaaactacccatttcccatgccatgtgagcccagaggataatgtgtaagaggtatatgagtttctgagaggaatgtgagaggtcttcacctgcccagattcctgacttaatctttaagtcttcttgccctgtagactctgaaaaatctcatccatttccatggccttggtttctaactgtatattgataatttccagattcctacctttggccttgatatgtgtcttgagctccagatctgaatgcccacctgta

SEQ ID NO: 204093 - DNA, 376 bp, Homo sapiens
tgcatgtgttgaagcccggggtgtgggggactgtggtcacgtactcgagggggcttcagagacctctgggaagccctttctgcccactcgaagcctgcccctgtgcctgacaatcttccatcgggagcgatgtcataaagaagaaatggaattcagtgggaagagtggtggactcggggacaaaagatctgggtttgcgccctggctctgacctaactcaccagcattattggaggcacgttaggtaggtgcttgtcagagtcctgcgttctaggtgctttacaggtgtccacttactggatcttcataacacacctatgaagcagggagtgtcatctctatttcacagctgaagaatctgaagctaagtgtcatg

SEQ ID NO: 204094 - DNA, 292 bp, Homo sapiens
ataaaagagaagaggaatccagtttacaacaataaatgacaaaagagacctgtggtgggtaagacatgtacaagatgacaagctttgaggaagtacaaggtctggtctgggagctgtggacccaataagcaaagactctggaaagacaaatgcatagttgttcatgggccgtggaggccctcgtattgtataaaaagggttccaggagcttgggataaattaaccactttgtttcccccttttcatcatctagctcggtacagtcctctttagcagtgttttgagtcctaag

SEQ ID NO: 204095 - DNA, 586 bp, Homo sapiens
ttcaactttttatatatccagaaatgggattgctgcatcgtatggtagttctatgtttaatcttttgagaaacctctatattgtgtttcacagcagctgcacccttttatattcactgtgggtcagttctgacctcctcaagccctacttttcctacctgtaaatgtgagtagtgatgggaatcttctcatagcatcattttgaagactacctatgtaatgcagataaagcacttgacatgatggaagactaacaagtagccatgatgcttagtattatttccattttataggagaaggatgtgaagctcagagactttggctgcgggaagggaaaaccagtgcccctcccctccttgatcagagtcaacatttaggttttaaggttgaaagtcattgtctgtgtcttcaaggtaccataactacctagagtttcatggcctgaaagagacctggagcttgtttatacctccctcccccactgctgtatctgggtcttttggggtatagcccatttactgaacaacgaaaactttggggatccccaagatttctgttctcaacattgaattgtactgttggttgac

SEQ ID NO: 204096 - DNA, 714 bp, Homo sapiens
  misc_feature (533)..(533): n is a, c, g, or t
gcagatacgatcgagctcggaccccgattggcgccatttcaagttttagccatcactgtgggtgtgtagggtatcgcaatgaggctttgattcacatttctttaatgactaattatacaaaacacatgaaaagattcttactggccatgtgtttctcttaagtgtccaaatcttccatccatttataaagcaggctgaggccgggcgcggtggctcatgcctgtaatcctagcactttgggaggccaaggcgggtggatcacctgaggtcaggagttcgagaccagcctgaccaacacaaagaaacccagtctctactaaaaatacaaaaaattagccgggcctggtggcaggtgcacacctgtggtcccaattactggggagactcaagcgatcctcttgtctcaaccttccaagtagctgggactacagacattccgccaccatgcctagctaacaaagggtattttaagggtgaagagataaataggtggggtgaggtctgaaaggattcccagcacaggagcttctgtncctgtgggtgggttggggaactcattcttgttcacctacctgtcagcctccacattcagttctctagaaactccccaaccctgtcctcttgggcattttatggagatgtcattggataggcatgattgaaatgtggacaaccgtgttgaaatgtcgccatccggggtcctctggaacagcc

SEQ ID NO: 204097 - DNA, 647 bp, Homo sapiens
aaaaattgtttttttcaatatcattctagaggtagttaaaattgaatcaatccattcaatccattatctttatgtaatctactcctaggtagctgatactatagtaagatgtaatttttttttgtctttgcaaaggtgttcttgttgctgacaaggaacagcagaatagtgaacaagtttgtggctaaacattattcccagattttaaaaaatgttcagtgtgcacaattgttactaccagatctttgtcaaaataatctttctgtcactgaataactgacccataaaacaatagagcatattgacctagtgtgcagggtaagcaatgagtaaataagaaatggttgtaaaatatttaccaaatgtaactttctaatttgggtagctttaagatgggtcaaaataaaaggaatgctattatttgtgaagaattacaagtttacatatgtttattcttgccagtcttttactgaaaattcctagaaatgatatcctttcctttatatataccataatatttgtatgatattcctctccaaagataggggtaatattatacattgataatagtcattcattattgaaaaactaacaatacactaagtactccactgcatgggacatagtagccattcaataaatgatag

SEQ ID NO: 204098 - DNA, 392 bp, Homo sapiens
accgagatccccatacagcggagggtaagaactggtgttgaagctgactaatctcaaaaacatttccacttgctttagtataaacagactgcaactcattctatctgcaatcatttcaatagattctgatccagagcctcccagggttgccttacgctttttttcctctaccaactggaaacttggttcttcatctttacagcatttaaaggtacaaacaatacgaacatttcataataccagatgctgggagccacaggcctagaacatattacagagccaccaagccacgttcattttgaaaagattacattaatgctgttttcaaacttataattaccagccttctagaaactccttaccatcttgagtaactgaaagcataaagtggc

SEQ ID NO: 204099 - DNA, 774 bp, Homo sapiens
ttccacttctcaaagcaccaccccagggccacattcacttgggactggattcgatacaatttcaaaacgggagtcggaattccttaggaccctctgtggacaaaaagctgatacccctgttaccacaaggattcctgcacttcttctagtttgtagctttccaggagacctggcagaaacaacaaatcaaatctccatgcttaacaatcctttacctttgaagactttaaaaacaaatgaggacaccatccctgctcattcaccctgccatccgagtgcaatctacaaagtgctctcctgctgattgtttcatctccattaacgcccttgtgaagcattcccattctaccagtgaggacgctaagaacccgaggaaggtaaatgatttgcccaaggttgcacagctaccatgtggcaaaaccagaacttttcttaaaaatctagcgttctttccaccaaataacagctaatatgaacaatcagacatggggctctcaaggaaaaggttttcatgataactttgttgtgcctcggatttcatctgtcattttttgaatagctaaatgactgagaagtctaaagagctgaggaatctaaacgagaaaagatgcctccttgtctggaaagagggtgggtcatctttacagattaatgaagcggcacagaaacatcggtaggagggggatgaagattacacatgcagttaagaagtaggctgggctgggaatctaaccctgaaaaaagacagattgcgtttatccctggattagcagt

SEQ ID NO: 204100 - DNA, 530 bp, Homo sapiens
ttcatggctcatactccttggtctccatggtctatttcctgtcttttacacctgtcggccttccccctgcaccccttagtagcaggctctgcttccagctctttctgtgtctgaggggacctgccttgttcatccctgttcatgtttacgtgtgtgtgcacacatgtgtgcgtgtatgtgatagtcaaatacagcccaaaggaacagaacaagcaatagaagaagagaaagagcacaaacattactaggcatcttctagtcccaccagctatgtgtgaccgttggcaaatcccttttcaccctgcagttttttcaaatgtgaaatgaagataacaattatcacctcacatgactgttataaagtacttggcacatgcaggttcttaagaactgtcagctgaggctgggcgcagtggctcatgcctgtaatcccagcactttgggaggccgaggtgggcagattgcctaagctcaggagttctagagtggcctgggcaacatggtgaaaccctgtctctactacaaataca

SEQ ID NO: 204101 - DNA, 324 bp, Homo sapiens
attattagctggtgagaacacttcattggctgaaagttcttagctgggtcacctatggttctactggaagaatgttcttcttaaggacattcattctccatgagcaactagacatgggaggcgtggtaggcaaggagttaagagccagctgtacagacttagctgcccctgtcctcagtctcctgaagagcaaacctagatctaaaaaagaggcagatgctatgaaaatgggggcttgcaaataagaaataaggagggaaagatattttccttgttcaacatttcactggtgcagaaatatgacctagagtttattgtctaaat

SEQ ID NO: 204102 - DNA, 387 bp, Homo sapiens
caatgagaaaaatcttgaaattacctaaatgcctaacaaagggactcagttaaatgaacaagggtgcatattggaatgctatgtagttactaaaactcttggtatagaagagtttaatgacaggatgctaatgcaacacaaagtggaaaaaataattcacttcctcaccccaaagtgtgtgtgtatagatgtatattctatgtatattacagaaaaagaaatggaaggaatctatttcaaaggggtaacagtggctaactctgggtggaattatgatttaaattttctcaataataaaatcagtgctaagaattattgctaagtaacttgcactgttctaaattctatctcggtctatctatcattaaattgtttaattcttacaaa

SEQ ID NO: 204103 - DNA, 470 bp, Homo sapiens
agaaacttgacttttaatctagcttctacacacaaggcttgggaagttgcttattcaacaatttaacaaaaattaacgatgtaattccaatcaaatctaaacctctagccacaaaaccttaaattcaaggtgctgatcttaatctaaaaaacctcatgtggtttgggttctggttaccttagagatttgactctaagcacccaaaggcaattaagattagatgaaatacttggccgatggttcactactgaaacctgatgaactggaatcctctgattttgtgtgtctcttttcagatagggtgaccaaccattctggggttttgtttgtttgtttgtttttcagacacagtctcagtctgtcacccaggctgcagtgcattggcacaatcttggctcactgcaagctctacctcctgggttcaagcgattctcctgcctcagcctcccaagcagctgggattacaggcg

SEQ ID NO: 204104 - DNA, 873 bp, Homo sapiens
tgtcagcctcccaaagtgctgggattacaggcgtgagccactgcgcccggccaaaaaggaaggaaattctaatacatgccgcagcatgggtgaactttgatgacattatgctaagtgaaacacgcctgtcacaaaaagacaagtattatatgatgccacttacatcagtcaccttcagtagtcaaattcagagacaggaagtagaatcatggttgctggagaaaggggagaattgggagttattgtttagtggatatagtataccaatttgggaaaataaagttttggagtttggttgcacaacagtgtgaatgtacttaacttttgaactgtacactaaaaaaatggttaaggtggtaaattttacgtgtattttaccacaattttccttaaaaaaggaatgacattacactttcttctgggtgatggaacaagaccctaaatcttaaaaaaaaaaaaaaaaagaaagaaaagtctgataaatgctacaaaatggttgaaccatgaaaacatgctgaaataagccagacacaaaaggacaaatattgtatgattacatttatcaaaatacctagaattgttaggtccatagagagagattaaaggttatcaggagctgggaaaaagagataagggggagttattggtacagagtactgtagtctgaatatttatgtccccccgaaattcatatgttgaaacctagtccttaatgtggtagtattaagaggtggagcctttgggaggtgatgaggtctaagggaggtagtgaaaaattttggaaatagtagtgagaattgcacaacattgtgaatgtagttactgccactgaattgtacatttaatggctgaaatggcacactttatgttaca

SEQ ID NO: 204105 - DNA, 553 bp, Homo sapiens
tgtcagcctcccaaagtgctgggattacaggcgtgagccactgcgcccggccaaaaaggaaggaaattctaatacatgccgcagcatgggtgaactttgatgacattatgctaagtgaaacacgcctgtcacaaaaagacaagtattatatgatgccacttacatcagtcaccttcagtagtcaaattcagagacaggaagtagaatcatggttgctggagaaaggggagaattgggagttattgtttagtggatatagtataccaatttgggaaaataaagttttggagtttggttgcacaacagtgtgaatgtacttaacttttgaactgtacaccttaatgtctatactggcacattttatgtgcattttaccacactgttccttatatctggatcggcattctaccctcttctgcctctcggaacatgacccttagcttctctcattggctctacaagatcttccatctcttcctccttcgctgtccatcttctccagtcatgctcttcatccgccccattctctacgctcctttgtccatctaccccc

SEQ ID NO: 204106 - DNA, 278 bp, Homo sapiens
cgatcatgtctacagctttcttgtgataccttacaactataagtttaaagagatgcaaaggatgagtatcttgtgcattttaatattaacactaaaaactgttacatcactaaaaatttaggccgggtgcagtggctcctgcctgtaatcccagcaattgggattacaggcctgagccacctcgcccagccagcactaagacttttacagccgatggtgtaaacatttcatttcccgactttcacaccttctctaaacaaacactttttttcactttg

SEQ ID NO: 204107 - DNA, 416 bp, Homo sapiens
gagcatttaacagactacagtataaacataacttttacatgtgctgggacatcaaaaaattcataagactcactttattataatattcacctactgcaatggtgcagaactgaacctgcaatatttaaggtattcctgtgacgacaatgaattataacccactgaatgaaataggcctatgaatccatactgatataaatgaagaaatgaatagggaagaagagaaagctttcttgcattagaaggtcaactaataaatgtagaaggaatgatagagttagaaaaatgaacactgacaacaatcacagtcaataattgattcaggcaagaatcatcagtagatgttcattttgatgagaagcagaatatttacagttaaaacatagtcttaacatgaggtagtattaattacaaag

SEQ ID NO: 204108 - DNA, 359 bp, Homo sapiens
cacatcccatatacaccttctcctggttgcgagccttgggcaagttgctcaaccacagtgtgcttcagtatcttcatctctaaaatgttgccagcaattttcctgataggctgttcatagaagaaacgaagtaatatgtgtaaaataattagaagattagcacatagatggatattattattactcatattactcatgtagaaaatcctgttcttgattaatgaattagataaaattaccaaagataatagaatcttgacctgccttgagaagaattaagtctattaaagaagatgagatagatcaagtgtggccacactggctttgatgtctgaatcgaagttggaattccaccctct

SEQ ID NO: 204109 - DNA, 329 bp, Homo sapiens
atctaatctcacttccttctggcttagagaatgggctttgaaattacagccaagtttgaatttctgctccaccaccaagtagctctgtttccttgaactaggaatttttttttttttttttttttgacaaagtcttactctgtcgcccaggctggagtgcagtggcgccatctcagctaactgcaatctcttacttctgggttcaagaaattctcctgcttcagcctcccaagtagctgggactacaggtgcaagccaccatgcctggctaatttttgtatttttagtagagacggggtttcaccatgttggccaggctggtcttgaac

SEQ ID NO: 204110 - DNA, 765 bp, Homo sapiens
catacatctttcttacagtatatataacctaaaatttaaatatagattttctcttgatttagttttttgtttttgagacagtcttgctttgtcactcaggatggagtgcagtggcacgatctcggctcactgcaacctctgcctcctgggttcaagcaattctcatgcctcagcctcctgagtagctgggactacaggcgcacgccaccacacttggctaatttttgtatttttagtagagatggggttttgccatgttggccaggctagtctggaactcctggcctcaggtgatctgcccacctcggcctcccaaagtgctgagattacaggcgtgagccaccaagcccggcctcatgttattttttaaagctgttttccgatttgtaggactctgtttcatttatgccaattctcaatgactggcagtagtgcttgtgtcagatgggacaagtactttgcagcgtcccacacaaaggttgtcagagtctcttatgaaactaattttgttatgagccatgtaattaattaatattggtgtttcagtggagtgtggctaccactccagcaggctcaagtcttcctctctgccaggtcttatgtacacacacctgttggtaaggaaaattgtatagtttttagtttggatgtattgggcttcactttatctgacatttctgggtccccatcttcttggaatcctgcttatgacacacgtaccttgtctattgcaaatgttttcttcctaaattttaacttaaaaac

SEQ ID NO: 204111 - DNA, 377 bp, Homo sapiens
attttagatgtaattaaggaggcaataattgtcattcctgcggcagcactagcagcctatccaattcgcggtatatagagagttaagataaatgtaaaaccaaaaaaagcagacacctaaagacaaatgcctcatactctatcaagcccgtagttaatcactgttgccccaaaagctacttcattatggtaaccgagaaaagcagagcacaattatgcagtttaaaaggtttcaatcagaatgatgaatggtggtctttgggtagcttattaacatgtttagaaacttatttgtttgagtgggtttttttattgaaagaaaaaataaatcccagaaggtcagcacgcctctaaagactttctggttggaaatctcta

SEQ ID NO: 204112 - DNA, 257 bp, Homo sapiens
actactagaagaaaacgtagagcaaatgctacaggacattggtttaggcaaagattttaagtctgtggcctcaaaagcacaggtagcaaaaacaaaaataggcacatgggactatattaaataaaaaagcttctgcacaacaaaggaaacaaatcaacagagtaaagagacaatctgttgaatggaagaaaacattgacaaactattcatctgccaaggactaatatccaaaatatgcgaggaactcaaacaacagc

SEQ ID NO: 204113 - DNA, 155 bp, Homo sapiens
ggagggaagtaaattgatattgaggctgagaataaaattgcaggtttctagccttgattttctacctctcacctactttgtgcctatgtaaataggctgtttcttcatggccaggaaaaaatgaaatagctgactattgacaattccagaaagca

SEQ ID NO: 204114 - DNA, 427 bp, Homo sapiens
tttgatgcctctaagccccagtttcctatctgtaagatggagacagtaatttccccatagacttgtctagggaattaaatgagactcctgtgaaaagtgctcagcacaggacatgatgtggaagtactcaaaaaagttgaaactggccgggcacggtggctcatggctgtaatcctagcactttgggaagtagaggcaggaggatctcttgagttcaggagttcaagaccagcctgggcaacatagtgagaccccacctctaccgaaaatcaaaaaaattacctgggcatggtggtgtgcgcctatagtcccagcactttgggaatctgaggtgggaggattgcttgaagccgggaggttgaggctacagtgagctgggatggtgccattgtactccagcctcagcaacagagtgagaccctgtctt

SEQ ID NO: 204115 - DNA, 820 bp, Homo sapiens
gatgggtcagattataatatgttcatatgtctaaggcaggaaattagatacaagatgaaatctaagaaagttctgtgattgggtttctcccacagaaggaggagaaaatccctgcatctctggttatgcaaataatatgcaaattacagtgattacatacttgcttagaaaattttgattacctcattttgacttcaggcagagttgggacaccaaaagggaatgtttgtcaacagtccagagttgttagatttcttccaggggaaatgaaagggtaaatttcttaccaaacacaagggttttaaataagtttttcaaactccttaatgtctcccttccacaaagcataccaaaaaaaaaaaaaattacaatagagtcaaaatgtgatctgtagacaaaatgaaggacaaatggttttcccccctaaattttactccagggtacattttctcctctttctttgtcgaacaatgtgaagtaagggcttggattttgtcctgcagatggttttgcaatcagttctagccatttctctaagtctgggcttcaaatctgtcagttgagagtgatacagttgcctgtcccatggtggtgttaagtgaggctgagagcatcaaacaaatgtcccagctcctgccacagttgcatccttgacacgttccagtggtgcccgagcaacactgcaaagaccccctgggatgtctgttggcaagaaaaggtggagccactgccctggggggctgggaagggagttagagaactactgtcttaacctaaaatttgggcagaatctgccttggatcaaatttaaaatcttttc

SEQ ID NO: 204116 - DNA, 533 bp, Homo sapiens
cagtgtgcaatgcatggtggactctgcaatgtgcagttgaattgagaagcatcttacttaatacctcatattttctgactgtaaccacttgtttcaaattcctatcaggagtctcacaataacttggcctatatagctaaatgagtaaagtaaaacaaacagctctctgaagaatggattgccttggtttcacatattcttcttttagagcaaaatgttagacctactttagaaaaataaaattataaaactttaaagttaaaagtaaaactaccagaaacttcagattcattataaatctgaaaatgaatttgtcaatgttcgatcttattaccttatttatatcagatagctatttagagtttacaaaacactttcacaaaagattttctatttgatataatcataatatatctgagatagaatttttgcattgaaattgccttatgtgtaggttaaaatagtcaaatattgtcaattttgtattcttcaacataatgatacccattttagagaggagtaaacccaggcat

SEQ ID NO: 204117 - DNA, 190 bp, Homo sapiens
ctctacatcccccgactacctgggttctaatcccagctccccagtttaccggctgtgtgacttcaggcaactgccttgggtctcaggtctctacctgtaaaagaaggaaaatgacaggacctatctcaaagggttgacataagaaagaaatgagtctccagcctgggcgacagagtgagactctgtctca

SEQ ID NO: 204118 - DNA, 428 bp, Homo sapiens
ttagatctgagttccctccatacagctgaccccgcccgggagtgtgtctccagctctgtgtcctctgcctgagctgaggcctctgtgtgtgctcggcatgggttgggcctggggtgagagtgaccgttgaatcagtagccccaaaacatcgtttctggggagccctcagctgtcccagtgtcctgggtaagtccctttccctctccacgggagaatgacagcacccacctctggtaacatattacatgcccagtgctgggcacagaacaaacgtgggagccatttggcagatggggaaacagaccccataagctcagtcaccaacacactggaggctggggtggtgcccagtgtgctgggatggccagtgctccagccaggggacacagtgggcatccagccacctccacccccacagggctggtccc

SEQ ID NO: 204119 - DNA, 371 bp, Homo sapiens
tagtaaaccatatgtttccttcccctttgtatatcttcccccagtatttagaacaagggttccatctcctggctggccatgtcttctgtgtaatgggaagagatgagatcattcaccaggtagttggttcagtgtgcagttgggaagacactgtgggttagagaaggcagataggaaactccttgtaggagtggaaagcattgagagggattctgacatttctttcttagagaacagggcctgtgtaaaggatgctcaactattcagcagtcttaatccaattcttgctttagacataagccgtttatctttctttcataatgaaagcatatattttcaaattccagatgcaatgtcataagataaagaag

SEQ ID NO: 204120 - DNA, 508 bp, Homo sapiens
gcaatctttagaaagtatgtttagtgacattctagactttgcaattaattattgtagtaattgctaaatttattttatatttgctttctctttttatattataaaaatcttcacactgaaaagttgaaagacttttgcagtgaacatttatataactccccgctaaattttactattagcattttattgtatttgctttccatatatctattcatccctgtatatattcatttatcttgttttttaatacatttcaaaatacttgcctccttttttgaatgtctcttctgtaaaataattaattcaggctataataggcttaatgtgtcttttccacattgaaataattagttagaaaataccatgttgtaaccaccagtaataagtaattcaggcaaggaccttcagtgatgggaaaccattgagtgaaagtcagacccccatgacatgcaatttacctgtataacaaacctgcacatgtacccctgaacctaaaataaaagttaaa

SEQ ID NO: 204121 - DNA, 190 bp, Homo sapiens
atggctcagattatgtgtcagccttgatgttcatgaaaacctagaatgataagatcatgttcctcaaggaaattccagatcttggttagtctatcttgtggttaaaaagatccttaaagtagagcaatttgaaactcttaataatctttaatagtgtttccttttaattaaaaatatattcttcctgata

SEQ ID NO: 204122 - DNA, 498 bp, Homo sapiens
ctgctctattccttacagctgggtcgtaaaatgaacaagcctgtgttcttgatcatgtgtgttcccagcgtcagtctcttgtgtctgtggggatgagtgggtgaggagcattctgtgaggctggtacaggcccattcctaggctttaatgctctgtttgcagtgagccctggaaaattacttagtggaaaggcaccagatgaaacatgtctcctgccccatagctaccattcaaaagggaaaataaccaaactggaaaaccttcttctatttctctattctgatagctagctgtactaaatgctatggccagtccctagaaactggtctttgttttgtttttgtttttgtttttgatttttctgttttgcagctgaattttggcttggaatcaccaactctgcctgtattgtgatccccaagactccagacctcagagtcacctgctggcttagaggagtggagtgctttctatgtaatgaaaaggtggcaattaatg

SEQ ID NO: 204123 - DNA, 437 bp, Homo sapiens
gcagaaaaaaatgtggcttctacaaggttacagagtgaggaatgagctaagaaccagggcctcctggcttctaaaagggttcagtttctaccacactgcactgagggtcaaaactctaagtcaggggacagggtagctggcaagtcagttccagcaggaactggtcacggctttgaccattatctattttggtaaatagaccctggtattcttgctggagttcataggccataaagtccagttgggaacccccaggaacttcttaggcaagacctcaccaaatacactggactcagaacattccctgctcatgaaccttccataactctccactgcctacagaagaaattccaacaccctcacctaccccacccctgactggcatccaggccccactccatctgctctcatctaattccaaagaccttatcctccaa

SEQ ID NO: 204124 - DNA, 425 bp, Homo sapiens
ttccagctctaaaattcaaaacctttatttttatttctttatttatttaaattaaattgtccttatctaaatggtagaaagaattctcactgaaggaactaaccactagatctttacgttttgtctcaggttttctgttgttgttttatcaacttaaaaatttccaacatgcaaagtagaggtctgaggcaaagttctgatttctatggaatgatatccgagatttgagttcatggagattagaagcgttaatggaaagaggttaataacaacctcaagtcacattcacagtttcagaaacttatagaaaagggtgaaaggggccatgtgtggtggcttatgactgtaatcccagcactttgggaggctgaggcgggtggatcccctgaagtcaggagttcgaaaccagcctggctgatatggtg

SEQ ID NO: 204125 - DNA, 447 bp, Homo sapiens
ctgcttggagtgcctcaccgagccagctaacaacggcgtgcgtgagcacagggaaaggcttcttgagaaatgaaaactaggttgtaaggtttaggaggggaataggaaggttagctctgtccagccgaaagccttttggtaagttgggggtccttgaaattcctgggtgactgcatcttggtgacttctctgaatagaccttcgagggcactggggggtgattgttggagggcttggggagctcaggcagcacttgtgtgggaacgtggctgttacaggaactgcagaaactgggactgggttcctggggaaaggattgggggtgttggaggcgctggcaggggagttatggggaggcgttcttatcagtgtgcgaatagtgggcgttcaggcagcgggaaatccgggtccttgcgtgttgtgagctccctggagttacgttcttgc

SEQ ID NO: 204126 - DNA, 127 bp, Homo sapiens
tgggggagggatgcagtaggaagtgcaggtgccaggaccaacatctagccaggaagtactggtaagtggttagaagtggttagaagtaaattgcctggtgcggtggctcgtgcccataatcccagca

SEQ ID NO: 204127 - DNA, 1258 bp, Homo sapiens
ctttaagacagagtgctaagcttaaatgtgaggagatatttagcagcggaagcatcatgaatgttttccctttaagtctgtggcacatttctctgaatatcctcagtaatggccagttgttttcctcttgagggtaggtttgaattttgaaaaccattagaagtcattatcttgcctggtgaataaaaatgagttagcagggtatttaaaagtcctcagcagtccagcgctaatttacttttttcctagatttacttgcttttgccagaaccttcaagaacatttatgccctttggcttttgatgttcatctgtttttttctcttcctcctcttaccaaaattttacttattcttcaggcacaacgcagattttctttcctttgtgaaattctcctgaatttttaacttggtttacttcctcttcattgttaacctatcactgtttatatacccttttttagagtatatttaacgcaaccaccttgtgctttggtctgtgtagtctagaatgtgagcagtttaagcagaaggatagtagcatattcatctttatgtttctgaacaggaccacagtgtagtaagagttcagtgacattaatttaaatgaaatcaatctatcagtgatgttaggttaaaatgaggcaaaactgtaaaacagtgagaccagatttcttacatgacgcttatgccagttacagatgagatacttcacagattctgaataatggcagtattgaatgtatactttcccatgatgaattaaagaagaaaatactgtctagatgtagtgtgtgatttttaaaataagtttaaaaattagccaaaatactggcatggctctgtttagtaggattacagaagcactttgttttaaacttctttgtactttttgtgatttccaagttttctgataagacatgaattgcttttagaatttaaaaaatcctattgataaaatttaagtcagttttattactctgtgatcatgtggggatcataatataacatgatacattagaagcctttttacttgtagttttccttgttacttagtagtagtaagattatatatcacagatggatacattttggcttcaacaaatatggtttcatttattgagtaactgccataggtggagcactgtgctgtaatgatagcacatttttgatagaattggaacccaagatatgtatttgatcttatgatctattattcttgtttgttttaaatttaacaatttaattgggcaaaaaaaa

SEQ ID NO: 204128 - DNA, 286 bp, Homo sapiens
gcagaaactgaaaaccagtttttagagactctttaacatcactcgctcttttagaagtggctccgaacagaggggtctcctcacccttgttgttgaggtactgagctgagggtggcattgagcccctccaggacttgagttctcattggccccactaaagtcatccagccgccaggcacgagcagatcgtggtgcctatttgcccacattcctgccctgtgtgacacaaggagaacttgctggagccctttcatacatgtagctaaataattcttagtgcttaagt

SEQ ID NO: 204129 - DNA, 981 bp, Homo sapiens
ggttagttgtgcctgttgtataggtagggtggaaatactatataatgctgccctattgtatgtcttttctcaactccatgttctcttggtagcatgaaattgggttatggtggcagtatttacaccactacatatcagagtgtgatttatgattttgttgagtgtgatggagaaaatgttaacgatgcagattaaacttaaaagtgtgtcatgtccatagcccttacattgtgaatagtccccatacatgagaaaatattcctccagtatttgaaaactattatttgattcagcaaagaagttgctttcatcactgactagcaagtgacattctcacatatatctttgttgtttaactttcctcttacttctaacataaatgaaaatctcaaccaatatttataccaaaactatacatgctcatcagttgcaaccctaggttggctttgtgtacaagagtttggcaaaaatcaaagcattctttgagaactaatgatgtacaaagagtatataataaagagtaatctatagtttattatcatttgtaaattgtgtgctacacattctttacatccgtaaaattgaaataaactatgtacatacaaaaaaaaaaaaaaagaaaaaaaaaaaaaaaaacaaacaaaaaacaaacaaaaaaaaaaaacaagggggagaacacaaagaaggaaaacccagagaagaagagacacaaaaaaaaacaaagacaaaaaatagagcaccacaacccacaaaaagcaacgcaaaaacgacacagaaacaaacaaaacacaccagcaaaaacacaacaaacagaaaaacaaagcaaggcacaaaaaaacacagaaagccaaataacaacaaacaaacgcaaaaagaaaccagacagaaaacgaagaaaaaaaagccgagaacacatacacgcagaaagaagaaacaacaaccgagaggaagcaaacaagagagggacaacacaacaacaca

SEQ ID NO: 204130 - DNA, 214 bp, Homo sapiens
cccccagggccctggcaaaggccgggcacccagcccaggagactccacaaagggttaaggggcgcaggcggctgtgcccacagtggggcggagcagccgggctggtgctgggccaggagcacgggcgaaggcgctgcattttaatgaatcgttattgccggcgaggcctttgtctttctttatccggtgcacaataaaagaattaattagacag

SEQ ID NO: 204131 - DNA, 283 bp, Homo sapiens
atacgtgaaatgctctttgagaggctctttgaaataaaaaacatttttctaaatacagaaaatagattgctaagaaagaaaattttggattagattgagtactgtattatatattatggaatgtatttagtactgacctattaaaaaatcaggtcagatttgaaaacaaaaacatctcttaaaatgcttatgtttaataagaaattggcactttatcaaacttatgaatctgctttcattagaaaatggtttcatgttttctaatcctttgaatatgtaggtt

SEQ ID NO: 204132 - DNA, 605 bp, Homo sapiens
ccaacaccacacttggctaatttttgtacttttagtagagatggggttttgtcacgttggctaggctggtcttgaactcctgatctcaagtgatctgccaccttggcctcctaaaatgctgggattatagatgtgagccactgcgcccagcccccagttcttacatagacaccatataagtggcaggcagaataatagcacgccctaaatgtccacatcctcatctccggaacctgtagatgtgttgtcttacacagtaaaagggactttacagttgtgattacagtccgggtcttgatatggggagatgatcctagattatccaggtgggacgaatgtaaccacaggtgtccttatcagtaaaagcaagcggcaggaaaatcagtcagagccagagagagagagactggaagatgctccgcagctggcttgaaggatgaaggatagggttacatgccaagaacaggaggcaacttctagaggctggaaaaggcagggaaggattctctcctagatggtccagacagctctgctgacaacttgattttagcccactgaaacccatttcagatttcatcgagaataaaattgtgttgttttaagcc

SEQ ID NO: 204133 - DNA, 519 bp, Homo sapiens
aagcagttaatacagactcatctacctcatgctgaagtattttatctagcacttaagactaatatggttgaaccacatccctttatggctctgggtttatgatgtacactaatgtgtcataaaaccataatgtacatttggtgaccacaatcatcttatcaaagagctctgttggaagtgaggctgatgcatgagcttccataccttaagctctgttttccaagttggtggttgtatgattatatatagaagcgtcatggtcatatttgcccttgctccccttctacccactacgtgtaccagttaggagtttatttaatgggtgtcgtatgattttcttgtctggtttacctcttgatggtccacatttcataaatcatatctcctcatatatacaggaaagcatatgttgaaatcactgaaattacataacttgctcccctttgaatcagtttccttcttatcactttgaacatgctcatttcaggcatctctacgctacggagtgtgccctacaaa

SEQ ID NO: 204134 - DNA, 466 bp, Homo sapiens
gtgtccatctgtcctggactacaaaagatttgcagaacctgcctggagacacgtctttgtattaactattgcaattcacaccttctctgttgaagggcttggagcctccttgtgctaatgtggcagcctttctgcctcctgtgggtaaggactgcagtgaaatcagatcaccgtgactgaacgcagttctgagccagctgtcgacttacactgctcagttctgttttttcttcctggccttctcacgcccaggccctgagcccagtggatttcaccatgctgggttgctcataaaaaatggtttcttcctgatgcttttggtggcagactgaatatcatcaatcatgctgcaagaaggaaacacagattcccagctgatggcattgtcatgtttatgacacatccgaaacagtaacagatggtctgtattaaaagtgtaactggtgagtgagtgctttcataatca

SEQ ID NO: 204135 - DNA, 522 bp, Homo sapiens
cggcgaggaataaattgctccccacccagctgcggtgcgacgcccccagcgtcccaggggagccggtgcgtcagctcacggctggccaaggcggggccgtacaaaagctagcgccgcgggacccccttcatgggcttctaccctagcagactgagcgctggaggccgctccacgcgcgagctcgaaccacggagggctctcagctcggacaagcgtcgctgtctaagagctccaagctccacggaactttgattttatgcccgggagcccggtcatccacttctgcatctcagacaagcgccggaggctcgtgcagcttcctcgcgtcctcttcctggacgcggggcgcccaccttagtcatagcccctggtcccggcactgctcacgccgtcggtttccccactgcccaggctccctcagcccgaaccctgcgtctctgttcacattggaacaccccctcacctcatctcagcttgcttttaccgaggtgtgtgtgtgtgtgtgtgtgtgtgtgtgtgtgt

SEQ ID NO: 204136 - DNA, 501 bp, Homo sapiens
gtatttttcacttgctatttttactgttaaaaatttattgaagtattttaaaaattcattcaagtgtttattcagcaaacctgttttttgtgtctttggcatgtgaagggcattgtgtgaaaccatgctaacaaacaggaccaggactgtatcgcccctttcagatctgcagctaaatgattactgtacagtgtggtaagtttaagtgatgtagttatttctcatgtattgtggaagcacagaagagaacttaaacgaaccccagggagtagagatactgggtcagggaaagtttcttggaggagataatgtctgaactaaagtgtttaaggatgaatagatgtttttccgggcaagggcataatgaaagatttttccaggcagtcagtaagacatgagcagagacctagaggtgagatgttgcatgatgtgcttgagaaacagaagcagttctgtggattgtcaagtgagttgtaagaaatgacctgaaaaaaagaagaa

SEQ ID NO: 204137 - DNA, 347 bp, Homo sapiens
atcaatgtattgtttcatggggaatctctgggagatgcaatagtaaaaattattgattttattaaacttcagctgttgagtaaacacttttaaaatattctacgtcatgaaattgggaagtatgcacaaagcatttctggtcaaattgaaatagaatggtttccttgagaaaaaacacgtgtacaactatttgtgttacaagtcaaaccagcagcttttttcttgaaatgccattgttacttgacagaagcagcaaagtatgcttattcagactaaggtatctggcagacattttctcaaaaatgaatgaagtgagcctgtcactgcaaggaaaactgacagtattt

SEQ ID NO: 204138 - DNA, 204 bp, Homo sapiens
tctgcatgtcagtggggctcaatcaataacaatataaagagaatgaatttaataaatctaaatggatgatgctctaattttggatataactaatggaaaatgtaaatgacagcttaaacttccacattgtttattaaacatgtgataaatatagccttttccctgcatagtactcctgaggaatcttctcatctggagactcat

SEQ ID NO: 204139 - DNA, 355 bp, Homo sapiens
ttttcagcatctcaacatagttagtaatattatagcaattattttatgaagatctaaaacatacagggagatctggcatgcaacattattacacaggttatctattggtgtaatacaccacattaacagattaaggaagggaaaaataatgatcacatcaacagatgatgaaacaattcttattcatgtcaaacaaaatctttgcacacttaggataaaaggggattttgtaatcctcatgcaatcttatatttagtgataaaacactggaagacttcaaaatttgagactgggcaggaatgctcattatcactgcttcggtacatcctatgagatcttcaatacaaaaaggcaa

SEQ ID NO: 204140 - DNA, 507 bp, Homo sapiens
cctaggaatggagttgctaggttgaagtaaattgtatctctaagaagtttgaccacttacaatcccactagcagtatttgagaccatcttagactatgttctctctaacacttggacttgctatacactataattctaataatttgaccacagattcttttgagttttgtacattcacaataatactatgcatgaataaggacaattttgtttcttctttcttttttaattattttgcttgctctccctacctcatcttttttgcttgttttattacatttattacaatcaccaatacaaatgccagtggagtaaaccttggtttgtttctgttcttgaaaaaaatgctttgattattcatcactaagtaggacattggctatagactttttgaaaacctgaatggatattgaattttatcagttgattttctgtatctattgagagaatcatgtgttttgttccttttatcttttaaagtaataaattatattgctatattttata

SEQ ID NO: 204141 - DNA, 172 bp, Homo sapiens
atggctgaaggtagaagggcaagacagcatgagagtgaaagtgcaagagcaggaggaggctcaactcacttttgttgttgttgttgtttgttcattttgaggaagggtttttctctatcacccaggctagagtgcagtgacatgatctcggctcactgcaagctctgtctcc

SEQ ID NO: 204142 - DNA, 309 bp, Homo sapiens
acagtggcaagccctgtgaacataactgtggaatattagatgggcattgggcatttatagaaaagaaagaaaccaattgtgttgcagtctctctgagaggcattcatggatcattctcatggatcattcaacatatgaggtggcaacaggttaaaaaagggggagtccctttcccttctttataacgtcccataaagcagaagaacttttcttcattgcatgattttagttcaccatggtgatatactcaaaagaatggaacaaatttattgcgagaaaggcaaatgaagataaaactttggagaaact

SEQ ID NO: 204143 - DNA, 986 bp, Homo sapiens
aactaaggatcaactgtgtagtcagtagtgggatttcagtcatgaagatttgacgatttctctaagacgcccactaatgccagcagaagcatgtgagagatcaaataccctaggaaagaaaaccctctccctggtaagaggggaagaagctgggttactatgtattcctaaaaccttaagaacaaaggaatatcagaacaatcatattttaaccagaacagggtggtaaggactaatcacacacataacgttggtcttatactgtgaccgccctccctggtgagacacagtaaaatttaggggtcaataaagtcattttattctttctttttgttaccttctattttctttttcttcccaaggtgtgtacttcagggtttaggacctaataaattagcagaggtgtacgtgccaacactcttcgttgccatctttctatctttgacaatagtaagtttgaaacttactttacagaaacctggtcctaaatataaaaaatactaagcagtttcagcttgtggaagacagaattatacttggtttttaccaatttactatgtggcatatgacaagaaactttacctagaataatactgaatccctgggatttttttatttgagacagagcatcactctgtcacacaggctagagtgcaatggtacaatctcggctcactgcagcctccacttcccccagttctcgtgcctcagcgtcccgagtagctgaggcacaagaatcgcttgagcccgggaggcagaggttgcagtgaggcaaggttacgccactgcactccagcctaggtgacagagtaaaactatctgaaaaataaaaataaaacagcacttgtcaaacattagtgttcataaaagttacctggagttcatcagcaaaaattcccctcatgactcggaaggggactgagaatctgcatttctttctacccagctcccaagtgatgctgacagtgaccctgatgcttttaaca

SEQ ID NO: 204144 - DNA, 655 bp, Homo sapiens
atattgatatctttctctaggtttgggaagttctctgttattatctctttaaaaatctttgtattttgatctttctttctacctcctctaggattttccttagattttccttctctatagttcatgtatacagcatgtaatgaaatacgcatatattctagtgtgctactagtagtggctgccacttaataaataagggattgaagaatagtggcttagagttggagagacagtatttagccatggaaaatttaagaaccacttaggactggttagggtttagagtcagcagttacagagcaatattaaaagagggtttgattctaagttatgattctaagttagaaatgaaagacaaccttgggccaggcaagtgaacttgctttctaagccaactccagttccttgaaaagttaaacatagagttactatatgacccaaaaagcccatttctaggaatgtacccaagaaaagtgcaactatgtaaactatacactaaaacctatgtatgaatattcatagcattattcataatggccctaaagtagaaaccacccagatggccatttagccaactgaccatttttatttttatttaatcattcatgtttatttctccacctaaaatttgtgttcctactgtgcataaggcact

SEQ ID NO: 204145 - DNA, 365 bp, Homo sapiens
catgaggggggaagttataccattatattagaaaggactcaaagcccttcccaaagcacagttttagaagagtagaataaatacatagaaaacactcgaagaaagcatttaagattattcataatgaatatctttggccaataaaattctgagtaattactaatttattatacttctcaatgtatcgcaatttttataaatatatacatcttttatgaggaaaaaaatggtccaagaaattcagcttccatcttaacattaaaaaatccctttcatgaactgtaactaggggccacaatgagtaaccactaagtacttccaattttttaaactccaacagagttaaaaagttcatgacaatggac

SEQ ID NO: 204146 - DNA, 269 bp, Homo sapiens
cacccagccaattataattcttcatactactactatgtatattctgtgaaactctcaaaaacattcttaaatgaacacatactttagcattcttctaatttacaaaaatagaattattccatcacaacaaacaagctgtaccagtttggcatgacattctcagtggctctgtgctggttcctactttctttttctaagtattctgctattcttttctaactgtcctacccattcctctaaatgactgtaggtgagaagtgtgagctggg

SEQ ID NO: 204147 - DNA, 591 bp, Homo sapiens
tctgtgtccccacccaaatctcatgttgaactgtaatccccagtgtggtaggtggggtctggagggaggtgactggattaggagggtggatttctcatgaatggtttagtactatctccttggtactcctcatgatagcaggtgagctctcacaagatctggttgtttaaaagtgtgtggtatctcccccctcactctcttgttcctgctttcactgtgtgacatgcctgctcccgcttcacaatctgccagtaaattgtggcaggttatgagtgtgtgtaatttatgagtgctgataggatgaaagatagaaaatgattttagatagaaagaaaatcattctggaagctttgagtcttccttttgtaatctatgttggttcttttttaacatcccctgtttcagcacttactgacctggagtctgtctcacaatgactaaatgtaatataagattctaggatgtacactagaacagaaaatggaaactaaataaaaactgaggaattctgaacaagtatggtctttagataataataatatgacaatattgatgccttaattgtaatgaatgcaccacactaatataaaa

SEQ ID NO: 204148 - DNA, 610 bp, Homo sapiens
taaatcagcatcagttctataattatcattagcaagtttgcatcagtggctcacatcacttgaaaagctcaacttaaatgatttgtgaatgtactcatctgatacattgaacactctccatagatacaaacaggtgcttgcatattgctttatgtaaaatggaaagtctgcacatgcatattgtatgaaatacattttcaattcaatattaaaatattatttccatacttgaaatattaagctatatagagacacccaagatacctgtgctttaaaagctcagttggggtgagcagtgtaaggaaatagaaaactattactcatacttaaggctagacctgatgtcttcctcattttcagaatgttcaaataggaatctggcaaggatgattgacaggaagaagtatccaaatgcaattcatctgtattttcattgtttctattcttgaattattgatattgccagtagtcgtttgccatgaaaacaaatcaaaatacgtatggtaagcacttacttgaatgcaacacttttacatgttaaaaaatatttacagtacaccatgcttataatttaacaaaatggcaaactggtagggagaataactatagc

SEQ ID NO: 204149 - DNA, 429 bp, Homo sapiens
tttgaaatgctgaggatctgtttacacaggccaactccttacgaaagggtgttggatgaggagccctcagtgtcttgtaaattaagggatcaactggagtttgtccagccttcctagctggagagagtcttatttacatgagaagcaaggctaggtgattaaagagacaagcaggataaaattcaaagtaacgagttaaagtaaaaacaaggttaggcatttcagttacaagaaggttcctgggctacaccccgaccctagagtttcttattgagggcctgaagtggacctgagaatgtgcatttctaacaaattcccagatgatgctgatgctgctggtctaggaaccacactttgagaatctctgtgctaggctgtattagtctcttctcacgctgctaataaagacatacctgagtctaagtaatt

SEQ ID NO: 204150 - DNA, 441 bp, Homo sapiens
ataatagaggacttaccaaattgggtgcagccactcatactgtgtcttgatttgtagataaagaaaatgatgaccctccctaggtactgatttagagtgacatttctgtgaaaatagagaaatacttacatatccatagaacacatatatgcatttaaaattgtatatgagcatgacatatacatacatatttgtgtgcatgacacctgcatccttgtatgtttaaatacgatctggcaattgcattctttggtatatacccaaatatttgaaaacttatatccactcaaatcctgcacatgaatgttatagcagcttatacacaactgacaaagattggaagtaaccaagatatcctgcaatagagaagtggataaactaactctgaaacattcatacaatggaatattcttcaggaataaaaagagatgaactaccaag

SEQ ID NO: 204151 - DNA, 821 bp, Homo sapiens
caacaatgtcccccaccttgggaacatcattggttgtgtgctcagtgccgatgtctttgccaggtactctcgcctccgccagtggaacaccctctatctgtgtgggacagatgagtatggtacagcaacagagaccaaggctctggaggagggactaaccccccaggagatctgcgacaagtaccacatcatccatgctgacatctaccgctggtttaacatttcgtttgatatttttggtcgcaccaccactccacagcagaccaaaatcacccaggacattttccagcagttgctgaaacgaggtttgtgctgcaagatactgtggagcaactgcgatgtgagcactgtgctcgcttcctggctgaccgcttcgtggagggcgtgtgtcccttctgtggctatgaggaggctcggggtgaccagtgtgacaagtgtggcaagctcatcaatgctgtcgagcttaagaagcctcagtgtaaagtctgccgatcatgccctgtggtgcagtcgagccagcacctgttcctggacctgcctaaagctggagaagcgacttggaggcacgtggtcggggaggacattgcctggcagtgacctgtaccacccaaatgcccaagttttaatcgacccggttcttgggtcttcgaggatgtggccgtcaaaggccaacgcctggattaaccccgagaccttcaaatgggggaacccctgtgttaacccctttagacaggtcttggacagaacaggttattcctaatggtcctggttgatgccataatggcttatttggcccatccaacggcaatatcccggaacat

SEQ ID NO: 204152 - DNA, 120 bp, Homo sapiens
atgggatatcacccaaaagcaaaaagaactgaagggaaaaaaaaaccctaaacaattttctgtcattatatcattgatggtggagttggtagtctaacacgggtgttctaatatgtatta

SEQ ID NO: 204153 - DNA, 457 bp, Homo sapiens
atgcaattaaggcagagaagaaataagatggaaaatggggagaaataaacagattcttttccattaagtattgttttgagatttctaattttttcaggacctctaagaaaattgtgaggtgtcacttctctcttctgggtctatctgtaattgaatctaggtcactattctaaggcaagaaaagtctgctttccactttcctacatcaggctgaaatttgggggagggacaagggtcttgcaatttcatttaaaatgtaatggtggatgaactgataagcaaatacggaaaaaagagtctgcttaaaagaaaaaaaaggcatggttttaatatgctacagatggggggaaaatgatttacatgagagtttatttcctctttgctgatatgaaagaattacagatacaaaacccactgatctatagaataaaaaaagaaaagaaatgttattttcctg

SEQ ID NO: 204154 - DNA, 440 bp, Homo sapiens
gacacagagtctctctttgtcacccaggtgggagtgcagtggcatgactgtagcttactgcagccttgacctcctgggatcaagtgatcctcccaccgcagcttctcaagtagctggaactacaggtgcatgccaccatgcctggctaatttttcgtggtttttatagaggtggggttttgccctgttgtccaggcttgtcttaaattcctgaactcaagccatctgcctgcctcagcctcccaaagtgctaggattacagacatgatccactgcacccggcctgaaaacattctattgtgaaaattgtaatctagtaaaaatgaaagaggctcaacgcctgtaatcccaacactttgggaggccgaggtggggttggattgcttgagcccaggaattcaagaccagcctgggcaacatggtaaaccctatttctaccaa

SEQ ID NO: 204155 - DNA, 504 bp, Homo sapiens
atgtttggtaagaatggtaaaaccccagtgttaaatccagtatgcaaggaacataaatgtttactataggctttttatggatgagaaagaaatactgaatttacaggtcttccatgaaaatcaatcccctttcttcacacaattatactttataggtttcattttatccgtgatatcattaaatctaccagtatagggaaaggttttaactaggttacatacatacatgcacacgtttgcatgcatatatatttatgtatataaaagttgtagtttgattcatctgcaagtgacagaaaaaatatggcataaaaaaaaagtttatttctcagtcatgtaaatgaagtccagagccagatggtggaactctgtaaggctccagcatgtcagagatgtaggattgaactttcatctcatggtcaaagatggctgcttaatctccagccatcacatctgcattccaaacagtaggaaggcaaggggcaaacaagagtgtgtgtttct

SEQ ID NO: 204156 - DNA, 402 bp, Homo sapiens
aattcaaaatcccatgcctaccctaaaatggacatttctccggcagatctgagactgaggctatttgttcattcattcaacaaatatttattgagcacctactagaaaccagaatttgtgctagggactggagctgtaagggaaacaagattccagggccctgtccttatggagattacattcttgtacactgtaatgcaagtggtgagcacagcttccatcttgtcacagtggtgagcacaacctacttctctgaccattggacaaaaaattgcactccccacttaccttgtcttattttatatttctttgttgctgatctttcagtctttgcatgcaaaaatgtatcctctttgagggtgctttatgatgttcattgctgaatcccaagcacctagaacc

SEQ ID NO: 204157 - DNA, 284 bp, Homo sapiens
ggctcggctcctgattgagaagagacgagatggaggactcctcctatgataatcatctcgagggcgacgaccccgagagggaggtgggccacgatttctagagaagagacgagatacaaggagaagagacgagatgaggtcagcctggtggaatattcctggggtagaatcagccacttacaagagagtctccacttgcctttcttgccaatactggtagccacttgcatttattctttcccttcttctcatccttctctgtgtcctgccttttctattcatct

SEQ ID NO: 204158 - DNA, 539 bp, Homo sapiens
tagtgcccatcagtagatatatggataaagaatatgtggtacatttacacattcgaatactatttggccattaaaaaaaatgaaatcccgtcatcagcaacatggatggaactggaggacattatgttaagtaaaacaaatcaggcacagaaagacaaatactgcatgatctcactcatacgtgggagctaagaacatgcatctcatggaggtagaaagttgattgctggttaccagaagctgggaagagtggtggggaaaggaggagatgaagttgattaatgggtacaaaaatatgcttagaagaaatggtaacatctagtattggttagaaaagtagggtgactgtagttaacaataattagttgtattgctggaggagaggaattggaatgatctcgacctaaagagggtgtgaatatgatgacggatgtcccagttgccctggtttgattgttaagcctatgcgtatatcaaaatatttgtaccccccaaatatgtacaactattacgtactactaataaaaaagcatattgct

SEQ ID NO: 204159 - DNA, 333 bp, Homo sapiens
ggtttgagaggaggaggctttaagttcatgtggtaatgctgcattctggagtcaagttgaaatgactttggagcccaagtatttcagaaaatctgtacctctactcttccctagggcattactgtttcagaatcaacagtatactgagaacctgtttaaaatattcttaaatactcttcatttttacaaatgagataatattgcttatttagaaatattattaacttttctctatatgttgtggctatttatttatttatttgtttttgagagagtctcactctgctgcttaggctagaatatagtggcacaatcttcgctcactacaacttc

SEQ ID NO: 204160 - DNA, 507 bp, Homo sapiens
gggtcggggtgggggcgaagggccgcttggcctctgtagggtcgggactggaagggtgtgccctcgccgtcctcgccttcgtcttgcacgggacaagatgtcacgattccgaatccaaacctcagagacagcccccatccctctcgttagccacccacacaccccgctcagcaacaataacaacctgcatttagggaacgtgtgttatgtgccaggccacacaggcattatctcatgtactcctcacaggcaccttatcaaggagatgctgttgttacctgcattttacagatggggaaactgaggctcaatgcattaaggactgccaggaagccctgtcctgtggctgtgatgatggaaatgttccctgtgttgttcagtatggtagtcactggccacaagtgagcactggaaatgtgcctattgagactgaggaactgattttttcattttgtttaattgtaattaaacagttacgtgtggctgtggtattggacaatgcaggtc

SEQ ID NO: 204161 - DNA, 502 bp, Homo sapiens
cacccaaaactgctctcatgttctaaaggtgactgtgtggggtttgaaccttggcgcccactggacagtggtgagcactcaccaccctgaggcctggcagcctgtctgtcactggagagcgttcagcactgacactgacattagcagatcacagagcttttcagcccacgtatgtatctctgtgaggcaggacaaggcctgcttgtcagtgagccattgaggtttgcagcatgcagtgcaagccagtattctggcctaggtactgaggaaaccacagaatggggatgtcagccccagggagactaactcctagtgagggcttccagacccacaggctacctccagtcctgttcagctaaatcaaacagactgcagaattcttccaattatgctttacaacttgtattaattgtaaatatgctctgtataaatattaaaattgctaattactattttaggaagacttaagacctaattagagcaagattttaagaaacagaaa

SEQ ID NO: 204162 - DNA, 263 bp, Homo sapiens
gtttcaaaggtcaacactccaatgaagagcttcctcagctgttcaggctttttaggagactctgacttagacaggacggcagtgagaagagagaatctaacggtgcttcttcaatggcatttacaggcagaaaggttaatttttgtatttttagtagagatggaatttcaccatattggccaggctggtcttgaactcctgacctcaagtgatctgcccgcctcagtctcccaaagtgctgggattacaggggtgagctaccg

SEQ ID NO: 204163 - DNA, 588 bp, Homo sapiens
agcacttttcccaccctcagccctgaggtgaccccagaaggggaaatggtgacccaagtccagctgctggcctgtctgtctgtgctttccagcccaagaactgattccctctctgagaaaattggaaaggctcctggaggctgctgagaagctttgatgtagaggtagcaattgaacagattgtcctttagaagcagccaaatttcattttccagattgaaagacagacttccaagaaaatttttctttttaatgttttgttctagcatccaaaaaagacccaacttcagatccgggcttcagagtttctcagggctattcttgtctaggtggagggtggttggcccattctcagatggcatgtgtcttaatagctgtatggctggccaggccagccttcagctccctcctgctgggctctgagaggaagtcgacttgacagctgctaggcacctcccagtaagctcaccaaagtattttggtgtcactttgtgacagacttggattcaaactgcagccctgccactagcttgttaatattgtggctgcccacacgttacttagtttgagtctgtttcctcatctcta

SEQ ID NO: 204164 - DNA, 462 bp, Homo sapiens
gttagcaggtgacacaaccaagattcagacccaggttcttcgtctaccctaacagtattgccaaagagagattccaaagttaccgcctggccactgggtaaacctccgcagcagagagacctactttatgtttcattttcaagctcctatggagcccagcagagagagctgacaaggaggaatactgcgaggggctcacagactaagacaatctgctgggaaattaggagtttgaaacatccaactaagaagcctaaggtttagactgcatcatattctaataacaacaggattataatatcaaatgagactctctgaccctgcaaatctggaaccagctgtatagggactttgaacctcccttttctccaatctgctggtgtttgtcatcctaatatatacctcatattttctttctgaaaataatttttaaaatatacccatcatacatacggcagcaca

SEQ ID NO: 204165 - DNA, 601 bp, Homo sapiens
gtgcgcggcgatttagaggatcccacgacaccctcctctttcctggcaccctaacatcctctcttgccacatcactcaggccccagacccagctattgccaagctctggcctccaaggaagttaaataacaataataaaaacagtaacaatgaccagcaaggaccccagtttctccacttgctagttgtgtgatcttgaagaacctgaacttctccgagccttagtttgctcatctattaaaatgagggcagtaattctacttgccttgtagagatcttgggaaggttagatgtgaaagccatgagcaagggcttggtgcattccacagaggaggcacagtgttagttgacggaaagaaagaggagggtggtcgtgggatcctctagatcaaccccagcaactgaatacaaccagacgtgtcagcttcatttttatagatgaggaaatcgaggcccagtctctggggtgaagagattctcaaagtcacacaccagcaggcacagtcacaaagccaagtgtgcccccaggtctccttccatattccttccaggcccttgtgccttcacctgttcctgtgtctgtcctggatgcacgttgtct

SEQ ID NO: 204166 - DNA, 597 bp, Homo sapiens
aaatcagtatcttcttacttacagaagtgagtagtaggaaacactactgcaaacttttgtcaaaggatatttatcctttgagccaaagcaccctgttttcatagttctgcttcctaatgtggttttctgagacctgtttgatcatttcctttttaactagaaatctaacaaagtctgcaaattacttgggatcagaaggatggctataattgagatttaaaaagtaaactcaattacaaagaattgtttggaatgtaaacttgagccttactgtcacctattggcggtcgtggttttgaagatgacccctctggagctggatgaaatttaaaactagaatcaggctcagttcagtcacctggacagacatttattgagcacctattgtgaaccagcaactatgcagaggatagaaacctgaataagaagcaatctttggccgggtgcggtggctcacgcctgtaatcccagctacacaggaggctgaggcaggagaatcacttgaatccagaaggcagatgttgcagtgagccaagatagtgccattgcactccagcctgggcaacaagagtgaaactgtctcaaaaaataaaaaaa

SEQ ID NO: 204167 - DNA, 479 bp, Homo sapiens
aaatcagtatcttcttacttacagaagtgagtagtaggaaacactactgcaaacttttgtcaaaggatatttatcctttgagccaaagcaccctgttttcatagttctgcttcctaatgtggttttctgagacctgtttgatcatttcctttttaactagaaatctaacaaagtctgcaaattacttgggatcagaaggatggctataattgagatttaaaaagtaaactcaattacaaagaattgtttggaatgtaaacttgagccttactgtcacctattggcggtcgtggttttgaagatgacccctctggagctggatgaaatttaaaactagaatcaggctcagttcagtcacctggacagacatttattgagcacctattgtgaaccagcaactatgcagaggatagaaacctgaataagaagcaatctttggccgggtgcggtggctcacgcctgtaatcccagcactttgg

SEQ ID NO: 204168 - DNA, 353 bp, Homo sapiens
aaaaatagatgctaaggtaacacaaaaaagatagaaatttaccataagattttataaggaaactaattttattttaataggtagctttaatttggtctctgtttaccaactggaccactgagctcaggacagagcccattaaagaagagggatgacaaagtctttgcaatttttagatcctaataatttaaatatgtgaaaagaagacacaattggaagggagaggacctagacctttaaaaatcaaggatttcactgaatcccaggtccccaagaagagtaaaatgccatgggaaccataatgtgcaacacttccacagtttactttgctacaaaggcatttttttcattgt

SEQ ID NO: 204169 - DNA, 440 bp, Homo sapiens
ggatgtcataatacaatcttttctgacttcagtaccatgctcagaaagatctagtacaccaagattaaaaaaagaatctacatatgttttcttctaatacttctgtgttgtagttgttcttatttctattaggaattttttggatgtaggaatgagggtaagggttcagtcttttttttactccaagagaccagtttctcctgcattattcttgaataactcatttattatctactaatgtgaaacttgtcctttgtcatatattagttttctacacacactctatgcctgctgatcatatgtacacacactcatgcacagtctcgtctaacatgcttatacgttctgcttgcatgtcttgttctaccctcatgtgtgtgctgctcacatgctatgcattctatgtttaacctttactaccttttgaattccaaaagctt

SEQ ID NO: 204170 - DNA, 185 bp, Homo sapiens
ttcccgcttgatccgcttatgatttaaaaaaaaaaaaaagtctgcagtaagtgtttttactgcaatatattggtggtatttccttaaaataaattactagcaatggaatcgataactcaaaggataatattgttttaaggccttgtgataaatattgtaaatttgccttttaggaaggttgtgcc

SEQ ID NO: 204171 - DNA, 400 bp, Homo sapiens
accctgcttcttactagcttcatataggcaaatctcagctgccctgtgcttttattttcttatcttaaaatggagcacttgaacttggtcataactaaaatacactaatttctaaatttcttaatttcagaaattccacagcctatcttcccccatgacatcagttaacaaagttcctcccagactattcatccaaagtagaaacttagatctttatgatgatcttcacggttccacatggactgcctgcttcccacttcccccttctacttggcttcctactgctctccaggtcactctgacctcttcatatttcctcatacccactaggtaccctccaaaacagcctttgcaccaactggaatgctttctctctctagataactgtatggcttgcttt

SEQ ID NO: 204172 - DNA, 578 bp, Homo sapiens
tgagtagaactgatgtatgagaccctttaagaccattatccaactgcagtttgcttggcagagttagcattaatgcaccctttgatctaggcacctggaggcaggtaagacaggctctgcgtgcaccaccgtccctggacctgttgtggcggactccttgaagcaagatcaacttgggctttgtttgagtttttaaagtcttttttttttaatgtaaaatttgtcattttaactttttaagtatacagttcagtggcattaagtttatttgcatttttgtgcagctttcaccacttccatctcccaaactttttcatcatcccaaactgaaactgtacttattaaacagtaactccccttcctcaagacctggcaatcaccattcatcttcatttctataaatttgactattctagacatacgtgtaagtgggagcatacaatatttggtttttttagaggggggttctggcttaattttataaggtgttaacttgttcctcaaaatgtgttctataaactggcagcatttgcatatcttggaacttgcttgaaatacagaatgtccagatctactga

SEQ ID NO: 204173 - DNA, 612 bp, Homo sapiens
atttgagacaacacatgtgaaatgttgccaaccaaggaagcttatagggactctgcccagggcttttattgggtgctgaacacataggtatactctgccagacatataccaaaatgccagactcccagaaggaaagcaagtgttcatcataaactatattgtttgcacaaacagtttaggcataatgagctactcttatcagttctgggaataatggtaacccttctcaaacccaagtttctagttgccaaccttgtaagcaggcctctcaaacagtagcagtcctgctgtgttaacctttctctgaatatataactttgttttttaagatattcatgtctcaaattcacttctggagtttactgctagatatgtaaggggacctctataaacagggaaacttcccacctcctggtggtggatctccgatgtgaaagttttctttgaaatttttatggctgatttcaggacctcttcagtttttacagccttttccagcttacagttagacagaggaattaacaattactaatgttctgttccacgccagaccttgtgcagacatttcagaaagtatctgtcatttaatttcattcaccctaaagcatagat

SEQ ID NO: 204174 - DNA, 724 bp, Homo sapiens
ggtccacggcttcattcttgaagtcagtgagaccaagaacccaccaattccggacacagtgtcaggcgcctgtagtcccagctcctcgggaggctgaggcaggagaatggcgtcaacctgggaggcggagcttgcagtgagccgagatcacgccactgcactccagcctgggcgactgagcaagactccgtctcaaaagaacagcaacaacaacaacaacaacaaaccatagtcctttgtcagtctttagtctactacttctgacctattaacagctcctggccttccatttctagttatcccagaaggacatactggaacaccttgcaggttacacactttgatggcactaactgcatgttagaattgtgtggcaaagaactgaaggcatcagtccaaaagcccaaagaactaaataccgccaacaaccccatgaacttggaagtgggtcctttcccagtgagctctggagatgacaaaagacagacaacaccttgattgtagtctgtgagaaaacctgaagcagaagacccagctaacttgtgctcagattcctgaccaatacaaattgtgagacaaatgtgtaattttttaagccaagtttttgataatgtaatatgaagtgatagataactaatacaaaatagagaactggatacatatgttcacgagctattctggcataaaaatacattcaataaaaaacttgttgctactctgtaaa

SEQ ID NO: 204175 - DNA, 454 bp, Homo sapiens
  misc_feature (42)..(42): n is a, c, g, or t
  misc_feature (55)..(55): n is a, c, g, or t
tataagtctttataagcggtctaaggcccaaaggacagaagnaccaaagcaaaanttttggttacacactttgatggcactaactgcatgttagaattgtgtggcaaagaactgaaggcatcagtccaaaagcccaaagaactaaataccgccaacaaccccatgaacttggaagtgggtcctttcccagtgagctctggagatgacaaaagacagacaacaccttgattgtagtctgtgagaaaacctgaagcagaagacccagctaacttgtgctcagattcctgaccaatacaaattgtgagacaaatgtgtaattttttaagccaagtttttgataatgtaatatgaagtgatagataactaatacaaaatagagaactggatacatatgttcacgagctattctggcataaaaatacattcaataaaaaacttgttgctactctgtaaa

SEQ ID NO: 204176 - DNA, 1072 bp, Homo sapiens
agccattgcaactggaggcccagcggaggaagggatcaagaagaggatgcagcccagagcccaggaccgagcatccaccggcctctggagatggcgtggtctccagttgcatcggggcttcagggcccatctgaagtgctgatcaaaccaggcagacacaccatgctggtgaaggcaggctttgtagatgcggggctgaattgagcagccacagaacctctgcagctctggggccagtggcagaacttctagaagtacctgtggggtgggaaaccccagccacaaaagcagtgagctgacttccaggcctgaggctttgcctgcaggcctcatctcagcccatgggacagattcctggtttttttagtttggccttggggtagatgataccttcagctgtccaccctgcaatacctcacctcctgccttctgacccagtactctgcagagcgggggaatggggccaggggacaggggcagggaagaggaagaagcaagagctgccagtgtgctccaaaccaagagagccctccacatgattctgggcacagctgaggaggagtgcaagctcaactctgctcaccacacttaagaagcaggcaagggaggatgaagggcaaaaacatggggtcctgaggcccttttactccctctaccctgctggaggtgaggatgagaggtgagacttcgttggactgtgctcctggccagttgatctcacccaactcattacatcagtagcctggtcacagggtggacactctgacctcttcttagcctttcattggcaatactaccagctctatatatgcccttatagggcctgaaccttggctcaggtggatgggcttggaggtaaaataattgaatgggtcaggggtaggaggagagatgagtctctgccaaggctgtgtgatgtgtcatctgagagagtgggtaacccctattcccagcacatggccatttatttagagccagggagggggacgagaattcatattcaaatgtgattctttcttaattactaccagttgttcaggtgagggaatcagggaaggccagattaataatc

SEQ ID NO: 204177 - DNA, 456 bp, Homo sapiens
tataccacagttgtttttccttagctcattgttaattctctaattagaaacattcttacttaaataattatttttctaataaaaaaggagagttatgtcttatttctcatttcaactataagaaaatatgttcttatcttggacccgttatctttaagctttttgatcatttcccttacgattctttctggtaagtgaatgagaatcatcacttagtagttctaattatgtcctaccaaagcagaaagaaccacatacatcaatagtcaaattggtagaaaattgagaacaccgaaatgcctttaacaagaatgatgtgaatataagtgacatgcattcgtttttttaaaatctagataaacttctgagttatttagtccaatattatttggaagggaaatggaactaatttttaacaaaacatattttatttgagctgctataaaaataaatttg

SEQ ID NO: 204178 - DNA, 261 bp, Homo sapiens
tctcccagatgagaataacatattaaaccagtgttaccaaaatgactatactgaacccagctttattggggtagaaaaacgataacgagtacaactgtgtagctcttgctctgccaccaccaccatcccatgccctccccattcactctcccctaatctgtgaactgctttcacatttcatagcctcaccttctaaaggtgggttttgaaacacagtacaatatttctccttatctaagatgagaacaattagagagcaac

SEQ ID NO: 204179 - DNA, 311 bp, Homo sapiens
tcctgggctcatgtgatctgcctgccacggcctcccaaagtgccgcacccggccagcttcctctttgaaactacactcactctcatggccaggtacagtggctcacacctgtaatcccagtgttttgggaggccaaggggggaggatcaagttgaaggctagcctgggcaacacaacaagacctcatctctacaaaaatgtaaattatacttgctctcttgacgacatcagtctcaagcaattttttttttttttttttgagacagtctcgctctgtcgtccaggctggagtgcagtagcgcgatctcggt

SEQ ID NO: 204180 - DNA, 483 bp, Homo sapiens
cgataactgcagggtacgctgctacaaatgacgtctgcgtttgacaaggatgagcagaaccggagcgtgtgcgtcaattcaaatctgtgacactggcgcaaaatgtgagaatgggctggggtgccaggcggccagtcacggctagggcacagttccaagaagggccacaggggcccgcagggacacttaccccaagccctccagaaacagctgctgcaggtcagcaccagcaccagggccaggcacacagtctcatcggcacgtctgccactggctgtctgcaaagtgcttccctttcacaacccacccacacagctcaggactgaggtccgcccaggcaaaggggcctctcggttccagaatcctttggcctgacaggcaactacagatactttcgtggactctgctgaaacctgtctgagactatggagctttacgtggctaaggaagagaaaaaatatgtttggagtccttgcccactga

SEQ ID NO: 204181 - DNA, 627 bp, Homo sapiens
attttattgacagggtctcgctctgcccccaggctggagtgcagtggagcaatctcagctcactgcagccttgagctcctgagctcaagcagtcctcccacctcagccttccaagtagctgagacaacagatgtgcaccacacctggctaatcttttttttttgtagagatggggtctcactatgtcgcctaggctagtcttgaactcctgggctcaagcgatcctcctgcctcagcctcccagagtgtgggattacaggcatgagccactccacccagccaacatccccatttttaaaaagcattggtgcagcgaatcacttgaggataggagttcaagaccagcctggccaacatggtgaaaccccatctctactaaaaatacaaaaaaattagctgggtatggtggcaggtgcctgtaatcccagctactcaggaggctgaagcaggagaattgcttgaactcgggaggcagaggttgcagtgagtcgagatcacaccactgcactccagcctgggcaacagagtggcactccatctcagaaaaaaaaaaaatttttttaataaaaagcactggtgcagtggtgaatctgtggtctccaagacaacccagacatgagagcactg

SEQ ID NO: 204182 - DNA, 513 bp, Homo sapiens
agtgagaccatttcttttgagttattacctgaatagaaagatgattacaagattagcatttcagggtatgaaagactttagaggttatgtttgactttgggtttagagtaagggaaattgggccacatgaatgttaactggtctactaagatatctcagccctagagctagtctagaatcctggtccagccaatagagaatcatgacttttgaactatgttccctgagtacccttttctactgttggccgggcatggtggctcacacctgtaatcccagttctttgagaggccgaggtgggcagatgacttgaggtcaggacaagaccagcctggccaacatggtaaaaccccatctctactaaaattagctgagtgtggaggtgcgtgcctgtggtcccagctactcaggaggctgagaatcacttgaacctgggagacggaggttggttgcagtgagtcaagatcacgccactgcactccagcctgggggacagagcaagactccgtctca

SEQ ID NO: 204183 - DNA, 201 bp, Homo sapiens
tttacattttgtgtctcacaatcagatggtcttcctcccttctttctctctggggtttttcaaatttaacaatttcaaggacatttatgtgaattacagttgaccactgaacaacatgggggttaggggcactgaccacatgtgcagttgaagatctacatctaacttttcactccccagaacttaaccactatgagctta

SEQ ID NO: 204184 - DNA, 507 bp, Homo sapiens
gaaatatttgtctctggaagagtcactgaatatgtaaatatatcctgcatcaaagaaatcactgtacctttgtttagtccagtgtttaatgattatggtgcctccctatgtagcacatctattaatgtcccatagaattattgttatgtgtaagagcattttggaaacatagctccaaatgaatagctttctagaggggaatttgatattgaccagttaagactatcaaattaaaagttaaactcagattgtgaccttctgcttttgtctcatttactcctttgtttccatcctgaagttgcaactgtcatctctacgtagattatttggactttaccttttctatcttacctgtttcctgggtagttcttttatttgtgaatttaaaaaaagcaaactttattcttttaagaataatacatgttcaagttggaaaattagaaaatataacctggcaaaattaagcagtataattctactcataatcccactaccagagataactgt

SEQ ID NO: 204185 - DNA, 847 bp, Homo sapiens
ctacagaaaagatataacgattgaattagactcttaaatatctgtggatgtcaggttgaatacaagcagctattcagtgttttactctggcaggagaacaagtcccctggaggtcagaagccatgcaggtccctggaagtgtgagcagattgttaaaatggtatcaaagatgggctggcatgaggccagagtctatccttgatgctcacctgaggtctagggctaaactcttgcctttacctgttccatgcttagccgttcctgctttttgcctagaacctcagtgctattgctcacacagacccagctcatgtccccaggccatgaccactgcctccccttctcccacctgtgcaggtgttaagcatcagtacataactgaggagtaggagggcagcagcccaaatctttgatgaagaacctctttcgtatcaacttatgctttggaacgagacactgttggatgggaatctggcttctaacaaactgattggttggactcatgccttattctttcggagccttagttttgtcatgtgtagaatggggagtattgctagctattcccatagggagtgagagagagtgtaagtaaaatgcaatggcaggcacagggatggttgccattatcagttacattattatgaggattattttctacctagatcaggtataaggtggatgtattattggcattcctaggactgttttaaaggaagtacctatgaggcctcatgataagccagatgtccagaagccagcttgagaccagggctcctggtcacttaaaagatgtttggggctgggcgtggtggctcacacctgtaatcccagcactttgggaggc

SEQ ID NO: 204186 - DNA, 1124 bp, Homo sapiens
taaggcatgttactgtactgaatactgtaggcagttataacacaacagtaagtatttgtgtatctaaacatagaaaaggtatggtgaaaacatgatatgaaagattaaaaaatggtatgcctttataaggtacttgccataaacgggacttgcaggactgagaggtgctctgggcgagtcagtgagtgggtggtgagtgaatgtgaaggcctagaacctgtagacgttataaacactgtatgcttacaaattttatttttaaaatttcttttttcagcaataaatttattgtaacttttttactttatagtttttttatttttttaactctttaactcttgtaataacacttagcttaaaacacgaatgcattgtacagctctacaaaaatattttctttatatccttagtctataagctttttttaaaaagactttttaaactttttgttacaaactaagattcaaacacatacattagcctagaccaacacagggtcaggatcatcagtatcactgtctcccatccccacatcttgtctcacagaaaggtcttcagggacagtaacatgcatggacctttcatctcctatgataacagtgccttctcctggaatgcttcctgaagggcctgcctgagcctgttgtatagtaactgtctttttaaaaaaataagtaggagtacactctaaattaataatgaaattaaagtaaatacaaaaaccagtaacgtgggtgtttattatcaagtagtatatactgtccataattgtagtgatatgcttttttaagtgaaagcaagtttattaagaaagtaaaggaacaaaagaatggctattccgcaggtaaagcagtctgtagtggtatactttgtatgtaattgcagcgcagatttgtttgcaccagctaatgcgatgggctatgacattaacccatcactaggtgagaggaatttttcaacttcattataatcttatgggaccaccacatatatgcaatctgttgtcgatctaaatgttatatggtgcattactataggtgtgcaaagcactcgaggacttccgtatgacagagctcctccttcatgtctgcttggtgcaccctgatcaccctgaatgtatcttt

SEQ ID NO: 204187 - DNA, 227 bp, Homo sapiens
tttcaatatttaggcttccatttatgaacataatttttcttttctttaatgtctttcagtgttttttttataattttttccataaaggactagcattttttttttttcggttagagttatgtctaatttacagttttcatgtctcttgtgactggaatcttttcttattttcagttttgtaactgtttgttactagtgtatagaaatgctaataatatttataaatc

SEQ ID NO: 204188 - DNA, 320 bp, Homo sapiens
gcctggctaattttatatttttagtagagatgaggtttctccatgttggtcaggctggtctcaaacccctgacctcaggtgatccatccaccttggcctcccaaagtgctgggattacaggtgtgagccaccacgtccggctgcactttttattcttgatccacctggtttgcaactcacagataaactgtttccacctatgacacatgagtcttccaccttccatgtcctctggactttgtccctgttataatattcctgtctcttgttctggtttttggcatctcacacattgtccctgtttcagtccggtctcctgt

SEQ ID NO: 204189 - DNA, 584 bp, Homo sapiens
aataatacaaatatgcatacttaccacatatggttcaaaatatacacacacttggaacaagccagcaagtacagcaaaatgttaactagtgaatacagaagcagggtatacaggtgctcacagtactatttttttaagcgtgaaattttcaaaatattataaaaagctagggcaaaaaggctgtattatttccaggggtctccctcatttgccactgtgaaagaaaaataaaatctcaggaccccaaactcactatgccagagggaaagttaagcctggaaactgaatcacgaaaaaactgccttacttttgttcccaaacagctgtaatttcacatgcttactttatcttacgtaaaatgtagatttactgagcacaagacgaatgcataattgactttttcccccactcctttcttttcacatgtaaaaatgtagattcactgagcagtactaatcagagcctcccaagaatgtaaccacttgcctcattgcctacccactctcccttttttttcttcccctcctgctttctctttccactttaaatattgaagttcccaaaatcctcttcagaaaaagcac

SEQ ID NO: 204190 - DNA, 596 bp, Homo sapiens
gcacttcccttccccacttctgtattgtttaaagagaccaccctcttcccttcccagcacttccatattattgccacctgcagagcttcttattgcaaccaaagcctctgtaatcatttgagggccaggttgatactcaccacctgcagagcttcttattgcaggagtaccaagtaagtagctcttgatgtcaggcctttacttcttgttaaaggaagtaaagccccagaatggttttcagggtttttcttgactcggacattttacctctgtgacagcagcaactatcacttcccaaatgtggggcagcaagtccgtaaggaagtctgaagtcctggcccagggcactttcacccactgactgtgggactataaattgattcaactctgtttgattcagtttgtatacatcatttgaagttgtaacattagaatatttttacatccagaaatttaattttaagactttattctatggaaataaagtacagacccaacaaagacttaattacaaggaatgttcctggctgcattaaaaaaatataataaggaacaggtcagggatggtgactcatgcctgtaatcccagtactttt

SEQ ID NO: 204191 - DNA, 172 bp, Homo sapiens
cagcaggacaataaaactcagacactaaatatgcttgctcctgtcctctaaccttagacatatctgatttggtcaaatggaagagaaccacaaaagatgggctctgagtaatggctcccttggttttctgagaacttgacttgcgtcacacgatcattcctgcttatctcct

SEQ ID NO: 204192 - DNA, 636 bp, Homo sapiens
tgtcttttgtgactcaacactctccctatattctgttggtttacaagggtcctgccaggttcaaggcaaggaagttcatcagacttcctctcttgatggaggagtgtcatgttacctaagaggagcacataggatgggatgtatgatatatgttggtgtgtaccacgctacttgtcatccttgcatcatttcctccagatcaagggatctgattagccaggattaggtcatggtctgacccccagactctactaggggtggagaaagaggtttggctcccctctgcttctgaaggcaaaggtaggtccctagagctatcctaccaccaagactccacatagcctggaagagagaacttgcccttatctgaagtacctagagtaggcagattcatggagactgtaagtaaaatagagaggttcccaggggttggaatggagggagaatagggagtaattgtttattattaaggtagtttcaatttgagatgatggaaaagtcctggagatggatggtgtgatggttgcacaacagtgtgaatgtatttaatgccactgaattgtatgcttacaaatggttaaaaggataaatattgtggcatgtatattttactacatatagacacacagattgttg

SEQ ID NO: 204193 - DNA, 293 bp, Homo sapiens
ctccagcctgggtgacagagtgagactctgattcaaaaaaaaaaaaaaaagaaaaaaagaaaatgaaacactgatttagattatctaaatggtggatttccaacttttgagtatggagaacccctttttaagatagatagatgatagatagatagatagatagatagatagatagatagatagatagatagatagatgatagatagataatcagacatccatgtgattggattgtgtttagtgtccactgatttttttaagtgatatacaatgggaagaagctactttatgtc

SEQ ID NO: 204194 - DNA, 389 bp, Homo sapiens
tgagatcgtgccactgcactctccagcctcctcggtgacagagcgagactctgtctcaaaaaaaaaaaaaaaaacagaaaaaggtgctattaaagataccaaaatataaggcactttcctttattctgcaatctgtctctccacttttcatagtattttttcatttgttatttaacatcatgttttgtcaggtgaggacatttactcagccagtgcagcactcactggtatccaggggccataggtgatttgacgcacccacatggcccaccagctgttgagttccacctccagccagccactggaccaacatgcagtgccctggctgggggcaggaaagtctaacaaaccatttcattccactgtcctcctggccaaacccacagagg

SEQ ID NO: 204195 - DNA, 620 bp, Homo sapiens
cagaggataaatagcttgatatagctgtagcagctagggagaagacttaagattcaaacccaataatactacactagaatttggttgggtgcggtggcttgtgctcgtaatcccagcactttgggaggccgaggtgggcagatctcttgagatcgagacagcctgggcaatatggtgaaaccctgtctttacaaaaaatacaaaaagctactcaaggggctgaggtggggaggttaaggctctggtgagccgagattgtgccaccacactgcaatctgggtgacagaatgagaccctgtctttaaaaaaaagaatcctacgctagaattgattaccaacccttaaactcaactatcagctaccagctgtcttagtagtcaaacttattttctaggtttaattatccataaactagtctgataatgtcttttaaaggttgtgtcccgtatttattttgagaggaattaaaatttaaagttttaaatggcatggaataatgatctcaacttttgatcatcttcccatctgtaaagtagtaggtacttccactatatgtatatttacgtttatgcacgtgttactgcctttggtgtactaaagcttactttttgtcaaacttc

SEQ ID NO: 204196 - DNA, 446 bp, Homo sapiens
taaagaaacaagttaagggcaagattcttgccaagaagaatcaatgtgtgcgagaatcaacgtgcatattgagcacattaagcattctaggagccgaggtagctttctgaaacacatggaggaaaatgatcagaaaaaggaaaccaaagggaaagtgtcagcatgctccacccagagaagtgcactctgagaaccaataggaaggagcctgaactgctggagcctcttccctgtgaattcatggcataataggtggtaataaaagacctctggactgtaaaaatgtttctcttcattgagtagaagtgtagtgtcctcttccgcaaagaaacatttaaagcaaatttaaattgttgtcctaattcattgtgtaatatctttactattcaaatttaatgtatttcttgctgaaagatgtgaggtggcttattatgcaacaaattact

SEQ ID NO: 204197 - DNA, 428 bp, Homo sapiens
ggagttactattcgccagcaggaacctgtagaacaataaactgtgcttaaacatagagcacccaataagtttcctaacatgtgggacatattgtggtttgggaccttcataaggggagcttcatttctaaactctgagaaaccaaatgaataatgcataggttatttactcgatatgtcaaatgtccctagggacccatatgaggtatttaacaagaactacttcaagtagtggaaacccccataagtgcgagataatcagactatcacttgacttagcttatttcacaactaggaccctgagagttagaggaaaccgtcatggtacagggtaaatctctcctttggaaatctggaaggcggctctctgttagtaggagatgaagcatattactactggcatccaggctaaaacaaggacaatcactc

SEQ ID NO: 204198 - DNA, 550 bp, Homo sapiens
caaccactaaaaaagctatgcaaggagataccttcaaaaatactataggtaaatcaaaattgaattttttaaaatgttcaagtaaaagaatgttcatctacaggaagacaggaaaaatgagaacagagaaatgataaacaggaacagtgtaaaacaaaattataaatggaagacatagctttaacacatcaataactacattaaatgtaactggtctaaatgtatgaattaacacaaagaaattggcttagtgcattaaaaactcaacacaactatatggtgtctacaaaaaactaacttcaaatataatgatataggtaggttgaaagtaaaaggatggaaaaagatgtatcatgtgaacattagtcaaaaaaaaagcaggagtggctatattaatactagataaagtagatttcagtgcaaagaaaattgccaaagacagagggggacattacgtaatgataaaaaggtcaaccctccatagcaatcttaaatgtctgtacatcaaatgacaaagctgcaaactatgtgaagcaaaacaacaacacca

SEQ ID NO: 204199 - DNA, 248 bp, Homo sapiens
aggttgcaaatggctgagtaactgaataaaatatgtgaaaatataataataatatctattctgctgtgctattttcttaaagttccaataatcaaataaaagaagctttaatttgtttgttttaatacatgataagttcttattattttagaaatgttttttgaaattaacctctaaaaatatcaatactgtctaataaactggcctgtcattaaataaataaaataaacaaatttcaataattatct

SEQ ID NO: 204200 - DNA, 367 bp, Homo sapiens
agttgacgctgaggatcagcttctgtgagtgggaacaggacctgtgcactcctggaccttcagcactattctgaggactagttttctgaatgttttgtgttgggcacaagttattcctcctgcccctttttactctgttcaaagacctgaatctatttggagctaaaaaggggcccgtggtgaatttggggtacctttggagtcatgtgggtatcttaatttaaacctgtgaagtgatgtgctgtgcaagataatacattttaatacaaagcaatcaccccgtgaagaaaagttgcccttctaatacatgtttgtaaatatcaactttatttcacattttaagaatataccgtttagattcatctac

SEQ ID NO: 204201 - DNA, 228 bp, Homo sapiens
ttcttttgagaaatgtctgcacatgtcttttgctcagtttttagtgggctttttattgttgttgttattgagttgttcaagtaacttgtagatactggatattagtccctcgttagaggcataatttgcgaatattttcttccatcctgtaattttgtctttttagtctgttgatagtttattttgttgtgtagaagacttttagcttgattaaatcccatttgtcta

SEQ ID NO: 204202 - DNA, 424 bp, Homo sapiens
ccccactactcccaagtgcgcacagcgagaaggaggctgtctgcaacccagggagagagacttcaccagaaaccaaccttagtcttggactcccagcctccagaactgtgagaaaatgtctgttatttaagccacccaatctgtggtattttgttacagttgcctgagcagattaatacaccctctgtacttaaactttataacccagagcttccagctgacaacttgggttcatgaaagacaaatctgcttggaagagagggagcaaagagttctggtcatgccatttgagccctgcatcaagcctctcatgaagctagagctgtccctggactgttcagtttttgctcaaaccacacagcttcactttgagttttctgttttctgttgtttgcaacataaaggttttttgttgttgtttgtt

SEQ ID NO: 204203 - DNA, 456 bp, Homo sapiens
agctgtgatgtaagaagtctggataccctcttggagaaatgcgcatgaagaggagatgtggaagggccacatggagaaggaggagcccatacaggacagcaggagagaaggaatcccatcaatgcaccagtcccagcctagcccagccctccaggttctttccagggtacctgacatgtgaggccaccatcttgactcagccagcccagtctagctcccagatgacttcagttccagctgccatctggctgcagcagcataaaagtcccttggtgagatcagtggaagaactgctcagccaacttataaagttataagagataataaatgtttgttgtccattttaagccactgcattttagagtggtttgatacatacaggtagataaccaaaaagtaagtgcctaggacagcgcctgccatacagcaggcattcaataaatattggctgactaa

SEQ ID NO: 204204 - DNA, 459 bp, Homo sapiens
tgcttggccaccctctctgtacgctcaccagaccattctgtgctctggggcacagggagttggacttggggcatgggatccctggcttctgtctgcatcttcacagcaatggctggctacagcctccaaaggtcaaggccccatctcctcccgcagccactcacctgtaggcctctgttctattactcctccctgggccctgctgcccatgctcctggaggtccccttcctggactggcatctcctaaggcataaccatcagggtcttaaccagctgatttcaaaagtgcccaggtagccatcagacccatggggctgccctcacccctgatgttatcagtccttgtgtcaagtcccacttcctgccctgggctcctcagtgtaggctaccaaggtacttcccagctgaagcagtataagaaggggccagccctgagtgaacatcgtgggtcatttagg

SEQ ID NO: 204205 - DNA, 484 bp, Homo sapiens
gcccagagaaatctcttgcgtcttgcttttcgtaatgagtttcattatgaaatgtgttctgggatatatggtgagaattcactggtaaaaacccattctcaataacctaagatttagaaaggactatcaggattaaactatagctatttttctctctgagacatctcataaacattctttgtgtgtatttgatacagtcgcatttgctattcataattgtaggattgggcatttccttgtttcccagaataggaagcatgtgttaaattgtaaatttgggtcttatttaataacaactatattgttggaaggttatccttggaaatataacattttagttttgatgatatgtacaaataacaaccacagaaacatttattgccatcaaacaattactgaagaaagcatcttccaattcttgttcttacagtttatgtagcataggggaagaaggacacagtactagaaagagcatttgagcagc

SEQ ID NO: 204206 - DNA, 370 bp, Homo sapiens
taagacatcttgttataacaatttttacttattttaaatatacaattaaattactatcaactatagtcaccctgttgtgctatcaaatactaggacttaattcattctttctaggagtttttgtacccattaaccatccccacgtatccccaaccctccaactacccttcccaacatctggtaaccatccttctctcctctatctccatgagttcaatagttttgatttttagatctcacacataagtgaaaacatgctttgtctttctgtccctggcttaacttagcataatgacctctagttccattcatgttgttgcagatgacaacatcttattctttttgatgactgaatagtactttattgtgt

SEQ ID NO: 204207 - DNA, 504 bp, Homo sapiens
cactgtgctcatctctgtagattgcattggggtgtataaatatgaaatctggttccctcaaagaatccacaaaacttttgtgataattacaactagaagccttataaataacaaattcattttgaaattttgaccacatattaagtgcttaccctcgatactttctgttcattctctcttaagctcccactatccctgagaagtaggcactattatctcccatcttaaagacgagcaaaaatctgcagctgagactggttaggcaatttgtcaaatcatagaactagcggaatgccagaactcaaacccatatttccaaagactaaatacatgctgctctttaagaaagtttgacagactaaagcaaggtttgagagggaaataagccatttttctggtactttctgactgttctgtagccagttttgttcaacaaatctaaattttataaaatctaaattttatgatgtaaggggaaaaaataaagttgtttttgaaactaaa

SEQ ID NO: 204208 - DNA, 877 bp, Homo sapiens
actctgaccttgacagaccaaacctctcctccactcaaccatttttccctcttatatgcttttaaatcctcctataacccataactctcctttctggatgtgttacaatttatccagaaacttctaggcttggcctgagccctataaccacagcaactcaaacagagctttactaaaccaacgtgaatggcagcagtcatttcagaaccccagagaccactggttacttatcagttggggaatgcactgctctatctgcccaaatgtgtaaccccaagtctgccaaagtactgaaccttcatggactacaaatgtggtcactaaaaaaatactctaattatatccactgtgctcccagtgcacttcattcattccacatggggacaatagaaggctttctgggagaacggatgatggcagccctgttatagaaagacttccaatcttcccagcctgaccaacatggtaaaaccccatctctactaaaaatacaaaaatcatccaggcatagtagcacaccagtaatcccagctacttgggaggctgaggcaggagaatcccttgaaccaggaggcagaggttgcagagagcagagatcgcgccaacacactccagcctgggcgacagagcgagagcaagactccgtctcaaaaaaaaagaaacaaagaaacaagacattaaaaggagagcccactagactttaaaatgtaaactttgtgctgcagaatttcatgaaaaagatgaaagagcaaactacagactgggagaatacatttgaaaccacatatctgacaaagaacttgtatctaagatatataaaaatctctgcaaactcaacagtagggaacacttgttctattttatagaataaagccac

SEQ ID NO: 204209 - DNA, 334 bp, Homo sapiens
tctgaaacccaccaacatagcttacttcttcaaataagaaatcaatctcacagacagaaagagaacttaatttaaacagaaacccacaaattgcaagtaaatgcttagcacagtagttcccagtttatggacaaataagtctgtcagttcccagggggcccataaagcattttcccatggaaaccgtgttattgaaaagcctaatttgcttgtgttctgtggctcaggagaggaggaaaatatttaacacataccctccttaggtctgattcggcaagcatttctcttgaaggtactcttacttctcagctcccccattacagggattctaaga

SEQ ID NO: 204210 - DNA, 2141 bp, Homo sapiens
  misc_feature (676)..(676): n is a, c, g, or t
cctggactacataaaaaggacattagtgagaaaactggtaaaatttaaaaatggttcttagagtagtagcagcctctcaaagttaatgtcttggtttcaataattgtactatggttacataaaatggcaacactacaggaagctggataaaggcaaatgggaaatttctacactatttttgcaaattttctgtaaatttaaaattatttcaaagtaaaatgattaaagaaacagaaaataaaaatggctacctaatgaaagtttcctaaattcaaataaagtaagtaaaatgtatgggaacagattttataagaaaacaaatgcaaggcacctgtagcctctacactgaaatatacagctataattaacagtttgctttccatcattctaccccaaattcctaagtacctaaaatattcataatgttgatattattgatttttattttcttacctgtgctttgccacattttcttgttttcccactgtgagcatagatttccttcgtaatcagaaaacatagctttcttttactaagtccctttataatttggccatatgaacaaactatttccagaaataagtaagagttacaagactctatgaatacaaagagaagatgtcacttgtttttattttaccaaatatgttcttcatagcaggcaaacatccatggnggtacaacagtaaaatgaagggagacggtgcagacaggcactaacttaaaatgtttctatattcttatgatattttctttagattttaaatattccttttactaaccagagaaggaacagttattataactggatccaaattaatagtcagaattatctctatactttaataatgtttcttttaaaagtgtaagaatacatatatagcttttagggaaaaaacatgtagacactcaacctgttctaactgctggtagctacggaacaagtgtagaaagaaaaacagatacactacttggcttccatctgtggtcaaaaaactatattgttttattcatttaaaaacatatgctagatatgtaactctcaacagcatttaaaactgtgtttttaatacagaaaatatgctagtgctgcacaatgaagaaataatttatcttaataactggaaaatactgacgataatgaaaatgttttaggcaaaatgagcacactgcatgcttcagactgaaattaattagagtttttaacgttttacaattccaccataattctttaaatggtgcatttacctcatagtaataaacacttggatcattaagtaaagtgcgaaatgtgtgtgatatgctacatttaacaacctttggccttttatttttctatacttctgcattcagttttccaatgcattgaatgagcaattgaagaccacaattagatttcctgactttgcatatttgagattcttatttcatttaatacaaaaggcaattaatataccattttacaactgaattccaactttagtgagccatgacagatactgaaatgaacttacaagaaatgcttaattaaatttactgtaaaaagcataagaatttttttgtatgatacaagttgcatatttaattagaaattctaaggctatattatgaaattaaagtcacttgggatgttcttagtaaactcagctcaaacacatatatcattaagtagaatagagctctttttaaaaaccttaccttttttctctatttagtgatgcaaacaaaagataatcaaagagatctccctttatttaatactgcaacatttcattcattatttattaatagtaaatattttttaaatagcaagatagaaaaagggcagtaacaaatttctaatttcatgtatgggaatacataaataactatttcttttcttgagcaatcacttctctctccaattcatgattctggagcagattgagtagagtaagtttttagctcctcctgtaactttttacttctttgtggcagcttttcgtagcaaagaaatagggcagtggtggtgtgtgcctgtaatcccggccactcgggaggctgaggcaggagaatcacttgaacccaggaagcggaggttgcagtgagcggagatcgcgccactgcactgcagcctgggcaattgagcgagactccgtctc

SEQ ID NO: 204211 - DNA, 2130 bp, Homo sapiens
  misc_feature (676)..(676): n is a, c, g, or t
cctggactacataaaaaggacattagtgagaaaactggtaaaatttaaaaatggttcttagagtagtagcagcctctcaaagttaatgtcttggtttcaataattgtactatggttacataaaatggcaacactacaggaagctggataaaggcaaatgggaaatttctacactatttttgcaaattttctgtaaatttaaaattatttcaaagtaaaatgattaaagaaacagaaaataaaaatggctacctaatgaaagtttcctaaattcaaataaagtaagtaaaatgtatgggaacagattttataagaaaacaaatgcaaggcacctgtagcctctacactgaaatatacagctataattaacagtttgctttccatcattctaccccaaattcctaagtacctaaaatattcataatgttgatattattgatttttattttcttacctgtgctttgccacattttcttgttttcccactgtgagcatagatttccttcgtaatcagaaaacatagctttcttttactaagtccctttataatttggccatatgaacaaactatttccagaaataagtaagagttacaagactctatgaatacaaagagaagatgtcacttgtttttattttaccaaatatgttcttcatagcaggcaaacatccatggnggtacaacagtaaaatgaagggagacggtgcagacaggcactaacttaaaatgtttctatattcttatgatattttctttagattttaaatattccttttactaaccagagaaggaacagttattataactggatccaaattaatagtcagaattatctctatactttaataatgtttcttttaaaagtgtaagaatacatatatagcttttagggaaaaaacatgtagacactcaacctgttctaactgctggtagctacggaacaagtgtagaaagaaaaacagatacactacttggcttccatctgtggtcaaaaaactatattgttttattcatttaaaaacatatgctagatatgtaactctcaacagcatttaaaactgtgtttttaatacagaaaatatgctagtgctgcacaatgaagaaataatttatcttaataactggaaaatactgacgataatgaaaatgttttaggcaaaatgagcacactgcatgcttcagactgaaattaattagagtttttaacgttttacaattccaccataattctttaaatggtgcatttacctcatagtaataaacacttggatcattaagtaaagtgcgaaatgtgtgtgatatgctacatttaacaacctttggccttttatttttctatacttctgcattcagttttccaatgcattgaatgagcaattgaagaccacaattagatttcctgactttgcatatttgagattcttatttcatttaatacaaaaggcaattaatataccattttacaactgaattccaactttagtgagccatgacagatactgaaatgaacttacaagaaatgcttaattaaatttactgtaaaaagcataagaatttttttgtatgatacaagttgcatatttaattagaaattctaaggctatattatgaaattaaagtcacttgggatgttcttagtaaactcagctcaaacacatatatcattaagtagaatagagctctttttaaaaaccttaccttttttctctatttagtgatgcaaacaaaagataatcaaagagatctccctttatttaatactgcaacatttcattcattatttattaatagtaaatattttttaaatagcaagatagaaaaagggcagtaacaaatttctaatttcatgtatgggaatacataaataactatttcttttcttgagcaatcacttctctctccaattcatgattctggagcagattgagtagagtaagtttttagctcctcctgtaactttttacttctttgtggcagcttttcgtagcaaagaaatagggcagtggtggtgtgtgcctgtaatcccggccactcgggaggctgaggcaggagaatcacttgaacccaggaagcggaggttgcgccaatgcactccagcctgggcgacaagaccgaaactccatatcaaaa

SEQ ID NO: 204212 - DNA, 241 bp, Homo sapiens
gtatctggtccaacaagaaattaccttgaaattccatattttattataaaagtgtatgcatttttgcatcctaattcattatatatctcagcttcttttattgtcaaaacactgttttaaattgtatttttctcctcaaaaggaagaattttgtcttgtttcatgttgaatccttaatgcctgaaacagtgcgtagcatataataactacacagtgattatttagtaaatgaattttagca

SEQ ID NO: 204213 - DNA, 515 bp, Homo sapiens
agcttccattcttagtcttggtacttctaagtggcattgggtcaatagctttctgcctaagaagagaattggctgggcatgatggctaacacctgtaattccagccctttgggaggctgtggcaggaggatcatttgagcccaggagttcaagaccagcctgggcatcataggaagaccccatgtctgcataaaataaaataaattagccagacttggtgacatgcacgtattgtcccagcttgtcaggaagctgaggtgggatgattgcttgagctcaggagatcaaggctgcaatgagctatgatcatacaacaccagtgcactctagcctgagtgacagagcaagaccctgtctcaaaaaaagcaggggggcatagtcacctccctaaaatattagttgaacagtatgtattcagaagtccagaggctctgtattttattaatattttcaaggcactatttctgccccacatcctgggtcacagactgggatgagcaacgggctgaaggcac

SEQ ID NO: 204214 - DNA, 777 bp, Homo sapiens
  misc_feature (357)..(357): n is a, c, g, or t
  misc_feature (359)..(359): n is a, c, g, or t
gtactttgtaccctaactctcactagcttcctttgccagatgaagctatgccatcttttatgtctgatgaggcagtttcatctgatttgaagatgatgaagaaaagttctttgcaaggttgcttattgaatattactgggaaaacaggaaaattaggaggaatgttctggagtgatttatctttttcatcaggggcccgcgttcagtccagccaccagatcaacacattctccaaactcattaactttggagaggctacccagagttcctgaagagttcatctgaaaaatgttgaaatagtcacagcccatggaatcaatgttttgggatgccatccaggattccatagcacatttntnagttgtcttaagctcctcttgaccgggacagtttctgcaaccttttttgctttcaatgaccttaacggttttgaagagaattggtcaggtgctttgtggaatgcctttctttggaatttatctgtgttttttcctcaagatagaactggagttaatgtgttttggggagaaacactatagaagtagcattagtcagtgttctccagagggacagaactaataggatacatatatacatgaaaggagcttattaaagagaattgattcacgtgatcacaaggtgaagtacacaataggccgcctgcaagctggggaagaaagaagccagtggtggatcagtctgagtccaaaagcctcaaaagtagggaagacaacagtgcagccttcagtctgtggccaaaggccccagagtcccgga

SEQ ID NO: 204215 - DNA, 526 bp, Homo sapiens
gtactttgtaccctaactctcactagcttcctttgccagatgaagctatgccatcttttatgtctgatgaggcagtttcatctgatttgaagatgatgaagaaaagttctttgcaaggttgcttattgaatattactgggaaaacaggaaaattaggaggaatgttctggagtgatttatctttttcatcaggggcccgcgttcagtccagccaccagatcaacacattctccaaactcattaactttggagaggctacccagagttcctgaagagttcatctgaaaaatgttgaaatagtcacagcccatggaatcaatgttttgggtaagattttttttaatggaattctgtctctattgctttaatttctttaatctttcactgcatgaaaaatactctaatatcttaaaatttcatgtatttccagcctaaaaataacatctattatagattttcctcattttattgtgtaaatgtagataagcataaagaagaaaataaaaattgtccagaaagaaccaca

SEQ ID NO: 204216 - DNA, 465 bp, Homo sapiens
caccaatactcatccatcttttcatctgcatcataggatacaagtgttataaccacaaataataacatattttctatgtcatttaactaatttttccaagtcagagacaggcacaccagtttcaaatagtttcagtggtagaccacaacattaggtataataggttcctagagcaattagacaactgtagcaaggaaaagaattctactgaaaatagatttttaatttagactctccatcattaatcagagagatggggtgtcaagagagaaactaacacttaatttaactgacttttctattcagctcagctaacttttgttatcattcatttatatagtaatgatgttgagcatcttttcatgtgcttattggtcaattgtatatcttctttgcagaaatgtctattcagatcctttactcattttttatttaacttaattaacttatttattttgagatggg

SEQ ID NO: 204217 - DNA, 597 bp, Homo sapiens
gacatacccaagactggacaatttacaaaagaaagaggtttattggagttacagttccacacggctggggaggcctcacaatcatggtgaaagtcaaggaggagcaaatcacatcttaggtggatggcagcaggcaaaaagagagcttgtgcagagaaacctccattttgaaaaccatcagatctcgtgagactcattcgctatcatgagaacagtgcaggaaagaccggcctgcataattccatcagctcccacgggttcctcccacaacacgtaagaactgtggagttacacttcaacatgagatttgggtggggacacagccaaaccatatcaggcccactttgcaaaatatcaaaacagaggggaaaagtataagtaactgaagagaagggtgcggtgtgctgaatacaaagatgctgactggggggagtgaatgtacctgcatcccaatttgcctgggaggtctggttttacccattgtctgacattctgtctaatttagcatttgtcctgaatatttcatttagtgatgtattattgttattagttgcattaaaacaagccaagatggattaggtagacctccacgttgta

SEQ ID NO: 204218 - DNA, 433 bp, Homo sapiens
agtttagcatttggtttctaaaaccccataagattaaaagaagaatatcaaaaaagggagaagagctgctatattaataccatctaggggtgagagctgaaagctgactgaaaggggaggggtgaaagaagaagttaaaacaacagtctgggccgggtgcggtggctcacgcctgtaatcccagcactttgggaggccgagtcaggtggatcacaaggtcaggagatcgagaccatcctggctaacacggtgaaaccccgtctctactgaaaaatacaaaaaattagccaggtgtggtggcgggtgtctgtagtcccagctacttgggaggctgaggcagaagaatggtgtgaacccgggaggcagagcttgcagtgagctgagattgcgccactctactccagcctgggcgacagagcgagactccatctca

SEQ ID NO: 204219 - DNA, 436 bp, Homo sapiens
atactactctccactttttaaagggttaaatattttcactacaaaaatgtttggaaaataaatattagatcttcagatttccttaaaagtgttataagcaataatgtaattatgatattcacataattccttcatgacagctaagaagatacacactttgttttcaacatttaaactcaccatttattactaaagtcttatagcacatttgtgctatctgaagcacaatatttaaaaattgtttctaaatacaaatgcattgaagagctaacaaaccctaagcagaagtctcatgatggaacaaggcattgctatcaatttcatttattgttaataacatactcacaaatggagcgatggttttaactgaagcttaatttgaggaaaacacagcaaatttctaaagcctttttttcttttttagtgagtttcttaa

SEQ ID NO: 204220 - DNA, 814 bp, Homo sapiens
ttttgtatttttagtagagatggattttcaccatgttggccaggatggtcttgatctcttgaccttgtgatctgcctgccttggcctcccaaagtgctgggattacaggcatgggccaccgcacccggccagaaatgtgtgttctctacctcccttgcacctctttgtggctgcacaagtggggaggaaacttgccccgccttgtgcaggtgagaggccagggcatcttaaccctctcacccgcaagagccaaagccagggctcacttcctatcaccagatgacacatgtgggctggggagggctctggtctgcgtgcagggctgcttccagcctagctgtgccactcgcaccctgctggtccttccccgacttacgtcctgaggggactcccctaccccttccagctgtgactgcaggacccaagggaagcaggactgtgccaagcaaatggaatagtggtgtaggcctctaggtgttgggtgtagggcaagaggcgggcacgagggctccttgtagaggatattataagggtccaaggtgggagacacttggctgaggtccattccaatcacttggctgaggtccattccaatcacttgatgccttgatgctggagagctttgagcagtttccttggcggtgttggggcagcaagggaacagtctggggcagagcctgtgcctcagtcttctcatctcttaactggggagggtcatgtaatacccaaccccaggtgcttgtgacgattaactggggtgggcagtgcttaacataatgcctgggaacgaggactggtgggcctagctgtgccc

SEQ ID NO: 204221 - DNA, 469 bp, Homo sapiens
cttggcttctcaccatccatcagagcaggtgtcattacagtgaaaagggcagaaggtatcttcatgtgtgggcgcactttgagatacaccctgacttggaggatctttgacatgcttcaacaaccaatggagaatgagttgcattttaatacatggtgctttaaaggtcattgattaccggccaggtgcggtggctcacacctataatcccagcacttcgggaggccaaggcgggtggatcacaaggtcaagagattgagaccatcctagcttacagtgaaaccctgtctctactgaaaatacaaaaaaaaatagccgggtgtggtggcacatgcctgtagtcccagctactcgggaggctgaagcaggagaaatcacttgaacccgggaggtagaggttgtagtgagccgagatcatgccactgcactccaacctggtgacagagtgagactccatctcaaacaaaca

SEQ ID NO: 204222 - DNA, 378 bp, Homo sapiens
atcctcacttctgttttccttacatgcagctgtctgattaatcttgctacagcacagatactgtctgcacagacatgacttaagtctggttcctggcacttgaagccccctgtgatatgaagccaatccaattttcaagtctcttcctcattccccacccaaattccacactccagcaaaggcactgttttccatttctaaaacagatagttttcaaccacacagccttttcttataaaccttatatatctgtctggaagtctcctatcttactaactgcacctcagaaatttatgcttatcttttagagctcagctcaaaccccataactctgctcaatgttactctcacctctaaatatgctaaagaattctgaat

SEQ ID NO: 204223 - DNA, 427 bp, Homo sapiens
ctccagctgtcttatgactaggaaaaaggaaacataaaaattttaaaatagctattgttaaatgactacaaaaaggtaactgtattctaagtatccaagtagcttactttatttttaagtaaatgtttctggccgggcgcggtggctcacgcccgtaatcccagcactttgggaggccgaggcgggcggatcacgaggtcaggtgatcgagaccatcctggctaacacagtgaaaccccgtctctactaaaaaatacaaaaaaaaatagccgggtgtggtggcaggcgcctatagtcccagctactcgggaggctgaggcaggagaatggcgtgaacctgggaggcggagcttgcagtgagccgagatcaagtcattgcactccagcctgggagacagagcgagagagcgagactccgtctaaaaaa

SEQ ID NO: 204224 - DNA, 787 bp, Homo sapiens
caaagcagacgctctgcccatctgtcactaggagccgccgctggcctccaactacccttccctaaaacctcagcttggagtaaacaccagatgtcaagaacacaaagcctctgatgcttgaggcagcacggcctctggaaggagatggggctggatgccctctgcctctttcgagacaccaaaggattcttgcagggttggaactgcagttttcagcctacagctttgctctgatgtttacacacactgaaagtgtgaaacatacggcaagagagagaaagaacgtgggggaagaggtcactgcagcttctctacaaagcactgactcaagtgattcagagtaaaactagtaccttggaaccaaataattaaaagccttccaaaaacaaagaccctgattaaacctgataagtaaagtttggtcatgaaaatccttattggggtctgtatgaatcatttcacttctcaggagtttctgtctagttgtgtaaagacaagctttccaaatggtactgctgggcccaaatgcttccaaccctcccttctatggctagcctggtagcctggggctaatggctaaacaagaatacgtgaaagcgggtctttgagaaaccatgccaaaacctaaatataagaaaataaaataaacatttaaaaaataaataaaaatcctttcaatgtagtacttcagaatctaatttccaggggccaattgtcaccttcagaaactaatacccacatctctataaagtcatgtcattctcaccaggtatgttttaccctcatg

SEQ ID NO: 204225 - DNA, 598 bp, Homo sapiens
ctcaaagcatttacactctatttgtgacaagactcgtagttcccacatgaaagcatagttcccacagacaacaatgggcaaatcctggtaaggtacagtgtgtctgcatgacaccaaccccaggcacaagagggaagtctctgggactagtagagaaatcggtgggggttggattagtcaggattttaggagggcctgaggacgactaggatttaggtggctgcaggagtaggaacaatctttgttttagacaagaactgtgtatggcagatagaagatttgaaagcagagaggtgggaacctgcttatggagaaccttgaaaatcaggtagaggagtcttaggggggtacagaaagcagcaggaagtcatagaaatttctggttttgtttgttatagtaactcccttgctcagtatttattaagtttgagcaagagggattaaactggctaatggtggtatggggtgaaatgcagaatgcctgaagatcaggacgctggtttctcaagggctcacactgatgccggatgaggtgaggaaggcctagtcgagggtggtggaaatggggacggaaggaaggcataaagaaggccctttc

SEQ ID NO: 204226 - DNA, 416 bp, Homo sapiens
tgctgaaatggttcagaagataccaattatttacatatatagatggtggaggtgggaagagagagagagagagagaaagagaggaatacacaataaatcaaccctgataaaatgttaacatttgcggactctgggtgaaattatctggacattctttgtattattgttttgcaacttttcccaagtctaagttatttcaaaataagttttaaaaaattaaaaagtatcaaaatcaaaataagttttccttttagatgggaaaaaaaataagtgtaggattaaaagcgtgtaggctatgttcagggtagtgagaaaaatctgcagtaattactttgaaattgaagtcagtggttacacagagtgataattggaagttggcacaattccagggtgctgacactatctcccaaattaac

SEQ ID NO: 204227 - DNA, 426 bp, Homo sapiens
cctcacaaaatgctgggattcaggcgtgaggcaccatacccaagcagcattttctctttatactcaaagttctaaaatttcaccaggatatgtctaggtgtagtgttttccttttatattcattaatgctcagagaactctttcattttgaggattctagcttttctcccagggacattttattctattaatatatgtacagtctccattatattatttgtgctttcttttatagtaatatctaacattttcataactttgttttctttctttattctttttttttttttttttttagagagatgggctgtcagcatatcgcacaggctgaggccagaggatgacttgaggacaggaattctcatgtgatcctcctgcctcagcctcccaagtagctgggattacaggtgcaagtcatttcatctg

SEQ ID NO: 204228 - DNA, 635 bp, Homo sapiens
aataaatttctgttgtttataagcccctctgtttacggtattttgttataggaaccttaatggactgttggaaatttttatttagatttcataattaaaacacaaatacatagtcattataaaagtatgaccttttgatccgccatccccagggggcccatgccactgtttccaatctgggtcctctccagattttgatacacactcctaggtagtcacgtctcccctccctgctttgaaaaccactaccatctgcatatcaaccagtcaagattttgaacattaacttcttgcagtctatattataaaaccctttttaaaatttttccaaatataaaatactattagaatgttttgtgaaacatccttgctcaaacaccttagtttgagggcactaactaacacccagtttggagggaaatgaaacccactcaaaggcatttgaggaagtgggagaagggacttctccagggcaagcaagagaagtgtttcagagtcaggaaaggaagctattaacgtaacttgcaagagaaagctgcagcatttacagtaatttcatcgaattttaaagtaatcaaatctgaattttataacatttggcatgaggtcatttatgtataggctcatgaggaagg

SEQ ID NO: 204229 - DNA, 494 bp, Homo sapiens
cagcttacttgaggttaggagtttgagaccagcctagccaacatggcaaaactacacctctactaaaaatacaaaaatttgccaggcacggtggtacacgcctgtaatcccagctacttgggaggctgaggcaggagaatctcttgaacctgaaaagtggagtttgcagtgagccaagatcgtgcccctgcgcttcagcctgggagacagagtaagactctgtctcaaaacaaaaacaaaacaaaacaaaacaaacaaacaaacaaaatatatccgtaggattaatactttgaagactggtcctttacctggaattttcttattgggtggccttcctggctctctacttttcatgggctttcccttccagtttctactactgcagatatgtacccctttgtactgattctggctgcccccagtcctgtgctggatgtctcacctggatgcatcctatcaaaatagctgtgtgcccccttcttaacatacacttc

SEQ ID NO: 204230 - DNA, 480 bp, Homo sapiens
  misc_feature (1)..(1): n is a, c, g, or t
ngagaattttttgtatttttagtagagaccatcctggctagcacggtgaaaccctgtctctactaaaaatacaaaaaatgcttctgcctctgcctctgccccctgcctctatggaggcaggagaatctcttgaacctgaaaagtggagtttgcagtgagccaagatcgtgcccctgcgcttcagcctgggagacagagtaagactctgtctcaaaacaaaaacaaaacaaaacaaaacaaacaaacaaacaaaatatatccgtaggattaatactttgaagactggtcctttacctggaattttcttattgggtggccttcctggctctctacttttcatgggctttcccttccagtttctactactgcagatatgtacccctttgtactgattctggctgcccccagtcctgtgctggatgtctcacctggatgcatcctatcaaaatagctgtgtgcccccttcttaacatacacttc

SEQ ID NO: 204231 - DNA, 506 bp, Homo sapiens
aactagataccctgaaaaacctctcaatacaaaacacctagaaatgatgaattaaatataatacatagtctttaaaatattgagctcaaaggaaacagaagaaactctcatacaccagaagtggtgagatgatgcttatactagtccccaatcctgtttgagggtatttggtgatcttggcgatcaagaggtttgggtttctgacatgctagtacaataggcaaggccttggcctatgcaaggtggggaggcagaatcaaggctctgcataatggctagggccctcaaaaggctatgctgccagaaaaaagatgctcaggcaaagggaaatgtcaagcaaagttgtctgtttcccctggcctctgggtagaaaagaattcagattctgcccatacacagctttgaggtttaatttatacaatctgagtggtcagaaactccaagtcaagatattaacatgaaattgttccagtttgatagcacgtccgccatctggcagaacaatt

SEQ ID NO: 204232 - DNA, 401 bp, Homo sapiens
aaaatcccagtcactcttattgtgcccacctctaatttttcatagcaatcatcatctggttattttacatctcgttccattattttaagctacatgcatatgtttattatttttgtatcctccaaattctaatacaagccctctgaagccagggtgtttgtttatttggtactatgctgtatttccagcatctactttgttgaacgaataaattggtagaagtcacaaaaattctgactagcatatgatgtacagtgatccaatctgaactaaattttaaaactgcaaactttttcatatccagctattaaataatagccaccctaaataacataactctccccaagtttagaatactatttttggcattcaaaaatcaaccagtatgtaaacactggctg

SEQ ID NO: 204233 - DNA, 451 bp, Homo sapiens
gcaaggagatcatcaaacgcagtgggcaaaggcagaatttctctctttctcatagtatttgctgtagttccacacatggtgactgaacacctggagcagaggccccgttgcacactgaattggcctcattatatcatgagcaagatcttctatcactgttactccttattgttgtgaagacttcttttatgtctggaaagacatttaggcaacttagcattgtgatagaaaacagctaaactactacagttttctaagttcaaatcaagatttcactcaccccctagcatcttactaaaacctgggtttcctataggggaggataaattgcccacaaagttatgactaccagaattgggactctgttctgtgaagtagaaataaatgcagagaccattttttcatcctagagtaagtagaaaaaaagcaacagttattttcactttctttt

SEQ ID NO: 204234 - DNA, 597 bp, Homo sapiens
taagtcccttgtaacagatggcattttccagagacagcctctgcaatttctcccatcccacaagatattcttcccatatgacctttacctcccactgctggagagtggggtttatgttctctccctcctgaatctgagcacgttcatgactcactcacaactaatagaatgtggcagaagagacgctgcgtggcctccaaggctaggtcacagaaggtgatgcaggtgccttcgtgctatagccctgagatgctgtgtaagcatctgactgcccagggccgccatgttgtgaggaagtccaagtagcccgaaagggggctgtgggttggtgttgtggcagacagtccagatacgtcccagcccccagccagctccaactgccaaacaggcacttccagaaggccctggcatcctggaatagagacaagacatctgtgctgtgccttgtgtgattctgagccataggatctgtgagcgtaatacgatggctgctgggcgccctaatgttttgagggattccttacacagcacaagtaccctggcaaccgtggctccacctccagccaggcgttatcactgggctccctgtcttcctct

SEQ ID NO: 204235 - DNA, 347 bp, Homo sapiens
ccaatctactaaccttggggaaactcaaagtagactcgttaccaccagcttcaaatacatgcatgacctctcactgcattctggataaacagcacacatttagaccccacagaggccttctccgccaggtctctgcccactcctcaggctttgtagtgtacagtgaactctctcttcctccatgttaggtctacctggccaggtagagctaatgccaggtagggtggggggcatccatatagtcagctccaggtttatggagggttcttctactattaggactttccgattcgaagcgaaggcttctcaaatcatgaaaagttatgaatattactgctgttagagag

SEQ ID NO: 204236 - DNA, 196 bp, Homo sapiens
gggcagccaatattgcttcgtcaaatacattctttaggcctttctttgtaagtgcagaacactccacatacttgacagccttcaggtcacgggccagcttttcagcagtctctggagtgataggcttctgtttgttcttggcaggtttctcaatagtagaggggtcatctctgagatcaatttgagtcccaacaag

SEQ ID NO: 204237 - DNA, 381 bp, Homo sapiens
aaaaaaaaaaaaaagaagtggattcaagatatatgtattttagatatgaaattgataagatttgtttaggtaaagaacgactcccaggtctctggtagagcaattagtttgggtggagatgtcatttcttcagatatggaaaaccaaaggaggaagaggctttttgaggggctggcagcaggagtgtttagtgaagatcggaagcaggccgggtacggtggctcacacctgtgataccagcactttgggaggccaaggtgggcagatcacctgaggtcaggagttcaagatcagcctggccaacatggtgaaacctcgtctctactaaaaaaaatattgttgtgattacctgagagaatgtaaagggagaagagaagagag

SEQ ID NO: 204238 - DNA, 650 bp, Homo sapiens
ctcacctggacgataaaagagacctaatatagcactctatacctctacatccacatttgtagttgtttactaagaaatcaagcaatggatttctcaaagcattgtaaccaaaccaaactcttcattcatctcaacactttaccatcctaggaaaaagtttactttcctcactatgttctccagcttagtcaataatatcctcatttatcaagaacttcagttaaaacctaaatgaactattaaccaggcatggtgatgggcacctgttatcccagctacttgggaggctgaggcaggagaatcacttgaacccaggaggcggaagttgcagtgcactgagatcacaccactgcgctccagcctgggtgacagagtgagactgtctccaaacaaacaaacaaacaaaaattaaaacctaaatgaactaaaacagatatttgcacaccaatgttcatagcagcattattcacaatagctaaaacatgtaaataatccaatgtctgtcaacggatgaatggataaacaaaaggtagtatatacatccacaatgaaatattattcagcctttaaaaggaagaaaattctgataacatgctgcaacatgaagctagaaataattatgctaagtgaaataaaccagacacaaaagg

SEQ ID NO: 204239 - DNA, 145 bp, Homo sapiens
tccccggcagcaggggggagaatgggggaataagatcactaccaagtccctgggggtctctcactccccatcccccggcaccctctccgagactctgcaaagcccaagaaactccctccgtgaagccgggagaagacccgccatc

SEQ ID NO: 204240 - DNA, 512 bp, Homo sapiens
attacgtgtcacccttagtggttcagctttcctaatcaaatcctaacagatacgtgtactacattcaaaaacaaaattgtctaaaaactctccttattctagcatcttcacagggttttgacattaagcttaagctacgcccataaagacagctggagaaaatgtcattatattctgctttatgtttatgatttttctccttctcttcccttattcctgtttagtaattttttctaatttcgtatatagaacactaagcttactgttttttctcttatgttttaacttgcacatttatgaatagacatttgcttcacaagtgttgatattaagtctatttgtattactcagttcgaaatgttatttttaaattttatttttccataagttattggggcacaggtggtattttgttacatgagtaagttcttcagtagagatttgtgagagcctggtgcacctatcacctgagcaatatgcactgcaccatatatatatatttttttgaaaca

SEQ ID NO: 204241 - DNA, 375 bp, Homo sapiens
aggtgtctgagcctggagatacctgtttgggaaattttgaaatcacaataccaatttacttagtagtcatagggctattcaaataatcagttttatattgggtgacttgtggtagtttgtattttttcaaggaactggtttattttacctaacatgtcaaattttgtgtgcagacttgtccatagtattcccttgttatccttttgatgtctacatggtctatagtgatattccctttttcactccagatattggtaattcacatgttctctgtttctttgtcagtcttgctagacatttgtcaatcttactgatcttatccatgaaccagatttgtttcatgaattttcttcattttttattttcagcttcatt

SEQ ID NO: 204242 - DNA, 538 bp, Homo sapiens
cccacatgggcacgaaacataccacattttacggaggatgtagccccagagaagagggaggtggagaagcataaatgaaaggcaccttttccttcctctagaagatgcacagagaatttctgaccttgtgacgtttgggagtgaggagatcccatacagaggcatccaggtatttccagagatcctgtggcaggtgaggtctgccctcgctggagccaactcgtctataatatcttcctaacagcagaacctgggtctcactctgtcccctaggctggaatgcagtggtgtgatcatggcccactgcagccttgaactcctggacccaagcaatcctcccatctcagcctcccaagtagctggaactacaggtacgggaaaactggcttagagatgttaaatatcctggattattgtcagtttaacaaaataatttcggctatcaaagatcaagtgggataaatttcagaggaagaaactgagctccttgcataccatagaggagaggtcgaggtccttccactgaagcaccaagtgg

SEQ ID NO: 204243 - DNA, 295 bp, Homo sapiens
gctaaggaatcatgagccacagggactgcagcagttgttcctttataaaacatagattcccgatatcacagaaatccatattgtaaggaaaatttatatttaaggcatacatctactttcagagataatatgcacatgttcatagaaaaatagatttaatttgcatttaataggtttggtatcaaaactttctcattgactggaggagtctcagcttcacactcttgtttttctctaaagttgatttgagaaatacgatgtgtctttgccggactttcaaagagatataaatcat

SEQ ID NO: 204244 - DNA, 2155 bp, Homo sapiens
  misc_feature (1071)..(1071): n is a, c, g, or t
  misc_feature (1269)..(1269): n is a, c, g, or t
  misc_feature (1652)..(1652): n is a, c, g, or t
  misc_feature (2070)..(2070): n is a, c, g, or t
ttggggttttcaaggttttatgagatggtcttttccattttgccttcaaaagacagaatgtcttaaaattttcactttacaatgtgcgccacattccttctgcatgatagcccattcaattatattgagacttagaaaattagtatcttaaaagatatttatatgggggtttcccacacctcttacaaatagtaactatgctcttgttttccttttgttttgccgtttccatctttgctttaaagacactgaaaaatataaatgacttgaggggactcccaaagatgaataaggatcaatggtgtcttttctactatttctagttttggattttctagattagtcttcattttctagataagatcctatgttgtatctatgttagtatcaataatcaataaaagttgaatcttagatccctttcaaattatctgcaaacttacaggataaagaagtaaaaaaaaaaaaaaaaagatgtgcacgtgcttctctgatgatttttatgaggagctgaacaagaattcaaatattaatctttttctcaaacaaaagtttatgtctgagcagcttggcaggaatacgcttgcctcctttctcttggctttctctttgttcccactttttccctcttttctttttttgtctttcttttcttatctcaatgtctctgtatctcttgtttcctagctgaagtgcatcattttctgctattgtgcttaaaaaacttggctgcaggggctctgaaatgaataaaaatgtaatcctcactgtgcccattgtgtgctctcatttgtttttgctgtatcgatttatcagcagagggaaattacttgctggaagagaggatgccagtcagaatgacatttatttcatagtacaaggaggctctccagcgtgtttccatgtaacctagatattggagctgtaaaagggcttgtaacaaggtttagtgctatgattagatcgtgtggagcaccttgctttcataacaacaggcactctgcaggagctggggcctcgggttatggtcaaccctctttttttttttttttttaaagcatagacacaganttcaacaatttcctccccacctaaacagtttctattccaaaagccaaatcttgcagacttacaagaataaaagaggtatatttttagatgcccgaagctttcatgacatcaaattaaatgcaaatagatgaaacacttgcctattaatccccttaactttttttttttggcctttccccctttattttggagaaattnttccattttaattcaccaaagcgaatcttttcattcagtgattgtaagttacatgtgcttaaggctaccaattacctgtgaaaccaaacacattctctatgtaaaaacgaaggcaggtgaggcaaattgtgacagcaattggttttgcttaaatactagaggtaaaatttcgtaggtctttgctatgattcttatatgtctgacattaggaaattaacttgtttcattatgttcctaattttccatagaactgatacagttgggatctatgtaaaagacattttttcctctaaagaatgagaggaaatgggtctgttttctaaggaatgtgctcatttgtgtaaaagtatataggagatgtctttcttttcccaccatttctncactgttgagatttgttcatttggtaatgttggcaaaagcaaaaatgattaagatttgcagaatgaaaaatattaaacttaagctggcaaatttaacgaaaatctgcacttctgtttttagcaggaattttttttttttttaataactgggtttgtgatgctgaggtgtattgggctgtgataaaatatactgtcttattaatttatttttaaaaaatctggccaggcacagtagctcatgcctgtaatcccagcactttgggaggctgaggtgggcagatcacctgaggttgggagtttgagaccagcctggccaacatggtgaaaacttgtctctactaaaaatacaaaaattagctgggcgtggtggcaggcgcctgtaatcccagctacttgggaggctgaggcaggagaatcncttgaacccaggaggcagaggttgcagtgagtcgagatcacgccattgcactccagcctgggcgacaaaagtgagacttcatctg

SEQ ID NO: 204245 - DNA, 156 bp, Homo sapiens
tgaaggccatttgtctggtgattaaaatttggaatattcaaagagagtcttcatagcaactttcaaaacgtataggtagaatatttaaaatctgtactgggatgggatgctaatggtttctcattctagcttggagttttggggcaaaggtgagca

SEQ ID NO: 204246 - DNA, 872 bp, Homo sapiens
cggttttttgatgtttttttagatgtggattttctacactcctgttgtcccaggctgtgagtgccacttgcgcccgtcttttggcgttccccgccatttttcggcggtctctggccttctaagccggtttttctcctgccttcatgcctttccgggcacagtctggagggctttaaggccccggggattcttcttggaaccctgggggccacagggtttccctgtggcccgattgtgcacataatgccctcccggccttggccaaccaagggggaatccgctttcccaaaaaaaaaaaaaaaagactttatgcaaagctttcacagccaacttccctttccttaggagggcccagcagctttgtcttctgtcccatctgggtactaaaacccaagcctgttcctggctctgataatccttccactccaccctcctctttgtgtaatactgccaaggggctacaccaagagatatggaaaataaaactgaccagataggtctccggctatttttatctctaattactgtggcaactctggggaaaccccaattgcctggagaggtctactgtgttcaccataaaccatgaagaatttagctaacagtttaattttttacttttcctagaaaatgtgatttttaaccggctcgaaactctgtttccatgatggagtttcacgtttcagacacagcaagcatggagggagatttctgagggccatggactcttgtcatgaaatcacaccacacacataaatagtggtctacaccaccaacacgtaagcaaagtcctggtttgaaactattaggatttggaataatatgccatatttctgcaaacatataattaaacattaactctgtttcaaaga

SEQ ID NO: 204247 - DNA, 654 bp, Homo sapiens
atctttttgttgtctgtagtatctcactccctaccaaaatctgtctgttcagtctatttcctttttctcttcctgctaccttccctgtttgttttctttcccttcttccctatctccttcctctccgtatgcctccttttctccccaattcccaatttgtatttctctcacaactccatcttgtttccaaaaggaggtaaggtacattacaaagattcatataaaaaaagagaaataccacaaagggaaaaccaggagagggttagtacggtatacaaattcatgctgcaaaggcttgcatattttctagaggtgagtcttagaggttgtaccagtttatatcccaattttaagtgggatatgtttgtgaagtatgtttgtcagactttttgatctatgtatatttcacttattaaattagcagttattgtggctttaatttgcatttctcttattagagaggttgagcatcttttcagatgtttaaaagccattagtgtttatgtgttcctggttctgcttatatttctttgttttatgaatattgatgctgtattatttggcccactatctgtttctccctcttaatgtaaacacccttcctgtttttctaaaatagttgtatagcattttaattgattatcattttttccg

SEQ ID NO: 204248 - DNA, 362 bp, Homo sapiens
tgacttggcaggggaagggggaggtcacactgggagagctggatgttgattctgaaggcctcccccagtaaaccgctccaacaacaaaaaggggctttctgtacattatctgcgaaaagccaagtgagggggagggaggggaaagcaatcaaagcaaagatcaattgtgttgcagacaatgtggcaagaagacagatcttgctggaaattccttctgactggactctgccaggatcagagtatttttcattccaagattaagcaaaattctttccctgtcataacctcctacccatctgtgtccaaactcccactatcatttttacaccgtgcacattttaaaacctgttttgcagcttttt

SEQ ID NO: 204249 - DNA, 370 bp, Homo sapiens
ttaattttataagaaactgtcagacctttctccaaaatgtatcatttatatgttaccataaactatgagtctccattgtaccacatcctggtcagcatttgaagtttctaattttttgtactttatagttttgaccacttgggtatgtatgtagtggttgctcattgtggttttaatttgcatttccctggtaactaaaaatgttaagcatctgttcatgtgcttatttgccatttattttttaatttaatttttatttttttgtgaaaggtctgttaaagtcttctgcaccctcacccctttgtttactggcttgtctttttattgactttttcggagttccaaagttaaagtcatgctttagtttttc

SEQ ID NO: 204250 - DNA, 505 bp, Homo sapiens
gtgttgacaatttgctatataatagagtttggccacgagagagaccagtaaagtctgacattttgagatttaagaatccttgtttattcctttattctaataaactgtagaacttcatggctaaaaaacaaaaaaggcatagaaagggatcggaatggataagacactctaaacttgtatgatggaaaatctagagtcttcctctttagccttaaagatgaatgcgctttgatctttcctctgttctcttttttatattgaatgtaaagaaactaattatactgcttgaattctctaattccttctctttgtatgctgtagacgttgatctttgtgaacaagtctgagatctttgtgtggtgaatttttgcccagtaacatcaacttttttatttgaaacaaattttgttcatctttagaatgtgaatctgttgtttctgtaactggcccatttttgagtatgtgccatgctagcatatttttagaacaatagacatggtaaaaa

SEQ ID NO: 204251 - DNA, 626 bp, Homo sapiens
tatgtcagtgtagattaatcaattgtaacaaatgtaccactctggtggagaaagttgatagaggggtgtgctatgcatatgtgggggcaaggcatatatatgaaatctctgtaccttccactcaattttgctgtgaacctaaaactgttctaaaaaataaggtctataaaagggaatataaagtatttaagaatatatagtaagataacagttgtattaataatagttgtatactttttctcatatcttgccttccccaactttttgaaatactgctaaatggaatacttttaaaataaagaaaaatattcctgtgggtgctattttaaagtgaaggtcatagtatgaagctaaaaaaaagaataacaacaataataatggttaacagttactgagtacttacactctgcaaggcattgttctaagacctttatatgtatgtcctcatttaaatcctcacaacttaatgaggtggacatcattatccttgcatgtagataagaaaaataagataccaatggtcaggctgtaattcaataaatactcactgaataccacactgtacagcaggcacttttgtatatattatctcattacatctttcaacaatctcatccattaaactt

SEQ ID NO: 204252 - DNA, 406 bp, Homo sapiens
tgcctaactacggatcaggggagatggtagatggtagtgtcattagcccaatagggaacatagaaagaaggaacaaattaggagtgttggtgattggagagcagggaagatgattattttggacacattgcatttgtagtgtctttatatagatatgtcttataagcagatctcatgtattgtaaatgtcgtacaagtgaaatgagaaataataaggacttttaatgagtacattgggcttatatcgttatgtgtatgagtccttctacttcaccttcacttccctttgggtttggtggctttgggtagaaaagaaggccaggcacaggggctcatgcctgtaatcccaacactttgggaggccgaggtgggaggattgcttgagctcaggagtttgagactagcc

SEQ ID NO: 204253 - DNA, 405 bp, Homo sapiens
acctttatttagcggatttgtcattggggaacgtatgggtggagcaattttgaaactatcatgtgttttacaggactgagcaaagtagcaaatacaaagatattattaggaactagggtctttgctgggagagaaagatgtaaatatgacctgggagaaagcaagaaagaacccttgcagggttaaataggacttcaagtttcccagcctgtgcaacacggcaagaccccatttctacaaaaaataaaaatgaaataacatgggtgtgatggcatgcacctgtggtcctagctacttaggaggctgacatgggaggattgcttgagcctgaaaggttgaggccgtggtaagccatcattgctcctctgcactccagcctgggtgatggagagagatcccgtctct

SEQ ID NO: 204254 - DNA, 534 bp, Homo sapiens
aattaattgtgcccctttcactctcaaaagtgtcccggtttggacaataaattatgtggtcaccctacttatacagggtcctcccaacccagggacaatggcattttaatagaggaccctgaaagacagaattgtctttaagactcaaagaagtaaatcccagatggtgaaattttaagcgtttatatcccagtaggcaagagaatgtagacaaagattctgctcagcaccccacaaacctaccacaaaggactatttctaacacccgatttgagggttgtgggggtcaccaggcctgtgatgagatttgaaagggcaggagtcccactgtggctcatggaagtgtctgacaagcaaggccagaaaaggggagggacagcaaaaagctgttgcttccccacctccccaggcaagagggaagcccctgcctagcatttgattgttctcaagcccccagcctccctgcaggaaagagctaatggggattggccctcttcccagcgtcaccctcagcccctggtgggcccctgggct

SEQ ID NO: 204255 - DNA, 460 bp, Homo sapiens
cccagcattaccccactgatagattctggggattgaatttggatccaggtcttttcaactccaagtttcaccacgtgaacttgagttggcataagaatcacttgaggcttggttataatataggttctgggccctccccagacctgctaactccatcaccagggaaggggccctgaaatctgatgactggtatgatcaggcaagtttaagacattatactctactgtatagcctcctttggtttaaggtcctgattctcaaggctttccatttgtaacaccttagaggtataggcattgatgccaaaaatagtaaagaagcaaatcatgtacagttgacctttgaacaacctggggggttaggagaactgacctccttgcagtcaaaaatctgtgtataacttttgactctcccaaaacttaactacgaatagcctactgttgaccagaagccttataga

SEQ ID NO: 204256 - DNA, 251 bp, Homo sapiens
agagagagagcatagggctcaataaacgggagcacccactgtgggctgggccctgcaccaggctttggatacagagctgaaggcagggccgaactcaccatggaaggtcttttatgctacgcaaaagaactttggcagtatcctgcagggggtaggagctgtcgcagatttgtaaacaaggaaatgacaaccgatctatattttagaaagacgggctgctggcagtgtggacagtgggctgaggcgggcag

SEQ ID NO: 204257 - DNA, 203 bp, Homo sapiens
ggtcaacgagttttccttacaatatcttagaatgatgttaaaaagtaccacatcaatgaattccacttctggatggcagcataagaagttccatggacccactccccagaaaaacaaagttggtaaaaaacaatgaaaaaaatccaataaattaaagtctctgtaaagtgtcctaagggaataaagcaaataaatatttacta

SEQ ID NO: 204258 - DNA, 432 bp, Homo sapiens
gtacatttttttttcattgacagtgcaaaagataccatttaggatttgattttcagaaggtaaaatataaaacattgtcaggaaattcgaatacttaattaagtaggataatggattactgagaaatagtacttggttatctatttaatcaaatgatgtaaaataattttagagtagatataggaggtaacataattgcaaagaacttcatctcttttatatgaagactgttctcttaaataatcaaggactcgaaaaagtcagcacaaagcatggaaaattattctgatgagattctgaatgtttatcttctaagaagattactcagaaggtaaagaaaaatattttacaagctcttactaagagaatacactaatccaaaaaaattattttaatagagaataaaacaaattctagttttgcatctgcata

SEQ ID NO: 204259 - DNA, 538 bp, Homo sapiens
gtataattcatgattagtcctccttcatacccgttttcctggtatcattattaataatgccccattggccaggtgcagtggctcacggctgtaatcccagcagctttgggaggctgaggtgggtggatcatgaggtcaagagatcgagaccatcctggccaacatggtgaaacctcatttatactaaaaatccaaaaattaactgggcgtggtggtgcgtgcctgtagtcccagctactcgggaggctgagacaggagaatcgcttgaacccgggaggcaaaggttgcagtgagtcgagattacgccactgctctctagcctggcgacagagcgagattccatctaaaaaaaaaaaaaaaagccccattatactcccctatgcttcccagcttgcacaacgaagtatatggttgatcactctatttataaaagcaccatcatccatacttcacatttaggcatcagtatattttaaggatgatatttcttcaatatggctccctattagacaaacaattagcatataaagaccgcatt

SEQ ID NO: 204260 - DNA, 553 bp, Homo sapiens
atgacttgtgcacacctgggtggctctcttcaagtggatgaagtgcagacacaaggcagagggctaagacttactccatagaataacgagggccattcattcattcctggtgtgatatacaccagaacaggttagaggtttcctaaaagggattgagctgccctgcctgatagtaagctccctgctattggagatattcaagcaaatagcagacagtctactaagtatgtagatgactttcccatcccgggttggattttgtaatttggaacaggagacctctgagccaaaacccattcagaagatttggaattgcatcctgactcctctctccactttctctgcctctgtttccactctccctccttgctcagcctcaggacagagcacacatgcatgcatgcacactcacatacacacatgtgtgcacacaagcacacaagagggtaaagcaattcagaaagcaagagaggagaagagtgtgagaacctgaatggggagaccatgaggggaaggaggcaggaaagacagagaggaaggaatgaagaagaaa

SEQ ID NO: 204261 - DNA, 663 bp, Homo sapiens
cctaaattgtttgaacaaacaagacagtttatgctgaactcttgctttctttctgggagtctggaatttgggggcatggtaggcagagggtacctacatgactagccccaaataaaaactcagggcactcagtctgtaatgagcttcctgtgttgtcacaattcaatgtgggaagaattaatagtcttttgtgactccactggggcactgacttctgggtgcttgcctggctttctctttgctgactgtgttttgtatcccgtccctgtaataaatcttagctgtgagcacgcttggatgttgagcactgtgagtccttctaggaaatcacctgtcctagaagtgatcttggggatactccaacacatggcacaaatcaagtcacatatgctacttaacaggacatgatgagaaaaacactgtaagattcctgtccaagatacataacctgaatctaatcacaggaaaacgagacaaactccaataagggacattctacaaaataactaacttatgattatcaaaagtcaagaatcattaatgtcaagaaaggactgagaatcttttccaaattgaaaaagactaaagaggccgaatgctaaatgtaatgtgggattctggaagaatcttcttctataaaggacattaccggtacatcctgtg

SEQ ID NO: 204262 - DNA, 207 bp, Homo sapiens
ctaaaattaacattctctcttgcctcagaggtttcatcactgctattgttgttgtcgatattgctgtttattaaaactgtattttgtaaattaccagtgagagtgagtggttttaatattactttagtgtccacatagaaattcttcagtgctgagaagataagaccccaaaagattgctcactgtacagggactcttggctagcta

SEQ ID NO: 204263 - DNA, 350 bp, Homo sapiens
cctgactcctctccattcaagttgggctctacagacaagacctcaggttaagaatcttctagaagtaaatacatactataatctatccccaggatactacaaggagcattcttctggtgctggacagaccgagggagaaaaataaacctgtcaccacaaattgtccttgaggacttgaagctgaaatcacatcacctgggtatttcaataagctccaagccattttaaagtggtctcaaactggtactgcctccaggcacctggcagaggcaaaatagccctttatggaagaacacacctgcatcctaggccttgaagaactataatttaaaaaagtgaactcatggaaa

SEQ ID NO: 204264 - DNA, 241 bp, Homo sapiens
gctaattcttaattattatgtgaaataatcataataaactttaaataattgtttttttcctcttttaattccctgcagattctgttcactctctgctatcagttgctgtgtccttaaggaatgcagacaatgttaattcaagcaaaacaatagaaagaaaatgatttgaaatgaaaacttggctttaaaaagttacataatatactctcaagctaaatataggttattttttagtatctgc

SEQ ID NO: 204265 - DNA, 527 bp, Homo sapiens
gtttttctttagagcggttattaccacctgataaatttgcctattcatttaattgttacgctgggaggctagctcctatggatgggatttctttcactgtagcatgcccggggccttagaacattaccaggccgacagtgtacacccaataaatatttgctgaatggaggaagaaggcactgccctaaacttgtgaagccttgaaggcaaagaccagcgaggtctgactgagccgaattcctaggccaaggttggtgtcggggcccacagtagccgaacaggctcacgaatgccgagtgagcaggagaggcttgtgggaagaagagggctgatgatcagttctctctgacctggtttgagaggtcccattttgtaggggttttgtgacgagaaaggcagggagtatatattccaagcaggtgttgagatgcccaaaccataatggctatccatgtgtgtctttattttagttatgttttcctttagattttagtgagaaattctattatttgataacttttaagaga

SEQ ID NO: 204266 - DNA, 1080 bp, Homo sapiens
gcaacagagcaagaccctctctcaaaaaaaaatattagaaagtcttcatgttctccaggaataggaaatccccaaagatgctgtctggaagaggtagggagggaaaaacacatagccttacagaatggacatctggtccccaacgttatgtgagcatcttgagttatgacccactccagaaaatctgttgttcgtctggacactgacaaacctctccacagccccagggacaggaaaccctgcttgctaattaatatgcgactcaactccctttcctgtggtctgctgactcatgcaggagcatcctggcagtctgtggagcccttaggctgtgatgtgactcatctgcgagtctaacagacctggtttatctcagttatggctgagcaaaatcaagcagcgtccttaagctctcctgactacagttccatatctgaaaggtggggataatagcatctaccttgcatttgaaacgccgggcatgcatgctcagatgaataactaccacagcggtgctctctctgtgccaggaactgtcaggcgtgtttcattcatatttcatcttccccagtggggcaattctcaacccctaaagtcagaaataccatccgacccagcaatcccattactggctatatacccaaaggaatacaagttgttccgccatgaagacacatgcacgcgtatgttcattgcagcactactcacaatagcaaagacatggaatcaacccaaatgcccatcaatgatagactggataaagaaaatgtggtacatacacaccatggaatactatacagccatgaaaaggaatgagatcctatcctttgcagggacatagaaggagctggaggccattatcctcagcaaactaatgcaggaacagaaaaccagataccacatgttcttacatttaagtgggagctaaataatgagaacacatggacacatagaggggaacaccacacactggggcctatcagagggtggtgggtgggaggagggagaggatcaggaaaaatagaggtgtatctgtcaccagagttcctcccttcctttttctgtatttcctttactgtt

SEQ ID NO: 204267 - DNA, 612 bp, Homo sapiens
tttggttgagctcaacaacgttcttttatctttctaagccatattcatttctcagggatgattacagaattggttaatttgaaagagttgtagcataaatattgtgactcatgaaatgtttttagtacttgttttagactttcatttcctttggtcatgctcttgtgggagatttaagcagtaatagcattttcatttttctttcctgcattccttacccatgagaaggtaatctttaatacactgtttttacttagtaagttctggtgttttaaagaaatgggttttttattcaatcataatttattgaacacctactaagtgcccagcacagaatcagatgttaatctaacataattttccttttttcaaatggtcttatttgattttttaaaaaatggatattaatgtacactagaatggagatttttgtttaccagttatttgttgctatataaatgtgggttaaattagtttttcttccttataccaccaacctttcagacttttaaaggaattactgtagaattaaaattaatagattcctcagtactggccaaactcatggatttgtggcacttcagaataatattggcttttaatgaacagaat

SEQ ID NO: 204268 - DNA, 411 bp, Homo sapiens
cggctcccagaaacccctacatcagaatctcctagagacattattaaaaatgcagtttcagaggaggttccaagatggccaaataggaacagctccagtctatagctcccagcatgagtgatgcagaagatggtagtttctgcatttccaactgaggtactgggttcatctcactggggcttgtcagatagtgggtgcagcccacacagtgtgggccaaagcagggcggggcatcgcctcacccgggaagtgcaaggagtcagggaattccctttcctagccaagggaagccatgacagatggtacttggaatattgagacactcccaccctaatactgcgcttttccaacggtcttagcaaacagaacaccaggagattatatcctgctcctggctcagagggtcccatg

SEQ ID NO: 204269 - DNA, 436 bp, Homo sapiens
aaaaaaaagccaagaaacaactgacattggtgaaagtctgtaattttcagatccattgatttacagaagaagatgccctgaacctctcagaatattttctagtgtgattttttttaatgattaaaaaaaatgaagaaaatattaaacaagaagatcaaacacatttcattgagtggtgtctcatatgtttttcttgtttgggatctatttttataattgatctttttagtggattcttgattgtagtttaacttatttctcttttgtttctttttgatgatgcatcaattctgacatttcaaaggtacagctggtcttcattagatatgtgctgttattgactttgcttaacaagaacagaccatcatcgtaccaccttgagttaactctgtgccagctggccttgctcttgagaaggtcatttctaaacagaagg

SEQ ID NO: 204270 - DNA, 515 bp, Homo sapiens
tgtaaaaagtctcagaaaaacacacaaagaatcccccaaatactcaagcttcctaatcaaataatataaaaacctatcttgggaaaagaataaatactgaaaaagctttaagtccacacacacacaaaatggacccaactaaataaccttaactaggaaaatgttctacagaatctaagacagcaaaaatgaagcatttgtaatactcacaatgttccatgttaaatacaaaaaggcagtgtaatctaacatataatatgctctcaatgaggaatgcaaagaataaaacacttaaaagaaaaaaaatgtcagcaataggggagaaagatacagaaatacagctctcttttggaaattttcctatttcattaaaaaaattctttagagataatttttctattcgacttttcttagcttctaaaatttctataatgagcttgtgagtacttttgtaataataaaagctttaaaaagtttaacaagaaattggcaaggaaaccaagtctgtttacatc

SEQ ID NO: 204271 - DNA, 338 bp, Homo sapiens
agaaagtgggggggaggagggaaatgagtgtggctctcaaagggcaacatgaggggtgcttttggtgatggaaatgttccatagcttgactgtatcaatgccaatatcctggttgtgatagagtaccacagttttgcaagatgttaccactggaaaaaatggaataaaggatatgggggaattctattatttcttataactgcatgtgaatctataattatcttttttttttttttttttttgagacggagtctcaccttgtcacccaggctggagtgcaatggcaccatctcagctcactgcaacctctgcctcctgggttcaaacgattctcctgc

SEQ ID NO: 204272 - DNA, 398 bp, Homo sapiens
gcaaaattgctcccagttgagaaccactgatgaaaatgataaatgatatactatgcttttaaaagtatccggccagttcactgccctccccgccaccccaaaggccaataagtacatgaaaagatgtttaacatcattagtcattggagaaatgcaaattaaaaaacacattgaggtgccactgcatacccaccagagctatatgttactgaaattattggtttttctcatctgatgcccccactaagccaggagcacctcggttgatttgggatctgggctttaatttggttctctcgtggattatctgaaggatcttgcacgacacttgaagaacaattcttccaacatttccctacattgtgttaaaagggatttttctgcttgttctgtaggaa

SEQ ID NO: 204273 - DNA, 522 bp, Homo sapiens
tctcattgttgttttaatttgtaattctctaatgagaaatgtttagcatcttttcatatgattattttccatttgtagtatttaataaggtgtcttttcagatcatttgcccattttttaattgagttgtttgttttccttttgttcagtgttaagatttctttgtatattttggacacaagttctttatcagatacgtgttttgcaaatattttctcccaatctctggcttgcctttttattctcttaacagtttctttaatggagaaaaacagtttttaattttaatgtagtccaacataccgatttttctttcatcgtgcttttgctgtcatcactaaaaatcatcaccagatgcaagtcatgtcaaattcatgctatgtcttttttaaaatttttattataggttcagggtgtatgtgtgcagatttgttacaaaggcatattatgtgatgctgaggtttgcagtacaatccatctcccaggtagtgagcatagtagtacccaatagatagtttttca

SEQ ID NO: 204274 - DNA, 847 bp, Homo sapiens
gtgggaggtactgggttacacctggggagaagaggatgtaaaaaaagcacagacatgagaattgtggaatgcaagcattttccgtgattagagcctattttaaatgaaatacccagatagagatgtagaatatttttcttcactgattaaaggtgccttgtgctccctcctattaatttctccctacagaagtaaccactattttaacctctaacctctatcaccataaattagtttttgcttgtttctttttcttttccttcctttttttttcttttgagacagggtctcagtctgtcaccctagctggagtgcattggcgcaatctcagctcactgcagccttcacctcccaggctcaagcgatcctcctccttcagcttcctgagtacctggaactacaggtgcatgccatcatgcctggctgattttttttttttttctttcggtagtagagatagggttttaccatgttgcccgggctggagtttttgtttctaaacttcttatggcatatttgtcctccctcccaagggtagtgagaattgatgcttgaatccatctctcttttcttctgtccttgtttggcattgttatgaattgggaggtaaatcaggtgatatttggtactatggcccttttttccccccagtgacaaaatcagagaggtgcttcttagtgttcattaatagtaatcctttagaggttagttttatgacttgatattttgtttagaatgcagagatttgaatttgcctccaccgataacatagttgcctggcttgctgtcattacagtattctctaggcatatagccaggaagtaggtggaggaagttgtggattgcc

SEQ ID NO: 204275 - DNA, 3292 bp, Homo sapiens
ggcacgaggcagctgcggcggggccggtctgtagcctttgctgagtcaacactactcacagtgaaagtgatgccttttctccatttgcacaacatgagtgtgacgtggttagccagaccaggagctcaacctcatgtagaatccagtccactgctctgatgccgaaggggaggcagaaagtgccacacttggatgcccccctgggcctgcccacctgcctctggctggaattagccgggctcttcttactggttccctgggtcatgggcctggcagggacaggtgggcctgatggccagggcacaggggggccgagctgggctgtgcacctggaaagcctggaaggtgacggggaggaagagactctggagcagcaggcggatgccttggcccaggcagcagggctggtgaatgctggacgcatcggagagcttcaggggcactacctctttgtccagcctgctgggcacaggccggccctggaggtggaggccatccggcagcaggtggaggctgtgttggctgggcatgaagctgtgcgctggcactcagagcagaggctgctaaggcgggccaagcgcagcgtccacttcaacgaccccaagtacccgcagcaatggcacctgaataaccgacggagcccgggcagggacatcaacgtgacgggtgtgtgggaacgcaatgtgactgggcgaggggtgacggtggtggtagtggatgacggagtggaacacaccatccaggacattgcacccaactatagccctgagggtagctatgacctcaactctaatgaccctgaccccatgccccacccggatgtggagaatggcaaccaccatggcacgcgatgtgcaggagagatcgcggctgtgcccaacaacagcttctgtgccgtgggcgtggcctacgggagccgcatcgcaggtatccgggtactggatggacctctcacagacagcatggaggcagtggcgttcaacaagcactatcagatcaatgacatctacagctgcagctggggaccagatgacgatgggaagacagtggatggcccccatcagcttggaaaggctgccttacaacatggggtgattgctggtcgccagggctttgggagcatctttgtggtagccagtggcaacggaggccaacacaacgacaactgcaactacgatggctacgccaactccatctacaccgtcaccataggagctgtggatgaggagggacgcatgcctttctatgcagaagaatgtgcctccatgctggcagtcaccttcagtggtggggacaagatgcttcggagcattgtgaccactgactgggaccttcagaagggcactggctgcactgagggccacacagggacctcagctgcagcgcctctggcagctggcatgatagccttaatgctgcaggtgcggccctgcctcacgtggcgtgacgtccagcacatcattgtcttcacagccacccggtatgaggatcgccgtgcagagtgggtcaccaacgaggcaggcttcagccatagccaccagcacggtttcggcctcctcaacgcctggaggctcgtgaatgcagccaagatctggacatctgtcccttacttagcatcctacgtcagtcccgtgttaaaagaaaacaaggcgattccgcagtccccccgttccctggaggtcctgtggaattcagcaggatggacctggagatgtcagggctgaagaccctggagcatgtggcagtgacagtctccatcactcacccacggcgcggcagcttggagctgaagctgttctgccccagtggcatgatgtccctcatcggcgccccccgcagcatggactcatggctctgtgtggagtgcagtagacatcagggacagacaaaggctgttagagagtgccatgagtggaaaatacctgcacgatgacttcgccctgccctgcccaccggggctgaaaattcctgaggaagatggttacaccatcacccccaacaccctcaagaccctggtgctggtaggctgtttcaccgtcttctggactgtttactacatgctggaagtatatttgagccagaggaatgtggcttccaatcaagtttgtaggagtggaccctgccactggccccatcggagccggaaagccaaggaggaagggacagagctagaatcagtgccactttgcagcagcaaggatccagacgaagtggaaacagagagcaggggccctcccaccacctctgacctccttgccccagacctgctggagcaaggggactggagcctgtcccagaacaagagcgccctggactgccctcatcagcacctagacgtaccgcacgggaaggaggagcagatctgctgacctcagggcctgacagtgtgggacaggctcttctttcccaaaattagggagctcttgacagaaagcagttctgatgcttacatctggaatctgaggcatcctctgactccactcaaagagggtgagggccttcttaagatacaaatggtggaggattgctgccagagaagtctggtcagagccacagggtctgcctccagccaaacgggagcttttggtgagaaggtgttggacaggggattggcgcccccctttggtttggcctccatcctcatctctcttgggccaagccagctgcctaggtcccccaagcatgggggaccccttcccacatataagttgagaaggtgcctgccatagccaggagcgcatctcaatggaaacatcactggggtcacttgggaagaggacttcggggtagaggctgggaggagcccctggacatgcctgtcctgaaagcggctgcctccattatccattcccaagatgcctgatcagaaaccaaccatgaatgaacccctggctccttcaccacccccacgattggtatgatgctgccggcacagctgggatacacacggctcccccaggcctgagctgcttcactagggaatcctgcggcaggactgcagagcagatggcagatgcacatgttggaggagagagccttgggagccactgccactccagtcctgccaccaccctgtcttcctctgcaagtgctcagggaaatggccttcccgccggaggccagctatctgcctgacaggctgtgactcttctctcaaccttggccttctcccctcttctgagctagttggttgaattttttttaatgcttaagatttgtttttctcttttcacagcaacattttcttgaatttttttctgcacagcttttccaaaataaaaaccttccaaac

SEQ ID NO: 204276 - DNA, 1963 bp, Homo sapiens
ggcacgaggcagctgcggcggggccggtctgtagcctttgctgagtcaacactactcacagtgaaagtgatgccttttctccatttgcacaacatgagtgtgacgtggttagccagaccaggagctcaacctcatgtagaatccagtccactgctctgatgccgaaggggaggcagaaagtgccacacttggatgcccccctgggcctgcccacctgcctctggctggaattagccgggctcttcttactggttccctgggtcatgggcctggcagggacaggtgggcctgatggccagggcacaggggggccgagctgggctgtgcacctggaaagcctggaaggtgacggggaggaagagactctggagcagcaggcggatgccttggcccaggcagcagggctggtgaatgctggacgcatcggagagcttcaggggcactacctctttgtccagcctgctgggcacaggccggccctggaggtggaggccatccggcagcaggtggaggctgtgttggctgggcatgaagctgtgcgctggcactcagagcagaggctgctaaggcgggccaagcgcagcgtccacttcaacgaccccaagtacccgcagcaatggcacctgaataaccgacggagcccgggcagggacatcaacgtgacgggtgtgtgggaacgcaatgtgactgggcgaggggtgacggtggtggtagtggatgacggagtggaacacaccatccaggacattgcacccaactatagccctgagggtagctatgacctcaactctaatgaccctgaccccatgccccacccggatgtggagaatggcaaccaccatggcacgcgatgtgcaggagagatcgcggctgtgcccaacaacagcttctgtgccgtgggcgtggcctacgggagccgcatcgcaggtatccgggtactggatggacctctcacagacagcatggaggcagtggcgttcaacaagcactatcagatcaatgacatctacagctgcagctggggaccagatgacgatgggaagacagtggatggcccccatcagcttggaaaggctgccttacaacatggggtgattgctggtcgccagggctttgggagcatctttgtggtagccagtggcaacggaggccaacacaacgacaactgcaactacgatggctacgccaactccatctacaccgtcaccataggagctgtggatgaggagggacgcatgcctttctatgcagaagaatgtgcctccatgctggcagtcaccttcagtggtggggacaagatgcttcggagcattgtgaccactgactgggaccttcagaagggcactggctgcactgagggccacacagggacctcagctgcagcgcctctggcagctggcatgatagccttaatgctgcaggtgcggccctgcctcacgtggcgtgacgtccagcacatcattgtcttcacagccacccggtatgaggatcgccgtgcagagtgggtcaccaacgaggcaggcttcagccatagccaccagcacggtttcggcctcctcaacgcctggaggctcgtgaatgcagccaagatctggacatctgtcccttacttagcatcctacgtcagtcccgtgttaaaagaaaacaaggcgattccgcagtccccccgttccctggaggtcctgtggaattcagcaggatggacctggagatgtcagggctgaagaccctggagcatgtggcagtgacagtctccatcactcacccacggcgcggcagcttggagctgaagctgttctgccccagtggcatgatgtccctcatcggcgccccgagcagggactcggatccgacggttcaatgatggacttctccactgtgcgatgtgggggaaagagccgaggaactacaggtgcaacaaggatgtcgggataagcatccaggcggatctcgcgaggagtgc

SEQ ID NO: 204277 - DNA, 413 bp, Homo sapiens
tacctgccaaaaaatggtgcttatatgtgtttgctaattgacagtaataccctagtaggagttgtaggcagtgaagaaatattaagcaacagccaatattataagaaattttcttggaccccttttggagtcaaagagaaccattacaatgtcttagtcttatgggagggccaagaggagtgtgtcagtctacaggcaggtgttgagcatagattcatggacctagcagagcactggctcctgtggggcaatcaaaagctgcagacaagcactgtggttgcagcagaaggccattatcctaaatggactaatgcaagaacagaaaaccaaatactgcatgttctcgcttataagtgagaactaaactttgggtactcatggacgtaaagatggcaacagcagaaactgaagac

SEQ ID NO: 204278 - DNA, 391 bp, Homo sapiens
acaactcaaaagaaccacatctaacattatataacctaaagtactatatctgctcaggaagtaacagtggcttcaccttatttattgtgtcaacttgaaattcttcagaccagcttttaaagttgttccccctccttcacataacatatatatcatcctgggaaaattacttaattattctgcgcctgaatttccttactggaaaatgggataacaaataaatggatgctggttcacatacaaagcaaaacacacacacacacacacacacacacacagcaaaggccaccactaactcctaaaatatagtgatctttaataccagtttatttgaatggggaaaatttgccacacattttctcgttttcttcttcttgtaatgttagagata

SEQ ID NO: 204279 - DNA, 514 bp, Homo sapiens
gaaagttaagaggcaagctgtcactgaaagatgaaagactgaaattaacattatgcagttattggtaatgataaggtcaagaatgtgattataggcatgagtggctgaaggagagtagagaacaagatcaccggagatgttaaagaaactaaaaggtcaacatgctggaacaatcatctatttaagtgttgaaatcaccaaaaattaaaatggggaatgctaaagagagtgaaagtgagccataagaaatgtgatggaatcacccagatgtaaatgacaatcatgagggaatgtgggaagtgtgtctgctaatatgaaactcaaaactgggggattgtctcaaggaagaatacctggaattggcaatgaggagcaaagagtatatactacagggaccaagaaatgtaaacgagtaaaatacacacccaaaaacaagctcagtctagcacaaaactaatgaccaacatatattactgtactataacacagtaacagcttactttcacagagaact

SEQ ID NO: 204280 - DNA, 572 bp, Homo sapiens
aagactgtataaatagtaaaaggttgagtggggtgactgtgagtcctaacactctcttctctattcatccatctcaggagactctaatcattccagtgagcccagacactcagcaatccaatggctgagggatctgaggcacaaacctggagctcaatggatccgggtcacctccaagtctttgaggggtgtcacaggacaaaggaaacagacatgatctgtggtgcccagtggctgagctaagacaaatcgatggaatggaactgcagcaggagacttgatctctcttcactgtaaaaagcaaattccaagagtcagagctacccaaataaaggatgagctaccttggatggtaatgagctgcttatcactagagatgtgcaagactgttttaaatagtaaaaggctgagtggggtgacctgtgagtcctaacactctcttctctattcatccatctcaggagactctaatcattccagtgagcccagacactcagcaatccaatggctgagggatctgaggcacaaacctggagctcaatggatccgggtcagctccttaaagataaacg

SEQ ID NO: 204281 - DNA, 410 bp, Homo sapiens
ggaaaacaggtataaatattgcaagaactgtccattgataaatgcacaggtgacacacaatttaaggatccatggctgttatagaagtcattcagttcaaacagttaacatttaaatttaaacatttcattttttgtttcttccctaaaacgctttcatccttctctacattaacagagcgtcaattttttagataaatcaaacatgagcgtaaaaacgtaatgaccacttttctccaaaccagaagacaatattacatctttggaattatacattactctcttattttcttattgaacaatcacaaattctcttcatggtaccacacaaaactgaatctgtaatgtcaggagatttagatgttccacataagataattaaaacaaatcttactccataagtgctaaaca

SEQ ID NO: 204282 - DNA, 593 bp, Homo sapiens
tggttttaagtgctggccccagcacttactggctaggtgatgttggcaaagttacctaccttctctgaggtacattttcttcatttgtacaggattatatgagtatgtctatgtaaatatttatgtgtataaaagatgtccccaagggacattttctatcccccagcctatcccaaggacacaaagacttacttcccacctatatggctccatgccatccatgaatggaacatagccttaaaatgtcgataacaacagtatcttcctaaaagagttatgaggattaaatgagatgattcacataaaccatttaacacaatggcacctaaatcctctaaatgttgtgccttgctgtattcctgtttgtactttgtaagtttgaaataattgaagtgcctaggggaagccagataaccaaacatattaaattaataacctttaatattttgtaggggcttaagtctctaagtaggttgggagggtttggggaggaacgattaaaagatttgtagagataaagacaaaaaaaggtagaatgcgatacatgctaaatgggtggtacaaagtagtatagaagtttacaggagaaagtg

SEQ ID NO: 204283 - DNA, 369 bp, Homo sapiens
ctattgtaagcccctgagttccagggtggtttgttacatagcactgttgtggccattactgactaatgcatcctgtcctttgtattaagagagtgtggctgcctccaccaacatggtgcattctcccatagtgatggtggtctgtgatgactcaagaactcctggatccatgggaagaatccattcagctgtggaccagagttaggggtgaggtttgagaagccgaaggggagtagaaagaacactgtactgggaatcaggagacccaagttgcagactcagacctgccatgaatactctaagtgacctttggctgataactttccctctctgggcctccgttccataacctatgaaacatggcagtca

SEQ ID NO: 204284 - DNA, 411 bp, Homo sapiens
tgctaggttgagttacttgaacagtttcacctcattaagtgtttgctgattgccagaaacctattagcgttgctcttatctctttattcaatatgacattattcgtaatgtccctttgacaacctatagataggccatttcaagttcttgtcagtcctcagttgtgctagtacaatagtagaaactagtggaatagcactaagcgcctttagatgttttaggcaggggctgtaacaaacaagtttgggaatatttgaataaatagttgaaatcagagtttgaaaacaaacttcgaaatcatatatagaatgttaaattaatagcattcaagccagaccatttaggcaactgaaataagtgtttgaatccctgctatgtactggacacagtgatgggcatttaaaatatcct

SEQ ID NO: 204285 - DNA, 1299 bp, Homo sapiens
aatacgcaggaagagataccccgtggacatgtttcccttggaaagtggagggaaccctctgagccgtgattccgcctgaattaagcagtggcgggcactggcctggcaggcggcttctactgccttggatttgcacctctaaggggtcacaggggccacccccgaaacaagacaaagtgtgatcatggacaggccctcggggggccggaagaaggaacggctccagtgatgaaagctgaacgccagctctctccccatcgttctcccggaccaggagagggctgctcggcagggctaggtttaaaaaccttccatgcaacttacgaaggcatccacagtgacttctgctgctgtggtacgttctgccctcccctcctccccgccccatcctgttctcggctacaagttatttatatgtacagtgtcatctgaacgtgcacgggcctatcccaggacatcacacacaaagaggcggcggtgaacccaagccgccgggccggcctgtggctcagtgtgtgtttcagaagtcccggccccaggcagctctcctgaacagagccactggaactcaggagggtcaggaccacagcccaaacaactgcgaccgaaaacaccctacagggcttgagaactaaaaaataaggagggatctgggcagccgagctgcctcctaaagaagccacgtcatagagaaaactgcttgctctatccatgagacggaggcggccggggtgtcctgccagcagacacgggtctgtccatcaccggccaccgcgctgcctctgtccttcactcccatttaagggaaaacgatatctcttcatctttctgccctggacattggaaatcagcggtgagaacagtgctcttgctacaaaatgctcaggttctagaatgctcccatctttccttccattccacatggagtttatccaaagcacaaaggccagtcacggcactgacatccgtggtgcccgctcaccggggagtgggaagcacaagcctgtcctcagaggaccgtgactgtgagcccgcagctgcttgtgggtggggccagcccgcagctcctcctggaggcctcgggcttcttgctgctgcatttctgtgacatgtggagggaggatcgttttgacacctgcctgggaagtttcaaaggagatggcctctgggcaggggttttaaactgaagggcaccacacagatccagatgtgaactgtggctgttgtttgcaattgaagcagagatgcagaggatggaacaggagtgctggccatgctgctctatggccttggcccagc

SEQ ID NO: 204286 - DNA, 391 bp, Homo sapiens
tggcttctggaaaagtctttcccaccctcaattgagtcctttcataggttggggcatttatatgttgtatgttccccaatcaaaaaagctcttcttacatttgaatattgacaacaggcatgtggaagctgaaaagaaaaggcagaaagccatcatgaaagtgctaccacagagagcgatgcccagacaccaatataaagagtgtgatgcaatttttacaagtcttaattgtgaaatgccaaacactcccaacacaaaggaaagtcaaatgtcacttattcccatgatgtgttgagaggtgcagtcccaaagcacacatttctaatgcttggccaagagctaggtaaataaatggtgagggcaaaatgccacaaccccccagcgaacgggc

SEQ ID NO: 204287 - DNA, 372 bp, Homo sapiens
ctggagaggccatagggatcccgagtgccaggactgggtacaggaggggcaggatggccgaggaggcagcctgagcaggaggggctcggcccccggcagtggccctgccacatggggtggcccaggcagcggcccagcgcccaggcctgggcctcgggagaatgtgatggggagagggaggaggaggaggttccgagggaggggcagaagcaatagaagcatggccgtgcccttgcagcctgcttagactccagtcagccacttgtacctgggaggccgggctgagtgcagaatcaggcccccccgccaccgcctccctgagaggccggggagcccacagctttgatctcaataaaagccaaggcctgcacg

SEQ ID NO: 204288 - DNA, 376 bp, Homo sapiens
tgagtgggtcatcactctcctaacaggtacacagatgccatctagtgatggagaacagaaatgcaagtttttcaagtaaaatgccggacgaaggcatggggttttttgttgtgtggtgtttagaaatatgtttcagtgtaggttacttaaggtgttgcacagagatacagttaatgcattattattgttagatcatatgcagttagaatggaattaagcaagttgttgacgagtacaactttaaaagattttggcattagagagtctcattttataggcctttgtcttgttctgagtctggtcattgaggataagaaacacctcattgtaaaaatgggatataattattaataacagattgaattaatttttgggt

SEQ ID NO: 204289 - DNA, 438 bp, Homo sapiens
  misc_feature (428)..(428): n is a, c, g, or t
aaatactgagttcggaaaataatattttaggcttttggttaacataaagcagtggtagtgacaactactaacaatcacactaataccttttattgataaagcaccatatatgtttgaaatgattatatgtgacagcaggacattttgttttgtttctactatatccccagtgctggacatacagtgactgctcaataaaaactcactcagtgaataaataaatgaatctgataaagcaggccttggagtttggtaaggctgtttgttcaaaagcaaagtaaaaaagtatttcaatcattctttgagaagcaggttaggctaatctacctttataaataggactgtacatcaagctccaattatctctctcccatagcttcttagctagtttctctttttctaacctcacctaccaactcagttgggtnccgagctcga

SEQ ID NO: 204290 - DNA, 363 bp, Homo sapiens
aatagtggtaatctatgggtaattactttctggatgatttcatttcctcattcatagttttctatggtgagcatgctttgttcttaaaatcagaagaaaaagaaacttaaagtgtatgtgtttgtaatactaaactatttattttcatcaaaataggtagaaagggagaaatcttagcctattccctaaatggcaagtttagttataatttttttttttttttttttgagacggagtcttgctctgtcgcccaggctggagtgcagtggtgagatctccactcactgcaacctccgcctcccggatccaagtgattctcttgcctcagcctaccaagtagctgggactacaggtgcccgccac

SEQ ID NO: 204291 - DNA, 868 bp, Homo sapiens
tggccaggctggtctcgaactcatgacctcgtgatctgcctgcctcggcctcccaaagtgctaggattacaggcaagagccactgcgctggcctcaagttcttttcaataaaagaaagaaatagagaagaccgaaaacctttccttatatgtcttagaatataaatagatgtttatttataatgattatttttagtagtggtgctttttgtgtcacttaatggaagactacttgtattcatttgaataggtaatttatgtgactgaaatttcctttcttttcttttttttttgagacggagttttgctcttgttgcccaggttggagtgcagtggcacgatcttggctcactgcaacctctgcttcctgggttcaagcgattctcctgcctctgcctcccgagtagttgggattccaggcgcctgccccaacacccagctgatttttgtatttttagtagagacgaggtttcaccatgtggcaggctagtctcgaactctgacctcaggtgatccgccgtctcgcctccaaagtgctgggatatagggtgtgagccaccgcgcccagctgtgacgaacttcccaaaggcatgcagtcagcaaatctcttccttcggtcattcccagacaccacgaacgaggccacaggtaccaagtcaatcaagtcacacgtattctccactgacacaatggggttaatacatcaccacagtgaggggggagcggcgggcggccaccacacaaggggccgcccgcaaacggcccctcgcggacacggggcaccacagatggaaaccgcccggcaaagcaacgccaggccgaacccacgcacacaccgcacacagggacaacggcgcacatacccaccc

SEQ ID NO: 204292 - DNA, 496 bp, Homo sapiens
atagatgtcaggtgactcccaagtgagttggtggagcagctaggaggatagtaatgtcttcactgagattagaaacaaaataagagaatatatgttagggaaggaagaagtctttgttttgaccatgtaaaatttgaagtgcatgtgagccaaccagtcatatatgtgtagtgtgcaattagatattcattcaacactgttggaagagcacctactctgtgcctggtactgttctacacactgaaataggtaaagcagcagcaaaacaaatggttcctactcctgttttttagagggaaacagcatataaacaagttttaaaaataagaggagagagaatatcccataaattcgtgaagaaggctgggtgcagtggctcatgccagtaatcccagcagtttgggaggccgaggtgggtggatctcctgagttcaggagttaaagagcagcctggccaacatggcaaaaccccgtctctactgaaaaaaattagctg

SEQ ID NO: 204293 - DNA, 1392 bp, Homo sapiens
ccatcttggaaaaagaaagaaaaaagaaaaacatgattgatctccatgcatcaatatcatgcctgcctcctaaggcagaggtaatgaagacttaattcccttctgtaggccttcccctcctccctaagccgttttctgagagaggtgcaggagcaggtgggttggggcaggctgcatacacagtgggggtgggttgtgctgctaagcagcagcaggtccacaatcccccctctgcatagctcctggggggaaaggatggaggagcgtgtgcacggctgcctgcctgttgaaggtggtggttctaattttataaacctcctctgcacagatgggtaggctagcacttgctgccactcctgagctgtgaagtcagcgattacctcactcagatagctggtcaggccctgcactgtaggtcctaataggccagtggacagattgaggaaaacaggagcttctgaagggcataacagagagcaaaaccactgaagctgagtggctgcagctgcagccagggaaagagccagtaggatgggggagaattccactgacctttatgtttacctagcctggtttctaggggtgtagattcctggctagggcccttattccttgtcttgactgtcttcatgacaccaatttggcatttcaggagagcggttaagaaaaggagttgtgtctgtccaaaagctggcaaggccagagctggattgtttggggtagagactggatggccgtcattctcttttgcctccatccctcctccccagagttggaggaaagcagtggattttgtggttagtcattctttggactcacactaaaagaaacattggtgccatgttcaaatatatcagaagacctaggaaataagaaatttgacctacttttctaaatgaaatcccagactgagcaaagagctcaccacatttgaaagcttgaacaaagggggcctaggctaagtccagaggcctagaacaaatgcttttttattttctacataacaaggggaaattccttgttatgtagaaaatagctggagacaaatggtgctatagagtgactcataacaaactacggtgatataggtctagggacaaaagcaggccactgataagtggcagatgcctgatccccctaggtagtggggagtgtgagactgggttataagaagccttcactatcttttaggaccctcccttgaggaggccagtctaccacaattgctttagaatgaaggtcttttggttgctcacaagactataatggtaatttttggctcatcatttttgtgtgtgtgggttttatcttaattcattgttaaagagatagtgggtttcccctgagctagtttcctatcatctgtgcctatgtttgcttcactgagctatg

SEQ ID NO: 204294 - DNA, 439 bp, Homo sapiens
agatatgtctttaaatgcattagctagaaagggctttggttatgctcaaaattgcccagtttaattttactaaatgtagtgtagtagatgtaactggaggtagtttcctggcttacagttctcccagcagccacattcatgctacacttttttctaataataggctcaattccaaatcatggaggtgggcaagtgacccaggtagatcaattataatgcctcattcctctagcctgtgattagtccacatagtggacacatgacccaagctgggcttgatcagcctttctccatggagggaagaataaagctaacaggaaaagagcagcagagataagagactgacagtttttaaattcctggctctagtcactccagcactttcatggtttgagaacatcagccaataaaggcctccttttttgcttaaattagttca

SEQ ID NO: 204295 - DNA, 258 bp, Homo sapiens
ttacattgggagtgtgtattagttataagtactgtgtttttcctatgttaatacttttcagaattttaatatgattacttacattaatggtatttttagtaatacattttttaaaagaaataatttaaaaaatagagatttgtccatttcatctgacaagtagttcataactggagaagtagtagataaagaggctaaaattgtaagtaggagacctggaataccaaccaggattatgtacctaattctataaagtgt

SEQ ID NO: 204296 - DNA, 449 bp, Homo sapiens
ttgggccaacgcaccgtcatggcttcccctggcagtctccaggaactggcaggcatgggtcgccccacactcagcactccgaaacttttttatttcccggcaagatagaggctttctggccccactgtggccccagccaagggcatcgcggagctgcccacaaaagcgaccagagtaaacggccccgttctctggctgtcagtggccagtggcttcccttatgcgtatctcaaaatggctgccggggcagctgcaccctgtgggctgactggtcttcgggatgcctggctgatctgtctcggggcctctagagtagctgcttctccaaggggtcccaatggcaggtccgctttgttctagggctctacgcccgggtcggggaaaccctggcttaggcagagtccaccccgccccgcccatcctcactcttctcggtgcctggcagaagg

SEQ ID NO: 204297 - DNA, 152 bp, Homo sapiens
tctcctcagcagggccacacgctctgtgaaggctgggtgacactgtatttatcttggtgtccccaaaagcctagaaacagtgtcttaggcatagtagacactactaaatgtctggtgaagtaaattatgggatgttggtggggtaccaaatt

SEQ ID NO: 204298 - DNA, 380 bp, Homo sapiens
tcatttaaaaagagaaaagaaattttagagagtttatcttgttggattatcggatgttatttttctctttttaatgccatatacttttcaaattttcagtgggctggtattacttttgtatttaaaaaagaaaaatataaggaaaaagaaacctgtcacacactttctagtggattttactgatcagtcatctctgtatttctggcatcagcaaactgagccagaaactcagtgcctcccatttctttctttttttttttttagacggagtcttgctctgttgcccaggctagagttcagtgagccactgcaaccaagtggcaaccgagatcgtgccactgcactccagcctgggcgatagagcaagagtacatctcaaa

SEQ ID NO: 204299 - DNA, 187 bp, Homo sapiens
tttacaaattctccaacactaacctagagtgttcaaaatgatgagtctgaccacggttaccaccgtcttcctacagacagacaatctctataagatgggtagatcaatagtcacataaactgttaaattttactatgctacaagactggctctctatttgcaaaattcatatgaataacataagagc

SEQ ID NO: 204300 - DNA, 324 bp, Homo sapiens
  misc_feature (6)..(6): n is a, c, g, or t
aatcgngctcggtaccgtatctctaacattataaacataaaacacaaggaactgagacaaactgatctaacatgattacctgttcctgtatgtaagttaaaaaattagacatctgtaattggaatatgggtatctaagtcactgcatacttgagatgcactaaaaatatttatactacatttagaaaaaaagtaagttaatttttctggatactttttaatgtttaatcgttcatgtttaatttaaaagtcttgagctacttaacctctctatgattcagttttatcatatctaaaatgagaataactgctaatgttagagata

SEQ ID NO: 204301 - DNA, 377 bp, Homo sapiens
cccgcctccccaccccatgaatgtgcacagcaccacctcgtgtcccagtagcgcagctttggggagtttggaaacactcctggtttgggattcactcagcaaatatttaatgtgtgtgtgctgtggccaggtaaaatgccaggtactatcttcctctacatggcagggacagacatgtgttcctcaagctcactggggatagcaccacctttctaaagttcctctcatctgttgcccggcctccaaacccggtggtcctttattaattcagctgtggcatgggcgttcatactctcagcttcctttactgcgtttcctactgtttctggcttcaagttgttgaagtcaaaataaaaaagtagagactgagctctaaa

SEQ ID NO: 204302 - DNA, 1619 bp, Homo sapiens
gccttcgccgcttctgcagccaccggcgggggggggaacgaggcagtactgccgcggacgctcaccaaccgcttcggcttttcccccctccgggtctcctcgacctttcctgagagccggaatccgactgtagggggaagaaagactcaagagcagatgcttgaactgaaataactttattttggggggttactttgctgacccttagcgcagggcttcctttcccttccccctccgccgccagtaccaatccaactccccatctttctctttgtttttcctctttttctttttctctccctgttgccgctgtctccgcgtccttcccctccgttgccgcccagggcgccgagccagactatgggtcccaggtgggggctgagcggcggcagcagcgcgggcggtccagtcacggtgcgcactgcagcggggatggaggggctcagttggctggtggttttctcttgacatggctcctgcccgtgctaccagcagcgcccccgccgccgccgcctcttccgccgccgccaccgctccgcccgcaggctgcggctagagggcccaaaccccgccctagagtcggtccgtgagtcccgggctccgcggggacagggaggggatttccccgtcacccaccccgccctagctgcctcaattccaccccctgcccctcgggaaacaactaacgaccccaccctaaacaatccaaactctggaaacatggtctgttcaacgtgagagagagctaatccgggaacttaattttttggggggagggtgggtgggcttactttagaagtaatattaacacaattattttctttttttcccccactgaaccttcccatttaccctctcccgcccactccacccgggcgggaattgtttccacgatgaaatgagtgaaaacctgagtgatcctgtgtctcccgtggtgcgagtgagtcgctgccgctgaaggcaaggggtgggggtgggacctgcgggggtggaaggcaggtggtctccgggcaccgcctgggatttgggagaagaacccgccacctttgcctcggcaatgctcacaagaagataaatcgcactccccaccattttgaacgggggcagatccacagggaagtctcccttggggaatgtaggactagttgcaggctgggggtgttgggaacccgggcattaatcaggtctaaccacagagccggaataattaataccgtattatataccccttttccttctgccgtcatgattctccttggcagcagcgttagcagccgcctgagggtgaaaatgtgggtgatggggaagttggtaatgactccgctgttttttctcatggctcctttgggccacagctgcccgcccccggtatacactgtagttgattgcagggaaaccctgtacctctccctttccttctctaccgattttgcacttttctctatgctcaccaccaagtgtaatcaataacaagcactgacaatacatagcaatagtgaaatctgaaataactaagaattaggtactacagccatggagctggctgggtaaaatctaattggatatttcagtttcattcacctaccctgttttggtgtttggttttggttttggttttg

SEQ ID NO: 204303 - DNA, 391 bp, Homo sapiens
tcagtcggtaccagtgatgcatgtagtcccagctacttgggaggctgaggcacaggaatcgcttgaacccgggaggcggaggttgtactgagctgagattgtaccactgcactccggcatgggcaatgcagcaggactgtttccaaaaaaaaaaaatcctaataaatccgcaatagtaagtgaattagattatgctgacactcctgggccctcgtctctatcccctccttaagggaggaagatgcttcgtagtggtgagaatggcgtttcctaatccccacctgatatggtttgaatatgtgtctccacccaaatctcatgttgaaatgtaatccctgatgctgaaggtgggtcctggtgggaggtgattggaccatgggggtagtttctc

SEQ ID NO: 204304 - DNA, 404 bp, Homo sapiens
ataattaaaccattttggttcagagcatgtagcctcccatttcacagaaggaacagtttgcagaatgcatggtatgctttggtcttagtaatgacactttaaatgtgattctccccaaactcctaagttttaaaagtatatatcaaaaggctttaagctgtactgatgacacatctcattggaaaatccctacgctgtaccccagctttcttacttcctggcattcactttccctgattcatttatgagatagtgcttgttgttaaagactactgtcaccgtgaaaaggttcagcctgtgtgacctggcattccctaatttctcattcatgacttcctgagtttttggggggatttgattgtggtattggtagggaataaaaatatggagagaacaagataagc

SEQ ID NO: 204305 - DNA, 350 bp, Homo sapiens
tgaaacaggccatagggatgcagcaatggcattgtggaaactaccatttctggcaaatgaagacttggaggttgggcgcagtggttcacaactgtaatcccagcactttgggaggccgaggcaggtggatcacctgaggttagcagttcaagaccagcctggccaacatgcgaaaccctgtctctactaaaaatacaaaaaattagccaggcatgttggcatgcacatgtagtcccagctacttgggaggccaaggcaggagaattgcttgaacccgggaggtggaggctgcagtgagccgagattacaccactgcactccaacctgggcaaaatagtgagactccatct

SEQ ID NO: 204306 - DNA, 696 bp, Homo sapiens
aataactatacaaagggctacagtaaccaaaacagcatggtactggtaccaaaacagagatatagatcgatggaacagaacagagccctcagaaataatgccacatatctacgactatctgatctttcacaaacctgagaaaaacaagcaatggggaaaggattccctatttaataaatggtgctgggaaaactggctagccatatgaagaaagctgaaactggatcccttccttacaccttatacaaaactcaattcaagatggattacagatttaaacgttaggccctctaacttttcactaggcatgaccactgctctattttagatagagattcagtggggcaaaacctgagaattatctgcccggctatcaagaagatagctccttgcatttttgcggggagagcacttttgcttcaagggagtgtttcttcctaggattataaatctttctgtaacctcaggaaacactgctgatgaaaaccaggcatggtggctctggcctgtaatcccagtgactcgggggctgaggcaggaggatcacttaagcccaggagttggaggctgcagtgagctatgatggcaccactgcactccagcctgggacacagagacagacgctgtctctgaaagaaaaagaaaaaagaaagaaaaacattgctgatgaaactgcggcctcttttgcagctcaat

SEQ ID NO: 204307 - DNA, 145 bp, Homo sapiens
attttagagtaaaaaactgcaaggcgtgatttgaataaggatataagaaattttacatcattttctttatattgtgttcacagtcaatagtttatgctgtaatagtttatgctgtaatagtttatgctgtaatagtttatgctgt

SEQ ID NO: 204308 - DNA, 347 bp, Homo sapiens
acgcatcctgccatctggggtgaggctagacccattttacagataagggggtccggagggttaattgacctgtccaaggtcagcaagtagggcccagctgagaactgaaggaagtgggcaacagttagaaggaggctttgttttcctctcctctcccaaacctacaccagggtcttcctgaaaggagggagggaattggtgtctcttgctggactgggccttctggtctggggaggaagaataaggatgaagtctcccttgtggtctgagatagttggaggaggttgcagtgagccgaggtctttgtgtaactgcactccagcctgggagagcgagactctgactca

SEQ ID NO: 204309 - DNA, 336 bp, Homo sapiens
gtaaaccagaagtatccaaatacgacatgaaatctctaaaacaacaacaaaaccaaaccaaaccgcagcactagcaaatcacagactgcctgatctacccactgtttacagaggcagcagctacttccagcactgtctctcatcagtgcccggggctgtgggtctcattctagattttgtctacatttttttacatggttctcctgattccctgctccccctccccaccaccgccccgcctggagatggagccttgctctgtctccagggaggttgcagtgagccgaggtctttgtgtaactgcactccagcctgggagagcgagactctgactca

SEQ ID NO: 204310 - DNA, 422 bp, Homo sapiens
gtaaaccagaagtatccaaatacgacatgaaatctctaaaacaacaacaaaaccaaaccaaaccgcagcactagcaaatcacagactgcctgatctacccactgtttacagaggcagcagctacttccagcactgtctctcatcagtgcccggggctgtgggtctcattctagattttgtctacatttttttacatggttctcctgattccctgctccccctccccaccaccgccccgcctggagatggagccttgctctgtctccaggctggagtacaatggtgccatctctgctcactgcaacctccacctcccgggttcaagcgattcttctgcctcagcctcctgagtagctagaattacaggcacatgccaccacgcccggctaatttttgtattcttagtagagatggggtttcac

SEQ ID NO: 204311 - DNA, 486 bp, Homo sapiens
atttgagagtgctgatgtgaggatttcatcttggttaactgaaggaaataataatttgtttaagatcatcaacatgtgatcaacttgaaataagagcttctcagtgttatgaaaattgtgagttgataatgtgtaacacaatcagactaaaataagccttattaaagcagatttctctaagggtacttctgcttcattttgccaattctggactctgcaatcttaatttcattggttagggaggatctactccctctaacacaatacatgcaaatcataaattagaattggttgcatataatgtaatagagaagctgtattcagcttactcaattagcagaaatgtatatgcaactggtataacacacattaacagattggagtgctaatatgaacatatctctcatttcaaaattaaaactggtagggaccccatttttcagattaggaggaagtccagcatctttctaaagaaatccctcactg

SEQ ID NO: 204312 - DNA, 509 bp, Homo sapiens
tccctctccaaactagccagccactgagaccttctgacaggacacccccaggatgtcacccaaaaaagttgggacagaacaagtcaactggcaagtccattgctcagcttgttgaaatactctgcacagaatgcaaggaaaaactgttttcatgaggtagcccatgaagcgatgaagcaaggcaaatttatctgcctggataacctcctgtatgctgttttcactccatggagagtcaacacaacagacttctgagttgtattatcgagctccttcaacagggcattgctgtaagatcctagatcccacactccatggtgtgatgttttagccaagtctggaagtagcacaggccctaaaatctcatgattgcaggttgtcaactctgctgtaggcttgccacttcaagggcaagtggttggttggggctgggatttgggcagagccatagaaagaaagggaacattcaagggaatttgatgatgtgcatgatgtctctgtctgataca

SEQ ID NO: 204313 - DNA, 118 bp, Homo sapiens
tgctgggattacagacgtgagccactgtgcctagccctagttttttttattgtctgtatagatggggtttccctgtcttgcccaggttggtctggaactcctggactcaagcgaacct

SEQ ID NO: 204314 - DNA, 300 bp, Homo sapiens
gatccccggtggtgtccctgcaggcaatctaagaaagaattccacctccttcccatgtgactttgggctgggctcacctatgttgcctaggctggtctcgaactcctggccccaagtgattctcctacctcagcctcccaaagtgttgagattacaggtgtgagctaccgtgcccagatgaggatgagctttattgaggagtgaggcaatgggctaggaacgcgtaaaatctgcctccagcagccacaaagcactgatgttccaagacccccattacaggagagaaaaattgaggtccag

SEQ ID NO: 204315 - DNA, 478 bp, Homo sapiens
gggatgggctggtcctgggggcatgctcaggcttctgctgcctaggaaatgtgcccactgggggcttagaggcctgagtgtgccactgcaggtggacccaggcagacatgcagccctggaaaagggcacaacggcagtcacaagaatcccggacgtggataccactcatagagctcactaacccgccacagcaccctgactgcagagtctttctttctacccatcttacagatgaggaaactgaggctcaaggaggtaaagtgactcgcccaggtacacagctggtgaggagaggagatgggcacagtctgccctgtctccgttacattataggaaagttagggatttgttatttggggggacgggtcagctgatgcctgtgggcatcgtggggactgctcagacatgcagccctggaaaagggcacaacggcagtcacaagaatcccggacgtggataccactcatagagctcacaa

SEQ ID NO: 204316 - DNA, 490 bp, Homo sapiens
aattaacttgcatgtagtagggtgagaagcatctgcttgtcaactgacatttaaatagcaattgccagtggaaagtaagcatatggttagttgaatgaagagccagaaagagacaaatacatccaataaaagattttagcactttctcaatttatatgttagtgtttgcaatctgcttctgcaagtcagctgagatgttgatctcactcactgaccttgtctgacccgaggcgtccaaatcagcaccaaccttggtttagtctttaacggctgagacagaattctcaaaggagtgttccctggaacagcagcatcagcgccacctgggaacttcttagacatgcaaattcttaggctccaacccagatctcctgaatcagagactctgagggtgtggcccacaatctggggttaacaagccctctgttgactctgctgctcacacaagttggagaacactggtctaagagaagcataaattgaggtggag

SEQ ID NO: 204317 - DNA, 657 bp, Homo sapiens
caataatccctacttttggggaattcttccttatccttctagttacccaagccaaatctagtacttattctataattcttcttctttcccacctatacatgaatctcttatcatgttttgtcggttctatctttgaaatctgtcttaaatctggcccttctccatttcttctgcctctgtcttatttcaggccctcattatttttgcctgagctccagtggcctcttacctaatcttcctgcctctagacagttctttcctattcattcctatttctggcaaagtgattccagagagatctttctaaaactcagtatgcccctgccattcttcttgggatactttaatgttccattattgtcagcataaagcccaaactccttggtatggtttgtaggtccccctatgaactttctcctctgtacctgttcagaattgtatgtcttgacattccctgacaggtgttctatgctccagtcatattgaactatctgtacatctctgggaccatgctgtttattgcttattatgcttttgcacattctgttcccttgaaatatattctgtcttgtttagttggttacttcctctgagatgctcagtcatttattcagtaagtatttttttaccactcactgtatgttaggtactgttcta

SEQ ID NO: 204318 - DNA, 777 bp, Homo sapiens
aggtgaggactgtgccacttgaccttgctgggttgcaggttttgctgatactggctgtggggcccttgagtgctcaaggagcatttattgagtgcctcctgtttgcagacactgggctctgtgagccacaggcatgcttacccacaccctccattaggtttggatcccgacaccacccctctgggagttccttagggcctcacttctaggggggtacccagccccctggccaagctgccccttcccatgccagaaagcatgtggggtgccaggagagactggtctcagcttcaggcttgtggttttttttttttgttttttttttttaagggaatgtctttcttgctaagcactttattattgctgacaagccactggcatgcagggcggagtcccacatcttgactccagccaagcatcactgcagcctgggtggagtgtgagaactgcgttcctgtcccactctgccactgccgcgctgtgtcaccttagacaagtcactggcggcgagcctcgcttcagtcatccatacggcgaggcggcaccttcgcagcttctccgcagggctgagggtctggagggggccctggcgtgcaagccctttgcaggtggtgacttgtggcgggaaccacttggagctgtgtggttcccatctggcctggagagaccaggggtggagtgagatcctggggatgggaggtgtgggccagggtgccccatggagcctgacagggtactgggcacccgcgagagaggtatcagtgcctgcccagtgcc

SEQ ID NO: 204319 - DNA, 1353 bp, Homo sapiens
cttcctcgccgccgacgtcggcccgccgccccttcttttcctttgccttccccccgcgccgcgcccggagaccccgcccagcacccagcggctcggctactcccggcgcgccccgagagctacggggatgagaggcggcgccggcgcccgggtgatacagccggcgttctgtacgtcagccaccgctctgaagagagaaaagcggcggtgtcctgcggagagagccgctccctccactgcccgaggggagcgcgtcgcctcagccgctcgaaagcaggaaatgggcggcaaaagcgcagtcagacaccaactggttctggactgcccccgagaggcagcgagcagcgctcccgcgcttcgcccgctaggagctgccgccacgtcccgagctgcgccgctcgcgcccctccctgctccgagtccccggtgggggctgggctgcggccgagtccggtacccgggcccccacccgcgccgcgctgtcgaacccgccgccggcccgctctcggcgccgataatcgccggcgggcatcccgcagaggctgccgccggctccgccaaacagcagccaaggcatagccgggaagtccccaggccacccgttccccagcacccttcggggaattcccgttcagctctacaggaggcgaaaacggaacaaacgaaaaccccttaacagtgaaaccgggcccggcgatggcccgggtggcgactgcgacgactcgacgcgtgcggacacaagacccgtctcgcgctccgctgctcctgtgcgtccggacgaaccttagagatcacttaaggaggctcgcgcgctactcctcaccacgtgaccgccccgccaggccgccccccgcgccgccatcttacatccgggacagaggcggcgtcccctttccctgccttggcaggcgtcagcgtgctaccagaaatcagccctgaaagaggggaccccgattccacgtcaccagagtgctgaggcagcgggcgatgccctccatcggctcagcgggggggagtggagtcccaaacttttttcggcctttgcccgcaaagaagatggcggcgcatatcgccgcctaagcggacacgttgtaccctggccgtggtttgaagtttccggcacctcctttcccaaccagcaaggacacaaccatacgagccccacccacgcggggtggctgccgtgctacattccgcagaaaacaggcgggaaagctgcggcacagcccgctttaaacgcaagcttttgggacttctggttttggctttttctttttaagccaagttagggagaaggctgactgccatggagccacttctgcttttggcccagacaacttacgggattttttt

SEQ ID NO: 204320 - DNA, 447 bp, Homo sapiens
ctagctatgcctgagtactatcagattacactatctgctccctgaagcatcatcccttcctttactgtcagtccccaggggtcatagagtaggtgtcacagatgcagaggttccctccaagaaacaggcagagactttaggagggcatctcagaaagtgggtgagaagctgggacagacatggaagatgcttccagagtatcacacttagtttcaacttggtcctctcaccctgttattccttgtccccctagcccaaaggcaggaagagagggaaacctaaaaaaaaagtcaggcctgggggcaacattcaggaatgttcctgtctaggaaggcgatggaaggggtccaaggacagatctccctcctgatctccctaaggctttcagagcttgttgagtcgacactttatcctggccctgatgaagaagcacccctcctgccccca

SEQ ID NO: 204321 - DNA, 471 bp, Homo sapiens
ggaaaaacaagagtgggattagctagtggctatgagggccaagctgaagttctgtaatgtgtacttgctgtgtgcccaagtccacatagttttctacagcccagaccccataccaaggtcacagacatatacacagactcacacacatgcgtacatgcacacacatgcacctgcagattcacatcctggaacacttaaacacatcaatctcgacaagggaattatttattgatctacggttttcatacagtgaagtatataggtctcaagtgttcagtttggttttgacaaattccacccttgtaacaaccacccaaaacaaactataaaacattgccattattccagaaagttctctcatgctcctttccattcatctgccaagacagctatttcctgatttctatgatcgtaaagttgctttgcctatttgtcatcggataggaaaatatacaaatacattgacagcct

SEQ ID NO: 204322 - DNA, 98 bp, Homo sapiens
tgtgagcaaaggactctgtgtcataaataagtttaaggaaaggtgctgtgcctggatgtgcacataggccagatttatgtttgactttacacaaacat

SEQ ID NO: 204323 - DNA, 482 bp, Homo sapiens
  misc_feature (5)..(5): n is a, c, g, or t
tcagnctagaggaccccaagcagttatacagactcacatttgaaatacgttagggagtagaatcttgggtaaaagcctctaaaaaggttgtgtatattagacattctcaaagtgcggcacccataccatagaattaaactccctgtttcagtcctgtgttttgaaacacatttttactatccctggaaacactttcacatttttgtcagacgttgagtgagcaacagggtaaataacttttcaaaagcatttttagagtagtaaaaccttaagttccttgctagaagggctgatccaaaataaattaaatgctggtatgactaagccaagtgtggcaaattctgatttgcagtgtggacacctccagttaatagatctattcagtgattcaacatgcacctccaagtcgtaagcctggcagcaaagtataaatttgagacttacaagcattctctgatctctgagtctgtattaactgcttg

SEQ ID NO: 204324 - DNA, 606 bp, Homo sapiens
tgtgagacagagttttgctcttgttgcacaggctggattgcaatggcaggatttcagctcacctcaatctctgcctcctgggttcaagtgattctcctgccttagcctcctgagtagctgggattacaggcctgcaccaccatgcctggctaattttgtatttttactacagatggggtttctccttgttggtcaggctggtctgaaactcccgacttcaggtgatccacccgcctgggcctcccaaagcgttgggatcacaggcgtgagccaacgcgcctggcctcactcactttattcatgtgtgtgcacatatccccctagctattcttttgtaatgttatgtagtcagatatatccaaacccagcaccatgctgctgtgggaccttgggcacattatttaatctctgtacaccttaatttccttatttgtaaaatggagataatgtaaatagcattaggcatagtggctggcacaaagtaagtaaataataaatgttagctgtgactcttattagtctatttatgtgacttttgtgttttgtgctctacttaagactttccttactccaaaatgtaaaatattcacctatctactaaactag

SEQ ID NO: 204325 - DNA, 717 bp, Homo sapiens
agctttgttggacaatgaggtggccaggaatgttatgctgcttggggcttccaggcactggtttcctctttgggaacagttcctcaataaaagaaattgaacgagtacattaagacctgttcagaaagcagctcaatggctaggtgtgatggcttatgcctgtaataccagcactttgtgaggctgaggcaggaggatcccttgaggccaggagttcaagattagcctggacaacaaagtgagacctcatctacaaaaaataaaaaaattagctgggcgtggtggctcacatctgtggtcccagctacatgggaggctgaggcaggaggattacttgaggttaggaggtcgaggctgcagtgagctctgattgtgccacggcactccagcctgcgtgacagagtgagaccttgtttcaggggaaaaaaaaaaaaagaagaaagcacctcaactaaatggagacctttggctgtgtccttgtgccctctgcctttgtgcgtggggagtaggtgtgggtgggccctccaggggacgctggttttgggtcactgtagcccgcatgatttggggatggcactaggctgtggcgggcgggaggcaggttcccgacaccattcatcatggatgaacaatgtcttggggtggttccgtgtcagtccagacctcattctgtttcatgactgtgcaatggctgctgtcatactgctgggggtcagg

SEQ ID NO: 204326 - DNA, 357 bp, Homo sapiens
ccctcctttctttttctttctctttctttctttctttctctctctctctctctttctttctttttctttctctttttctttctttcaagcagtctcacgcctgtaatcccagcactttgggaggccgaggcgggcggatcacgagatcaggagatcgagaccaccctggccaacatggtgaaaccccgtctctactaaaaatacaaaaattagctgggtgtgttggtgcgtgcctataatcccagctactcgggaggctgaggcaggagaatcgcttgaactcaggaggcggagattgcagtgagctgagactgcgccactgcaccccagcctggcgacagagcaagactccgtctc

SEQ ID NO: 204327 - DNA, 205 bp, Homo sapiens
aaagttattcggggtaatgattccagtgatccatctgcgctggaagtggggcagcttttcctcctttgcacgttaccgcccatattaaagtgtcatatgtaaatgattaagccgatgaacagttttatttcctccagcagctgacaattccacaaaatggagagattttaatttaaaggggcacaataaagaaaacccttctggg

SEQ ID NO: 204328 - DNA, 168 bp, Homo sapiens
cacagaataaataaataacactggtattacaacataattcaaaagacttaaagaatgcagtatttttgttttagaaatcatcaaaaaataaattcttagctccatttccccacttataaagcaatagatctaccagtgttttaatttcatatcatacaaaggtagaaa

SEQ ID NO: 204329 - DNA, 301 bp, Homo sapiens
tgccctgcctccccaagcgcctgaacacggcggcggcccgcagagcagaaacgcagcacatgaactccagcacctgcctgggctcagggaggacacagggcagcaagcccacgctaggtcctgccatgctgagctcttcccctgccccaggacggagacccgcctaggcccggggcggtgccctccttgtctgcctgtcccgccgggggcagcatcatttcaaacgctgaccctgccagccctcccctctccaggcagggtcaggtacacatctgttaaaaacttcgtagaaggaaaacat

SEQ ID NO: 204330 - DNA, 398 bp, Homo sapiens
cagcccagagtcaaggttgcccagagcttgccacctacacctttgtagccaaagtcagaccttcttattagctcctcaccccaaccgattcaacaagtatttgcctactgtgcactcaacactgatctaagcaagaatacgaccacacacaaaacccaaacctctctgctctcccggagcttatagtccagtgggtgccaatctgatcacactctttctccacctgaccaaagcaatctttaaggccagtccatacccaccttggcaatgagcccttccctcctgacccccagtttatcctggtttcccatccttggggctccagattcgttttatttccattcatcctgctggttacttaactaaagactgcagctgatcagtcagcccaattcatc

SEQ ID NO: 204331 - DNA, 333 bp, Homo sapiens
cgcgcgagtttcagggtttgatgaagggtttgatgacagggtttgatgacagggtttgatgatcatcgaaaccctgatctaagcaagaatacgaccacacacaaaacccaaacctctctgctctcccggagcttatagtccagtgggtgccaatctgatcacactctttctccacctgaccaaagcaatctttaaggccagtccatacccaccttagggtttgatgagtcatcaaaccctaatctctatgcgtcatcaaaccctcatcaaaccctaacctgcggaaagcaatataagaaggccccccaaataacgggtttagggtttcgatga

SEQ ID NO: 204332 - DNA, 538 bp, Homo sapiens
gtccacgttcagaaagctctcttccctcatttctctactcttgacatttattcagcttgtaaagaaaaggatcctttccaaaacacgtcttcagttttttaataaaccccgcaattcctttaatgatttcagattatcttaaatatttataaaaatcactctcagcaacacttctttaagcaaacctcctcatcaacttcgattatttatatatttatgaacacgatgttcaaggagcagatggcagctagtaagtcctccaaaagaaggaaaaaaaaaatcaatgggacagaatgtaagctccatgactcgtccatgtactcttctcgacaagctctggtacaattatctttccattcagcggaagcgccacacaaaagtccacaattggtttaaaatagcacacttggacttcataaagcttggaggctccaagtttaatccaggaatgacctgccagccaagggctctattcccaaaggaaactgaagctctgtcaggggagggtaagacattggatgcagggacagatgatggg

SEQ ID NO: 204333 - DNA, 1188 bp, Homo sapiens
aggagatgacggccagtgtcccatggtgagctggggctacagggcaagttaccccaaaaccagcagctgaaaacctgcatttatcaccttggatttctgtgtattgggcctcaggctcagctcagccaggctccctccttccgtctcagccgtgggccggggccgccgtctcatctgaggcctcatgggggctctgtctcagccgtgggctggggccaccgtctcatctgaggcctcacgggacaggatcctcccaggctccctccacgctgcaagggcctccccacgggctgctggcatccttagcacagggagctggtggtcagagagccacacccaggcagaagccgccctccgggagtcctggtgtgagggcagagccacgtgaggatgtgcacatccagaggggccttgtcagcatctttaaattgcgagtgaagtcggcccgggacggcttcgaaaactgcctctgaacttgtctgacaagtacatactgtctgtttcatgggaaccaacatctcagagatcccacacaacgcttcctctttagagaagaaaaacacagcaaaacaacacaggcagcctctgtttaaacgcacgtggcccccgcaccccgcctggaagcctctgcacgtggccttcatctggaagcctctgtatttaaacacatgtgggcctcctccatctggaagcctctgtatttaaacacacgtgggtccccatcccccgtccagaagtctctgcatttaaacacacatggccccccatcccccatccagaagcctgtgcatttaagcacacgtggtcccccgtctagaagcctgtgcatttaagcacacgtggtcccccgtccagaagcctctgcatttaagcacacgtggtcccccgtccagaagcctgtgcatttaaacacacgtggtcccccgtccagaagcctctgcatttaagcacacgtggtcccccgtccagaagcctgtgcatttaaacacacgtggtcccccgtctagaagcctctgcatttaagcacacgtggtcccccgtccagaagcctgtgcatttaaacacacgtggtcccccgtccagaagcctgtgcatttaaacacacgtggtcccccgtctagaagcctctgcatttaaaccaacgtggcccctcctctggaagcctctgtatttaaacacacgtggccc

SEQ ID NO: 204334 - DNA, 551 bp, Homo sapiens
  misc_feature (9)..(9): n is a, c, g, or t
  misc_feature (12)..(12): n is a, c, g, or t
cagctgtcnccnggagtaggatatgtcgaccaggcgtcgagctcccatctggaagcctctgtatttaaacacacgtgggtccccatcccccgtccagaagtctctgcatttaaacacacatggccccccatcccccatccagaagcctgtgcatttaagcacacgtggtcccccgtctagaagcctgtgcatttaagcacacgtggtcccccgtccagaagcctctgcatttaagcacacgtggtcccccgtccagaagcctgtgcatttaaacacacgtggtcccccgtccagaagcctctgcatttaagcacacgtggtcccccgtccagaagcctgtgcatttaaacacacgtggtcccccgtctagaagcctctgcatttaagcacacgtggtcccccgtccagaagcctgtgcatttaaacacacgtggtcccccgtccagaagcctgtgcatttaaacacacgtggtcccccgtctagaagcctctgcatttaaaccaacgtggcccctcctctggaagcctctgtatttaaacacacgtggccc

SEQ ID NO: 204335 - DNA, 422 bp, Homo sapiens
acgcccgcctaatttcattcatactttgggaggccaagacgggcggatcatgaggtcgggaaattgagaccatcctggctaacacggtgaaacccgtctgtactaaaaatacaaaaaattcgccgggcgtgttggcgggcgcttatagtcccagctactagggaggctgaggcgggagaatggagtgaacccgggaggcagagcttgcagtgagcggagatcgcgccactgcactccagcctgagggacagagtgagacctggtctcaaaaacactcctaatttcaacatcaatttccttgtgaatctatcttatttttgtgtgtcagaaacacttttggatttgaagataatttcaaaacaatactaactctgtatttttttaaggtattattgtttacttatgtgttatgtgtcaaaaaa

SEQ ID NO: 204336 - DNA, 461 bp, Homo sapiens
atgtccaacctgataattggttaagtcggcctcataagcttatattcttagcttctaggtcattccttgtttctattggaagccagaagacattctgttacagtcagggctttagagtaggagtggaccagattggattattctgtattccttccacttttagccttactattagtcaacatagggattgtggaccttcgtcctaggcagtgtaagtcttggaaagaacagatagggcctcctgcttctatttgtgaggtcttgagcatcacaatctggggcctgacaagggcatgttctttgctcagttgtaaagagggatgccttgggttgaaataaacatgcgtcacatgtatttatgtacgtgattattcacaatctaagttaaaagtgacacacagatcactttctttcattaccaagtataataaaactacccttagagaagccaattttgtctg

SEQ ID NO: 204337 - DNA, 247 bp, Homo sapiens
tatccccattaaaaaatggaaacagaaatatctattttttatgtataaagaaacatgtttgagacaaaaatagttgtatataaaaggatatttcataatctcagaatagtttatgctgtgggaggagctaattaaactcatttctgggcattttacagtctatgaggagcttagagttttctcctttctgctagctctcttagaacaatacagacagcttctgtctcctccctgcgccagttattat

SEQ ID NO: 204338 - DNA, 476 bp, Homo sapiens
catatttcagcacattcctcagtttataatgttaaggttttaagaaagcttaaagaaaccagcatcactggtagttaagcggtttatatttttactgtattttcttcagaagcttgttgccatgtagagtaaaagaaacctcatgttaatcttttcagaggacactgccagtaagagtgttgttattgttagataatcataatggtatgttctggagtctcttctcccctcactcgacacacccgattcactcccaccctgccagcggagccagagagagaagaataaagcaggatcttatttgctttcagaatttgattctgtattgctttggagacatgctgggatttgttcttaaactattattaaatttctaatgtccgtcaaggtttagattcctttgtaagagaaccaagaacgtaagtgaaactgtaaggcttcgctgtgcagacctttcttccagcaagcatcagctt

SEQ ID NO: 204339 - DNA, 225 bp, Homo sapiens
tatctgaggatcccttcgggcagtatgttgatctgtagttacatagtacaaaaacatttcaggcctgcttctctatattctacctttagtcttccaaagttaaacgttctgttttccttaaccattcctcatatgttatatttcccctcattttggtaaccctcttctgtgtgctgtctagtttgttaatatccttcaagtacagtgttcactgctagccccagc

SEQ ID NO: 204340 - DNA, 223 bp, Homo sapiens
actcctcattgtcacatggcagccgtgtgtaaaccaaggtccgtgtgcacaacctgctgtgggccgccgctgtgtgtcttctctgccttagggcaggggatggcgagctatggcctatgggccaagagtagttcttatttttgtttatttatttatttatttttattgatcattcttgggtgtttctcgcagagggggatttggcagggtcataggacaatag

SEQ ID NO: 204341 - DNA, 359 bp, Homo sapiens
aaattcctggttggatacttccgatatttctttcatatctgagtctggttctgatgcttgctctgtctcttcaaactgtggggtttcttgtcttttagtatgctttgtaattttttgtttgaggctgtatatgatgtactgggtgaaacgaactgagttaaataaggctttagtatgagattttgtgtttctctggctaggagttaggctttgtttactctttgctatatagtcatggatgtcagaggctaaaatttcctctagtgtccttgtgttgtctcccctgtcttctctggggagctccctaaaggcttctttgtaaagtagctctgagtcttgcagtgtctatccctaatcat

SEQ ID NO: 204342 - DNA, 352 bp, Homo sapiens
catcctacaacatgcagctggcctacatcttcacaatcggagcatgcttgaccacctgcttcttcagtttgctgttcaggtatggaagcatctacatttcctgattctgagggtcatgttagatttcagcaaaaatccaagaaattcaaaaattacccaggtaacagtttctctgcagtcctctcctctcctctcctctcttttcttttctttcttagatagagtctcgctctgtcacccatgctggagtacagtggcgcaatctgggctcactgcaacctccacctcccaggttcaagtgattctccttcctcagcctcccgagtagctaggattacaggcacctgccacc

SEQ ID NO: 204343 - DNA, 545 bp, Homo sapiens
tggggaggcagaaggcagactgatcacttgaggccaggagtttgagacctcatgtctaaaaaaaaaaaattctgtgaggtgagttttattgttattccctctctacagatatggaaactgaggctgagaatcagaaccattcacaagacaaaaatcccccagttggcagatccagggttgcaagccaggcctgtgcagccccaaaaccagtgcttgtttaaccactgtgtggtgaccacaccgctccaggccaacagcttggggctaagtcttcacgttgcctttcaccattaataatagggctgccctttgttgaagccctgcactcccagtgacggccataataaccttcaggtgttctgctttctgccttctctagcatggccaagtatttccggaacaacttcattaatccccacatttactccggagggatcaccaagctgatcttttgctgggacttcactgtcactcatgaaaaagctgtgaagctaaaacagaagaatcttagcactgagataagggtaaggcgagctcactttact

SEQ ID NO: 204344 - DNA, 412 bp, Homo sapiens
catcctacaacatgcagctggcctacatcttcacaatcggagcatgcttgaccacctgcttcttcagtttgctgttcagcatggccaagtatttccggaacaacttcattaatccccacatttactccggagggatcaccaagctgatcttttgctgggacttcactgtcactcatgaaaaagctgtgaagctaaaacagaagaatcttagcactgagataagggagaacctgtcagagctccgtcaggagaattccaagttgacgttcaatcagctgctgacccgcttctctgcctacatggtagcctgggttgtctctacaggagtggccatagcctgctgtgcagccgtttattacctggctgagtacaacttagaggtaaccaacaccagggtccagggcagagagaa

SEQ ID NO: 204345 - DNA, 414 bp, Homo sapiens
tctgttgggacctgacctctagtcattggttaccagtgtgtcaggcaatctggattttccagtgatgccgctgagatggcacctgtcaaaagagtagtggttccatttctagattgtggatattcagataaattctgccattttcatttcacttcatgaaagtcaggttcagcctgtgaaaagttgttaaacaacatgctaaatgtgaaatgtcaaccctcactctaaactttccctgttcagagcatcagatgaagacttcagtggctttctgatttttggtagtccattgaagaagggagtttgaaagttgttgtatactgttaacgattgtctgcccatgtcctgcctgaaatgccatgattgtttatggaacgtatctttaataaagctggatacagcttgaaaaaaaaa

SEQ ID NO: 204346 - DNA, 209 bp, Homo sapiens
tgatagatcagtaggtcaaaggtacacggaagaaaaaatattaaccagttaaagtggaatatatttgagggccaaatgaggacatgcaaatttgagaaattctgaacatttaaattcagaaatgtcatggatttgttctgtaacataccctatatctcacaaacaggagttaataacccaagagataccatatctcaagcatctacttt

SEQ ID NO: 204347 - DNA, 1234 bp, Homo sapiens
atggtgtcaaaagttacacggaagtagccaactttttactgtatggcaaacatacctgctagcaacagcttagcttgagcaacaccctgagagttaccctatggtttaagaggaatgcgtgttcagagttccaagctaaggaatccaggagtggccaaccagagattcattccttatctatgaggaacatctgagcccacggcctgtcccatggaatgtgggctgtcctggggagtcagaccctttgttttgggttaagtgaaggtttccaggtgaagggtaagtgaaaatggtacataaattgcatgctttctgaaggtggtctccgtgctcctgtccagcctgccaccactggaacactctgcatgtaagttcttctcaataaaccctatgtctcatttgctgactcttgagtctctccttcagcctcttgaacctggtgccatctctactgaagtgaataggggtctggtacgacaatattcaaatctagttctcactccaaagcatgtaattccaaagcccacactattcctacattatgatgcctatttcacttcatttgtctgactcataggaacctgtttaacctccttgttaaatagaacattataagaaatgctgccataccttaacacagcagagtactatataaattcagatggcattattgtaacatatctttcattcagttgtctgtgaagaacagatagtagtttatatatttgtgaaactcagcattaagattttgatattaaaaagacagggaaggatactctgtgataaatacgaattaggtcacatcattctatgcttggttatgctgaacaacacggcactgaaaaaacagagaatacctgtaagattatttcttctaaaggagaacctaaaggtaaacctagaacttggatgactctacaaataagggccctggaaatctacagggcgtcttccctttctaattttaaaaatataacaatcgtgtttactatatctattgtgaaatacaattacagggtactatgtaagatgctaaggggtggataaatctcagaataaataaataaaagtaactttccatggactgagggagacggtcaccatgcagtacgccacagttccagggcatgactgtagagcagggaaaagtactgcaaagacaccaatctttctttgatgtgtgtccctttcttccctttgagttgggttcctgctgatcctgagggaacccctc

SEQ ID NO: 204348 - DNA, 470 bp, Homo sapiens
taaacacatcatgctactgtgcaggtagttgaagcataaaaacatcgcactgtgtattagccatgcatatgggtgagaattaggctaataaaaattcactgaaagtgttttgccctgaagaaagcaaggtgcctgccatttcttggagtttatgtgttgacagtgttaaaaaaaaaactggagtgtacaaagaaagttgtcttgcttcctactttatagcctccatctggtcaggaaaggagtaaattgaccacatctgctgcaaatctgtagctgtactattggacctttcagctttgtcactaactctgtcttatccccaagatctgggatactatatcctgtacaggagtatgccaattttcacaacttttgtactcttctctagcattcttcaaattcatattcccttgggcatcctataggataagagttggaaaaatttttatttaaagcaacagataataaat

SEQ ID NO: 204349 - DNA, 492 bp, Homo sapiens
caagcagccactaataataatttggagtcaatacatcagatgaaatctttatcacccttggaaaatatatttttctgaatctcatctagtttttagcttctcgacttcatctacacatgaatggtgaggctgtagaagtctgtttcttgtgaatgacctacagataactggcaagcttggtaaaatctcatatcagagcaggttgaccaggtgatttgactagggaaggaaaggataagattagttagggttggccatttgccaggacaattgacctcaatatctctaagagctggaacacaaagttgatgtcttgctcatgaaataatccaagttgactccaggcttgggggatgggagtgtatgagttccattctgcacagtcattagggattaggaccaatagaggctctgtcttcttaaacacctgacttcccacatcactgtgggcatttgcatccacctggtggtaagggaaggagcatggaggaa

SEQ ID NO: 204350 - DNA, 175 bp, Homo sapiens
ttcactgaaacaggctcatgtctgactttggaactgacctctctgcctgtagatcatcatggcatgctctacaaaattgcttctgacaacggaattcactttacagtgaaagagggaaagcagtgggtgatacccttgtcaatggatcctgtcacccagaagcagtcatctgtat

SEQ ID NO: 204351 - DNA, 447 bp, Homo sapiens
agcttccaggtgctttcattttcagcatgatggctgccagctgtttaaaattcacgtaaaatcctcttcacctgttgactgaatgcatgttttcactctttggctgcctcagtcactgtgtaattcgtgtcttggtaaattttaccttgaagagaaagtcttaaaattatagaaatagaggacagattagttctcaccaggggccaagaagaggaaagaggggaaggggagtgggtgtagccataaaagggcaaagtgagagatccttggggtgacggaaattttctgtatcttgactgtatcaatgtcaatattttgattgtgataattttgtaatattctgtgatagtctgtaatattctgattctgtaagtaggatttctctgttatccttaaaactgcatgtgaatctacaattaccttgatttaacaaatggttttctgtaa

SEQ ID NO: 204352 - DNA, 621 bp, Homo sapiens
attgctgacaaaacacaatagctcaaagaagaaatcaaaaggaaaatagaaggtattttgaactgaagaaagatacaacatattaaaagtgtgagttactgctaatacagtacttaaatgggacatgttgtcactaaatcccacattataaaagaagaaagatcttaaatcaatattagcttccactctaagaaactaatgaaggaagagcaacagaagtccaaagtaagcagacaaagggaaataatagaaagtacagtggaaattaatgaaatagaaacagaaaatcagtagagaaagataaacaaaccttaatgctcattctttgagaatatcaatgaaactgataaaccttgaagtggaatgagagagagagagaatgagtgcaaattagcaatatcaagaatagcagtaatcactacagattctaaagatttgaagatcattaacaacttcatacctataaatttgacaactcagatgaaatggataaaatatgtgatagacacaagttataaggctaactcagaaaatttaggtagctttataaacatgtatctatatcaattttgaaaattgagttggtagttaaaacttcccttaaagaaaatgcaatgccca

SEQ ID NO: 204353 - DNA, 1388 bp, Homo sapiens
tctcattgagaatgtttcctgtgtacctatagaaaagcctctttggtagattttccggtttataattatttaaccagaagatacatgggaggttcttttgtatgtacctgtagaatacatcccagtaagggtcctatggagaaagacctgttgtcatcaataaccttcattattctaactgtgaaacgttcattaatgcgaataatatcctcaaagattttctacaatgagaatcatccagtaaagctttttaactgagaatttaaaagttgtaaaattgttagttaaatgtgtataattatcaaaagaggttgactttggaaaacaaacaatttgctaagggaaggaaaacttgaaaataatcaccttagatggggcatacaatttgacctaagcaattgtttcaaaactgtcttcagtttcttgaaaataattgttagggctgatatatagaaatacatatctaggccaggcacggtgactcatgcctgcaatcccagcactttgggaggctgaggtggatggatcacgaggtcaagagatcgagaccatcctggtcaacatggggaaaccccgtctatactaaaaatacaaaaattagctgggtgtagtggtgtgcgcctgtagtcccagctactcaggaggctgaggcaggagaatcacctgagccccggaggcagaggttgcagtgagccgagatcgtgccactgcactccagcctgggcaacagagcgagactccgtctcaaaaaaaagaaaaaaagaaatacatatctaatgttacagattgtggtttattggttaattactatgcatttttttcagtttaaaaaataatcttattttatatacttctctcggtataatttttcatgacatttcagcatgttgataatatgtgtgcatctatttcagtgccttaaagtattttgagagcaatcttttgctgacagttgaagaactgttaatgaaatactgttcattaaaaggatctgtgaaatcatttacccttgttataaaatagttatatgcaaatacacttgtcattttatttggcaaagtcattcagtttgataatcaacaaacatttattaggtgcttttgctttaaccaacattactttcatttaatactcagaaatgtaaagatgtgctatttttgaatactaactcaatgatatgtttaatttttcatttattctttgtgttatcagctgaactagcatgaagactctttagtagggtttactcctttgttcttttcctaagtacaaaccattttatgaaaaaattgctcattgcactaaaccttcagatggaaatggcttattcagtagaccagtatttggctttgtcatttgttttaatgtattttttgcacagataattt

SEQ ID NO: 204354 - DNA, 442 bp, Homo sapiens
aaggtcaaaagatgcctaatactaaatgaattaaaaatgtctcctaaatttcagctaccagtttgagctcaacctagaatagaatactacatatcaataagcagagttcagtcttaaatgattacatgacaaaggaaactgaatatgcaagccccagaggaagctcttttggctgtaagtactttaatcctgccagaaattttaagaattcacaagccatagagaatatttaaatcacagatggacggggttcaataaagctccagaactggcctttacagatatttaaacatcattctgaacttaaaaaaaattaaataacaaacgctattaattccacctttcaaaaactacagcaggctactccgaatgactaaagaaatacattcttttgcttgtagacaatctagaatcttaaaaacagaaatgaattacaaacaat

SEQ ID NO: 204355 - DNA, 366 bp, Homo sapiens
gatttgatatttttaaaatgccatcttaactgttttattttccatttcattgattgctggtgaagttgaaactctttgtttttcctcttttgtgaattgcctattcaaaacctcatttatatttttttcttttcatttccgtgtctaataagtcctttatgtatctaagatacttaattttgaagcagaaatgatgtggccaaatagtttctttattaatacccacctgactgtaaatgaaataacttggacaaatagatatatttacttactaatttattagtttagtcaccagtatctatcatataacttgctttttttatactaccttgctaaatgctttaataatgtggcaaaaaaaaaaaa

SEQ ID NO: 204356 - DNA, 447 bp, Homo sapiens
tgattcgtttcacatttttgagaaataggggctggaatggagtgagcaaagatctaagtggcagggcatgctatctgaacagtagcaaggggcaagatcatgcaggattttattctgaggtggaaagccattacagcattttcagaaaaagcatgatatggggccgggcatggtggctcacacctgtaatcccagcactttgggaggccgaggtgggtggatcacctcaggtcaggagttcaagaccagcctggccaacatggtgaaaccccatctctactaaaaatacaaaaattagccgggcgtggtggcggacgcctgtgatcacagctacttgggaggctgaggcaggagaatcgcttgaactgcagaggcggaggttgcagtgagctgagatcataccactgtactccatcctgggtgacagagtgagactctgtctcaaaa

SEQ ID NO: 204357 - DNA, 395 bp, Homo sapiens
tctcaaaaaaatttttttaaaaaatgccataagtttaaaaagaaaaaaatctgcttaaacttcacaaccttaaaaaaaaaaaatactggctgggtgtggtggcttacacctgtaatcccagccctttgggaggccaaggctgggggatagcttgaggctaggagtttgagagcagcctggcaacacagcagaaccctatctctataaaaatgcaagataaaaaaattacccggccatggtggcatgtgcctgtagtcctagctactcaggagacccaggtgggaggactgcttacacccaggagcccaggagttcaaggatgcagtgagctgtgattgtgccattgcactccagctgagcgacaaagcaagaacctgtctcttaggaaaacgaga

SEQ ID NO: 204358 - DNA, 407 bp, Homo sapiens
tcttctccagacaagcaaaagctgaggaaattcatcaccattagaccaccctacacgaaatgctcaagggaattctaaacctggaagcaaaaggatgacatttgccaccatgaaaacatacaaaagtacaaaactcactggagtaaagcaaatacacaaagtaagaagaaagagaaaggactcaaaccacccctacagaaaaccacaaaaccacaacgacaaaaagaaaggaaaagaaagaatatacaaaacaactagaaaacaataggacaaaaacaaaacctcacatatcaataataaccttaaatgtaatggattaaattctccacttacaagatatcaactaggtgaatgaattaaaaaacaaggtccaactacttattgcccacaaaaaacacacttcacct

SEQ ID NO: 204359 - DNA, 194 bp, Homo sapiens
aggcaaaaatcaaaaacaaccataaacaatgctacattgtctaaatgcatttattcttcaagaaatatttgttgaatgcttatcacaggctaagcacaaaaagtaaacgaaatagatctaatctctaccttaactaagagtttacagtctagcaaagaatatagacttaaatagacaatcagaataaattgtga

SEQ ID NO: 204360 - DNA, 191 bp, Homo sapiens
gctattttaaaaattacctctcattttacagtagttacatgtcttatcttgctaaaaactcaagaaagaaagaagataaaagagcacaatcgccaaacctcacacgctcagcacagttccctcctatgctttcaacgctgagcatcctgatggaactcactatccatctacatatacgtgtatctttcaag

SEQ ID NO: 204361 - DNA, 572 bp, Homo sapiens
taaagatacaaagagaacaaactgtctccgggcccaagtaagacaagctagtggtcaacacctggtcccctgcagactgggctggtttcaggacccttcccaaggatacatattctaagatcagtgccagctgggtgttcccttctggtcaagtggagacagtcctagaactggtcctctccatggagttcagcacgttcattgggctgttgggaaaccattggtttgggctccagcataagccagggcaaatcactttgcctctggacttttccacattgataaaatgaagtcgatagcaatacctgctttgtagttaccaaagtgctcttccatgcattttataataacttcccacaatcccacaacaattgtgaaaattaggaaagcacagatcagatctgcttagcatccaccgactgtgaggatgtgaagctgaacaccaaattacagggtttcaaacctcaagccttggtgacttatgtttgctaccttagttggaattaatgaaatcattacagaaattcctgcttcatttctggaagagccctcaggggaggttctaaaaatgg

SEQ ID NO: 204362 - DNA, 490 bp, Homo sapiens
cactcttggtgcaggcttctgcattttccactctgtgatggtgggtttcacaaggacaggtagaagagatggctaaggggaccaggcctgctcgcctgatcaatgggctccacaaatgaccccacagcaacagatactggatatgttgttgttgttttgagatggagtttcgctcttacataatgcccaggctggagtgcagtggtgcgatctcgactcactgcaacctccacctcctgggttcaaatgattctccttcctcaggctcctgagtagctgggattattggggcctgttaccacacccggttaatttttgtatttttagtagagatggtgtttcaccggttgcccaggatagtctcacttctggacccaaccaatattcccgccttggcctcccaaagtgctgggattacaggcatgagctagaatgccaaacgaattttttttcctaaactacaaccttttttacaacccagaataccttg

SEQ ID NO: 204363 - DNA, 370 bp, Homo sapiens
tacactattacagcataaactattgaggagtatcctgaggcatgggggtcaggggttgaggtcttggagagtgttttagtggggttagcgatggaggtaggattggtgctgtgacagcataaagaattgatgtttagtattttttcagatccttcttgtgactcatagctatgatcatattattttactcctttgatctaaggtaatatatattaataaacttccaaattagagccacgttagcaatcccaggatataccttatctagttgaattgttttctccctaccactcccaatgtttgctggtatttacggtttgtacttcaatgttcataagtgagatcagtttgatttttcttttttttggtc

SEQ ID NO: 204364 - DNA, 443 bp, Homo sapiens
tgctgggattacaggtgtgagccaccgcacccagcccctcttacctattcttttggaggagaaaaaatcaagaagccttcccaggttgtaatttcccaagctgttttttttgtccagctcctctgcatatctgacaaaatttcccatagcatctttcagtaacacttttatcttgctcatacttcccccatcatcacaattacacttatgttcacagggtctctggggcttgctgtcattccttcatctggccaaaaaatgcttcttcctgaaagccccgagtgaagcattctcctggttctaagtacagttcattagctccccggtttcccttttctcctccttcaagtacacagataactaatctaaaatagggccttcccagtccgaaccgttggtatcaagtacacaggagtgccatagccttgaatctaattacctag

SEQ ID NO: 204365 - DNA, 417 bp, Homo sapiens
taaggagccctgacactgagataaaccttgttagcatctgctgctcactctggatgcctgccctagtgggagagcccttatgactcccatcctactctgcttttctattgttctgcaacacattgaggaatccaaagagatcctagagataacccatcctcagtcaacacattttcctctctccttttcttctcttctcttctttctttctctctctctctctttctttctgacagggtctcactccgtcaccctggctaaagtgcagtggtacagacgattgggaggcaggaacactgaatgtcatcagagaaagtctcttttttggaaggaacttttaaatcaagacttaaagaaacagaaggagccaaccacacaaggatggtttggaattgagttccaggcagacggaacatc

SEQ ID NO: 204366 - DNA, 480 bp, Homo sapiens
gggttaaaataatctttttgtcctttcaaaatgatagttttattaccacagaagactacttatccttaatgtttgttatagttcatttttgttactaagtagtttgtgttaatctccagatagaatatttcctttcaaggtccaattctttggttcttgtgtaatagtcaattactgttgactatatatagccccctgaagctttcatgtatcacaggtagagtttttaactgcattctctgtgtatgtcgctataatttgtacatgtacataattttcttattttaagatgccaaactaagcacattgtagacattttggatgaaattagaacaaatgattgtgtgccattaataatagatgtggattggcattctgaccttaaaggataaaataagaggtgtggttagggctgggtgtggtggctgatgcttgtaatcccagcactttggggggctgaggtgggcggatcacttgagg

SEQ ID NO: 204367 - DNA, 518 bp, Homo sapiens
aattttctcaactaggtggttgcctttccaagcttttgtatacgtgactccatttaccaagaatcattcacataccatctttgtggtttttgccctggccatagatcccctgtattatttgctcacattttagttgactcacttttacatatagcaaaattgtttcacaaaaactacattgtcactattaaatacagaaagccagtgtcagttgcaaatagaaaaaacctcgagtcgtccaagaatccatcttactccccacagtaaaaaaacatcgcacctttcgggttcaaccttgaacaaccactttcatgaattaataagctgagggattgattacttctagaagttaagattcattatttgttctctctaccttggaaaagctggtagaaatgtctgcagctttggataccaaactaaccatgtagcacttagcagagctttgggataacagataagtgacatttagcctggggcttgttttgaacaggagaaactgggtaaattcaggaagc

SEQ ID NO: 204368 - DNA, 599 bp, Homo sapiens
aatttaaatgagtgtctgaatgctggtgaaggcagagcctgtctatctcctagcagccatctttgcctctgacagttcacatgtggcattgttgtgagaccattgcttctctctcccttagaggttttccaggtgctatagttcttgctgttgtgatttcaaagtagagacaaaataggtagggacaggaagattgttcttggatttcttctgaaaatgagagaggtgggagaagagaatttttaaaatatgtagtatcctgaacagaccaagcaacattccccagaaaacaagagataccactgtgctcaagaaactttctccctaaattgagttgattatgataatactagattaagtaacttgcccaggttcacagagctaactcttgattctgaaacctgtatacttaacttttactgcctccctggtacgtagtgtaggttgtcatatattttgtctgatttaggagcagtgtgataaagtacaggataaatggctgtccatcatagatttggactcctcgtggtagatggtgtaagacttgaagctaattactgtttcctctctaatctctctctagtcagcctctcctattt

SEQ ID NO: 204369 - DNA, 284 bp, Homo sapiens
ctagaaaataaattctgtatcttttagggaaggtcactgccctgaccctgtaatgcttctatccccgcaagtcccaggtaaccactaatctattttctatctttatagatttgcctattttggacatttcatataaatggaatcatagaatatgtggtcctttgaaactgtaagattttaaacagtttggttaatgctcatataacctttgttttttgaagtctatagacagctttgctgcagcacaaaatctattccacactatatcagcaaagtactgcatt

SEQ ID NO: 204370 - DNA, 367 bp, Homo sapiens
cgtctgggctctgtgcccgccgccctccccggccgttcgcccgcgagtccctttcgcttttaaccccagccgcgctgattgcctgcgattactcagaatcgcccccacttggctggctgagcgacaaaaatcagcagtagctgtccgaggaaagctcttcgcaaaccggcgcccccacccagcggaaacaccccaagccggatcccagaaatctcagtcttctcccaaccccggctctgcctctctctctcaatgggactcgtccgggtctcagtttgcccatctgtgcagacggtgtgaagaatttctgcacaatcgagaaaaaaaggtgtggaaacagccgaaaataattttgatccgaaataac

SEQ ID NO: 204371 - DNA, 242 bp, Homo sapiens
atggccttctaactttaaacagatccctccctctttcttcttctctggattttagtttgcccatctgtcaaaaatcgggttgaattaaattatcgttggagatattttagatctaagattagaatttgtctaaaggtctaaaagcctcggttaaaaaaaaatccccttcctaaaatgctactaaatgtcaagatgtgcttttcgtagcacaggtgttccagaggatttaggaaaccgaagca

SEQ ID NO: 204372 - DNA, 782 bp, Homo sapiens
acatggataagttcctggatgtatacaacctaccaagattgaatcagaaataaataggaaacctaatcagaccaataatgagtaacaatattgaatcagaaacttaaaagttttacaaaaaaggaaagtcccagaccaaatgacttcactgccaaaattttaccaaacttacaaagaagacctaacaccattctcctcaaactattcaaaaaaattgaagagtagataattcttcctttactcttctacaaggccagcattactctgatatcaaaaccaaagacacaaaaaaggaaaactacaagccaatatccctgataaacatagacacaaaaaatccccaaaataatcctagcaatctgaatccaacagcacatcaaaacaataatgcaccatgatcaagtgggatttcttccagggatgcaaggatagttcaacatatgcaaatcaataaatgtgatccatcacattaacagaattaaggactaaaaccttatggtcatttcaatagacacagaaaaagcatctgataaaattcaacatcacttcatgataaaacaaactcccaacaaaccagatgtagaaggaaaatacctcaacataatgcagaccaaatatgacagacccacagctaacatcatactgaatgggggaaggctgaaagtttttcctttaagaactggaacaagacaagaatgcccatcctattttcaccactcctattcgacatagtactggaagtatagccagagcaattagtcaagataaataaataaaaggca

SEQ ID NO: 204373 - DNA, 199 bp, Homo sapiens
aggctgtgcccagggccgcccccgcacctacctcgtgggagtagacgatggcgatgagaccgatgggaccacccagttgcaggaaaacaaactcagggctctcactgattctacatcaaggtgagttgtataattatttcattatatatgccaatgtaatcataacataaataaagtgcacaataaatgtaatacactt

SEQ ID NO: 204374 - DNA, 477 bp, Homo sapiens
gtgatatttagttaatgatttgttttggaaaacatgcagttaggagtatttttgtattttgtcagatgtttaggagacagactttcgggtcatgtttcttgtcttgttcccagatcttttcttaaaagaacagtgtgacaccagaagccaagagatggtttttactaacaacagctttgatgagttcctattaaggtcgtattgtgtattgtgccaaattttccacccagtataaatttagtaacccgctatgagcatatgtaggatattcaatttgcagatacttttgttggttatgttggtttataatagacaagttttatggtcatatgcaattattccattatctttttggacacagtgaatatgttttttagctaaaaatgtccttggaaacataaatgcctgccaataacatggaatattgaattcgggcaatgtgaattgattaattagaaaagggtcaaaagaaataca

SEQ ID NO: 204375 - DNA, 634 bp, Homo sapiens
gcaacaagtgctctacaacgtactcagagatcaacaatatctagctaaagctggtattgaattctgctttctcaacaactctatcatcaacatactgataagcaaagaaaagtcaccataggataggaagtcacgcagatgttggagatatactggcagagtgtggcatgatgagcacatcagattacataccaaacttagaaaaagatgtttgcttgcatccaacctttttattacagtaagacttggctcttatctctaaaacctgatttctttacctctcgtcagcaatactgaaagccaggctccacataaagcatcaagacagtccccaaaaaggttcatgtattacagcacgcctgttaactctgcagtcagagtcaccaattctgaactctactggtcagggcagatggacagtgggcaacagaaagattcctaagcagatactgaatggcaataaaaataaagtaaaaataaaactgcataactatcaaccttaaagaaatgacaagacattccacaaagacacagcaatcaaaaatagaaaaaggatatgaagtccttaagactaatggagccacaaacaatagcagaattcatcaaccagggatacataggatcaaccagcaga

SEQ ID NO: 204376 - DNA, 542 bp, Homo sapiens
tcaaatccagaccaggtttttgccaagggccagactggaatggggtggaatgggaacagctaaccggacatccgagtctcatcactctgagacagaaaatgggcaacccggcagtgaggacacctggatgactttgacccaatcctttcccatctttgtgcttccagtttcacagtctgaaaaacttctttgtatcacttattatgcttgtagttacacatctgtatgattatttaactaatatctatccactacacggtaggccccatacaacatgaactgtgccttgctcactataatcactcagtaactagcacaattaagctctcaatacatttatctgttaacaaaatgaacaaatgagggagactagaccccaagagatagttgtgaaaagaggagtgttccaaatctccttcctgactgctaccaagtttcacctcttggcttgaagtgctctatgtgagggaaaaaaggtgtcctagcagacggaaaaaccaataaactcaaagagctagttccttttgaggctagctcccaat

SEQ ID NO: 204377 - DNA, 464 bp, Homo sapiens
ggcaacataggaagactgtctcaaaaaaaaaaaaaaaaaaatatatatatatatatataattcatatattcatctttatgccaacccagtggtaagataataattttttaaaaaatttttaatggagaaagggtcctttgaaaacaaaagtgcctaggacccaagaaagtcattgtctgtgtgtgtgtgtgtgtgtgtgtgtgtgtgtgtgtgtgtgtagcagggaagggagagggtgctttcttcttccaacattgacagctcatgctagactcctaggcacctgcctggccaccaccccctttaaatgccgccccctctcccggggtacacctggcctccctgaatgggcccacctgccccgaggcctggcacgaagaagccaaacaaaagaacaaagattcctcaacaatcccagggtcagaagaatcttctgtaccaggcttggaaaatgcacctgcgga

SEQ ID NO: 204378 - DNA, 181 bp, Homo sapiens
tgctgcatctaaaattatttgcagttgagattattaaattgtttaaatccaaaaaaatacagttctaccactaataagtagcaacaacaactaatgtaattcttttgctgattaccaaccatttatttgccttggtgttcctttggaatgtaattatttctagctagttaaaattcttaaa

SEQ ID NO: 204379 - DNA, 621 bp, Homo sapiens
  misc_feature (608)..(608): n is a, c, g, or t
agtgggcagcgggacggcctgattgcgtgtgctgtcatagtttccagaagggtgagattgctggggactgtggaaagcatctcaggcaccagtccacactgctcactggggacaaagagcttcgcacagccctccacatcgggcagagttgtacgtgcctgatgcacttgtgcattctcaccttttacgtgatctctgtgaaagattcattctctgtggttttcttctgaagtaaagctgcttccttgaagatgtgtaaggcaacatgaatgggcagcgttcccattcatgtcccttcctgtgccccagtgggaggagctggttcctggggggcagaaactggcttgcagagctgctcaagcgttccactgtttggttttttttttttttttcccctaaaatggagtctcactctgtcacccaggctggagtgcaatggcgaaaccctgtctctactaaaaatacaaaaatgagctgggtgtggtggcacgtgcctgtagtcccagctactcgagaggctaaggcaggaaaatcgcttgaacccaggaggcagagattgcagtgagccaagattgcaccagtgcactccagctgggcgacagagcganactccatctcgga

SEQ ID NO: 204380 - DNA, 418 bp, Homo sapiens
agtgggcagcgggacggcctgattgcgtgtgctgtcatagtttccagaagggtgagattgctggggactgtggaaagcatctcaggcaccagtccacactgctcactggggacaaagagcttcgcacagccctccacatcgggcagagttgtacgtgcctgatgcacttgtgcattctcaccttttacgtgatctctgtgaaagattcattctctgtggttttcttctgaagtaaagctgcttccttgaagatgtgtaaggcaacatgaatgggcagcgttcccattcatgtcccttcctgtaatcccagctattcaggagactgaggcaggagatttgcttgaacctgggaggcggaggctgcagtgagtttgagattgcaccactgcctggccaataagagcgaaactccatctta

SEQ ID NO: 204381 - DNA, 489 bp, Homo sapiens
aggccccctcttggaaaggggctgttgaacgtcctttactcttcttaaaatttccatttgaaacctgttttgctgcatgtcaccccctgcagccaatattgatgttaatcttgggctgcatatgcaatgtgacctcggatgaaattgaacaactgggtaattatctgtggacctatttctaatgaaataattggaataattggaataggattagtagaactgcagagagacctgttgctcctagctgggctcttaatgccaaacaaaagaagcaacgtgtcagtaattcagttggtggatgccttggagccattcaagatgcattttgctcattagccaaatctcttcctgccctcatcctcccccaacatttgtttcagatgtgattttcatgaagcatgtccctgtgtcttgtttgtctttggcaaacacaagtaactattgtaaatatagcattggatctccctgctctttggggaccctgagatt

SEQ ID NO: 204382 - DNA, 475 bp, Homo sapiens
aaaggaacagcacattcacagttaaaagtgctttgtgatgtgacttgactctgtagagcacatcaagatgagcaccataggagcaagcttagaaagggagatttagaggcacattatggcttactttgaatgacaggctggaagttaaggcatgaaagcaggccttggtctggcccctttcattatctcatttaatgctcactcacactccatgaagtacctgctctaatgcccattttatagaaggagaaactgaggcatagagaggtgatataaatgtctaaggttacacatctgaactttaactcaggctgtaaattcccacatcaccatcagtgcaccagagcagaggttgaaaactggtggtctctgagctcagtatacctcagagttctgtcctgtttgatactgtatttaaaacattaaaaaaaaaaaacatggttgctaacatgtaaaaatgggggacattttcata

SEQ ID NO: 204383 - DNA, 313 bp, Homo sapiens
aattgagtgttttctattctggcagcatccgattgaaaatcatttcagaaattcttagtattgcatgcaatcattgtttagtagctagatctttttaactttatgatagaattgtgcatttcatttctgttttaagtcctatccatgtatttaagtagtgtaataaattattttcttgccagcagggtcttcttgtagccaccaagcttccttaaacaattattttgaattattctttaggtagttcatagatctctatttctttggggttaattactgaaaaattattgtgttccctttgcggtgtaatata

SEQ ID NO: 204384 - DNA, 311 bp, Homo sapiens
ttctgaaatccaactgtctactcatcatatccacgtaaatgtctaataggcacctcaacatagctgagaaaacatacttctcacctccaaacctgcagcaatcttccccatctgggttaatgacaactgcattcttgcagctgctcaaacacaagccccggagccatctttttctctctcacacttcacatcagcagatccaatcaactaccatcaaaatacatccagaattggtcacttctcaccacctcaatcactaccacaatgctccagcaatcaccaagtgaattactgccaatagtgtcctaaca

SEQ ID NO: 204385 - DNA, 531 bp, Homo sapiens
tctcccataccccaaagagagagacagggttaacattttgggagggagacagaagggaatcatgctataaacagctttctctgtcttttcagaatttatttatttatgtttaaacctctaaagaggtttaattctttcttgggtatcaattgcctgtgatcaaggagtaatcatattgttactaatacactcttgacagcttttggtcatgcagttctgagcagttggaagataaagttcttagttacagcttctaatactcataaatctcaccaacagtgtggggccccactggagttcccactctcatcttgaccaagatgatttactcagcttgcccacagtgctgcctcttgacattctgaagccctggggaattcctccacaccctctgacttcctgtaactgagcactgaggctcagtgcatctctatttagcactcctcttactgtctcatatttaactagtgtttccactggattgcagaagttttgaaggcagagcaggattacatttttctcctctttaaa

SEQ ID NO: 204386 - DNA, 355 bp, Homo sapiens
cgaagtatagcggaccaccgcattagcctcagccccccgaatagctgggaatacaggcacgtgcaccatgcccagctaatttgtgtatttttagtagagacagggcttcaccatgttggccaggctggtcttgaactcctgacctcatgatccacccgcctcggcttcccaaagtgctgggattacaggcgtgagccaccacgcccagccgcaagcttttgtttatgccccttcctccatcttcagagccaccatagcctcttcagatctctgactcttctttcttcccttccatttataaggacccttatgattacattgggcccacatgagtcatgtatacactgcaaaggcc

SEQ ID NO: 204387 - DNA, 492 bp, Homo sapiens
gtatttttagtagagatggggtttcaccatgttgtccaggctggtctcaaactcctgacctcaagtgatccacccactttggcctcccaaagtgctgggattacaggcatgagccactgagcccagccgggaacccacaggttttttggatggtctctgaatgtcatgtaactcttttattttttatcaaaaaaactttttttgacacagtatcttgctgtgttgcccagactggagtgcagtggcaagatcacggctcactgcagcttctaactcctgggctcaagtgatcttcctgtcacatgagtctcccaagtagttggaacacaggtgccagccaccacacctggctaatttggtttggttttgtttttttagagatgggctcttgctatgttgcctatactggtctcgaactgctggcctcaggcaatcttcctcccttggccacccaaagtgctgggattacaagcatgagccactgtgcacagc

SEQ ID NO: 204388 - DNA, 392 bp, Homo sapiens
gagagaggttacgtgactatagattctacagacattaaaaaaaggttaagaaatattatgaataggctgagtgcagtggctcatgcctgtaatcccagcactttgggaggctgaagcaggaggattgcttgagctcaggcatacaagaccagcctgggtaacataatgagaccttgtctctacaaatacaaaaattagctaagtgtggtggtgtgtgcctgtggtcccagctactcgggaggctaacgtgggagaatggctcagagtctgggtcgttaaggctgtagagagctgagattgtgccactgcactccagcctaggcaacagagtgagacccccatctcaaaaaatgtatatatattatgaacaacttcatgctcatacatttggc

SEQ ID NO: 204389 - DNA, 678 bp, Homo sapiens
acacctgtcctggagtgggaggctgagatgggaatatcacctgaggtcgtcgggagttcgaggccagctcagccaacatggtgaaaccctatctctactaaaaatataaacattagctgggtgtggtggtgcacgcctgcagtctcagctactcgggcacaagaattgcttgaacccagaaggtggaggttgcagtgagccaaaatcatgccactgcactccagtttgggcaacagagcaagactctgtctcaaaaaataaaacaagttatgggtatacagtatataaagatctaacttaagacattgataatataaattgcagtggagtagtaaagaagtagaggtttttgtatgcaactgaagttgttaaactagattgttataactttaagatatgttatgtgatctcattggtaacttcaagtaaggtatctatagaatatacccaaaaggaaatgggaaagaaatcaaagcatgtcactacaaaaaaaatcaatgaaaaatgaaggaaggcaaaggaaaggaggcctgaaaaggctacaagacatataggaaataattaatatggccatagtaattcttccctatcagtaattattttaaatgcaaatagattaaagtccccaattaaaagacagagattagctgaatggagtaaaaaccaggatccaactat

SEQ ID NO: 204390 - DNA, 790 bp, Homo sapiens
  misc_feature (462)..(462): n is a, c, g, or t
  misc_feature (468)..(468): n is a, c, g, or t
  misc_feature (473)..(473): n is a, c, g, or t
  misc_feature (480)..(480): n is a, c, g, or t
  misc_feature (497)..(497): n is a, c, g, or t
  misc_feature (499)..(500): n is a, c, g, or t
  misc_feature (502)..(504): n is a, c, g, or t
  misc_feature (526)..(526): n is a, c, g, or t
  misc_feature (553)..(553): n is a, c, g, or t
  misc_feature (555)..(555): n is a, c, g, or t
  misc_feature (564)..(564): n is a, c, g, or t
  misc_feature (568)..(568): n is a, c, g, or t
  misc_feature (576)..(576): n is a, c, g, or t
  misc_feature (579)..(579): n is a, c, g, or t
  misc_feature (582)..(582): n is a, c, g, or t
  misc_feature (584)..(585): n is a, c, g, or t
agcggaggcggattatgtggagtgaaagttacaccgtggcggattgacttctaaggactcttggtacatgaggaagaaacccggaaggggaagaggaaagcaaaggcgtcaggaatggttcttcctcagggtctattgacattcagggatgtggccatagaattctctcaggaggagtggaaatgcctggaccctgctcagaggactctatacagagatgtgatgttggagaattataggaacctggtctccctggcatggagtttctcgctcttgttgcccaggctggcagtgcagctggcacaatctcggctcaccaccacctccgcctcccgggttcaagcgattctcccgcctcagcctcagaagttgctggaattacaggtattttcttctaaatgtgacatcaaggaattaccaccaaacaaaggagagtaatacaggagaaactatccagacagnaatgtnggaangacatgnaaagccacgacatacangnntnnntgcttcagagaaacccagaaanaatgtacatgactctcagtgtcctgtngnaacatgatngaangacattantancgngnngcctgcgtgtgcacctactaacgcgcacacagtctcatctggtagcaacgagcacactgcatgggcgagaaccagcgcatgatggcaccaacaacgcagctctgattaaaagaatcagcttgcgatttacaccggcagttcacatctacccagaacttgcagctatttcacagctgaaaggggaaaactctttaaatattgaatc

SEQ ID NO: 204391 - DNA, 578 bp, Homo sapiens
ggcttcgcgccccgccgccacccggcccaggccccgcccaccacctcgcggggcccgccgaggcctggcttctgtcctgcgcgcgcagattctcgcaaatctggaagcggatcgcgtggagtgacggtcacaccgcggcgaattaatttccaaagactcatgttacatgagaaagccaccaagaagaccaaagaaaaggagacaaggatggctcttcctcagggatgtggctatagaattctctttggaggagtggaaatgcctgaaccctgcacagagggctttatacagggccgtgatgtggcagaactacaggaacctggagtctgtgggattgacttctaaggactcttggtacatgaggaagaaacccggaaggggaagaggaaagcaaaggcgtcaggaatggttcttcctcagggtctattgacattcagggatgtggccatagaattctctcaggaggagtggaaatgcctggaccctgctcagaggactctatacagagatgtgatgttggagaattataggaacctggtctccctgggtgaggactaacttccctccagaagctgggg

SEQ ID NO: 204392 - DNA, 662 bp, Homo sapiens
  misc_feature (334)..(334): n is a, c, g, or t
  misc_feature (340)..(340): n is a, c, g, or t
  misc_feature (345)..(345): n is a, c, g, or t
  misc_feature (352)..(352): n is a, c, g, or t
  misc_feature (369)..(369): n is a, c, g, or t
  misc_feature (371)..(372): n is a, c, g, or t
  misc_feature (374)..(376): n is a, c, g, or t
  misc_feature (398)..(398): n is a, c, g, or t
  misc_feature (425)..(425): n is a, c, g, or t
  misc_feature (427)..(427): n is a, c, g, or t
  misc_feature (436)..(436): n is a, c, g, or t
  misc_feature (440)..(440): n is a, c, g, or t
  misc_feature (448)..(448): n is a, c, g, or t
  misc_feature (451)..(451): n is a, c, g, or t
  misc_feature (454)..(454): n is a, c, g, or t
  misc_feature (456)..(457): n is a, c, g, or t
agcggaggcggattatgtggagtgaaagttacaccgtggcggattgacttctaaggactcttggtacatgaggaagaaacccggaaggggaagaggaaagcaaaggcgtcaggaatggttcttcctcagggtctattgacattcagggatgtggccatagaattctctcaggaggagtggaaatgcctggaccctgctcagaggactctatacagagatgtgatgttggagaattataggaacctggtctccctgggtattttcttctaaatgtgacatcaaggaattaccaccaaacaaaggagagtaatacaggagaaactatccagacagnaatgtnggaangacatgnaaagccacgacatacangnntnnntgcttcagagaaacccagaaanaatgtacatgactctcagtgtcctgtngnaacatgatngaangacattantancgngnngcctgcgtgtgcacctactaacgcgcacacagtctcatctggtagcaacgagcacactgcatgggcgagaaccagcgcatgatggcaccaacaacgcagctctgattaaaagaatcagcttgcgatttacaccggcagttcacatctacccagaacttgcagctatttcacagctgaaaggggaaaactctttaaatattgaatc

SEQ ID NO: 204393 - DNA, 379 bp, Homo sapiens
ttttcacggagctccttctgaagaggagagaggtggtgcaccaccccttccctggtgttcagagaaggaccatgccaatagaaaaaaagtgcaagcaactttgctactccttgagcttggcctttgtgtttctcaagccttgaatcacctgagtttcaacctgggcttgtaagtttcaaaaatcaccaggacagaatgatggtgtgaacctcttagccagactgccatggaaacacttcctcatagaagtttatgaaaaattcaacaatttttagggaaagttaacatagaaagcattatggattccacatcctggaagaaaagacttttcttcagaagtttgagggctatcaactttgtgccttgtgctattctaggt

SEQ ID NO: 204394 - DNA, 174 bp, Homo sapiens
tctccccagttgatttgttaatttcttgcatcattcaaatgccagatgattggactctacacaattgaccgaaggaacagaatttccaagagtgtcagttgcctttctgagtaaaataatcagacacttcactcacattctatgaataaataacacctccagtgtaaaatggat

SEQ ID NO: 204395 - DNA, 705 bp, Homo sapiens
ttagatttcagaagttgattgcaaagatgcactggaaatgatctgtaacttagaatctgagggtgatgaaaaaagcgctcttgttttatgtactgcgtttttgtcacgtcagctccaacaaggagatatgtactgcgcttgggaacttactctcttttggagtaaattacaacaaagagtagaaccatctatacaagtgtaccttgagaggtgtcgtcaactttctttgttaacgaaaacagtatatcacattttcttcctgattaaagttattaattcagagagatggggtctcactatattgcccagatttatctccaactcctgggctcaagtaattctccgtgccttggccttccaaagtggtgggattacaggtatgagccaccacacatgaccttcgcagcagccttcttgacagggatagtatgcaccatgactgaaggggctggacttgctacctgtatagaactgtgtgtaaaggctcttcgcttggagtctacagaaaatactgaagtgaaaatatctatttgcaagaccatttcatgtttgttgcctgatgatctggaagttaaacgtgcttgtcaactgagtgaatttcttattgagcctacagtagatgcgtattatgctgtggaaatgttgtataatcagccagaccagaaatatgatgaagagaatcttccaataccaaattctttacgc

SEQ ID NO: 204396 - DNA, 385 bp, Homo sapiens
gatgatgatgatgatgacaaccaaatgttttaatctggtagaaaagaaatagaagaaattaggccaggtgggaagaaaggaaagtaatctttcatgtctagccaaagacaacacttacaaagcatattttatttctgtttaaatcccagccagagattgcacaataccaaactgccaaatttcaaagacatttattcaaaatcaggagaaaggagattttacttagcaggtatagtctcttggattttgcaaagttaatcagcgggacttggaacttgtagggctctcttctatccaggagcctggctctcttaaatctttcagctgtcagagtaattatagagtcatgcataggtttgtactcagcatgtactagccttgaata

SEQ ID NO: 204397 - DNA, 408 bp, Homo sapiens
gcaattaggtaaatgtgtgacagttcgaaaatacattcaagtatagaccagtggaccaatgttatctcaggatgaaatcatagatcatacttcaacaaaggtgtcacaggctaaagtgggagagcgtattttagttttcatccatttccaacagtgagaggtgtgaatgcttatgcaatatagaaaaaagtccgcaaagaactgccagaaccaggcctgtgaccaagtttacagtcatctaatttctctccattggtccgagagaaattggagttaattattatttatcatccaagctcctttccctctgccctcttattttccaacacagtgtcttgaattttatcactttatcgtttagttattaagggtgatttggtgaaatgtagaacagactatatgaattac

SEQ ID NO: 204398 - DNA, 561 bp, Homo sapiens
ctatagactaatattataaccaagaaagtaaaacaggacacaggaaatggatacttttaagtgtgcccatgcctttcctaacactcagcccttcacaaaattcgtctgccaaattttatcacatttggttcttttagttcctacttaggccttgcaacaattcacaagctcaattccaagtggaacaaaagctgatgacccattcaaccttcttctcatgctgattaataatgataatattactttactccctaaactatagacccctgtaggaaaaaatacaagtaggcacttaatcaataggactccagcaaatttttttcatataacatactcgctttggttgttgttgttgttgttgttgttgttgagatggagtcttgatctgtcgcccaggctgggaatgcagtggtatgatcactgctcactgcatcctcaaactctcagactcaggcaaccctcccacctcagccatagttttatttttaaatgtctttataggccgggcacagtggctcacgcctataatcccagcactttgggaggccaaggtgggcggat

SEQ ID NO: 204399 - DNA, 645 bp, Homo sapiens
ctgcacacccgcgggccacgggccctagcacacccgtcacctgcccaggccagagaccgctctccgcgctagaagccacagcaaccccggctttcctcgcatggagcacagcagagctgctctggaaatgtggggtcacaccttcactgtcttctcgggagcagctaggctgggctggggaatgacctgggaacacagataatcagggaatcaacacagctggaggcagcattggaacccagcatactggaggcggtgtcggcccagaggttttttcctagcccaagagtttttttccagccggcgttgttggaaggcctgccctgctttaagcataaacagaggaagagactaaggcagccgagggcactgggccgggggcatagggaaacggggcaatgtggtggtctgggctggatcctggaaccgaaagaagacattcacggaaaaactggtgagagccaaataaagtctggagcttaatcgcattgtaccaatgtcagtttcttagctttgacaaatgtatgaaaggaatgtaaaaggttaacaaaggaagctgcgtgggggtaaatggatctctctgttctatattcgaaacttttctgtaaagcaaattattctaaattaaaagtttattaaaatatt

SEQ ID NO: 204400 - DNA, 990 bp, Homo sapiens
  misc_feature (768)..(768): n is a, c, g, or t
  misc_feature (783)..(783): n is a, c, g, or t
  misc_feature (829)..(829): n is a, c, g, or t
  misc_feature (869)..(869): n is a, c, g, or t
  misc_feature (899)..(899): n is a, c, g, or t
gaccaacttgtgttgatatttgctggaaaaattttgaaagatcaagataccttgagtcagcatggaattcatgatggacttactgttcaccttgtcattaaaacacaaaacaggcctcaggatcattcagctcagcaaacaaatacagctggaagcaatgttactacatcatcaactcctaatagtaactctacatctggttctgctactagcaacccttttggtttaggtggccttgggggacttgcaggtctgagtagcttgggtttgaatactaccaacttctctgaactacagagtcagatgcagcgacaacttttgtctaaccctgaaatgatggtccagatcatggaaaatccctttgttcagagcatgctctcaaatcctgacctgatgagacagttaattatggccaatccacaaatgcagcagttgatacagagaaatccagaaattagtcatatgttgaataatccagatataatgagacaaacgttggaacttgccaggaatccagcaatgatgcaggagatgatgaggaaccaggaccgagctttgagcaacctagaaagcatcccagggggatataatgctttaaggcgcatgtacacagatattcaggaaccaatgctgagtgctgcacaagagcagtttggtggtaatccatttgcttccttggtgagcaatacatcctctggtgaaggtagtcaaccttcccgtacagaaaatagagatccactacccaatccatgggctccacagacttcncagagttcatcagcntccagcggcactgcagcactgtgggtggcactacatggtagtactngcagtggcacttctgggcagagtactacgtgggccaaatntggtgctggagtaggagctagtatgttcanaacacaggaatgcagagcttgttggaacaaataactgaaaaccaaaaatgatgcaaaacatgttggttggcccctaaaattggaagttgtg

SEQ ID NO: 204401 - DNA, 796 bp, Homo sapiens
aactgagttggtaatctagagaaatctgcccctctactttattctctcctgctattgacttgttgcagaaaccaagtttggtgtcctgtgttctttcctacatttggaatgcatttgtttgcttccttttggtgtctttcagtgtgttactctatccacagtatttcttgtaagtggaagcaccagatgcttgaatagattcatatttcatagatggttatacaagaatacttcatagaggaaaagatttaaagatttttgcatgtgtttattcatttataaatttggtttcttaatattttggggctgtccttgtatctgcatcctatgacaatcgctgcctaggattcccacaagggatccatccagctacaagggtggtggagaaatgagtgttttgttttcccaggctctatagctgaggcagagaagggagaatgaggagtaggctgtgtgaacctctattcctaactccttcttcctacattggaacacccctagtaagcttcagtgtatctgtatttcctgaatgattatctccaattcaattttgttgcctcccacagaagaaggcatacagtagtgttactgagagagtggtgctattaggacaaccgtgctgactcccctagattttgtttttaatcattgtcagattttggtaattggacaattgttagtaacatgttcttgtgaagtcctttgtaactgcttacaacttttgtttgaaacctctgctttatttagagatgcagagtctattgagagaacatatctgtaaataccaactcagtgc

SEQ ID NO: 204402 - DNA, 275 bp, Homo sapiens
tttttggttcttctccttctgtaaaagcttatagtgccaacataaatactctgcatatttataactatttctttttctaccttctatgttatagttctagggaatgcctgatgcacagaaccctaatctttgcaaaatacgtaccacaaataagatatcagaataattgttatctcttttgctcagtgtagtagtgggaagagtttatatagagtgctctagctttagaacgggaagagaacgatgtgctgtctgttaactaaatttctctacgc

SEQ ID NO: 204403 - DNA, 705 bp, Homo sapiens
ctattttgataatcccatggtttagaggccctgacaccatggccacttccaccttttactctgattaagcgctcatgttgctattctgtgaaccagtgccagagaggaaggttggctctctgtttggaagtggcccaagcttctattataaccactttgggaaaaaaggcaaaagagcagctgtcctacacagtgtctttctcctcctcctgctcacccagtctgagctcagacttaccatgattccctcatttgacctcgagcatatcaccatcaggggtttgcaattcaaagtacagcatcacagcagacagaacaatggcttggccaaagatgtccatgtccttatcctcagaatatgtgaacaggttaggttgcatgatgttttgactgcattgtgttttcccagaactcatatgttgaagcctaacccccaatgtgtctgtatttggagatagggcctttagggaagtaattaaggttaaatgaggttgtaaggatgctgtttgtattagtccattttcacactgctgataaagacatacccaagactgggaagaaaagaggtttaatggacttacagatgcacatggctggggaggcctcgcaatcatggaggaaggcaaggagtagcaagtcacatcttatgtggatggcagcaggcagacagagggagcttgtgcagggaactcctctttttaaaac

SEQ ID NO: 204404 - DNA, 631 bp, Homo sapiens
ccacaattcttatttccttggggaagaatacttactctaatattttccaggattataacgactcaaataggctcaaattaatctctgcctggcaaaagctgattcatccagaaacaaccatctaaatagaactgtcttactgaaatcaaagttgatagggatgaagaatccactcattcccaaaagtcaagggggctaaggtgcctcacagagtccttcacagaatgtcaagaaaatggtgagaagggcaccctgactcaatatcctccttgactccttgcccatgaaataacattgcagacagacaaattcaaaccagtgctagaacaggagtacatcacaaactttctaccagtgctttcaaacttttttgaccatgatggataggagaagatacagcttacgctacaacccagaaaatacaggtttctaactaaaacaagttgcgaaaaacaatacttatctttcttaagtatgatacactgataatttcttttttttattttttattttatttatttattttcaatgtcttatttcccataggtttttggggaacaggtgctatttggttacatgagtaagttctttggtggtgatttgtgagattttggtgcaccaatcaccgagc

SEQ ID NO: 204405 - DNA, 712 bp, Homo sapiens
ccacaattcttatttccttggggaagaatacttactctaatattttccaggattataacgactcaaataggctcaaattaatctctgcctggcaaaagctgattcatccagaaacaaccatctaaatagaactgtcttactgaaatcaaagttgatagggatgaagaatccactcattcccaaaagtcaagggggctaaggtgcctcacagagtccttcacagaatgtcaagaaaatggtgagaagggcaccctgactcaatatcctccttgactccttgcccatgaaataacattgcagacagacaaattcaaaccagtgctagaacaggagtacatcacaaactttctaccagtgctttcaaacttttttgaccatgatggataggagaagatacagcttacgctacaacccagaaaatacaggtttctaactaaaacaagttgcgaaaaacaatacttatctttcttaagtatgatacactgataatttcttttttttattttttattttatttatttatttttttgagacagtcttgctctgtcgcccaggctgcagtgcagtggcgcgacttcggctcactgcaacctctgcctcctgggttcaagcaattctcctgcctcagcctcctgagtagctggcacgtgccaccatgcctggctaagttttgtatttttagtagagacaaggtttcaccatgttggccaag

SEQ ID NO: 204406 - DNA, 634 bp, Homo sapiens
atagaggagaagagtggatatgtggtgaccaatattaattaatttatatatatatatatatatgacattttcttgcacaatagactgggaaggagctactgtagtggacttaatgaagtataattttggggtaaacctcaattttaattccagtctgtcacttactagctgtctgacttcaacaaaatgagtcaccttctgatccttagtttcctcatctgtaacatgggattatattaggtaacatacataagacacctgtaacacaatcagtgcttgagaagaatgatgacttttcttacttatccccatgttcacagtgcctgacacatcatagggttcaatgagcatttgctgcataaacttgacactgcctttgtcagatgcctcacctggttaatttcattttttatacaattattttgttttggaagagcttctccaaatatacagttgtataaatctaaaccagaaaatgatggtgttctcaaacagtacgagagctgagtgttgagctgtgtgatgttcaagggctcttttgacttatctttaatttttctggcaaggctatgatgtagggaagtacttctgtgcatggacaggagaaaaaagagtgtgcttatttctcattcaa

SEQ ID NO: 204407 - DNA, 405 bp, Homo sapiens
gcctgttttactcttgtcttgagctggctttatgcccaggaagtgggtggcaacatctcctcttactccccagattgtggggagaactctaagagctgtagttccactggatgatgagttaaatcactctggaggccttagctggctggtgagctctttttctgtggggaaaatgccacttgtgaattgaacagccatcctttaagtgaatattcggcagtcagtcttcattataggcagtggccaaccagattggtgcttttcagcctttgttccctggagtcccaggacccgcgagagaagttcctggctcctctacttgcagtcaccctccacagcttcatctttctttttatttgaggttttctcctgaattgtgtttgaaaaatatattgctgctaaaaa

SEQ ID NO: 204408 - DNA, 544 bp, Homo sapiens
tttggtaggctgaggtgggcggattgcctgaggtcaggagttcgacaccagcctggccatcatggtgaaatcccatctctactaaaaatgcaaaaattagctcggcatggtggtgggtgcctgtagtcccagctacttgggaggctgaggcaggagaattgcttgaacctgggagacagaggttgcagtgagccaagatcacactactgtactccagcctgggtgacagagtgagactccgttaaaaaaaaaaatgtagttgtttatctgtttttctggctttctttgtgaggggagcaagcactaggggcttctagtcagccatcttgctgacatcacttcctctggacctcccattaaccaccaaccctgaaaatgtacaacattaattgtaaagaggagctgatataagaacatggataaatgagtcagacaataatttcaagccatgaatctgaaacaggttcgtatatgtgggacatataaagctataagatacagagctgtatggtaaggtacatctggggcaatcaagcttgggtac

SEQ ID NO: 204409 - DNA, 408 bp, Homo sapiens
tatttcaaacctgacaggactatatgctgcttgggtgaaacaaaagcagtctgcaattgtatttactggtgatcaaggttccaaattgtttggctgtcgtggaataaaacaattgaacataaaacccaactgttatattggaacataatattgtcttcaagataggccagtgctctgacttaatatgagcttatctgcaaaaatgccctttggcagagacatttctgaaaagggactgtttctgttgctggggccagaaatggctcacacactcctcactggcatgtactgatgggaaagcagaatagtagatattgccatcatcatgaactttgagttaatcattgtttgtagtgaaactgtataaaaataatgataatgatgtcaccaagcattctctatatgccc

SEQ ID NO: 204410 - DNA, 496 bp, Homo sapiens
ggtctgaatcctcacctgtccgctggctaagagccttaagccaggctcagcccgcacaatgtgtgcgatgacctccaccacggccaccacttgtcactgtgtcccctttcccacacgtcttcccagcacagtcctattaatttaatgagttgagcatttgagacacccacctgtagccagtgtaagttcttttagacaggggttggtcctgcttcaggtaacacccgtctccttctgttttgtgagctataccctctgacttcaagataccacccagaatgagtcccagagtttcatggaaagctagagttcaaaatgaataagctagagcaggcttgtctaacctgcagcccatgggccacatgcggcccaggacggctttgaatgtggcccaacacatattcgtaaactttcttaaaacattgagtattttgcaattttttttttccagttcatcagctatcgttagtgtattttatgtgtggcccaagacaat

SEQ ID NO: 204411 - DNA, 125 bp, Homo sapiens
tgctgagatttacaagcatgagccactgtgccagcctctgctccccatttcctactcttatttatctttttgccagattttctaacttggctttttgttttgttttgtttttttagacttgttaa

SEQ ID NO: 204412 - DNA, 428 bp, Homo sapiens
aacataggcatggttcccatgcttaaggtccaaagggtgcatagtggaatgtagatcttcctcacacctggtccctacctacccagccccctctccacaggcagcccctatttccagaaacatccatctccattccttcttccttcatctagctgccaagttctgccaccctttcttttgcaggctctgacacctcattccttttctgtttattcctatagaagcttagtggaaaatagacccctctccctctgtcttagaaaatagagacctctccctctgtcttagtagaaaatagacacctctccctctaagtagaacatagagacctctccctctgtatcctaaccactgctactcttattccctttggccctctctcttccagcccagacctccttctgcttctcagacaaggtagagccgag

SEQ ID NO: 204413 - DNA, 476 bp, Homo sapiens
gagaaactggaaatttggattttgacatgaaacctctggaatttaaaatactagtttaaaatgcacagtgcctaccaaaccaaacctatctgcaggccacccctaactcacagattgccagtaaagacctctaaatcagatgaacattaataccctctaggtctattactctgtggcagtgcagtgctgcatgactaaaaatcttcactgaatgaatgtgtttctttaccactaaacaggcagcgtgtttttactcaaccttgacatatgacttttttttttcattatgaatactcatgaatcttaagacctgagatctgcacagagtctttactcgaagaagtactgtcataaacagagataggttctgccgaacatggccggaccgaaaaatcagggagcaattttcacaggtacacaatcgagtaagaactgccatcaatctgtcttttcagacatattaatccacaaagata

SEQ ID NO: 204414 - DNA, 194 bp, Homo sapiens
tgtgccattacgcccggctaattctgtatttttagtagtgtccagatccagtgcctactaatgctaaataaatatatgttgaatgaatgaattctaataaggctaagtaaaatattcactataccagccctgtaaggaaactgtgcttacaaataacacagtcctttgaattaaaataacttattttaaagatc

SEQ ID NO: 204415 - DNA, 639 bp, Homo sapiens
tgagagacccatagatggttcacatcacaggactctgcagataacctccagtaccagcctggaactgggaagattcgctgggtggctagacccagaagagagacaacaatcactgcaagtttggctcataggaagccacatccataggaaaaggggcagagtactacatgaagagaacaccccatgggacaaaagaatctgaacagccttcagccctagaccttccctctgacagagcctacccaaatgaacaaaccctggtaatatgacaaaacaagacgcttcaacaccccccaaaaaacatactagttcactggcaatggatccaaaccaagaagaaatacctgatttacctgaaaaagaattcaggaggttagttattaatcagggaaggaccagagaaaggtgaagcccaatgtaaggaaatccaaaaaatgatacaagaagtgaagggagaaatcactcagggaaatagatagcttaaagaaaaaacaatcaaaaattcaggaaactttggacacatttttagaaatgcaaaatgctctggaaagtctcagcaatagaattcaacaagtagaataaagaaattcagagctcgaagacaaggtcttcaaattaacccaatccaacaaagacaaa

SEQ ID NO: 204416 - DNA, 376 bp, Homo sapiens
acacatgaaacactccacaggcaaagacattatccatcagtgcactacacacttctgtaaattatcaggactcctcaattgaggtgagtctacagagatttcaaaggctatttgagtgctaagctatctaactactggttggacactatttaaataatgcgttaaacacaactcttgaggctctgaagaatttctatgctttccaatgaaccaggagttacaaggtcctgaaaaccacaagtgtgttacatcctttaatagataaagcaaagctgatattaatgtgaatatactttatatttacttctattcgtgttaatttttctttgcctgtaatatacattttcatataacggggaataagaaacatcttagg

SEQ ID NO: 204417 - DNA, 162 bp, Homo sapiens
tagctcactacagcagcaacacctatgcaaggagactagatgtaggctgccagtgaaaaccaacgtgtaatttctgggcagcaaatttaagagctaatgtatgattcacgatgctcttttccctctgctatgacaacccttaatgttccaatgttccatcag

SEQ ID NO: 204418 - DNA, 487 bp, Homo sapiens
agcccatgggcttgagaatcatgcagacctagctctaggttattaatctattattttaaccttatttcaattatttacccttctaattccaattatttaccttataagtgtttataagaatttaatgaaatgatacaatgaattgtacctggcacataggttatctacaaattgtagttacctggttaaaacaaataatatagcatatgaaatatacaagaattctgtctcttaaccacatccagagattcttcatggcataaaaaataaaataccaatctcttcagcttagtattctggactgtctatgaactcaactcaacctttccagttttataattttttttgacagtttattctacaagcttatcaaattatttctggggtatttctatttactgtattccatagctttgcttacaaagttccctctatacaggatgtattattttaaaattatattaaaattctaactgttattccaagt

SEQ ID NO: 204419 - DNA, 210 bp, Homo sapiens
gcctctgccaaggtgagaggacttcatgaagctgtttctgcaaccagtgaatgcatctctggtaggggctggggcaacagggtctctgtgtctgcatcttccaatggtcagctccacccaaggttgaaatccaaagcatccagaggtttgaatggagctcatggctccataaaggttaaggaataaccattgtcctggcagcgtggaaac

SEQ ID NO: 204420 - DNA, 320 bp, Homo sapiens
aagggaggctgctctcagggatatttgtcaggtaggaatgggtggagtggaactacagggccaccatgtttcccatgggtcacccatggtggccttgtcatgtttatccgtgatcctcagtgttctctgtggtcctcccgtcacccctttcagactgtcctttcagttctccactgtccctgcatcacctctgcccctgtcccgtttgtctgtgttcagtccatgttcccaggtcttgaggtggcccctggttctatgccccttacctaagaccctgtgcagggaatctgtgaaaacacagaggaaataaaaagtgagga

SEQ ID NO: 204421 - DNA, 532 bp, Homo sapiens
accttaggagcacctggtacattaggcacctggtgcattgttgaaatgctggtatggcccttagttcaggattacctgcacagtagctccttcatgccattcattttagaccaactcaaagcaaagaagcttattctgtcatagtctgatgggatattgtcagcctgcatgtcaaatactttgtgatagttaaataagactacaggactgttagaaattcttgtctgttagtctgcatgccataggctgtcatgaaaattaaacagagactataggattattatcagtttttgccctctggtttgtaatgcaagttgggctcaagtttgtttgtttttttttccccattgctgttttactgattagccagtagagtgaaatattaaagtttgtggattactttttatttctatatttatcagaccccagtattagaccaatgctgagctaaacattgagagagcaagacattttttagcatgagttcatctagtcccctccatgtaagctggtggcaggggtcttggtactg

SEQ ID NO: 204422 - DNA, 796 bp, Homo sapiens
atttctcggaggtggctcatcacacggctggtggcagtcttggtgccgcagtgattccttaatatttgatttctctcttgatttgccactattctgtattggcactttcagtgtagatattctagtttggggatgtcctcacaatgtgtaatagagattggtctattagcatgcttaatttctgctaatcagagttttgcatggcccaaacaacagttgaccatttttatggtatgggaaagtgtagttcacaactgtctttgtcacgaaagccgtttttcctcacattttccagtaggcagataacattacttaaattattaatatataacactcttggaactattgataggaaataatgtatttaaaataattttttgcattttcagagaccttgatgttatagggtagataagctatggcactataaaatcaaaaacactaattctgtggaaggatatctagttggtatttttatctttagctttctcatttctgagacagcatagtcatccagcttgatggtaatgtagtatattactttgttcagtgggcttataagtgactctgaattatgtttgtgatgagctatacactttttttctgttccccaaataccatgaaggacaaggtcactctttctctctctttttttgagtgtagattattttaaagcactaattgcattacattggtaactgcaatataaaatagccattattgttttgtgaagcatggttgaaattagctagtggtcccttttgaatttcatgagcctctcaaaaaagaaaaactt

SEQ ID NO: 204423 - DNA, 385 bp, Homo sapiens
attacatacagaaggatggtgataaaaaccacagaaaacgtataccagaagagagagtatctttaaaacacagaaagggaggaaaaaaccccctcaatccagaaatctatatgcagcaaaaatacctttcataaataaaggtgaaataagattttcccaaacatactaaagctgaaaaaaattcatcatcggcagacctgtacaagacatgctaaaggaatgtccaggcagaaggaaagtccagattgacataaaggaatgagaaggactgtaaatggcaaatactgaataaatataaaacatgtttttcttatttttaatctctttttaaaagtgacttgtttaaagcaaacgtaacaacgatgtattgtgaggcttatgactg

SEQ ID NO: 204424 - DNA, 900 bp, Homo sapiens
  misc_feature (17)..(17): n is a, c, g, or t
tcctacttttcacaggntacttttctacaggctacttttccacagcggtacttccacagggggggaaaggatttgatgacctggaaggtctttacacgttaaagttcaatgattctagctccagtttcatggatttaataagacagcctctcttcctagctccttttagaaatggatctttgaaagccttttgttttatgttctatttaaaatagcaattagctttgcatcgcaggtactttacagtgcaccatgtgtattattcttgtggaatattagttcaccagatgatagcccacaattctagttacatatgaagtggtggtgtggtgaaataacattgcagctcctcactaaaccaaaaactgcagcaagcttgtcgcagagagaccctcattttcccagctgtcaacctgactgatattttaatttttttgccctgtagaaaacttcagtctcttatccaatagataaatgagtgaacccccaggaaatgcagcagaatgtttctgtttgccaatgcaatgaatgcagaagctaataaatgtctacttctatcaggaggaggcgtgtaatgagtaaatgatgagagaaagaattcagggaaacaaatgatcaattcagtctaagatgacaaacaatttcctaataacttggcctctagttggagagagggcttcaccaggcaaagagaatgcctgttgaaactaagcctagcacaaggccatttacattcagctgctgatggatttggtctggttacatttgggtcacactgagcaataaggcgacgttcagacacagcgtggttattgcagacttttctttgccctgtaatgtctatgagtgtgtactaggaaaaggaatcatttcagagcctaattcacattattcaccccg

SEQ ID NO: 204425 - DNA, 206 bp, Homo sapiens
caatcacttgtcggggatactgtaaagaagattcttgggaaaggatttgatgacctggaaggtctttacacgttaaagttcaatgattctagctccagtttcatggatttaataagacagcctctcttcctagctccttttagaaatggatctttgaaagccttttgttttatgttctatttaaaatagcaattagctttgcatcg

SEQ ID NO: 204426 - DNA, 575 bp, Homo sapiens
ggctatttcaactccgtattatttatagcttaataaaatattttaaagatagttggccagtcagcactgatactcctgtctacctgtgttacatctcagaagaggcttagcctatctgtgctgacacttactgaagtataagttatatataaaacacacccactttaagtgtacaggttgctggtttttggtgaatgtgtacacgggcataaccatcatcacattcagggtgcagaactttgccgtcaccctctcatgccccgtgcagtcagctgctctctccctgacccagccccagagaaccactggtctactttctgcccctatgagtaagttttgctttttgtagaaatggaatttcacagaaattgaatcatatagtatgtattctcttgtgtctggcttctctggtttaacataattttgagattcatccattgcttgcaggtaacagcagttcctctttgttgctagtattctgttacatgggtaaaccacactttattcttccacccattgatggacatttggatgtttctatcttatgcctattatgaataaagctgatatgcaca

SEQ ID NO: 204427 - DNA, 2233 bp, Homo sapiens
tttttcaaaaaaaaaagtcccacatgtggtcatcgtcgcttctttatgttgtaaggtgaattgtaactatgcattctgcaaagggggtggggaggagagggcagaaaggggaagggagtagcgttgcatccttgttcttcagtttctgtgtccatggtgtccccgtgtcctggaggggaaggggagtgagagacgaatgtggtaaggtcagcacagtgagatagagacctctgagtcctcttgccactgttgctggcaggtctgatggccaggtaaattccagggggcctgcagttcctgtcaaccaatgtggttcaggattcttgatcctagccgtgcagtgttaatccagtgcagcaatggaactccacaggctccagtgttctctggaaaaagtactcatcctttcctgaattcagagcccttcaagctcaggaaaccacgcttcactcgtgctgacctgaaagttaatctttaggtcgattttgaaaaactccgcctcctctctcctttttaatatttctttcttcctttttaatcatgtttaagtgaacttactcttagttataaggaactgtcctgctttgtggggaagagggctgttgcttgtcaggcaaaaaagttttctcttcctacccaccatccctctctctgcttcccttgcatttggcaggctgtatgaagccaatgagctgcgaggtgttttgacaggggaggtctgcatgcagcctcttctttgtcctaacaattcctttgttgatcttgcctgtgatgaatcatagcgcctgcattgctctggtctaggcattatttgcaacacacagtatcgtaagcgagagattgttctgcctatattcagtgttttccatgcagcaattcttcttgttgacgttcacagtactgtaacgagtaacagacttgatcacagtctcctcgtgcctgtgcagggctgcacaggcatgatcttatcagggttccaatctgttagattgcctttaaacaaaaaaaacaacaaaaaaataaaatcctgacgtttcaactgtctcacacaaaataatacctcgaggtacatttccccctgcaatgtaaacccttaactcctctctcctttctgacatcagtggattatcctttttaaaatatgaacatgtaaatagcaggataactttaaaaaacattttctttgctgtgaaagtaaccctaaaatatgttttcttcttttgtatttttttggtttttgtttttaagccatcagaagtttcagatctttactctttcatgtttaagaagaaagagcagaggaggtcgggggagccggtttgcatttgtgttggaggggtgttatctccattgcctcccacacagtgacagcagaccagtatgtaaaccctgtcttggctgggcgcggtggctcacaccagtaatcccagcactttgggaggctgaggcaggcagatcatctgaggtcaggagtttaagaccagcctggccaacatggtgaaaccccgtctctactaaaaaattagccggacgcagtggcgcgcgcctgtggtcccagctgctcgggaggctaaggcaggagaattgcttgaacccgggagacggaggttgcggtgagccgagattgcaccactgcactccagtgtgggcaacagagcaagacttcgactcaaaaacataaaataaacaaaagacacacacacacacaaaaaccctgtcttaaatagctgccatctcttccagcaatctagtgccagggtaagaagtgtctgaatttctctcttccagcagatccatcccctgcagggactccagaatgttctccacacaatacctggagctctcaacctttcttggttcagacacacacatacacaccccttgagtaactcagtatcattttgtagttcacagaaggatgtagtccctggcattttggtttgcactgtagaatccatagccttgtcactttgttatgctctggaaatgtactgatttcttacttgggaggaaacttgtgtaaggagatgtgcaaaccaccctgaaagccatgtgcatcctcacctcttccattaccccctccatgagctcgaagcgacattaagtagagggaaatgcttttaacaaatgctgctcatgtggatctgtcagctattgcttgcctagatttgggcacccatgaagcagggttggaatggatcattttgaattgcttctttgcagacaccccctt

SEQ ID NO: 204428 - DNA, 1853 bp, Homo sapiens
tttttcaaaaaaaaaagtcccacatgtggtcatcgtcgcttctttatgttgtaaggtgaattgtaactatgcattctgcaaagggggtggggaggagagggcagaaaggggaagggagtagcgttgcatccttgttcttcagtttctgtgtccatggtgtccccgtgtcctggaggggaaggggagtgagagacgaatgtggtaaggtcagcacagtgagatagagacctctgagtcctcttgccactgttgctggcaggtctgatggccaggtaaattccagggggcctgcagttcctgtcaaccaatgtggttcaggattcttgatcctagccgtgcagtgttaatccagtgcagcaatggaactccacaggctccagtgttctctggaaaaagtactcatcctttcctgaattcagagcccttcaagctcaggaaaccacgcttcactcgtgctgacctgaaagttaatctttaggtcgattttgaaaaactccgcctcctctctcctttttaatatttctttcttcctttttaatcatgtttaagtgaacttactcttagttataaggaactgtcctgctttgtggggaagagggctgttgcttgtcaggcaaaaaagttttctcttcctacccaccatccctctctctgcttcccttgcatttggcaggctgtatgaagccaatgagctgcgaggtgttttgacaggggaggtctgcatgcagcctcttctttgtcctaacaattcctttgttgatcttgcctgtgatgaatcatagcgcctgcattgctctggtctaggcattatttgcaacacacagtatcgtaagcgagagattgttctgcctatattcagtgttttccatgcagcaattcttcttgttgacgttcacagtactgtaacgagtaacagacttgatcacagtctcctcgtgcctgtgcagggctgcacaggcatgatcttatcagggttccaatctgttagattgcctttaaacaaaaaaaacaacaaaaaaataaaatcctgacgtttcaactgtctcacacaaaataatacctcgaggtacatttccccctgcaatgtaaacccttaactcctctctcctttctgacatcagtggattatcctttttaaaatatgaacatgtaaatagcaggataactttaaaaaacattttctttgctgtgaaagtaaccctaaaatatgttttcttcttttgtatttttttggtttttgtttttaagccatcagaagtttcagatctttactctttcatgtttaagaagaaagagcagaggaggtcgggggagccggtttgcatttgtgttggaggggtgttatctccattgcctcccacacagtgacagcagaccagtatgtaaaccctgtcttggctgggcgcggtggctcacaccagtaatcccagcactttgggaggctgaggcaggcagatcatctgaggtcaggagtttaagaccagcctggccaacatggtgaaaccccgtctctactaaaaaattagccggacgcagtggcgcgcgcctgtggtcccagctgctcgggaggctaaggcaggagaattgcttgaacccgggagacggaggttgcggtgagccgagattgcaccactgcactccagtgtgggcaacagagcaagacttcgacatcggttcaacaaagcacaaaaatccgagggggccgtaccattcgccaaagagtgatataacaggggcgcctacacgcgagggaacgtgtacctaagggtgaaccccagacggcaaaaaagccagatccaaggcacaacagaaagaaattaacaaattaactacaaggaacaacggcgccccct

SEQ ID NO: 204429 - DNA, 1836 bp, Homo sapiens
tttttcaaaaaaaaaagtcccacatgtggtcatcgtcgcttctttatgttgtaaggtgaattgtaactatgcattctgcaaagggggtggggaggagagggcagaaaggggaagggagtagcgttgcatccttgttcttcagtttctgtgtccatggtgtccccgtgtcctggaggggaaggggagtgagagacgaatgtggtaaggtcagcacagtgagatagagacctctgagtcctcttgccactgttgctggcaggtctgatggccaggtaaattccagggggcctgcagttcctgtcaaccaatgtggttcaggattcttgatcctagccgtgcagtgttaatccagtgcagcaatggaactccacaggctccagtgttctctggaaaaagtactcatcctttcctgaattcagagcccttcaagctcaggaaaccacgcttcactcgtgctgacctgaaagttaatctttaggtcgattttgaaaaactccgcctcctctctcctttttaatatttctttcttcctttttaatcatgtttaagtgaacttactcttagttataaggaactgtcctgctttgtggggaagagggctgttgcttgtcaggcaaaaaagttttctcttcctacccaccatccctctctctgcttcccttgcatttggcaggctgtatgaagccaatgagctgcgaggtgttttgacaggggaggtctgcatgcagcctcttctttgtcctaacaattcctttgttgatcttgcctgtgatgaatcatagcgcctgcattgctctggtctaggcattatttgcaacacacagtatcgtaagcgagagattgttctgcctatattcagtgttttccatgcagcaattcttcttgttgacgttcacagtactgtaacgagtaacagacttgatcacagtctcctcgtgcctgtgcagggctgcacaggcatgatcttatcagggttccaatctgttagattgcctttaaacaaaaaaaacaacaaaaaaataaaatcctgacgtttcaactgtctcacacaaaataatacctcgaggtacatttccccctgcaatgtaaacccttaactcctctctcctttctgacatcagtggattatcctttttaaaatatgaacatgtaaatagcaggataactttaaaaaacattttctttgctgtgaaagtaaccctaaaatatgttttcttcttttgtatttttttggtttttgtttttaagccatcagaagtttcagatctttactctttcatgtttaagaagaaagagcagaggaggtcgggggagccggtttgcatttgtgttggaggggtgttatctccattgcctcccacacagtgacagcagaccagtatgtaaaccctgtcttggctgggcgcggtggctcacaccagtaatcccagcactttgggaggctgaggcaggcagatcatctgaggtcaggagtttaagaccagcctggccaacatggtgaaaccccgtctctactaaaaaattagccggacgcagtggcgcgcgcctgtggtcccagctgctcgggaggctaaggcaggagaattgcttgaacccgggagacggaggttgcggtgagccgagattgcaccactgcactccagtgtgggcaacagagcaagacttcgacaacacaaaaaccagggggccgggccaatgcccaatgaccgctaaaccgccgcgtcacccgtagagaaacccttccaacacgcgcgagacctcgccagaagcaagccccggtacacaccgaccgaccgcgtacagtccagactacacacgcgatcaccacgggcacgc

SEQ ID NO: 204430 - DNA, 2179 bp, Homo sapiens
tttttcaaaaaaaaaagtcccacatgtggtcatcgtcgcttctttatgttgtaaggtgaattgtaactatgcattctgcaaagggggtggggaggagagggcagaaaggggaagggagtagcgttgcatccttgttcttcagtttctgtgtccatggtgtccccgtgtcctggaggggaaggggagtgagagacgaatgtggtaaggtcagcacagtgagatagagacctctgagtcctcttgccactgttgctggcaggtctgatggccaggtaaattccagggggcctgcagttcctgtcaaccaatgtggttcaggattcttgatcctagccgtgcagtgttaatccagtgcagcaatggaactccacaggctccagtgttctctggaaaaagtactcatcctttcctgaattcagagcccttcaagctcaggaaaccacgcttcactcgtgctgacctgaaagttaatctttaggtcgattttgaaaaactccgcctcctctctcctttttaatatttctttcttcctttttaatcatgtttaagtgaacttactcttagttataaggaactgtcctgctttgtggggaagagggctgttgcttgtcaggcaaaggctgtatgaagccaatgagctgcgaggtgttttgacaggggaggtctgcatgcagcctcttctttgtcctaacaattcctttgttgatcttgcctgtgatgaatcatagcgcctgcattgctctggtctaggcattatttgcaacacacagtatcgtaagcgagagattgttctgcctatattcagtgttttccatgcagcaattcttcttgttgacgttcacagtactgtaacgagtaacagacttgatcacagtctcctcgtgcctgtgcagggctgcacaggcatgatcttatcagggttccaatctgttagattgcctttaaacaaaaaaaacaacaaaaaaataaaatcctgacgtttcaactgtctcacacaaaataatacctcgaggtacatttccccctgcaatgtaaacccttaactcctctctcctttctgacatcagtggattatcctttttaaaatatgaacatgtaaatagcaggataactttaaaaaacattttctttgctgtgaaagtaaccctaaaatatgttttcttcttttgtatttttttggtttttgtttttaagccatcagaagtttcagatctttactctttcatgtttaagaagaaagagcagaggaggtcgggggagccggtttgcatttgtgttggaggggtgttatctccattgcctcccacacagtgacagcagaccagtatgtaaaccctgtcttggctgggcgcggtggctcacaccagtaatcccagcactttgggaggctgaggcaggcagatcatctgaggtcaggagtttaagaccagcctggccaacatggtgaaaccccgtctctactaaaaaattagccggacgcagtggcgcgcgcctgtggtcccagctgctcgggaggctaaggcaggagaattgcttgaacccgggagacggaggttgcggtgagccgagattgcaccactgcactccagtgtgggcaacagagcaagacttcgactcaaaaacataaaataaacaaaagacacacacacacacaaaaaccctgtcttaaatagctgccatctcttccagcaatctagtgccagggtaagaagtgtctgaatttctctcttccagcagatccatcccctgcagggactccagaatgttctccacacaatacctggagctctcaacctttcttggttcagacacacacatacacaccccttgagtaactcagtatcattttgtagttcacagaaggatgtagtccctggcattttggtttgcactgtagaatccatagccttgtcactttgttatgctctggaaatgtactgatttcttacttgggaggaaacttgtgtaaggagatgtgcaaaccaccctgaaagccatgtgcatcctcacctcttccattaccccctccatgagctcgaagcgacattaagtagagggaaatgcttttaacaaatgctgctcatgtggatctgtcagctattgcttgcctagatttgggcacccatgaagcagggttggaatggatcattttgaattgcttctttgcagacaccccctt

SEQ ID NO: 204431 - DNA, 250 bp, Homo sapiens
cattgtggatctggcactgtttctaaagaaaaactccattatcccaagcaaaaagcacagaaggtggagtttggcttcaagagatgttaactcaaaatcttaggcctagcagagaatcaccaaatttatggagagttaacaggggtttaacaggaaggaagtgcctttaataagttctcaagccagaggctggagacagcagctaaagaggatgaggacagtccagagcagccagaaccaccagagctca

SEQ ID NO: 204432 - DNA, 358 bp, Homo sapiens
gcacagacaacttttgttctctgagtaattctggtcaacacttaagaaaatacctagacactaatgtgaggggttgtttgaagaacaatccctaccagatacaccccacagtgaagcccaattttgacacggaccacccacttgaagtttccaattgttttttatagtattccactcttaaaagcgcaaacagccaaggattaccagacagctgaagaaagtaactatatgcaacagactataatcatctccagagaacaaaaaagagcttttggaaatttaaaaacatacaaacacaaacaacaacaacaacaaaaacccagaaaacaaaaaccaaaagaaatataaaaacattgtg

SEQ ID NO: 204433 - DNA, 133 bp, Homo sapiens
ttttggttacatagatgagttctttaatggtgaattctgagattttagtgtacctgtcacctgagcagtatatactgtaccctcactcctttcccaactccacaacaatatttccatctttagaaaccaggtc

SEQ ID NO: 204434 - DNA, 450 bp, Homo sapiens
gtccaattggatatgagatgagaataaactgataattattccatcttcttcttccttggttgactggaagaatgatggtggcatgtcatagggcacaaagagccacccaggggaaattaatgtttgcttctgaaaatgctgagtttaaggtgatggaagtacaaggaatagacactcaaaaactgctgtgtaacacctaagaacagaaacaaaactggactcatagatgctaaaatcaacatccaataggtgacttttgaagccatggaattggatgaggttgcccaatgagggagactacaaagttagaaggaaaaaaagctggccgggtgcggtggctcatgccagtaatcccagcactttgggaggccgaggtgggtggattacctgaggttgggggttcaagaccatcctgaccaacatggagaaatcctgtctctactaaaaata

SEQ ID NO: 204435 - DNA, 438 bp, Homo sapiens
gccaggtatggtgactcacgcctgtaatcccagcactttgggaggctgaagtgggtggatcacctgaggtcaggagttcgagaccagcctggccaacatagcgaagcactgtctctactaaaaatacaaaaattagctgggcatggtggcgggtgcatgtaatcctagctactcaggaggctgaggcagaagaatcacttgaacccaggaggcagagtttgcagtgagctgagattgcgctactgtactccagcctgggtgacagaatgagactgtataaaacaaaacaaaacaaaaaaacaaaaaacaaaaaaaacaaaacacacacacacacacacacacaaaactgaatggaaactgagaacttactgttctatttatgatgaaagaaaactggtaggctttagaaagtacaccctatgtgatatgaaaagtgaa

SEQ ID NO: 204436 - DNA, 115 bp, Homo sapiens
caccaaattcctttcatgagattaatcttccacaacttctacacttccttaaatctttgattttgtcctatacttctttttttatattagcaatctactttaggacagaaattta

SEQ ID NO: 204437 - DNA, 306 bp, Homo sapiens
cagggctgtggatatgagccaccgtggcagggatgcatctgagatggcccccagggcagcctggcttttcaggggtgcagcctgatgacagagtgttctcacagtgaacgtgccattccagaaagcactgttttcttcatcacgcattgcttcaccaagcacttcagaactttaccctctgttcggtgctggggaaacgaaggggaagagaagggtccgtatgccagcgggcagacagacacattgagaacgctgcagtaacacggaaaacgatggtggcattgttgaggtccagaggagcagccc

SEQ ID NO: 204438 - DNA, 538 bp, Homo sapiens
tctcactagagtgtaagttccataaggacagagattgctgtctattttgttcactgctgtatcaccagtctctagaatagtggctattgcatagtaggtgctcaacaagtatttgctgagtgaataatctcactgaagaacctggagtaagtattatcataatagtgtgcgctccatttgcacctggcttttcacttacactcatgtcctgcccatcttccatgttaccacagagtcttcataatcatgatttctcatggctatggaatcttctgcccagtgtatatgctttacctgaccattcctatatcattggatcccataagttattactagttctcgacactataaataacacgacaatgaacatttttttggttgtagtatttccaatatatgatttatttttagggtgaattccctaaatcactaactaaccatttttaaagtaagaaaatacaattttgaattgctattttaatgaatgtattcaagaggggggaatcaatttttaaaaccagtgagcagtcaggtgcag

SEQ ID NO: 204439 - DNA, 463 bp, Homo sapiens
ctcaatcaagtagcctattaaaaggattatacactattaccaagtgggatttaccccaggaatgcaagggtgattcaacataagaaaatcaaccagcataatgtaccatattaacagaatgaaacaaaccacatggtaatctctactaatgtaaaaaagcatcacatagctgggcgcggtggctcacgccagcactttgagtggctgaggcaggtggatcacttgaggtcagtagtttgagaccagcctggccaacatggtgaaacctcgtctctaccaacaatataaaaaactagccaggtatggtggcgcacacctgtaatctcagctacttgggaggctgaggcaggtggatcatttgagagggcatatgaggttgggggctgtgctgctagaaacacagagttctgtctgccctttagtcagttttaaagagataatgttttgaggtaatccgtgaggg

SEQ ID NO: 204440 - DNA, 302 bp, Homo sapiens
gttttgtttttagtttaacaattttttatttaaaacctattttacaaataacaggaaacacatattttagcaaaatggttattctactattttagtaaaaatctgagatataaaggaagctttccaactagcaaaacctattttcaagtttagaaaatattctgctattaaaagaaaaattctctccttgttaaatttagttcaggggtcagcaaactttttctgcaaaggagcaaatcataaatattttaggctttgtggctcatgtgatctgtatgtatctactcagctctgccactaca

SEQ ID NO: 204441 - DNA, 368 bp, Homo sapiens
atgtaacagaggaaggaatcaatcaactagaagatgaaacaaaggacattacccaatcttaacagagacaaaatatactggaaaagaagtgaacagagcctcaaagaccttgtgaaatgataataaaagataaaatgtagatgtcatagaattatggcagatttccgtcagaaaccatggaggtcagaaggaagtggcatggcatttttcaggtgctgaaagaaagaaaactgtctacctagaatcctatttctaggaaaatatcctgcaagaatgaagagaaaattaatacactctcagatgaagacaaactaagagaatttgtctcactagacttaccttaaaagaatggctaaataaagttcttg

SEQ ID NO: 204442 - DNA, 477 bp, Homo sapiens
tttctataaatctgaaactgttctaaaaatataaagcctattaatttaaaaagtggcatatggtataatcttaatgttttgcaaataaaaaaaagatagggttcaattcattcattaacctgatctttactgagtccttcctttgtgccagtcaggcactgtgataaataacagaacattaacaatggccatctctgggtagtgaattgctgccattttcatcatcttctttatattctctatatttctaaatgttctaaatatatgtgttttggaatcagaaaaaaataagtaaaataatcattatgcaagcatgaggtaatattactcacaaattggatagactttaatttttggtcctcatcttcatttcactcagtagtagtgcgatcagctcaagtcgttgtgaaaaaggaaaggaagccccctggtcagagatcaaatggggaataaagaagatcctacaggaggtggagt

SEQ ID NO: 204443 - DNA, 478 bp, Homo sapiens
caccagcctgggtgatagagcgagactccatctccaaaaaaaaaaaaagtacttgggtacagtggctcacacctgtaatcctagcatttggggagaccaaggtgggaggatcacttgagcctgggaggtcaaggctgcagtgagacatgtttgagcactgcattccaacctgggtgacagagagcctatcttattgttgtataaaggtttgaaataggtacaaggtttggtcattcagtttcaaattcatttctcaaatatccttgtatctcactaacatcatctgtctaccagtaacatttccaaatctaatagtacttggcaagagatggggagggggttaaattgcacaatttaaaattttcataattgttatgcatcacagttattgtgatcacgtgataatgttatgcatgtcttttgttgtgtgtcagccccaacttttgtctcagcatttgaaccatgcatacatcttatc

SEQ ID NO: 204444 - DNA, 421 bp, Homo sapiens
tagactttcaagacagcaacagcagaaaattaaaccccaagtatgggaccctccttagcacagtgccgtatgcaactgcactggtcacacaacttgaagctggctctgcctttagattacaagaaatttgggcagggtgtggcagttcatgcctgtaatcccagcactttgggaggacaaagccagaggatagcttgaggccaggaatttgagaccagactggtcaacctagagagactctgtttctacaaaatctaaaaaaaaaattagctgggcatggtggtgcatgcctgcagtctcagctacttgggaggctgaggtgggaggatcgcttgatctcaggagtttgaggctgcagtgacacgtgattgtaccactgcactccagcctgggtgacagagcaagatcctgtctcagaaaa

SEQ ID NO: 204445 - DNA, 188 bp, Homo sapiens
tcaaactcttaggctcaatcaagtgatcctcttgcctcagccccctgagtaatgaggactataggcgtgtgccaccatcctcagctaattgtttttattttttgtagagacaggggtctcactctgttgcccaggctggtctagaactgctggcctgaagcaatcctcctgccttggcctcctaaaac

SEQ ID NO: 204446 - DNA, 512 bp, Homo sapiens
ggcctgcataaggaacaagacaatggtcaagattttctaagtatccagagcgagtatttctaggagagcaagattctcagaactgctctaaaaggtcagggttcatttcataccctcctctagactcccactatacttggttctacacttctaaacacagcactcctcctttgcctgttgttaacaatctctggactccttccattgctgagtgtctgtaattcttagtacagtacaatgcttgatacacaacaggcatctataatcattaaccgaattaaaagaaatgtaccggctggggcgcggtggctcacacctgtaatcccagcactttgggaggccaaggtgggcaggagatcgagactatcctggccaacatggtgaaaccctgtttctactatggtgaaaccctgtctctactaaagatttaaagatttactctagctaaatctaaaaactggttgggcgtggtggcgcgctcctgtagtctcagctactcagcgaggctgaga

SEQ ID NO: 204447 - DNA, 490 bp, Homo sapiens
ggcctgcataaggaacaagacaatggtcaagattttctaagtatccagagcgagtatttctaggagagcaagattctcagaactgctctaaaaggtcagggttcatttcataccctcctctagactcccactatacttggttctacacttctaaacacagcactcctcctttgcctgttgttaacaatctctggactccttccattgctgagtgtctgtaattcttagtacagtacaatgcttgatacacaacaggcatctataatcattaaccgaattaaaagaaatgtaccggctggggcgcggtggctcacacctgtaatcccagcactttgggaggccaaggtgggcagatcacctgaggtcgggagttctagactagcctggccagcatggcaaaacctcgtctctactaaaaatacaaaaattagctgggtgtggtggcgcacatctgtaattccagctactcgggtggctgagatacaagaat

SEQ ID NO: 204448 - DNA, 436 bp, Homo sapiens
ggcctgcataaggaacaagacaatggtcaagattttctaagtatccagagcgagtatttctaggagagcaagattctcagaactgctctaaaaggtcagggttcatttcataccctcctctagactcccactatacttggttctacacttctaaacacagcactcctcctttgcctgttgttaacaatctctggactccttccattgctgagtgtctgtaattcttagtacagtacaatgcttgatacacaacaggcatctataatcattaaccgaattaaaagaaatgtaccggctggggcgcggtggctcacacctgtaatcccagcactttgggaggccaaggtgagaggattgcttgagccctagtgagagcttgtctctacagaaaatttaacaattagctgaccatggcggcacacaaccatagtcccaa

SEQ ID NO: 204449 - DNA, 272 bp, Homo sapiens
gcttcctattttgttgatactcataatgttcacttagacattttaagaatttgtctcaaacaacttagaagaaacctttcttttctcttaaatgtcagattttagcagctctgaaactagcctaaacattcaggattgcctaattacaggattctaatgctggtgagcaaaatgaaccagatttgttcacctagatgcaagtgaagcttcaggccactctgttcccgctgagatttagaaacaagaaatgtctctgtgctgtgtatattgaa

SEQ ID NO: 204450 - DNA, 440 bp, Homo sapiens
tggagccaaggatgggggcttcctagtggagaacaaggcttcctagtggagaaagctgctgtgtgggaagatcagtagagctttctttgttattttttcctcttggtctggtttctgagagcaaatctaaaggtctcctggataccttaaaagtaccacctggagtcaggtagactctacatggttctgaggagaagagttccactaaaggcatctctgtaagtgggactgacttgaggcagcagcagctttcgtcaggccagcatgggtgtgcagcctggagggttgggggaagagggatgcccttcagcctttgcactcccatctactcactgtcagtgcttgctgtaccgccaggagaatggggaaccagaggtttcctgacaacttggagagaagtcacagttctctttaaagtaattaaaattatactcacatca

SEQ ID NO: 204451 - DNA, 777 bp, Homo sapiens
atggaaaaatacaggctaaaggggaagagcattgaggctacagtcagaaaggcttaacatacttttggagttctggaagattagaagagagaatgtagggaagaagtaatgttgctgagacctttccaaaaataataaaatgtatcaatccatacattcgagaaaccaacaaacctcagacaagataactgaaaacaaattaacatataaatgctacaggaaaccaaagaccaatagaaaatttgaaaagtagcctgagaaaaaagatagattatgttgaaaggatcaactgtttgaatgacaagtgattttcagcagaaagcatggaagctagaattcaatgtaatatattttcagtgtgtttcaaaggagtagcagacatttcataaacagaaattcaaaaggatacattttcagatagaaaaaagttactgaaaatacaaagttgaagatgcaagaaggaatgaaaataaaggcaatggcaaatgtgcgtaactaaaaggactattgactgtatagaacaataatatcttgtgttaaaagaggtaatgaataaaatgtatgccaataacatatagactggggtgaaggtgaaaagattaaatttagtttaattattatttaaccttttcattgtctgtgaagagagtctgagtatcaaattcaatgcatatactctagctatatatacaagagaagtgcattaaatgacatgtaaaataatgcccatggtagtattatttgtaattgttctaaaaagaaacagctcaaatacct

SEQ ID NO: 204452 - DNA, 516 bp, Homo sapiens
atgaaatttgtctatacaaaaaaaaaggatgtgaacaaatgttaacaatacaaatttaaacaggatacaggatttaattttgaaattctataattgcactttggaatatttcaacttgaagagtcttttgatggagctcctacgtttattcagataaattggcattctgttccagaatagaatggaatagagttgagaagtctacattttcacaaaacctaaatttggtgaaatgctccaaacagtcataaagacaacgtttttcttccttttatttttttttcttttttgattaaacatgtctttattatcagtatgcctgattctgtggaaagccgactggaaccctggtcattctgactctcggggcctcatgttccaaggttggctgctgcaactctctcttgagctctacctgtgtgtacatcttggtgatgtcattgtacctgcctttggggggctggtagttagagacccatagtgtataatctggaccttcccattcaaaggggaaca

SEQ ID NO: 204453 - DNA, 213 bp, Homo sapiens
cgcccagatgggctgacctaggagcagtataggctctacacaccattctgctgtcaagtggtcaaaatgaacgcatcagaaggtcaaattctggctcggcctccaagtgcagagacagcattaacttcgagagtattgctggcaaccattataaccctctaattgcctatgcaatgcacaagattttaaaatatatgtattgcacaaacaata

SEQ ID NO: 204454 - DNA, 539 bp, Homo sapiens
cacagtaaactcatggcagttcttctaagggcaggaaaagttatataaaatgtaggcctttaaatactggatttgcaaagttccattatgtgtggtaagaatggaaaagcgtatacctactatgtcccaaataggaaattacctataagcatcataatttaactcaccatacatactttgactcaagtaactgatttaaaaaaaaatccatgtggttggtgcatgtggttcgttatgttgtgttcataaatatgatcatcaaccgatttgcaaaacagtaaaatataataattctatgaactcaattccaaaaataatttacacctggatgaatctttttggaaaattttaccaaacagcatcatcttcagtgcttttctaaaccaaggatagaaaaatgcataaaccattggattaaatgtagagttcaagtagccaaaccaaatcaatacatcattcaaagtaggtggaataatgtagtgaagaaaagggtccatgactgtacagataaagaaagggcaccagcatattaggaaaac

SEQ ID NO: 204455 - DNA, 331 bp, Homo sapiens
ccacccccacgacaacatacatatcccaaaaccctgaattctgagtcccgcccttgggtctttgcccagtaattggccaccacagattctagcagcatttactgagcatctaatctgggccagccctcctctgggtgccatgacacacacatgaacaagacccagccccagaccaggccctagcagttcatagtctgatacggtggttctcagccaggggtgattttgatccccaggtaatatttaacaatgtctggagatgcttctggctgtcgcacttgtgggggctgggaggtatgctattatcatctagcgggtagtggccacggat

SEQ ID NO: 204456 - DNA, 365 bp, Homo sapiens
ggtcggccccatgtagactaacataggtatctaacagtggatagggaaccagtatgagtgttcgagacatgttacaaatataggagctattttacaatgaatccattgaataatactgctagatgctgtgagagacagggactccccggcccagcacacacgcttgagcagggatggagacatgggcatgggtaggcaggctggtggtcagcagataccctttctgtccctcctctgtgacaatcacccccaagtaatttttgggattcagaatgttaggtctacctggccaggtagacctaacatagctgaaaccaggggttgttaattcatttttaaacaataatactagtttactaaaccca

SEQ ID NO: 204457 - DNA, 449 bp, Homo sapiens
caggtggatgcggagggcagcgctggatttcccgggggagcattccaggtttagtccctacctggccggagtctaattcctggccttaatcctgtctgtcatgttccctagctgactacctgtcttcaagcgacctcttgggattgacataggcggaaacagtgccttcaactcagagaaagcccctttgtggactgaccattcccactcttactgcgcttgaatccttgggaagtgagtttggcagaagatacgatctaaaagagaagtctcccccttttctttttgaagtcattggaaactgtgtggagacagtatagtatggtggtgagggcactggcttgagagcccgagcacatgtttctgtctcagctctgccaactctagagccctgggcagattttctaacctcttgtgtacctcggtttcttcatccttttagcaaaaac

SEQ ID NO: 204458 - DNA, 694 bp, Homo sapiens
  misc_feature (388)..(388): n is a, c, g, or t
  misc_feature (394)..(394): n is a, c, g, or t
  misc_feature (405)..(405): n is a, c, g, or t
  misc_feature (412)..(413): n is a, c, g, or t
  misc_feature (417)..(417): n is a, c, g, or t
  misc_feature (420)..(420): n is a, c, g, or t
  misc_feature (600)..(600): n is a, c, g, or t
  misc_feature (611)..(611): n is a, c, g, or t
ctggcacccaaagagtgaccataacatgcagcaagaggggaaggggtgggctctgatttaggtgtataatttcctcagttgactggacaggtctcctctaagaggttctattactcaaccaatccgtgagctccttataaatgcatccaccgattgcagcagtgaaatgattggttttcctagaatcccctgagcaaacgtccaaccaataaaaaggtctgtgcatttcaccattgcttattccacaagatagttctgtcagtggtcacctagggctaccacttaaggagaaagcagagagaccaagcacagaggagacagaggggcaagaggaaagggaagaaacaggatgggcaatgcccacccagtcattgccaacagagaggtnctcacnctgagagatgngagtatnntggntcntggcagcccgacagtgaccatagcatgcagcaagaggggaaggggtgggctctgatttaggtgtataatttcctcacttgactggacaggtctcctctaagaggttctattactcaaccaatccgtgagctcctttaaatgcatccacgattgcagcaggaaagattggtttcctagatnccctgacaaantcaacaataaaaaggtctgtgcatttcaccattgcttattcacaagatagtctgtcagtgtcactagggtacacttaggaaaa

SEQ ID NO: 204459 - DNA, 121 bp, Homo sapiens
tttttggttgtcacaatgtggcagggaagagggtgccactggcatctagtggatggagagaactgccaaacaccctgtgatgtacaggacagcccctacaacaaagaattgtcttactaaa

SEQ ID NO: 204460 - DNA, 264 bp, Homo sapiens
ccattagcatgtttacacaaatgtgcatccagtcccattctttcctcaaagccagttttgattggaggagaaggaagttttttaaaaaatcacctatatacaaaagagaggtgaggatcagaagatatatcttcctgggcattaatcctattctctcgcccattcccagctaagtgcaagccctcgttgacttcaaatagcaccggtagcccaccagttttccatgtcatctgtggattatctgaagtgacattaatctgaact

SEQ ID NO: 204461 - DNA, 411 bp, Homo sapiens
cagtactagaaatagttatcttccctcctagtccctcaagtacggtcatctttgaatatattaattctagaatgcctattttgctcttctttttctcatttaaatttctaatattaaagctgaaattgagggccaggcgcggtggctcatgcctgtaatcccagcactttgggaggccaaggcgggcggattacgaggtaaggagattgataccatcctggtaacacggtgaaacgctgtctctactaaaaatacaaaaattagccgggcgtggtggcgggcgtctgtagtcccagctactcaggaggctgaggcaggagaatggcatgaacccgggaggcggagcttgcagtgagccaagatcgtgccactgcgctctagcctgggcgacagagcaagactccctctcaa

SEQ ID NO: 204462 - DNA, 444 bp, Homo sapiens
acatcacagtcatttctgtgtgtccagggctgtgaacacggagctgccgcggtcagcattccctgtacatggatgtagggtcaggaccactgtaccctgtgggggcctaggtcacagagaaatcccaggccttgttcagagatggtgaagggtgcccggtggcaacagcagggtgtcctctgagccccggcacttctgagctcagggctgagtgaccacacaggtagctgctatgggcccagcccttttgcatcgtgctggggggatgcgggggctctgttgccttctcgggtcccagggagatgtgccttctgtgcccacgtctcagcggctcccacggcgcatccagtgaactgggaagtgtgaatgagcacctgctcgggccagtgattcatccgagtgtcgttagctgctaattataattaaacctttgatgagttgtgt

SEQ ID NO: 204463 - DNA, 464 bp, Homo sapiens
gatttgaccctcaagctatagtttgccaactcctgctccatcctatgctatcttgccttacatctacatgaaagatgtaacatgtcagacagagtgtgcctgaacagtgaccagcgcagactaagtggtcagtaagtgttcattctcgttcccttccctaatctcgttcttcttcttcctccccacaaccagatcagatatctcattctgtgcccagcacaagagaggaagacgagggctttcgcaaggtctaatcagcaggcagagcctgagaaattatcccttcggaggagagaggctgtcattggagcaccataaacagcccctccaggtcccagcatgttccaatggagagtcagaagttcaaatcccagtgctaccactgacaagctctatgatcgtgggcaaaactgcttaacctaacaggccctaaatttcctgtacattaaaatgaatataatgat

SEQ ID NO: 204464 - DNA, 441 bp, Homo sapiens
aggatcagaatttgaactcacgctgtgtgactccagagcctacatgtttaaccacacttagggttgccagataaaatatagttacactggatttttgggtaaacaaatcctaaatatttcatggaacatatttttactaaaagcacattttttgtttatctaaattcaaattcaactggggatcctctatttttatttgctaaatctagcaaccctaaccacactattctgccttctgtaaattcagatatccatatatttgggttgtttaatttgcagtttacacgtgcttgagttttttttttttttttacagaataaatgatgttaattcacatctacaaaactaggcttctggatttctctttccctccatttattgaagggcgggttggtctgatgccagtcttctccctgatagtgaagctaagtgcaagctttt

SEQ ID NO: 204465 - DNA, 405 bp, Homo sapiens
aggtggctatacttcagttgtggataaagaggtgaagaaggacatctatggtgatgctcagtaatatctgcgaagaactgtggagacagacaaatagtcaaaggagaatacagatgactttcagaagaagtgtgaacatcaagctgaggagcttttttgaagagcaggatctttctatcaacatgggatagtggaagattaaagtagtgatgactacatatagaaatacaaagttgaagtgagagacgcaagtctgatactgcaaaagaaaaatgacacaacaagaagatggttgtctacaagccaggaagagaaccttcacaaggaaccaaatcagcgggcaccgtgatcacgagactcccagcctccagaactgtgagaaataaatgtctgctgttgaagcca

SEQ ID NO: 204466 - DNA, 517 bp, Homo sapiens
aggtaattaataatttgcatgtttgtatatgatatgatgcatattgtttgtaaattcactcatagccacctgacagaaagagtcccttttctagtagtgtatggatgtcactcctattttgttttttaaataagtggttttcccccatccagcaacctttttagcaagttagagtctttagtccataacctgacaatccatgttcttaaaaatttgttatgaaagacctggatcagaacaacgtaggtaatattagaaatgttcattccatctagtcctctagaagcctgcatacatcatcaagcacgtaacagtgcctgactctcaaaaatgcagtttatgtcaagagactgttacctattatatgttcccaaaatttgcttttaaaaaagcaaactaggctgggcacagtggttcacgccctaatcctagcactttgggaggccgaggcaggcagatcacctgaggtcaggagttcaagaccaacctggccaacatggtgaaatcctgtctctac

SEQ ID NO: 204467 - DNA, 315 bp, Homo sapiens
caggaagcttccaattatagtggaatgcaaagggggagcaaggcgtctcacctggtgggagcaggagcaagagagagaagcaggaaggtgctacacacttttcaccaaccagatgtcacaagaactcagagtcacaaggacagtgtgggcatgggggtggggggtggactggtggtaaatcattcatggaggatccaccccatgaaccagtcaccatccaccaggccccgcctccaacattggggattataattggtcctgaaatttgggtagggacacagatccaaaccatatcaagtggtaatatcgtatgtt

SEQ ID NO: 204468 - DNA, 329 bp, Homo sapiens
caatggttcttaaccaaattgaaatgacttaaatgaaagccataaagttcagaatctggatggcaaggaagctgatcaagatacaggtaaaagttgaaacccaatccaaggtatccagtaaaactatccaaaagtagaaagaagacaaaatagccactttaagaaagaacaaatggaacttctggaattgaaaaaattactacaaaaattacctaatacattttgaagcattaacaacagaatagtccaagccaaggaaagaatcttggagcttgaagacagaatcttataatcaacttagacaaagggaaacaccgggagatcctcta

SEQ ID NO: 204469 - DNA, 420 bp, Homo sapiens
gcatgcacggaggaaaggccacgtgaagaggcagtaagaaggtggccatctgcaagctgaggggaaaggcctcaggggaaatctcaccatgcacagaggaaaggccttgggaaatctcgccggcactttgagcttggactttcagcctccagaacactgagaaattaaatttgctgtctaagccaaccaataaatctgcagtttttgttatggcagccctagccaactaatacagagctttaaaaaacattactatgtacactgtagaatttaatactctaaaaagttttattccatcgtctccactgacagaatttctaaattaataagagaaaagttacactaggtaacatgattagtacataaatgccttacgggcagatttcctttgtttactgctatatacctagtgcacaggtg

SEQ ID NO: 204470 - DNA, 481 bp, Homo sapiens
atcatttaggtgggagagaggatgttagtaaattaaaagaaaaaggttattcattaaatgctaaatagtataggatgtacaggccagaaaagaaaaaggaagtccacgagtgaggaaaggttggaaaacaatagtagaattaggaaagctattcaaaatgctctcttatgtaaaaaagagctttgcttaggaatatgttagaattttttttgcctgttttttaacgactaagacttgagagttctttctacatgttctagatactagtgttctgttggacatatggtttgcaaattttttctcccagtctttagcctgtatattcatcctcttaactgtaaaaagttttaaattgtttgtaaaagtaaaatccagcccccagatcccagtctcagcaacattttgagttctgtttgagacggtgtccgggtggcttttatagtgtgagggctaagacagcttgtcttgcaggacagtaggt

SEQ ID NO: 204471 - DNA, 442 bp, Homo sapiens
tttttattttagccgttctgatagtgtgtactaggattaattcgcatttttctcatggttaatgatactgaacaaatttcgatgtgtttttttgtcatatggacgttctcttcagcagaaactgtttatgtcttttgcccattttcttattgggttgtttggttaaatgtttgtctgttttttaacgactaagacttgagagttctttctacatgttctagatactagtgttctgttggacatatggtttgcaaattttttctcccagtctttagcctgtatattcatcctcttaactgtaaaaagttttaaattgtttgtaaaagtaaaatccagcccccagatcccagtctcagcaacattttgagttctgtttgagacggtgtccgggtggcttttatagtgtgagggctaagacagcttgtcttgcaggacagtaggt

SEQ ID NO: 204472 - DNA, 495 bp, Homo sapiens
cggcgggggcgggagctgtcagtgggccccgaccctacagcccggggctggcgggtggggcaggaggactggggcggagcgcagaaaaacagggcgacgccctgtgagggaagggtcccgcggtttggctgtttgggcctgtggctgttaggggtggcaggatagtgacccggggacaggacttgggggcactgtgggggtagaatttggagacagagtgtcccagggtaggattgccgagacacgatggccgagggatacgatttttttttttttttttcctgcaccttcagctacctaaagtcttatcctcaagatacaatctttggcctagtcatgtctacaaatgctgcctattttaccatgttgcagcgctgtcagattttgctatcactcctattaagaattccaagctacagatcttgtcctaacttctcatcagagcttctagccaacacatccagctgtgtagggggcctgtttgtagggtggaaa

SEQ ID NO: 204473 - DNA, 490 bp, Homo sapiens
ttcccaggtgcaactgaaggactatggctatggtagctgcccaggaagactggccatccgattcatgcttgtgcagtccttggacttttagatctaccaggatcatcacattttggagttctcagtcccatgtacaaagtccaactatctgaggccaccatgcacttaggatgtccaggccacctggagaggctaccagatatgtgtatgaagaagttgtcttgaaagtggatcttccagcccatgttattctagctacagctgtttgagtctccttgtgcaagccccagacatcatggaatggagaagagctgagccacggtgtcctctccaaattctcaatccacaaaactcatgaaaataataaaatgattgtgtctttgtgctactaaatttagggaaatttgttattcagcaaagatgattagaacaagagaccacaatttgactatcatatttcagaaatgacacagatccagagaggttaaat

SEQ ID NO: 204474 - DNA, 779 bp, Homo sapiens
tcaatgcttgaacaagaatagtttcatgttatcctcttactgtgttacatgtataaaaagcccacatcctgtgtttctcaaattgccttctggagagcagaggagatgttttaattgaatatctactgggaatctaagtaaggcatagaatcagatttttagagctagaagggaaagcagggatgtgttgaattttccagatggccaccacgataactcccatccttcgtgctttcctacgatgtcaggaacctgatcggaaagtgaagtcaaattcttctcccttgaatctgactgaacttgtaaatgctttaaccagtagagtggagggcatactatatgctttccaaggttatagaatgccgtgttctttctgtcctgtcaaacaggatcatcacattttggagttctcagtcccatgtacaaagtccaactatctgaggccaccatgcacttaggatgtccaggccacctggagaggctaccagatatgtgtatgaagaagttgtcttgaaagtggatcttccagcccatgttattctagctacagctgtttgagtctccttgtgcaagccccagacatcatggaatggagaagagctgagccacggtgtcctctccaaattctcaatccacaaaactcatgaaaataataaaatgattgtgtctttgtgctactaaatttagggaaatttgttattcagcaaagatgattagaacaagagaccacaatttgactatcatatttcagaaatgacacagatccagagaggttaaat

SEQ ID NO: 204475 - DNA, 496 bp, Homo sapiens
gcctctgtctctgcaccaataaaaaaattttaaattatgtcactactccttcccacccatttcaggctcctggtgctttcctcttctgtctttgtctccttatcagatcaatgactgaatcaataattatttactctcataactgttacttatgttcatcttctattgaatgatagaaataattaacatctaattgtgacaattttataagaccaggactattccaaaagaaaaaagatactatacattttcttttctttttttttgagatggagtctcgctgtgtcgcctagactggagtacagtggcaagatctcagttcataacaacctccgcctcccgggttcaagcgattctcctgcctcagcctcctgagtagctaagactactggcacccagcaccacacccggctaatctttgtatttttagtatagacagggtttcaccatgttgcccaggctggtctcaaactcctgacctcaggtgatccgcctg

SEQ ID NO: 204476 - DNA, 538 bp, Homo sapiens
gctgacaataggcagtctaataggagtgtgatgagtaaaaggaaattgcataaaatcagggtggaaagagctcaggggtcagattgtcccaggcctgggagtctgtgtatgtgggctgggtttcatcctctgtaaagcaggacactattaaatggttctaagcaaggaagtgcttttgacttacattagtcaaagatctctctggctgctgtatggagaacagattggaagagggcaagagtggaagaagcaagaccagttagaggctagtgcagtcattggagcaggagaagatgggtgctgggatggaggggtcacggagaggcaggagcggtcagattagaaatagagttagaaggtagagcaaccggggctgcccccctgtgttcttgggattcaccagaacccagtctgtatgttccgctctctgccctccacacccctcacagtgaccaccactgcttattgcaattacttcccatgcttcctcagcattcttcataataaaaggaaatcaaatatttgtgttttaccatta

SEQ ID NO: 204477 - DNA, 442 bp, Homo sapiens
tctggtttctggcctttctgaagagcattgtggtgagagtttctgtttcattctaaggagagtatctgctctgggatatctattgtacttggacatccatatcttagcatttgctgcaactctgacagttggggtctgccagaagtgttcaagacatatattacagaagagcttctcaaggtacactggatgcctgttgcttctttctccaaggacttctgccctctgaagagcaccggtggaggccttctggaccggggagtctctgctgtttgtcttcccgcttacttctaaggggcgtgcatgattcactggtgtgaaaagaaagttctcctacagttgatgccttctccatcaaagctgctaccttgttgtagaactttttacctggacatcagactccacagaaaagactatcacaccgccagaaccacaaatatcg

SEQ ID NO: 204478 - DNA, 523 bp, Homo sapiens
gaatattattcaatgttaaaaacaaatgagccaccgcaccatgaaaagacatggagaaatattaaatccgtattactaagcaaaagaagctaatatgaaaaagttacataccatatgacattctggaaaaggctaaactatggagaagtcgaaaagatcagtggttacctgaggttagggggaaggagggatgaacaggcagagcacagaggattttcagggcagtgaaactactctgtatggtctaatagtggatacatctcattatgtatttgtccaaacccacagaatgcacataaagagtgaaccctaatgtaaactttggatgacaatgatgtgtcagtgtgggttcatcattgtaacgaatgtaccactctggtgggggatgtggataattcaggaggctatgactttatgaaggaagtgggtacataggaaatctctgtatcttcctctcaattttgctgtgaacctaaaactgctctaaaaaataaagttgttgttgttgttgtttttaaaaaaa

SEQ ID NO: 204479 - DNA, 440 bp, Homo sapiens
ttgtggttctggcgctgctaaatgctgggaataaaaccagacgcagagccacttgctgtcttgtaggagcccagcacctggtgggaggtgcttggagaacagaggtaagatctgggtgtaggaagaagggaagggcaaagttgttctgagaagggcttggagatgtggccctaaagccccgatggatgaggaggttcatatttgtcatctgccttagttcagagaagactgaagcagctcagaggacaagcagaggttcagagaagtgtgtgcacgggtggggaaagtgtgctcccatgtggtttggaagagttaggggctccctgagctctattgtgaactatacgggtttcatccaaggaatggtatgatgtgggcataaaaccattcttcagacaactgaagatggtccccttctgtagccagaaccacaaatatcg

SEQ ID NO: 204480 - DNA, 599 bp, Homo sapiens
ttgtggttctggcgctgctaaatgctgggaataaaaccagacgcagagccacttgctgtcttgtaggagcccagcacctggtgggaggtgcttggagaacagaggtaagatctgggtgtaggaagaagggaagggcaaagttgttctgagaagggcttggagatgtggccctaaagccccgatggatgaggaggttcatatttgtcatctgccttagttcagagaagactgaagcagctcagaggacaagcagaggttcagagaagtgtgtgcacgggtggggaaagtgtggtgtgtgtgtgtgtatttaactccccaaaaggaaacagcatgagacaggcccaataacaggccaaggaatcctatagcagcagaccagatattgtgctcctcgacccaaccagtaaatgttgtaaatgcttatctttggggagagaaggggaagggcccacccagcttctgttcttctttcccttggtaacttaccatctatgagttagtgagatggagacatcctaaccattaatccagggaaagggaggaatctaagccatcagcaagggagttagtgcttttcatcaaatttgagacacctgtga

SEQ ID NO: 204481 - DNA, 448 bp, Homo sapiens
  misc_feature (121)..(121): n is a, c, g, or t
  misc_feature (257)..(257): n is a, c, g, or t
agtaattgacatgtgttgcttaggagcaggtaaaacacaaacagcaaagaagcacagctctaccttactctttgctagtggttcttacatttattcaagtgcagaaccagcctgggcaacntggtgaaaccctatctctacaaaaaatacaaaaattagccaggtatggtggtgcatacctgtagtcctagctattcaggaggctgaggtgggatgatcgcttgagcccaggaggtcgaggctgcagtgggttgtgntcgtgcccctgcactccagtttgggcaacagagagagactcggtctcaaaaaaaaaaaaaaaaaagtaaaaccttgggcttaaattgggcgggattgcctttttttttaacttctaaattttttaaattgtatggtacggtatggacgtgtcctccagatattttcccgtgaacctttttttctctcaaat

SEQ ID NO: 204482 - DNA, 401 bp, Homo sapiens
ctgaggattcctgacatctagacgaggcagttacagccaagaacaagtccactgaggctaagctgtgctcctctggagggctgtgtttagagtccagccttctaggggaagcaaattaaacccaaactatagaacagcccagggaaatactcacaaagggaaatgctgacagtcagactcctgaagcttcctgatgcttctcgagttttggtaaagaacctcagtgctgtttgtttgtttgttttttaatgttttctggttttttgtttgttttgagacagtctcttattctgttgcccagtctggagtgtagtagtacaatcatggctcactgtagcctccacctcccagattcaagtaatccttctgccacagcctcctcagtagctgagactacagat

SEQ ID NO: 204483 - DNA, 511 bp, Homo sapiens
tggagtgatggcctgcgggccgcttgaccctttgggaaggggtgcgaacggagaagttgtcccccagtgcgctcgaatcagagcaggctgggctgtgcgtgcccggcgccgcggagcccagagcccgcgggatccccaggctcctggtaccctcggcaatgcccccaaccgtcctggctccgaggggcgcggacaggactcggccgccaggcttgctttcgactgcgttcgaccctgttcaccacccactttgcgccccttcagtccagacccgcggcttcttagtcttccaccctcttctggaggcgagaggatcctcgcgccccgggagaaaagtatgggatttgttttttctttcctgcttttcggaggcctggggaggggcgggaacccgtgcgggaggaaagctccagggcttggcgctctcgccgcgacctgcttaattggggcgccgagcagccacagcgggaaggcaggttcggtctggtttttgtttttctttctttcttta

SEQ ID NO: 204484 - DNA, 536 bp, Homo sapiens
agatggagtcacttatgtcaagggtgtgctatacatatagtatcttttaaagagctgcatctttagaagcacattgctggttatgtaagatgttctatctgaggaagtgtgctgaagtgtgactactactaataataagcagaaagcacgtggtgttgatggggatgttgtcaatgctgatggcagcagcgggcacttgctgggcatcaaaccctgttctgagtccttggaatgactttccataaacaaacccatctcccatgtcaccacatgcccctcagccctgggcagtgacttctgttagggtgatcatctcatccaggtttgtctgtgactttcccacttgtagcactggaagtcccaagacccaggaaacccctcaatcccaggcaaatcaggagagttggtcactctactccatatccacaatccattttatctatttatttgttatttttgcctttaaatttatatcctagaaaaatactttaaaagctgctagacatgtccagctgaaagaacattcttcaaagatt

SEQ ID NO: 204485 - DNA, 1103 bp, Homo sapiens
ccaaagttctctcatgtgtctcccttttctgaagtactcttcctcacaagtctcacctccttggccatacgaacttcatgtatctctgacttctcaatttggcgatgtctcgggattgtgtttctgttctctgttcctgtgctgcaacctggaaactttctccagacagtaagctgggacatagatcctaagggctttacctcttttgttttcttatatagatgatcacagaaaatgcctgataaatgttgtttgataaaatttttctgatttactagttttttttaacactggtcaagtggttcatatagcatttctcccccatgggcagatgttactgaatttttaaatcagtatagtgtaaggggagtctatcttgaacttcaggcaaatggatttatttaaggacctcatcaacaagtgatcttgtcagtaacttggtcatgtggcatgatgtttgaattcttcaagtgttcttatgtaaacttaaaacatgttagctttaggacttttttcatatttagatataattttatggttttgtttagttgagtggttctcttagaagtaaatgtcagtaccttattgggtatgtctctcacagtatctatcattattttagtatttcccaaccctagactggagctattggctacaaattcactgcagaattaatttaccttcagaaatgctattttttccagttaagtctgatataataatttacaaactgatgtgtattttttgttaaatgtaattatgcattaggttcagggatcaataaactatagcccacacaccaaacctgaatgaaacaattactgataaatgtaatactcccaggtagtagcttaagaagctgaacgtgagggggtgtggagaggagtataaaggggaatctccaaaactcctgtttttactaatgactaagcatgaggaagactgaacgtggaacaaaattatattgaccatattgacaaaattatctttatattgccatgttttgctttggtttccttttttaaatggaaggtagactatgaagacattcttgctgtgaaagttcaaacaatacagaatttgaagtaaaaagtggggagtgt

SEQ ID NO: 204486 - DNA, 486 bp, Homo sapiens
caattcaagacccagcttgactttactgtctccattgtggtggttaatggagacaaattcaattcaaatatgtgcacgtggatttctttgtttctctgaggtttgacttatctgccaaaagagagaaacacagaaagaggggagaaacaggagaggggaaagagagaggagagagaaaccaaggaaatgtgacatataataattttttaaagaatattttttcatttttttattgaggtataaaatacatgtagtaaggtatgtcaataactcaaatcttatgtgatttttttatgtacatgtatacctgtgtacacctgtgtaaccactacctaagtcaagatagagaacattttaatcatcttaaaagatttcctgtgtctcttcccaccaatacctgctgatgagcccactctccttacagctatcagcagagttgttttacctgtccttgaacttaatataaatgtaattatactgtatatg

SEQ ID NO: 204487 - DNA, 450 bp, Homo sapiens
tcattgttctatgtatccagagacattttaccacaaatacctagttaaatcttgtattgtcagagattactaagtaactgataatttttcctttctgaatctttttctagtcagtctggtaacctgtttctttagtcctcttaaaaggtactgcatgcatttgaggagagaccatttcaggacctatcccattttaaatatgtaacaggttgtgcttttctaggaatttgtgaagtttgttgtaaaatactttatataaagttccaggtatatgaaggttgacaatgctttattctgattgttgtaaatttttgtatttatacattttcagagggtttcacttggtagaacctgatttaatttagatgtgaagtaactgattccttccacaacccttctttgtcttcagtttatgtgcatcactaactgaaataaatttttgtcttacga

SEQ ID NO: 204488 - DNA, 591 bp, Homo sapiens
aatgtctattatggtaaagttgtatcagtcttctagttataacacactggaagtaagaattaatatgatagattggctgtcagacattggaagccttatatagtcctgttttaaattattcctgtgtgttttagaggtgaacatgccaccttttcctttatccatcatagatgcatagaatagagcaaaggagaaaaaaaaattcctgtgtatacgatttgattaaacctttgaaaagctagaagtcaggcttaacctttgtatcaaagctttaattagatcatttttattttttctcctaggtagagtttaatttttcacataggcataaggactattaggaaaaacttatgttgaagtaaacttccaccactcagaaaattcttgattagaaactgtatagagatagcaggggtttttttttggttggtttggtttggtttggtttttcgagacagagtctcgctctgtcacccagggtggagtacagtggcacggtctcggctcactgcaacctccacctcccaggagagtcgcttgaacctgggaagcggaggttgtggtgagccgggatcgcgcattgcatccatc

SEQ ID NO: 204489 - DNA, 372 bp, Homo sapiens
accgcttgatcaaaggttagctgacttctagctttcaaaggtttaatcaaatcgtatacacaggaatttattttttctcctaggtagagtttaatttttcacataggcataaggactattaggaaaaacttatgttgaagtaaacttccaccactcagaaaattcttgattagaaactgtatagagatagcaggggtttttttttggttggtttggtttggtttggtttttcgagacagagtctcgctctgtcacccagggtggagtacagtggcacggtctcggctcactgcaacctccacctcccaggagagtcgcttgaacctgggaagcggaggttgtggtgagccgggatcgcgcattgcatccatc

SEQ ID NO: 204490 - DNA, 503 bp, Homo sapiens
acatgtaattcatccaatgatgatgcagtacaagccatctgaaagtgggggaatggacaaggcggcttccctgcaggaagaattgggcaaggctcatcaggaggggcccccaaaccatgccttacaagaagctctagagtttaccagatggagaagtagctgaatggtcactcctggccagaagggcaccagtgcagagggggaacttcttggtgcatcgagaagcttccatgattggggtgggctacctcattgggtgtgatgtggactctctggctcaggtattactcactcaacacccttcagcaccgatacttccaggacagttccctgacattcagtgggagaggacgcataaagggtgtgcccagggacctcagaccactttaaaactggagtccagcttgtcaaagtaacaacaacaacaacatacacaaactacttgcttattttttaaaaaaataatagttttgttgaaatataattcacatgacatcataaca

SEQ ID NO: 204491 - DNA, 158 bp, Homo sapiens
aggtgatctagaggatcccgttcatatctacacaaaaacttgtaaacaaatgcttgtaacataattcaaaatagccccaaagtagaaagaactcaaatggttcatcaactgacaaataagctaactgtggtatatccatacagtggaatattgttcat

SEQ ID NO: 204492 - DNA, 455 bp, Homo sapiens
atgaggataccccccccatggaatccagtccaaaaatgtgtttaaaatacaccacagttgtaattcttgaattctctgtcaaaatctaaatttaggggatttcagatttctctggaagaaaatgggaaaacttagaccttcatcctttaaacagcaggaattaggaaacggagctgagtgccgctgcccctttcagatagggtgttcaatgggccaatgggacatgcctgtggtcacacacgtcactcattcacccacctgcctggcccctgctggctctgaagctggacatcctgatgaacaggatgctatgtgtcctttcaatatcatgtggccacacacacacacatatgaaagaaaccagccagacacaagagatggtctactctataattctgttttttggtttttgatttgcatttgcctagtgattagtgatgtttagctttttaaat

SEQ ID NO: 204493 - DNA, 567 bp, Homo sapiens
acttactgcactgatctgaaaaaggtaaaagacatttaaaaaaaaaaagcttccctcaatggtgtattctgaggaaatgattaactctccagacaaaataaacagaccttcccatcaaagattgctataaaaccagaaagactgacaatagaaagtagttattttaaagctggccatttggacgtatagaaaaccaaaattcaaagccaggaaggatctattgctttgttcaatatctcccagtatgttgtgagaatgttaacaggtgttgagtgaaaaataaatgcaaggaaatgcatgaagtcggctttttaacttttaagatgtctcagagcctttaaatgccagtgggtacgaggatactcgtgaggggtctagggtttatttcccatccgctgcttgccttcatagtgccttctctcttagagcaagtcctgaattgagcatgctgaggacagcactttgggagatgctcatctaggccatccaaatcccctcattttcagaggaggaaactgaagccaggctcaaagtcatcattcatagccagacaggggcagcatcaga

SEQ ID NO: 204494 - DNA, 581 bp, Homo sapiens
cggggtttcaccgttttagccgggatggtctcgatctcctgacctcgtgatccgcccgcctcggcctcccaaagtgctgggattacaggcgtgagccaccgcgcccggccattttttgtattttttgtagaatagggcttttgtcatgttgcccaggctggacttgaactcctgagctcaagtgatctgcctgccttggcctctgaaagtgctgggattacagtgtgagccatcatgcctggcagcatcatttgtttttttggtgtggtatccttgccagaaatgcatacttgactccagtattaagaaagcaccagacaaacccaaatggagggacattcaacaaaataactgattggaaaaaactctttaaaagcatcaagatcgtgttagacaaggaaaaaacaagaactattacagactggaggagacaaaggaaaatatacaaatgcaatgtgggatcctggatgggctcctggaatagagaaaggattttaatagaacactaggaaacttaaataatatgtgtagtatcgttaataacattgtatcaatattaatttcctgttcttgatcattat

SEQ ID NO: 204495 - DNA, 428 bp, Homo sapiens
aataactctacaatggccactaagtgtttgaacgagagaaaagtccaatgtctctcactataaatcaaaaactagacatgattaagcttagtaaaaaaggcatgttgaaagctgagataggccaagagctagacttcttgcaccaaacagctcagttgtaaatacaaaagttattgaaggaaattaaaagtgctactcttttgaacacacaaataataagaaagcacaacaaccatattgctgatatggggaaacttttagcagttcagacagaaaatgaaaccagccacagcacattgttaagccaaagtctaatccagagcaaagccctaactcatgtcaattctatgaagactgagagaggtaaagaggctgcagaagagaagtttgaagctagcagagatttgttcatgagacttatagaaaga

SEQ ID NO: 204496 - DNA, 362 bp, Homo sapiens
ggttcatttcctgtttattattaaagtgattttcacaaatgtttcattacatgcatatgggggacatgatggataaaacaaaactgaatatttgtggcaactaaaaggaagatgtggttatgttggtatttgccacttgcaggcagagtcgttgccaagcgtctggacaatacagtgccctcacaggagccagaagtgaagtctgcgggccgctagcacagcgccctggtgtcctgttccccgagcaatgtggcctgcgtctgctcggcatgttggaggttctgatctcagcggagtaagacacccggcatcggtcagctccctcttcctcctcctgctttctgccacccatctgccgaggg

SEQ ID NO: 204497 - DNA, 412 bp, Homo sapiens
ttatggcattgctgtctcactcatgggccttcacatgcttctctgtgcccagaatccttatcatcttcctctgtacttagctgaggcatccttctggtctcagctagataccactttctaatgaaagcattccttggccaggcatggtggctcatgcctataatcccagtgctttgggaggtggaggctggaggattgcttgaggccaggagttcaagactaacctggacaacaaagtgagacctcatctttacaaaaagtaaaaagaaaattagctaggtgagtggcacatgcctatagtgccagctgctcagaaggctgaggcaggaggattgcttgagcccaggagttcaaagctacagtgagctatgattgtgtgactcccggggcaacagagtgagaacctgtgtca

SEQ ID NO: 204498 - DNA, 293 bp, Homo sapiens
ggaagtgaagagccccagaacagtcatgggcctctagcacaccacagctgttgtatggaaaagcagccagactgtcttccttgtgggtccctgtctctgctactcctcactgggcagggcctcctgacctgggcccccagcacatccaccctgcccccacctgattacttcagtcagtggaggctctgtgtttctctgggatggaattcccagaaacacctgacaggctctctaccattgctgctgcagcagtaccaacccttgctaccctcaggcgggggaacaaagaccct

SEQ ID NO: 204499 - DNA, 739 bp, Homo sapiens
gctaccacctcctctttccccttttaccgttaagcctggaaaatcagcttacaagtggcaggtcctcagttcaacctcacttctcagggagatagaagctccacatccccattttccagatggagaaagatgatcagataagcctcgaggccgccttctctaatgcccagaattcattcaaaactcctgcccttctcaccccaccactcctgggcacatcaaaacctcgggatataaagtcagggggtgagggtctagtggcccctgaacccactgccctgcccctgccctaccacctccttcccttgaatcatgttcccctctttctggacagcttcagaagggagccctggtctgcgtagggctggctcactgcttgttgaagcccccgcttgctctcaggaaatctggggaaatcttggggatctcaatgtggctgagttcctggtggaaaccctgcactctcccctgagcacccacagagaaatgtgagttccccactcatctccctggaaagcaattagaggcataattaaaatgtcactcaggtccctccctctgtccctagacaggctcattcgtgtgggagttatgagcggggacttctggctgccccaagggaagaagagagagggaggagagctggggcccattgggagacgggtccctaggggctacagtctagctcagggatgactggggagaggaaggtactgttcaggcgaggaccaggcagatg

SEQ ID NO: 204500 - DNA, 350 bp, Homo sapiens
ggcttggtgcgtcacactggtaatcccagcactttgggaggccagggcaggagatcgcttgagcccaggtattcgagaccagactaggggctggactgtaggagctgtatcttactccatatcatacccttatccccagcaatgcctgatgatgggttggtgttcaacaatgtggactgaatgaatgagacagccggctactgaagaagtcagggcaacctgcagtgctgttagggaagtgtccctttctagcaccttctcagagggtcctcctgtataccatatgcgaaattctgacttaagatttggagcagctagtgctttttcattgtttgacttaacatgatcat

SEQ ID NO: 204501 - DNA, 534 bp, Homo sapiens
cagttggaatccttttctcacatatgctaagttacaatgtaaggatagatgtctttctaaactcttcatctggtccatttatttatttgtacatttctatgccaatgttagattgttttaattactaaagctttatacttaggataattggtaaggcaagtctccatgtacttattcaacttttttcaaaattatcttgggtatatttatagagtaaaacttcagtattcattttagaataaatctgtcaggttctgtcaaatactgttaatttaaattgggaatgcattgaaattaaaggaaaattagaggtgtattttcatagctcctgcattgatcattcccaccaattaactggtatatttatacatttattcagatcttgttgcatgtatatcaatgaagcttcagatttgcatcaaaaagataatgaatctgttttcttagataaaaccttaggaactttataattttttgagtgtactgtacatggaaatttttttctattaagttttcttattatttattgatctt

SEQ ID NO: 204502 - DNA, 468 bp, Homo sapiens
tgtatttatatcaagtaactatgactattttacatgggattccttgttattttaacaaaactttaatttttatctaggtttcagatatgtagagtcatttgggcagggaagttctacctgaacactgccattatctgatggcagctatgtaaatcacaggctggaagattaaaatgaaaaagagcccctgaagcctggccctgccaccctgaggtctataatgtaatgggaaatgtcacggaatcagttacaagactagaaaattcacaactcagaagagtttgggtacccaagcagagaacatagtataaagtttaggtaaatttcaaggcttatgatgtggattagataatccaccctgttttagctgaaaacactcaaattgcaggccagcttttggagaggtgaaactatgctaatgtaaaggcataaagataaaacagtgcagcaatgcctaattaattttta

SEQ ID NO: 204503 - DNA, 214 bp, Homo sapiens
cacttagaggatcccctccttgtaatccaagcagtcgtatgtggaactatgactgtgcagagaccctgggaggtggtctgacccaactctgccacatgcggggggctctatttcaccactgctgcctccttggcactgctttttgaggcacattgataatttagctactctgtgttaaagatagcgatgtagactgactgattgcctgatgtaa

SEQ ID NO: 204504 - DNA, 536 bp, Homo sapiens
tcacatcctgacaagctgtctcttcaggaatagacattctcaagcaagcaagaactcaaggaatacaggcaaccatgagccacctttggggaaaagcaaaacaataaagccaacaacaaaatgaattaaagaaagaactcaaatgaaaaaaacatgtacctcagaaacaaaaatagaaggactggtaaaattttaaggaataactccttttgtaataaagaaagatttaaatgaagttaaaagtgcaattctttcaggtttactttgatttcttttcagataatttcaagaaaattaaactctggcaaataaaaactgcatgtacagtatgatctcatttttgtttgactattcatccatcttgctttgctctctacataaatggagagattatgatgttttatcaatacctgttttggggtggtggaattttaggtaatgttttactttcttcctcatgttcttttctgtattggtgtaagtttttttgggggtgggacagagtctcgctctgttgcccaggctggagtgcagtg

SEQ ID NO: 204505 - DNA, 516 bp, Homo sapiens
gccaagcccaccacaatgcaaaagcagcagctgctggcgctcacattttcagaactctttcatgtacattatgccatttgatcctttaccggaaccccaggagagagatgggcagacatcttagactgttttcacagataaacaaagaaaagttaattaagtctgtctaaggtcagacaggttagtagtgtgagacgagacgaaaacctgtgcatctgtgagtccaattcccagctcagggctctcttctaatgcacaagggcccgtgatttctcttgtctactcgattcttagtgagcaccttctgtgtgtctgagactgtagtgggctgaggggattgagagctcgctaagataaaagttggaccctggaaggagatgtgtgaccatgtcattagagactacacatgctgtgcttgtgaaagcttcaaaactggaaaagaaaaatcgccatccttgggattctacaataactatagttaatgacatacaaattgccaatactccctaccaccca

SEQ ID NO: 204506 - DNA, 487 bp, Homo sapiens
tgctggagagacccttgcccatgatgctgatgggtgtgaagcagaaatacagtggaagagctaccctggaggaatcatgctgccaagtcagacaactggaacgtgtctcactaccgggagtagtttcactgaggttgtgaaagggtgggattcaatggggaaaaggaaagcttgctccctttattataaaaagtgtttaccaggcacagtggctcacacccgtcatcccagcactttgggaggctgaggtgggtgggtcacctgaggtcgggagttcaagaccaagcctggccaacatggtgaaaccctgtctctactaaaaatacaaaagaaattagccgggcctgatggcgggcacatgtaatcccagctattagggaggctgaggcaagagaatccaggaggtggaggttgcagtgagccgagatcgcgccactacactccagcccaggcaacaagagcaaaactccatctcaaaaaaaaaaaa

SEQ ID NO: 204507 - DNA, 130 bp, Homo sapiens
agtaggagaacctatcctagagtagaggtcagtgaagatcttaccagagtgaaatttaatgtcagaagaatggggtcactttagtcagggcaaaagggagttaggaaagaatattccaggcaaggggaac

SEQ ID NO: 204508 - DNA, 539 bp, Homo sapiens
ggggcctgccaaaggctccaaacagcatctccatctgcctctgacacctcgagcaccatggggtctgctgggtcatatggcccgaaggggagagcagcttgcacagcagcctggacctgttgcagagccttcccttgttctgggcaccactcaaaactagcagctttttggatcactaaattaatgagccggagtcacacacccaaatgttaggggctgcctcccacaaaatcatatattgaagtcctaacccgcagcctctcagaatgtgactgcatttggagattggggatttaaagggtaattaggataaaatgagattaggatggaccctaatccagtatgcctgttgtccttataagaagaggagattaggacacagacaggcacggaggtaagaccatgtgaagacccagggagaggacgccatccgcaagccagggaaagagacctcagaagagactaactctgctgacaccctggccttgaacttctaagctccaaaattgtgagaaaataaatttctgttgtttaagcca

SEQ ID NO: 204509 - DNA, 405 bp, Homo sapiens
gcccacctcagcctcccaaggtgctgggattacaggcgtgagccaccacacccagccctattactgctgttttctgttttctgaccatttcgtttctgttaattctttcatgctgtcttccctggtgttttcttgaatttttgttttgtttttgttgttttatgccttctttttttgtatttacccactacaatttttttttgtaatttccaagaaacttatgtaaaacatctcatagttataaaatcaagcttcagatagcaatttaactgtttgttttgtacagatagggtcttgcgttgttacccaggccagacagggtcttgctttgttacccaggttgtagtgcagtggtgcattcatagctcagtacagactcaacttccccaggctcaagcaatcctc

SEQ ID NO: 204510 - DNA, 224 bp, Homo sapiens
acaaaatctgcttctcctgctgtctatctcatcttagcaaatggcaactccattcttccagttgcccaggccaaaaatctggagtcatccttgacttatccttttctcttatacccaacaatcccatcccttggcaaatcctgtggccaccagcttcagaatttacaacaaacacaaccacttttcctcgtctctatacctaccactcttttccaaaccaccat

SEQ ID NO: 204511 - DNA, 720 bp, Homo sapiens
ttttaaacttcctcattataacacaaattttgggataagaaaacgtgtgtaaaaggccatttgggctggatgcagtggctcactttgggaagccaagctggtaggattgcttgaggccaggagttagagattagcctgggcaacatagcaagacctcatacaaaaaagttttggtctttttttttggagacggagtctcactctgttgcccaggctggagtgcagtggtgtgatctccgctcactgcaagctccacctcccaggttcacgccattctcctgtctcagcctcccgagtagctgggactacaggtacctgccaccatgcctggctaattttttgtatttttagtagagacggggtttcaccgtgttagccaggatgttctcaatctcctgacctcgtgagacctcatacaaaaaatttacaaattagtaggtagggccaggcacagtggctcatgcctgtaatcccagcacttagggaggccaaggcagggggattgcttgaccaggagtttaagaccagcttgagaaacacagggataccctgtctctacaaaaataaaaaaaaaattggctagatgtggtggcacgtgcctgtggtcccagctacttgggaggctgaggtgggaggatctcgggcccaggaggtcgaggctgcagtgagtcgtggtcatgctgccgcactccagcctgcacaacagagtgagaccctatc

SEQ ID NO: 204512 - DNA, 492 bp, Homo sapiens
ccctcttaattaaatgcagtgagagaaatgggatatcaatccaatacattgagctcagcttgtcctgagagtcagggtgcctagagaatatttgatatgccatgagttgcacagtgttataatgggccctgagttagtgttttgtgtatagtattcgtggtagagtcctgtctcttcccagataagtgtgtgttatataggatataacagtaagtagacataagtgcttgtttttattattagaaggctgataaggagcagagaacttgtggtcttagcagcccacattaaggaatgcaggttctatttaagtgcaatgataaatcaatgatggatttccaaacccggatgtacttttttttttttttgaggaaaagaaaaacctttgttgatgcataaggaaaggctgggtagaagaacagagttaagggtgggaggccagttaggagactgttgaagtaacgcaagtgaggcattatagtggaatggact

SEQ ID NO: 204513 - DNA, 432 bp, Homo sapiens
atatatttttgtctttgttttagttattattttcattaatatctctgaatattctttaaagtccttttcagatctcaagtatggaaatctttgtttgatggctctatgcactatttttattggctttaggattttgttttgttgtgattcattgtgagaccccttctagggactgatcttccatggtagtcctgtatgtttcctatgtggggtgtgtttgtgtgtgtgtgttatgatagactctgcctggttccaatagaatttaccagttctgaaccagtgtaaattcaatttcttggcttagggttcccttttatgaggataatgtgaacttgggccttgtatctgcttgagccatagagaagtgtaggcttgaggatttgtcttttattttttaatttattttttatttttatttgagacatagtctca

SEQ ID NO: 204514 - DNA, 261 bp, Homo sapiens
gtgcggtccgtatctctaacattaggacaacttctttctctggtacaatcactttttttttaaagttaaaactcattttctcttctgtattccccttcccctgggaaggaaaagaatacatgcacaaagaagaaaaaatgtaaaacacaaccctgccatttaggactttttccaggcttatatgttgctattattctttaaggatactatatgcttcctaatgtgatttttttttcactaatcaatataatgttagagata

SEQ ID NO: 204515 - DNA, 215 bp, Homo sapiens
agtactcagtaggtgttccatatgtatttattgagtttttggaagattccagtacacagtaggcattccatatgtatttattggttgagtttggggaagattccggtgcacagtaggcattccatatgtctttactggttgagtttggggaagattccagtgcacagtaggcattccatatatatttattggttgagtttggggaaagctgtcta

SEQ ID NO: 204516 - DNA, 525 bp, Homo sapiens
atatcaaaggccatactttacgtgtttatagtcattttgattttgaggttatacttggagcaattccttttcatgtacacaactgtggtgtattgctgtgtgtttgtttttgggaggggtggggggatgggggacagattttcactcttgtcacccaggccagagtgcaatggtgtgatcctggctcactgcaacctccgcctctcgggttcaacccattctcctgtagtcccagctacttgggaggctgaggcgggagaattgcttgaacccgggaggcagaggctgcagtgagctgagatcatgccactgcactccagcctggacaacagaacaagactccatctggggggaaaaaaaaaaaaaaggaaaattttgtgtatttgagtgtttgtacattttattgtatgcatggaagaaatcctggtagaagataaaccaaaatatggttgtaagtataattaattaaagttggggaaatggaaaaattaaaacaggaaggaatacttatgaaatattttgttt

SEQ ID NO: 204517 - DNA, 370 bp, Homo sapiens
caggagtgaggaagctgggccagaggtccactaactcccattacccttgattaagtgcacattctagggatgtctttgctgccccacatgagaaccaagcacattcctgtgcccagaggcaacccttgaatgggggatttcactcacatgcagtaaaaatgtctgtagagtgcatggggcagtgagtgctcaggggacacaggagggtgtgtcagcataggcttgaggaaccctgactcattcctactctctatactccctgatgtagccatttttattttttcttgttctttattatgttgtatgtaggtaagtatgcaggtgtacatgtgtatatgtttgtgtatgtgtgtgtgtctgtatttatgta

SEQ ID NO: 204518 - DNA, 695 bp, Homo sapiens
agcacctggtattgacagactttatttcatttagtctcaaccacaggtaaacacagtatctccattttatagatgtggagactgaggcatggggcagtacgtacattattttgagttcatacatgtatagtgatgatcaggtgggacaaggtggtctgagggaagttcttttctactccacatactacgatggaaagaaaactggacttggcctggcacagtggctcacgcctataatcccagcactttgggaggccgaggcaggcagatcacttgaggtcaagagttcgagaccagcctggccagcatgttgagacccccgtctctactaaaaatacaaaaattagccaggcgtggcagtgcacacctgtaatcccagctacttgggaggttgaggcaagagaatcacttgacctcgggagacagaggttgcagtgaaccaagattgtgccactgcactccagcctgggcaacagagtaagacttcatctaaaagagagagagagacagacaaagagagagaaggaaggaagagagggagggagggagaagaaagaaagaaagagagagagaaagagaaagagagaaaggagaggagaggagaggagaaagactaaatgtagggaaggggaaagggagctggtctaagttttagacccagctgtactactggttgactgtgtggccttaggaaa

SEQ ID NO: 204519 - DNA, 242 bp, Homo sapiens
tgagatggagtttagctcttgttgcccagacttcatctaaaagagagagagagacagacaaagagagagaaggaaggaagagagggagggagggagaagaaagaaagaaagagagagagaaagagaaagagagaaaggagaggagaggagaggagaaagactaaatgtagggaaggggaaagggagctggtctaagttttagacccagctgtactactggttgactgtgtggccttaggaaa

SEQ ID NO: 204520 - DNA, 243 bp, Homo sapiens
actagttattatattttagggtggtaggattaaaactttttccttagcttgtatatactttctgatgttctacattaaatacagtttgtgtgtgtgcataaaagagaataatttcagttaaagggtaagaaatgtagaccccatattttaattcagtagcaccagttcaaatccagttattcagaattaacaaagcaactgttgctcaaaaaaatgccaataaactcccgagccaactgagat

SEQ ID NO: 204521 - DNA, 777 bp, Homo sapiens
gttgtggaaaagaataggaaatcttcaggcgaagtcattaaactctgaagctcccaggggatcagctttagcgccctctgtaaagtatctgggagggagaatatgcaaacaataagaaaaataattaaacttcagtacagtactttagtttcaaagtactgttctacatatttcaggtccataaaacattatgtaaacaaattgtttgggtaccacccacctcccttctcggtaccctttcaacaaaccccaccctctccccaaagtcttcctcctgttcagaggcgttcttgacagtcagataaatgagtgatcctgaaatcggattcatattttaggaaactgatctcagctcagtattctctcctatcacacgtgtggtttgctgctgtccattttacctcttccacccgacacctcccagatggggtcttgctccgtctccaaggctggagtgcagtggcgggatctcgactcactgcaatctctgcctcctaggttcaagcaattctcctgcctcagcctcctgagtagctgggattacaggcactagccaccacgcctggcttttgtgtgtgtgtgtgtgtgtgtatttttagtagagacagggtttcaccatgttggccaggctggtcttgatctcctgacctcgtgatttgcccgcctcagcctcccaaagtgctgggattacaggcgtgagccaccacgcccagccccattctacctctatgagagcctagtcttgcttttaggcagcaactgaactaacaaagaaaa

SEQ ID NO: 204522 - DNA, 676 bp, Homo sapiens
cacgagtaaatcactttaaaagccttttttataattttgctttaaaaaaaaaatgaaatccccagacctgtcaaaagctgaatctatgccagaaggagaccagattttgccaagaatatggtgaacagggacttccttcagtcccctggccacaagtggcctcactcaccaccagatgggctgcgtgtccttccacctggtctcgcagtcaaccaacccagagataagcaggccagcttatcctccaaacatcgcccacaacaggcctgagcttcaaccctacaaacgcaggtggggcagcccctatcacggaaagtcaaattcccattttcagtttccaatgagatgtcaagaaccaagcaacaggctcaggaagagccaagaaaattgactttctcaactaaaaaaaggccagaacacatgaactccttgtgtttgtcatgtggactccagttactcacacctgaatctctgaggccctgaacatctgtgttcccccttccttccatatctaattgttgtttttttttgtttgtttgtttgtttttgagatggagtttcactcttgttgcccaggatggagtgcaatggcaccatctcggctcaccgcaacctccgcttcccaggttcaagcaattctcctgcctcagcctcccgagtagctgggattacaggc

SEQ ID NO: 204523 - DNA, 369 bp, Homo sapiens
acactctacgatctccctttctcatcctgcaaaatgtcgtgagtgggatgacactctgagctgtgccattatgtgcatcttgatagtatcaaatgataatttcagtatttgaacccattttggaaactgttaagtctgttgacattttcaaaatcgtgaaagtttctttggcaaacaaaacttcagttgttgacatatactcttagacacaggtgatatttcacctgtcatatttcactcatttcagtcaacaaatatttattgagtatatgcagtttgtcatgcactatcttcagtattgtgaatgtagccgtgaacaaaagcagtcaaatttttcccatgatggaggttacatgtcataattatcaa

SEQ ID NO: 204524 - DNA, 882 bp, Homo sapiens
tcggtaccccacccacctgagtccagaaaacttattctagcctccctcccctagccctcattccttttattatttattttctttagaaaacaaattagggaatgaaatatttagaaacaaagatccaggtgctagctgtgggcattgctactgttactctactaaaaaaaaaaaaaaaaaaaaaaacttcacatttccaaataaatagtaacactttttaatgtgttcttaacgttttatttggcattaatctaaattcccctctagcacaatgaaaacagaaagagaaagttaaaatttcaagtaaactgaaaacaacaatagtgctcagaggatttttttttaagtgaaaagggatagtgcttaattatgacaaataaaagctaacttgagatgcacatatacagatgcagccacttattttggcgggggacacttcaggaattaaaatttaaatagcgagagatcaaatagatacttggtaaatgtgtctgaattggatgttcccagacacaaaaataaaatgagttattgacagctcttgggagacaacattataaagactagacacgttatttattttaactctatgttctaaattaccattgagtaattgacattcgtatttgactatggtttgtggttaagttcttaattgcaataatgttaaataaaatgtgaagcccaaagcaaacaacaacaaaaattatagcaatacttcaacagaggtaataataatatgctgcatcaatggttcagaatccagcatctacataaaacaagcaacagggtaatgaaattattttcttttcaaatattctggcagagctactttagttttcttaagttatagattgtggtcttaactgcaacttttcgctc

SEQ ID NO: 204525 - DNA, 1165 bp, Homo sapiens
atctatggataatctttcctcaaattaattatttcaatgatgattgtaaagttctgtttttcaaatttcgccgttccttctacatgttagtaggcattgttctttaaagaggagctcagtcttcttcctatttagaatcacttcgtaaccatagattctttttttattcaattgttatcaataactaccgttattcttcttgatgctcaaacaatcccaaatctagtcagtggaactcctccaagccagcttctattcttttcacatgtctctaccattctttgagtgcttaattgctttttgcaacagaaaacttattctagcctccctcccctagccctcattccttttattatttattttctttagaaaacaaattagggaatgaaatatttagaaacaaagatccaggtgctagctgtgggcattgctactgttactctactaaaaaaaaaaaaaaaaaaaaaaacttcacatttccaaataaatagtaacactttttaatgtgttcttaacgttttatttggcattaatctaaattcccctctagcacaatgaaaacagaaagagaaagttaaaatttcaagtaaactgaaaacaacaatagtgctcagaggatttttttttaagtgaaaagggatagtgcttaattatgacaaataaaagctaacttgagatgcacatatacagatgcagccacttattttggcgggggacacttcaggaattaaaatttaaatagcgagagatcaaatagatacttggtaaatgtgtctgaattggatgttcccagacacaaaaataaaatgagttattgacagctcttgggagacaacattataaagactagacacgttatttattttaactctatgttctaaattaccattgagtaattgacattcgtatttgactatggtttgtggttaagttcttaattgcaataatgttaaataaaatgtgaagcccaaagcaaacaacaacaaaaattatagcaatacttcaacagaggtaataataatatgctgcatcaatggttcagaatccagcatctacataaaacaagcaacagggtaatgaaattattttcttttcaaatattctggcagagctactttagttttcttaagttatagattgtggtcttaactgcaacttttcgctc

SEQ ID NO: 204526 - DNA, 199 bp, Homo sapiens
tgctgggattacaggcgtagccactatgcccggcttggctctcactttcgtgttctttccatgtaatcacacatgaatggttgtcacaagatctcacagggaaataatttagcaagtgaatctcagttttaaaaaggaaggtgtttgtgttttatcagcatctgtaattgatcagaccatatagttaaacccctaagaa

SEQ ID NO: 204527 - DNA, 527 bp, Homo sapiens
tggcacctaatgggcatgtgagcatttcttgttgagtgacattatgaatgtttttgtaagtgaggcaacttgaattaacaagtatcttatttaatagaaactataatatttctacttgtaaatgactatagacaagaagaaatatttatattcagttgtgaaagttttttattcatgaaataaaatctgctatgagattaaacatgccacagcagcacatatttgtaaaagcatttttcttcaggacataattttaaggtgctaatgcctggtatgaatgggtgagagagaagcagaaacatgttccccttccccttctgcttcatacctgggccagctggggagaaagcccacgtgctccttctccctctcccctcctatctagaatgtcccctgcttctagcctcaccagatcccccgttctcccccttcctcctgcctctctgccttttactgctatgcccttcttctcctcctttatccttctttctgttttccacatctccactctctcttcaagcaaagtc

SEQ ID NO: 204528 - DNA, 698 bp, Homo sapiens
tggcacctaatgggcatgtgagcatttcttgttgagtgacattatgaatgtttttgtaagtgaggcaacttgaattaacaagtatcttatttaatagaaactataatatttctacttgtaaatgactatagacaagaagaaatatttatattcagttgtgaaagttttttattcatgaaataaaatctgctatgagattaaacatgccacagcagcacatatttgtaaaagcatttttcttcaggacataattttaaggtgctaatgcctggtatgaatgggtgagagagaagcagaaacatgttccccttccccttctgcttcatacctgggccagctggggagaaagcccacgtgctccttcccttggtgctaatggggagttcagcccacacaagtcttggccaatgaacaagaacccttacccagctccagctcccaaccacagcaggccccaagcctgtatccctgctttcaagccattttcagacacactcggagctagccctcctctgcgtagaaagcctcactctgagtaataaaccggtttatgtcctcttggtgcgtgtgtcatcagagttgacatctgaatgaaattttgggtgggagatccatctcactctcatggaatacccatcacaaacatgttgttacattttctttttctcctcctccacctcctcctccttttcttattc

SEQ ID NO: 204529 - DNA, 547 bp, Homo sapiens
ttaaaaaaagctgagatataagcaccagagacaaagggaaacaccggtgtttccctttgtctgttttcgagacggagtttcactctttcacccaggctggagtacagtggcgtgatcttggctcactgcaacctctgcctcccaagttcaagcgattctcctgcctcagcctcccaagtagctgggattacagacatacaccaccacacccagctaatttttgtatttttagtagagacagggttttgccacattggtcaggctggtcttgaactcccaacttcagtgatcctcctgccttggcctctcaaagtgctgagattacaagcatgagccaccatacccagccctgaaatgtttaaaatatggaatgcttcacaaatttgcatgtcatccttgctcagaggccatgctaatcttctctgaatcattccaactttagtatatgtgctgctgaagtgagcattaaacaacacacttaaacaccaaatgaataaaaagaggaaatcattagggagataagaaaatatattgagacaaattaaaa

SEQ ID NO: 204530 - DNA, 1204 bp, Homo sapiens
gatctgctgagcctcatttaaaccaaattgtctcaaattctttatttcagaagtctttaagctcagataatcttctcactattgttatctcacaatttactctgtgctactgctgctttgttgtttaagaacactgaattctgtcagtgctgttctcccattattactgctatcttcagcattgtctgtttcattgtatcttgtgtgtgccacacagccacctagatattgcgtttgagaaaggtttcgaaatttttttctattgtattcttctgcctttgttgcagtgataatctctactggcctttcaaggtaggggaggatatgttcctaagcagaaaattttgaggcctgtgtccttgaagagtttgtgaacatcaagatttcagtagttaagcactgaccccaggcctggtattgatacttaggatttccctaacctgcagaaccatgggaatagtatccatagtggtagagctgtggtaagcaaatcagcttttacgttagaaaagtcacacctggtgtgattgtctaacaagcaagcatgcttgcaggtctgtactgtttctcttctttatgtcttttacatctctctggttcctcagagtgctttgtatatagtggctactcaattatttgttgagccaagtacagagtgctctctgtatagtaagtcatctatttcttgagccgaattgaatttaattgtcagagttaacagtagttcttgggtctcttccagtagttctttcacctccagctcacttgagggtatggttggactgaagattacttcaagattattttccccagtgccttgctgttaccaactggggaagctgtggaaaagaatattttaggagagttgaacgatgatttaatatacctatcatttaatatagcttcccactttaattgaatttttccttccaaaattgacattcagtggacttataggctctttttgaatatgcgtcttaaaggggggtgaatacactttggggtagctcaggttttttccataatgtttatttatattcagctgaaatgaatatatttttggcttattcccattgtgattatataggaagaatgagaatttttgttttacccaagaaccttctgtataccttagtaaaagcattgtttctgtccaggcttctcttggtcttgaaccattcttgtaaaatatggttttgaagct

SEQ ID NO: 204531 - DNA, 847 bp, Homo sapiens
tcagccgcgtatctgccagaggatttcatccgggtggggcagctgacaaagcgagtggacatcttcagctgtggaatagtaagagtgtcctgctctgcgtagagtggggcccaccttgatttgtccttcccacggctcctttgtaatcacaggatacggtagaggcacacagacaggttccatcaaagtacaacaggggctgacaaactgtggcccacaggccactttggcctgtggcgtattttgtatggtctgtgagctaagggtagttttacatttataaaggattatatttttaaacacaaagaatatgtgatagagactgaacatgctccccaaaagctcacatatttactgtgtggcgtgttacagaagaaatttgccagcccttgaaggaaaaccactcatgagtgtccaggttctagtaggctccagatatcctctcctgacttccgtaattcccatccagccatccacttgtccatccagttgtctatttgtccttatttgttcatcgctgtccgatcatccatctaccctttagctgcccatccattcagcgaccactgacccacccagcatcccaccctaccaccaccaccatccttgtctgccattatgtcgtgccaggcactaggaatatgaatgtaacaaaaacacagtccctcccctcaggagctcatggtctgcatgtagcagtctccaaagtatatttctgtagaactccagttccttcggacctctaggattgatgtgttaaaagggtttgtgccctgacaggcttggaaatattgcattaggcaaagtcaagcaggtttctttaccacaagattaattcaagctggtt

SEQ ID NO: 204532 - DNA, 212 bp, Homo sapiens
tatctgaatttggactagccacatttcaagtgcccagtggacacatcttggacagcacagataagtgacaaatattcctaagtgtacataaggatttaataaggtagctgcaggtcacttttctttttctgtctttctttctattttttttttttggagagggagtctcgctctgttacccaggctggagtgcagtggtgcaatcttggctc

SEQ ID NO: 204533 - DNA, 275 bp, Homo sapiens
gcattaaagagaatagtatcatatgttcttttgggaatgtccccaaaaaggtttatgtaaagtctaaagtctaaaacagtatataggactgcatgtgaatgtgaatgtgtagtgggaaggaagagacagagtaacagagaaaaggaatcccaggcattagacagagttgaaccaggtggctagatcccaacaccgtagcagcttcctagactatacctaaagcagccgcaatgagaccagtcccttgcatgatcttcccaaaagtggaggagtca

SEQ ID NO: 204534 - DNA, 210 bp, Homo sapiens
tactattttgcaatgacaacatgttatataaagatgtattcaccaaataacattctagtttcatagcctttataatgatgacctatttttgctatgagtgatatgcaatctgcacattgtttcctgtatccattatgtatgcttaggaaaaactatatccattaatatgcttaggatttgcttcatagtgcacagacattcattttagta

SEQ ID NO: 204535 - DNA, 442 bp, Homo sapiens
ctcagcttcaacacattcacacccatagattcagccccaagttgtccacatctttgtcactgagggaaccaggtaagggaatgtggatgggcaggtatcatgtatcaacaaatatttattgtgcccctattgagcttgcacatggttacaaagacatggtgcatgcaccagtatttgaagatgataatccccattggatgacccctgagatgactttattcatctacaatttcttattggacacctactactttccaggcactgagagggtgctgggaataaatattatacaccagtaagtgaatatgaaagattgcatcctaatgtaaagagtgccataaaaggatttgttagaaacaatatgggagagaataacaggaagagggtgttttgttttatgtgtcagtaggcaaaatcctccctgagactttaaatggaaaaa

SEQ ID NO: 204536 - DNA, 252 bp, Homo sapiens
cttgttcctgaccccctttaccccaacttgtgctcaccctttcagaattaacttgggaaatgcctctctaaggaagccttcctggctggaccctcccctcggcagccctcagaccctgcactcacttgtgtccttgcctcatcgcacaatggtgtaattatctgtacatatgttggtggcatcctagaaaacagagactgtatcttattcatctctttatccccagtatctagcacagacagggcctagcat

SEQ ID NO: 204537 - DNA, 419 bp, Homo sapiens
taagactgttaaaattgttttccagagtggctgtatcattttatatttccagcaatgtaagaatggtgcaatttctcagaatttttgcgaacatttggtgttttcactatttttttaaaattttagtcatttgataggtgtgtagtgatttgtcattgtgatttttatttgcattttttatgttgagcattttttcatgtgcttatttgccatctctgtaacctgtttggtaaactgtctcaatatttttattcattttcttactaaattttttaactgttgagttttaaaagctttaaatcatattttgtatactagttcattgctgattatgtgatttgcaaatattttctctcattccataccttgacttcattttcttcacatgtgattttatgtattaaaagttcttaaaaata

SEQ ID NO: 204538 - DNA, 516 bp, Homo sapiens
aatgtgactttgctcttacgctgaggttggaaaaaaagcttaagttgaaaccatgcttgtgattattatactatttccccttttgtttcctttcatcagcccatctgagtttttattagtgacttaagagcattaaagatggaaagtgaccactggagacagaaaacctaagcaggtttataatttagttgggaagaaaagatagaaaaggaaaaggagggcaaggtagcttatactgattacttgtaggcagtaagtacggtaggactgggagacttagggagaccgtacagcagagttgtgaatccagctagatactatacttagactaagacatcaatatttttgtgggaaaagtatcctaatgacttttttttttcttttaagagatagggcctcactctccgatgcaatggtgtgatcatggcacactgcagtctcagcctcctgggctcaaggaatcctcctgccttagacttccaaagtgctgggactacaggcatgcacccggcaaat

SEQ ID NO: 204539 - DNA, 694 bp, Homo sapiens
agatggcaaagaagaggagaaaaagaaaatttctaccctgattatcaaagataccaagaatgtcatctcctttaatccctgtaccaactcagcaagttaggtttcattattatttccattttacataaggaaactgaggttcacagacattaaactgctcaagctgtgatgtagacccactggttgcacagcatccatctggccttttccatattgctgctttgagacttgggaggcaagaaaaaccaatgcaaacaggaatctcatgttgcttgctacactgtaaatagtaatgtcctttgcctttgagccaggagttttgtgtctttagctaatatttgtgaaacttggcaggttaatgtgtttgctcagaagtagcataaaatctctgattcttcacagttctagataaaaaacaggcctcaaaaggatcaaactgataacaggtaactgtgttccataaaaagagatggcaatttttatttatttatttatttatttttagagacacagttttactcttgttgcccagactggagtgcaatggtgcgatctcagctcactgcaacctccatctcccaggttcaagtgattctcctgcctcagcctcctgagtagctggggttacaggcacccaccaccatgctcagctaatttttgtatttttttttttttagtagagacagagtttcac

SEQ ID NO: 204540 - DNA, 524 bp, Homo sapiens
cctaggaacaggaattagccattatccacacatttgtatttagtatcatctgtctcctagccctttgctactggaggaattgtggaatggagaggttatggctaagtactattttatgatgttattctctgggaattggcttagattagaatcacctggagtagttttataattattaatggccacatcacaaggattcaggttcttcaggttctgttgatctgcggtggggttgggcatcagtagtttataaaggtctccagttaattccaacgtgcatcaagacggaaaaccaccgtgtaactccttgcttctcaaaatgtcccaggacaaaggccccaggtaaattgtttgtatattcaagcctgagaaacctacaggttcctttctagttaaaagcccattgttctagttggcctagagagctgttgactccgcaatgaaggaaagtgttgtatatttctggaggcagagagaggtctgcaatgcaaaaatagtttacagagaaagcggtattgttacca

SEQ ID NO: 204541 - DNA, 395 bp, Homo sapiens
caatcccacctcgttagtgtataggagagatagatggagtgaatattctaaactatatacctggtaggaacttatcccctataggcaagacaacaaatagaaaagtggaaaagaggccgggtgcggtggctcacgcctgtaatcccagcactttgggaggccgaggctggcagatcataaagtcaggagttcgagaccagcctggccaacatagtgaaaccttggctctgccaaaaatacaaaaattagctggacgtggtggtgggcgcctgtaatcccagctactctggaggctgaggcaggagaatcgcttgaacccggaaggctgaggttgcagtgagctgagatcgcgccattacacaccagcctgggcaacaaggcaagactctgtctca

SEQ ID NO: 204542 - DNA, 281 bp, Homo sapiens
gccattgttagttcatgatatagttctcacctaaaaccttgtcatagttttagaatatttttcttcacttgagattctagacaacgataggttggtagtgtatactgaacaaacaagattcttcctaacgtgttctgtagtcacttgctcagcatttgggccatatatatatttttttttccagaagtaaaaaggacagtgtggctaagtgtctagattagtccccaaaagcccgtttaacccctgcagttcagaaaagaagactagatgttaggggcaat

SEQ ID NO: 204543 - DNA, 722 bp, Homo sapiens
gagttctggagctataatcctcctgcttgttctatctgctgactctcgtttgtggtacaaagccatttcctcatgtgtcatttttaatcataaattcatcttcagttgggcttatttcttctgtaagaatcccttgaggtctaaggtatggacgtacctctcagagtcttttcctgtttcactagcttgaagcctgtttgtatattaatttctgagccatataatataaacccagttcccaaatgtaagcaaagtatagatcttgtgcttcaatttctcaggcaaacttttttcattttctctttgcatagagctcaagcaaatcaagacaagatttcttgtcgtctccttgtgtaatagggaagattttctttttctagcccaccctttcacctagagtgcagcacatcaaaaatctcaactttatgcagaaatcttagttctgattcctttttgcatatggtaaaactcaacctgctaggaagagaacacctgaaataacccatctctacactcctcactctgctccagggcaatacagcataggttcaagggcttacagttttggtcggtagttccatttttgtttttggaaacgagattttcctatctttcctgtatattcaagaatgcatttaaaagaactgtcattctttattatgcagcttttgggcttacagttttggtttgtagttccatttttgtttttggaaactggagat

SEQ ID NO: 204544 - DNA, 512 bp, Homo sapiens
tccccagtccctgcaccccaccccagcatcctctccattagctccctgaaggagtcatactgttttcttgttccctgagagctttctattgataaaagttctgtctgtcttcaactacaggaagaactgtgggtctctctggattctacaggcacctggcaggcatgagagcactctcagagacagggctttggtgggctatgaatggaatgccctctgagttcccctgaaaggaggatgggaaactctagatccctaactgccctcagggtacccaggactggctgaaatgatccaaactcagaagttgagtgctcacgcatagggccataggggcctgaggtaaaacagggtgagtctagccatcctgataaggtctgaggggaatttaagagcataaaaattagcccagtcagtgaaagaaaaaatcagattaatagtgactaattgtttggtcctgcacttgctctacagaaatataatgcaagttacatatgtaattttgaatgttc

SEQ ID NO: 204545 - DNA, 458 bp, Homo sapiens
agtggtaatactaggttttatttgcttactgtccattggtatattagggttctccagagaaacccaaccaactggatagatagatagatagaccatagagagaaggaaagcaccacagtcactgaagtaagggccctcatggaagaggtgtgacaggaaaggtctgctgtcccagggccaccatatataggagtgactcccatcctgggcaggacctttctttcttttgtattcacagtagttctgaaattgcaggatgctgaaacccagcactggccagttatactgtttctttctttaccattaaatgctgtgccaaagagcaccttaatacatttctttcctcttcctggagagaggcaaaatgatagtagatatgttgaaacacacaaatgtactttaagcacgtgctttcaggaaaagctactagaagattagttgcaccaaaatgagggggg

SEQ ID NO: 204546 - DNA, 372 bp, Homo sapiens
gtgccagatactcaaccaactctcatggagctcacaagttggtagtggaaggatatgcatcaaccaacatttcaataggagacaaggagctggaagggctgccggtaccagaaagggtggggaagcacttcacactgactgggctggaggactgcttctcacaagtgccttggaggtgagtctggatggttgcttaggagttcaccaggggtcaaggaagaagtcaggcaaggatgttccagacagaagctgtgtggcgcaagctagcttggtgcactcaggatggctggtgcattggatgcatgagggtggaaagtggacagcggctgaatccttcaaggcctggtgggacatggcgtgccaagagtatgg

SEQ ID NO: 204547 - DNA, 350 bp, Homo sapiens
gtaggaaggaaggtagattgaaaatagtttatttcctaaatattcgtggtgaaaattggtaaaaataaaatacatagctttaccatttggggaaaacaggacagaaaggagaacaaaaagcatcgaaaaaactctgtaaagagaaaacacaaagattgtagaaataaaagacctatgtatcagtaatcataatataggtaagcatatttcaatatggagttgaaagtaaagaggtcaggcatggtggctcatgcttgtaatcctagcattttggcaggccaacatgggagggatctcttgaggccaggaattcaaggccagcctgagcaactaaatcttgtctctacaaa

SEQ ID NO: 204548 - DNA, 308 bp, Homo sapiens
gaagtgataaacatacgtctaatagaataaggtggtgagataataacacctgctgtggcatagtaccaccaccgatggaaaaatggagccaagagctggctgagaccatgatactgggcagacctttggagaatcatacacacagcaaggagctgatgatgtctggggcgcctttggaatctttgcccatgagaactctgaggcctcctcctagcatgacaattgccgcccagcggctctccaggagaggaacagccactcctcacttactagcatccaagggacttccaacccacttgagggtccat

SEQ ID NO: 204549 - DNA, 379 bp, Homo sapiens
gcccgcggacagttgccctccctggtggccccgggcaggagcgtgacgtcgaggggctgcagcggaggctggaactcaccctcccgctgcggcgcctctcggcctgccgaggagcagtccggtgcttttgccggctgagaggaagcgagagttattttaagaattcaggggttgcctttccttcgccttgggggaagggcgtaagagtcagttcccactttcctgcattctctgggcccatggtggcatcttttgcttgcggtgcattcgtaactttccaacagcctgcctgtcatgtggattagcggttgtgtttttgtatatccgagtgtgttaattatcccaaattcgcccttcttcgccagctcagaatctaggc

SEQ ID NO: 204550 - DNA, 535 bp, Homo sapiens
tgacactgatgtttctaaaggttacaggacagatgttttgcagaatgcccctcgatttggattttgatcacttcctcatgcgtcagtgcaggctaaaattctggggaggaatatgattaccttagtgtcccctgcttttcccagtcgctctttctttgagcctacagcagtacttgctgcagtctaacggcccctgcacttgttacctgggcaaagtgcttaacttgctctgcctcactctactaatctgttcaatggaccaatgacagtcacctcccataggctgttgtgaggatgaaatgagattatgccgtaaagtcggtggaatggggcctggcgcatggtgagcgctcagcagcggtgagcgattcgtgttgtcttttctgtgtgtgtcagattacctgccaggtagacgtgtcagacacacatctgctctgtgtcctctgagtctagcacaagtctgaagaatcacatgggtgaagctactgcctggcctctgttttctgtagtgaaattataccccattcccatgaac

SEQ ID NO: 204551 - DNA, 643 bp, Homo sapiens
aagcagatactacagactcagcctcctgagtcgctgggattacaggcacctgcatcatgcccaactaatttttgtttttttagtagagtcacggtttcaccacattggccaggctggtcttgaaatcctgacttaaagtgatccgcctacctcagactcccaaagagccgggattacaggtgtgagccaccgagcccagcctgtattttctctcttaatgtaagcattatggtatacactttacccatcctgctcttgattagagaattaggccgtctctcattctccatgcagtgaacatcttacatggaattgcatttgtatttatctctgataggtttgagtcaaacagaatttctaggtcagagggtatgattattttaaggctctccagaaagatttattattttcattcccatcaacctggaaagtttttaccgtgccctcaacagcatggataagaactccttaaaatttactaacttgagaggaagagtaaatattaaatacttaacattttaccaatattaaatgcgtctattccaagacaagtactagggtaaatggtagggttaagccagcattttgtctactgtaggaacaatgaaagatctcagtgagcacagcgtattgggaaatttgt

SEQ ID NO: 204552 - DNA, 332 bp, Homo sapiens
caagcagttcatacagactcagcctcccaaagtgcggggattacagtgcatgaggcaccacgcctggccaagaaaaaattttaaaaactttctagcttctttatgatgacatcagaggattggaattagaagggggaagggtgacctaagaagaataactgaagtggagaatctgaaaggaggccagactattggagagggagttccactgggctgcaggaaagcataagattgccttggtaaagtgagctccaatcatggtgtaccttaagttctagaacgaggaataaggaattgattagtgagtctgtattaactgcttgggttaccga

SEQ ID NO: 204553 - DNA, 221 bp, Homo sapiens
tatactgtattatcccatatttataagtatgtatacgcacatctaaaagaattgatagaagactacaatcaagaagttaaaagctgttatcacaaggtaaaggttgcttgcttatattttccaaactgtctgcagtaatcatgtttttttaattattgctgaagaattatgataatttcttatactacaaatgagagtagatatagaagagtgcacttttg

SEQ ID NO: 204554 - DNA, 455 bp, Homo sapiens
caggttgtagcctaggagtaacaggctatactctacagcctaggtgtggagtagactataccacctgggtttgtgtaagtacaatttattatgctggcccaacaagtgcttaatgaagcatttctcaggaagtatcttcatcattaaatgacacatgactgtacagactctgcatccaaagctagcgtgttttaaactgagtttttttcctactgttcaaacaggctattttaaaaatccctttaaaaattttcatttatagttttgttttgatctagactactactgccgacttaaggaaaatatcgctagagaacatgacagcaatgacagagaaacataaaattaacagaaattttgaaagtatctattgaacgttaactacttaagttacttttgccaattttgtcctattttcaatttgtccctatgtggattagtttaacagcaacaaa

SEQ ID NO: 204555 - DNA, 395 bp, Homo sapiens
tctgcctccctcggcctcccaaagtgctgggattacaggcgtgagccaccgcaccccagcccatttcctgaatttcagggggagtgaattaattctaatatagagagtgggtaaaaggaccaattttttcattactatttgacttcatatcatcttgctttgcaatgccctggtttttacatctataaatcagaaatgataagcaacctgctttataggaatgcaatgaagataaggagatacaatataaaaatatacattgagtcagaaagacagataacactatttaaaccagtgtattcttataatcctcattattactaagaatgatgttaacagttatgataaaaagtcaacatgcagaaagaagagaataaagtaatttctagtttggg

SEQ ID NO: 204556 - DNA, 296 bp, Homo sapiens
gtgtttgcagtaaggacagccttgttgagggtccatgacctttaacctgtgggtctggtgctgactccaggtgattaatattagaattgtattacagtataccagttggtatcagaagacttgctcagaaagttcaaactcaactggggagaagataatgataaaaccaataccaaaaatatagaaattatctggaattgcactaggaggtatttgagatactcagaagatttcctgaaataaaacactgtattagtttgcagagcttctaaaacaaaataccacagactgggtag

SEQ ID NO: 204557 - DNA, 539 bp, Homo sapiens
ctcacctgcttcaaactcagattcttgtcaagactaacatgattgaattcatttaatgtgaataaataagtgatgttagcttaaaacagcatctatcactagcacattcttttctactgatttcgaccagacgttcattctctagataaaaaatatttatgttgtgaattcactgaattaacatcggtcactaatcacccagttaagttacaatcgtatatattctggctggtgttgcaatttaaattgccaaaaaaataggctaatcattagctaatgaactatattagacatggtttgtctgttaatgacattatctttatcctttaatgacattatttacaagagattcagtgtttgtgaaagcaaaaagctctattcactcattgtgacaagaaattttgacacgtaaatatgtatgtcatgttttaaagatatacatactactttttaaaagacaggagagtctttcaggcaccaaacttgcaaaaaatctcacagttttttttaacagcataattcaagtatatgagtaaata

SEQ ID NO: 204558 - DNA, 478 bp, Homo sapiens
ccctaaagttgttataatttagaaatagtttattctaatttctgaaataggactagaccacatcaaattgaaatgtgggcaatagataagcacatcctccttactgccatattacagcaattccagaaagcttgaagagttggatagttactcttcaaaactttaagcatgtagattgttgaacaataatatcaaccagcttaacttatttaacattaatagaacactatttccagtaacaacacattcttttgaagtacatatagaacattaacaaaactatattatattctgactataaaataattccgaaaagtttaaaagattcaagtcctataaattatgttttctgagcacaatagaattaaattagaagccaatacaaaaggatctctgaaaatctacaaatacttggaaatatatggcacatgcctacctaacccactagtcaaaggagaaattaaagaaaaatcatgaa

SEQ ID NO: 204559 - DNA, 337 bp, Homo sapiens
ggcgtggtggcaggcacctgtaatcccagcaactcgggaggctgaggcaggagaatcgcttgaacccaggaggtggaggttgcagtgagccgagatcgcaccattgcactccagcccgggcaacaagagcgaaactctgtctaaaaaacaaaacaaaacaaaaaagaatgtacacactctggagtcaggctgcctggatggagcctcacctctactgttacccactgtgtgaccttgagtaagtgactctgagcctcatgttctcccctgtaatataggggtaataataacacaaccttcttccaaggatggttgtgagtattcatcaagattgtgc

SEQ ID NO: 204560 - DNA, 499 bp, Homo sapiens
aagtacctcactttccattccttatacatactgtaatttattttagttaaaatgttagtaagaagcccaggcacctgctgattaagcatacatggcacataataccatagctctcatgatcacagccccaaaaaagtaaatctcaagaaacaactgcattagcagccatgccaaagatttagaaaggttattatcctgtgaacaattatggttcttgtttgattgaaaaattcataataaaaacataacacttttggggatacaatgttcattatacaccattgtagtcagtggctactttagttttcatttttgttaagattccaaataataaaactatttgcaaactgttgatttccttgtaaattcccctttctttggctaaatcaatatatgtaaatatctttgttcatatattagttaagctttaaaatgaggttgtttatgttcttgcattcttataaataacccacaaatatgtaatccctctaattctctt

SEQ ID NO: 204561 - DNA, 924 bp, Homo sapiens
ctgtccaactgcacattaacacaggcctgccagtcctgtcgggcttgcttttaggctgagccaactgttaatgtcttagctgcattgttcccctctctggaatgtgccccctcctccctggtcaactccagtccactccagagatggctgaattgaatccattaattagtcccaggtacagacttgctgctggacttgaacaccctgtctgttagatacttgttttctttctcgtttgctgcttggctcaagggaagcacagagtatacagaatggaagagcggagttaagaaacagatgatcttggttaaacctctcaaaagcaagatcacaaaggtcacccgaaggcccagtcccacatgtactgctagagcttgataaactctgggtagctcatgtggcgtatctcacctgcaccctctggaacctttgtcctggagagcatccaaggtactttctaatataggacaaggagttttctctgaagtcgttgttagacattaacaatacagatgtaggaaatatcagccctttcctcaaacttgaacttctgcctaagagcagtgtcggggaaattggttgcatgtagacagcaaattgaatgttaaacacaataagtctttgatgattaaaggccatagctggcaggcagttataagtttaaagtaaatagtgatttaatgcacctttagtcttattctgggaatctgtcaacatcccactcttcaaagcccattttgtaacttgtgtatttaggcatttcatccaaggaatttagtatttaagagtaaaaaaaagtttgttgtcttcctctctataattcatatttctttggaattctataaaattttatttccaaaaggaatgaattataagctcttagataaaaaaactcaaaataaaatttatatactagttgtcaaa

SEQ ID NO: 204562 - DNA, 465 bp, Homo sapiens
aaggtgtgcgttgcacagaggatttgctggctgggtcccatgagcttgcagagctgagcttggctggagagtaattggaataccaaaaatgctcgacctcggactgcagcttccgtatcaccagggccagctgggctgtggtcccagcttccaactcagagacctgggttcttccactgagtcccaactggttgagcacttctgggatgagttctggtgcagcgtggtgctccagtatccagcatgggccctgacactcaggaggccctcgtatatggctattgagagattgagctacctgtgccatcttggaggtggccatgtccctcaggcctcagtctcctggtaacaaaaagggatcctttctcgttccagaggacaggacttaaaacccttaggggtgagcgctccttgagcacttactgtatgccatgccctgttctaacacttcacatgtgcaaactc

SEQ ID NO: 204563 - DNA, 467 bp, Homo sapiens
cagtaagactatgtgtcaaaacaaaaccaaaaaggaaaaaaaaaacaaaaagaaattcaatgaattatacatatttgtaaaatctctttcacaatcactgtccaaatactaccaaatcagatactgagtagttgtgtgataactgcttgtcaagtgaatgaaatgtacggcatttatacacatattttttcaccatagtcttgtactaaatgagtaaagaagtgattaagtatacatttttttttttttacttacttattggctctctgataacaagtgcctctgatgtctcaacaaatggacccatgccaatactattttcagccgcaattcggaaaaagtaggcttttccttgaatgagaccctggacagtagcattttgtcgggtaactgtatatgtcactggggtccatgctctgcggtcagattcacgcttttcaatgacataattggtgattggagagcct

SEQ ID NO: 204564 - DNA, 530 bp, Homo sapiens
gcccctgtttttcgagcatgtatgggtacggggcagaatgatggtcagtcttagtttcaacaatcgttgagatgcccctagctaccggtatctcatcatgtatcacctgacttaatcagcctctaacagtgtctaatctgctaaacctgttgtcatttgttactcatgtggaacatctcaggccgaatgagccgacttattaggatatcggtaatcatttctagcgccccatcatatttctcgacgatcccaatgtcagattcactggatgtcgagtgactgcttggactcccaggtctgcacgacgctctggtacggttattggctctctgataacaagtgcctctgatgtctcaacaaatggacccatgccaatactattttcagccgcaattcggaaaaagtaggcttttccttgaatgagaccctggacagtagcattttgtcgggtaactgtatatgtcactggggtccatgctctgcggtcagattcacgcttttcaatgacataattggtgattggagagcct

SEQ ID NO: 204565 - DNA, 405 bp, Homo sapiens
aagtggacaggaccgagcgagaaggaaatggtgtgctgagttcacctgaaagcctcagttcccaagctatttctttgctaaactgtgtttttccaaagttgtatctacaccttctctggtttgcaaagagggctcaatcccaaagcagcagcaggctccggtccaaagtgcaaaccaaaagaagcagcaggaggggtagaacagagtcattaccaaagactgagtacagaataaagtgatttatgaaaaccagcatggaagggcatgctacaggctaaagccggactcaggaaggcctgttgtgagggagaggggaaatccacagcccggcatgggagaagagaaccatgggcacagagtaagtgggaagacggaatagtgagtgacccacggccatactctacc

SEQ ID NO: 204566 - DNA, 370 bp, Homo sapiens
tttatatgaattatttctaatgactaacgtaaaatatcagaaatgcccacagagctatgcctgcttttgcctcagacttttttatactgacttataattgtcaggatagggacccatcccactccagcagcctcacaccaatttctcgtggctgaacacagagaaaagaacacagcaaagatatttcttcaaaacacatctaatgagagtcattcattttacactttgaatgaaaaaaacaaattcataaggaaatcagtagcttttaaagaaaaacatattaatgattttaaatgtgtttgtaaacatgaaaccaaaatatatagaaaatattgaaactaaaattttattctcaagaaaaaaaatgggt

SEQ ID NO: 204567 - DNA, 481 bp, Homo sapiens
aaagaggccgagggccgggcgtgatggctcacagaggtaatcccagtgatttgggaggctgaggagggaggatcacctgagactaggagttcgagaccagctgggcaacatagtgagactgcgtatctataaaaagttaaaaaattatctgttgtggtggcatgcatgcctgtggttctagctactcaggaggttgaggcaggagaatctcttgagcctgggagttcaaggttactgtgatcatgccactgcccaccagcctgggtgacagtgagaccctctctcaaaaaaaggaaaaaaccctgctaccttttgtgtagcaacacaaagtcctagagcggtctcctctaagagacagagttttgctttgtcatccaggctggagtgtagttgtgtagtcatggctcactgcagacttgaactcccaggcacaagcaatgctcttacctcagcctcctgaggagctggaactacaggcaca

SEQ ID NO: 204568 - DNA, 329 bp, Homo sapiens
agtttccttaggtttttaccatgcaagaaggattgtgaaatgacagcttaggtgggaacaagaatttccttgtgtccctggagttttgtctgaacataggtgatgtctgggtctattttgcattctaaaggacaataagagaaacaagtatgtgtgaaatacataagtgggcaaaaaaacagtatcaaaatgacctaatcatgtatcctacagtaaagttattgtgtaattttaaaattcagatagataccttattttgcatatgtttgaagacaaaatcagtagttgtcatttatatgcactaaataaacagctaaaagaaaaacata

SEQ ID NO: 204569 - DNA, 218 bp, Homo sapiens
gggccttgcctgctccttcagtggggagtccttgtgaagggcttgtgctgtggaaaaccagtctctctagcttttgtaattttctcaagcaacgaaaaagcaaacaaacgcaaaaagcttattctgctttaatacccatttccgtcaaaggagtgtatgtgtgtgttaggagagtgctccggctcatactggaaagttaggtgttggtgaggactgct

SEQ ID NO: 204570 - DNA, 509 bp, Homo sapiens
taagagcatgatgctaacctattcatgggaaatctgccccatgatccatcacctcccacaaggccccactgccaacactggggattacagtttgacatgagatttgggtgaggacccagatccaaaccctgtcacctgttctcaggtattctgttatggtaacacaaatcagaagaagatagtggcttttggagcacgaaagttttaaattatggtgatgtttaatgtagtttgtgcttcctatgccttatttttaaaatccttgcttttcctgaggttgcaaagtttttctctatgttttcttctacaagttttatagttgtggctattattgttaaacctattatcctttttgagttagttttttaaatggtattggtttaggtccaggtttatttatttttagtatagatgtccaagtgttctctcaccatttgttgaaaaatgtatccacttcccatatggaattaccttggcatcttgttgaaaataaatttcacatatatgca

SEQ ID NO: 204571 - DNA, 244 bp, Homo sapiens
tctaaatctagaatgattccattttagggcttcctacatctaaaaatatgctcaggagtagggcaacttagatctgaacattataacttgataaatgaggcataaataagctttaataagtggtaaataattctacattaggtatttgttgaataaaactgacaagctaagagtaggggatttgacatctcacagccttgtgttgaatgaatatatatcctatgctctggttgcttaatttacc

SEQ ID NO: 204572 - DNA, 591 bp, Homo sapiens
tagaggatccccacgcgcacgcgcgtttcaaaaaatcataagttgaaccatcatgaattcgggatcacctgtattcagtaccatgcaataaagtaatctgactaaaaagtctaaccaactatttgcagaacatacaagaaataaaggagcttgttaaataaccacagggatgcaatcagcaaaaccttgaatgtgggaaattccaaagaacaaatgatctgatttcctcaataaataaatggcaaggaagagctaaacaaaaaatattaccaattgaaaggagagttaaaaatagcaaccaaatgctatggaccttgttttgaatctttagtaaaaaaacaaaccatgtttttaagggaaaaaaagatacaatcacagaaatgtgaatactgactggatctgatgttacagaattctttaatttttaaaaggcggaatcatggtgctgtatttgtatttctttgtcttatgcatccttatcttttagaaacaaatagtattttccaaaaacatcatatgatgtctgaaatttgctttaaaaatatttgaaccgcggtgcgcgtggggtacgagctcgattcgtaacagcag

SEQ ID NO: 204573 - DNA, 401 bp, Homo sapiens
gctgggcgtgcctcagagggcgccccatgccagcttaaaggcagctgggaatgcagcaattgatcagtgggtgctgggcagctcacacccccgtgcggacagtcttctccatgggccgagaagtgtgtcacatgcatgcaggtgcatatgcatggggacatgggggcccaggagtcttcctactgcagagttcaaagatgcgggctgaaggcagtttggagagcgtcccctgcctgtgcttctcttttaactccaggacctgagcctctgctgggtggcgggtggacgctgctcccagtctcccatgcaaggggccccagagggaggaaaatggcaggatgggacagagggaccacgtgagagcagctttgggataaagctgccagatacacaaagcaata

SEQ ID NO: 204574 - DNA, 382 bp, Homo sapiens
agaagaaacaactagatgcttcagtcagtttctcagagttttctaagaactgctcagagaggtggaagaccatgtctgttaaagagaaaggaaaatttgaagacatggcaaaggcagacaaggcctgttatgaaagagaaatgaaaatatatccctacttaaaggggagacaaaaaagaagttcaaggatctcaatgcacctaagatgcctccttcggccttttttctgttctgttctgagtatcacccaaaaaccaaaggagaacatcctgtccagtccactagtgatattgtaaagaaactgggaggaatgtggaataacactgctgcagatgaaaagcagcctcatgaaaagaaggctgtgaagctgaaggaaaaatac

SEQ ID NO: 204575 - DNA, 728 bp, Homo sapiens
attttaactcacattttccataatcgctggaattgccccaaacgaagagctcttcataaatctgtttctaatggttggcctcacccaggagtgggaaactacagaatggggcagaatttccatgcaagtgtcttagcttcatacaatttgaattatttgttgaaaagccaacttattttccagttacgatgactgttcagaatagcacatctgcaaaccagtaagacccaggtgaagtgattcccacagcgtctcctgtcaacagccctctccccgctctccttctgtaaggagctgtgtttatgagcttcctcactgaactcaaatttcaacttaaattctatgccacaaatatatttcttccccacccttttctactgctgttatagttcatcaaaaatgctgtatgaaaggaagtgctattttccccatggcttagcgtggcaaggtggcttctgacatcagggaagggccacatttaaattaaactcttgacactctgcttgcgagaggtgatagataggctcccaggagctgcctcctctggaaaccaaatctgaccgggagccagaaggaagtgaatgatgcttctgcacaacatgaagtgaatccagtttcctcctgaccttgtcccactgtatattttctttctcttgttttatttatatttctttattaccagaagattttcttttagacagcggagttctaagttaaccacccgtcta

SEQ ID NO: 204576 - DNA, 490 bp, Homo sapiens
ccgttcaataaggagaatttggaaaaaagtggaagaaggaagcgctgcagccacatccccgccctgaaggctgcgtccctccagtgcctcgcagattagtcaggatgcccacttagcactggccacggggccttgctctgtcccgggtccactctcatccccgtgtggtgatggacctctgtggacaaatgctttttgttttatttgttttttgggatggagtttgtctctcgtcgcccgggctggagtgcagtggcgcggtcttggctcgctgcggcctctgtctcccgggttcgggcgattctcctgcctcagcctcctgagtagctgggacaataggcacgccaccatacctggctgttgctaaggactctgcatctgtgttcatgaagacattggtttggagctttcatttcttgtaatgtatttgtctggttttggtatcaaggtcatgcttgcattaaattagctgaaaagttgccagcctctt

SEQ ID NO: 204577 - DNA, 559 bp, Homo sapiens
cttctccctgacagtcctccaaatataaagacagctatctccttcccttggacgtactcttacgtttttaacttatctagaataattttatatttaacatacattttttcaggcttatcaataacttctgttacaattttattctctatcctattaagccacaaaaaagccatgttaaataaatttcaacatagaagggatccttggtttccccagtgaatctttgttttgtgtctccttattttgttttctggtttttcaagccagagagactatgagtgtctacaagaatcttagctgccttgcatggttctgactggggcctgccctcaggctacaagctacacaaatgacacttagcaagtgctaccctctgcttccaggtttgactctcccctggtcattctctactgccttcatataattgttttattatatttttgtttacagtttttaatctgtgggagagttgatctgataggagctactcagtaaaagcagaggtggcatctccctctaagggcttttttttttttttttttttttgagacagagtctt

SEQ ID NO: 204578 - DNA, 180 bp, Homo sapiens
gggacctaagtatcctgtgaagctaatgattcatcttattcacactacagcaatacaacaatcatttagtacaatccagcttctcaaacaagcgataaaaagacaattttaaaaggataccaaaagggaaaacatactcttcgtagtttaaatttcaagattggattcttgggttttaag

SEQ ID NO: 204579 - DNA, 349 bp, Homo sapiens
tctagaggatcccgttcattttctacactatagtttcatctgccccaaattcaatgtgcttttttagaggtactgatgtcactgttgttgaacattcaaaagcagctggtaaattgcttatcagggaagttttaggaagagacctgatatgtagttttttccaatactatgtgccaagactatttcaatatacctatgcagaagccatgctgagttttagtttgattaactattcttataagaggtttcgataaaataagatttctgtttactacaatcaataatgacaaatgttccgtaaagtgaacacttagtacacaagtcttgttttcatattgtgcagatgcca

SEQ ID NO: 204580 - DNA, 461 bp, Homo sapiens
tagcttcagctgaaattatacaaaaaaaaaaaaaaccctcctctcaactccaaaaggaagaaggaagtaagaacctatgccatcatatggtagcataactgtgctttcattgttctcctgtggtgcccttatgctatgtacctgccattcaactgcatgtgcttactcatagcattgttcctcctctcaggggccatcgtctctccttccatactccagggacacacataaacactcacatcagtgcacatccacaaacttacaaaaatcacttattcatctacactcacaatctcactcctttgcacaaacatacacacaaatacattcatacacaaatacactcacacagagattttatcttgttctgcttcactagtcctgtatgctgcttttaatgtcaaatactctctctaactcacctggttgaatttcattgcattcctagtaaagcttgaatt

SEQ ID NO: 204581 - DNA, 401 bp, Homo sapiens
cccaactccaagttgtagctttcagttgaagaaaaagttctctacactgttttaagcaaaaggagtggggataaaacactggaacattattagaagtaagaattttcttagtcttgaagtttatgttttagagtaatttaaaacactttttctgtgtagttttatataggaaaccttgaaggatgccttcactaatttgggagatacagaactgttagctctttagttgacactggttaaacattggtagttggatacttgacaatatggtttgaagacaaaccaatatggtttgaagcagaactagagtactgcttagtaaatgcccaattttcctaagaattttaagatctaaacatatgcttttctgttttaaaaagttacttctaatgtagatactc

SEQ ID NO: 204582 - DNA, 530 bp, Homo sapiens
gcaccccggctgacattttgtgagatgggtgactccaaggtgtagatcttcaaactgcgtcagctatccacaggttgtgatgaaacagttctacagatttcttctaagaaggaaaaaaaaatgaaatttgagtctttccattatgccaagcttctcctcaacaccagaccaagtaatgggatgaattctgtgccttaagaatatgagaaaacagaggcttggaaatggaaggtgccatgaggcagtcaaaagacctgagatcacatctaccacattcaacccatgtgacatgaggcagattatctgacttcaatgtcacttgatgtcctaattttcaatgcagggctgggaagcacacattattgaggagaaatcagggaacacatgatatagagcccaatttatttcaacaaaccctgagaccccattgtgtgccagtgttggagagtgcaaaacggctgtcagggggagaagatcttctcccctgacatctgtcgttagtaaaaattttgcctaactcaatataccta

SEQ ID NO: 204583 - DNA, 233 bp, Homo sapiens
tcttttctcctcctctgcttccttcccctgctcctccttcttcttctctgtttttcttacaagggttaaacaagggtctattttgagcttagcacaaagtctgttcccactttctccaagtgtcccacctaagtgctgaagctcagtaaataagcccaattggaagtggatacatgattagttaattgttcagtggcaaagttcttacagttgattttctctgcaatcactct

SEQ ID NO: 204584 - DNA, 480 bp, Homo sapiens
caaggatgggtgtggaggtggcagtggcaatggggagaaggggaactctgtagaatgtatgtgagaaataaaacaacaacaacaacaactgtatattagggcttggtgatggggtcactgtaaggggtgcaacagcaaagtgagggtgagggaggcttcctgagtattctccagtattaggacgcgaatactttagtcatcctcttcatccatatcttctatttatacctgggcaaatagtcccagagagaaaggagaaaagggtttgggagctacaaaaatggggaattcgatgaatgcaaaggcttccatgtgtggatatgaccctgaaatgacaggcagaaggtgagtagttgactagttaaagataacagtttgtgcaaaggtcctggggcagggttggtgggggagagcttgaaacactcaggactgcctttcacatagtagatgctcaataaacaatggctgcaggaatgaata

SEQ ID NO: 204585 - DNA, 226 bp, Homo sapiens
tcaaaaggtgcaatgtcagccttaggaggcttaggaatctttccagatgagggtttaagaaatgaagctccgtttttctggtgagaaaattcctaaaattagatctagttttcacaaaactcctcttaacagaacagaatctctaagatgtgtgttctgaactaaatagctcatcttgcccttcattattgcagccctagcagcactccacctcctatgataaacg

SEQ ID NO: 204586 - DNA, 592 bp, Homo sapiens
agatgtgacctgtttagccacggtgaactggaaatcctctcaccagcacaacaccttccagtagatgagaaagaagataaacaaggatataatctcattgaatctatcagtggaaaccaagattattcttactctcatttgcttctttgatttgtttttaataggcaaactcctagtctgtctgaaggcagcaactttcagactgcaaggtgattatagattgttttttgtttataaaaatgctttcacaatgggcacactagaccaacagtgggaagtctttttcctttagggttcctgatcctcaaaatttgtgagattaagaaacattataggcggggcgcagtggctcacgcctgtaatcccagcactttgggaggccgaggagggcggatcacgaggtcaggagatcgagaccatcctggctaacatggtgaaaccccgtctctactaaaaatacaaaaaaattagccaggcgtggtggcaggcgcctgtagtcccagctactcaggaggctgaggcaggagaatcacttggactcgggaggcagagcttgcagtgagctgagattgcgccactgcactctagcctg

SEQ ID NO: 204587 - DNA, 723 bp, Homo sapiens
gagacttacaaattatggccttaaaccaacagctacggagattacattcatataaattgagaatattagggaggctgtgggagtaaagaaaaggggatcctttgaatagtcttaggagaaaatttatccatataaaaattagaaaagctctatacccttatctatccaactggtaaagtctgttttaaatatattctttgaatatagaatcatgctctcaagattaaaacatattatgacagtatagccagaaagcctgggtgtgagagggaggtctctgctcctgtgtaataggggcaggatgtcaggtgggggcagctcagctcatcctgcacatccttccccgcctctgacctctgatgccactatgttgaggactgcctgttcctggttattttgggttttccagtttttggtacacacatgcatctcacaatgtcctaggggtattcactggaagacaaagaatagtattaggggagaagattttagagatggacagaaatggcttctaacaaggtcatcatctgatatctcactaatctaaaatgcagtgctgaacctataccatctgaaaactgacggcatgctgtgtttatgctgtgtttaaagatccttatgttttacttattttagtgcatcacagtctaagtatgttatcacttttgtctgaactaagccagttggaaagtaaaagagaagaacatttgatagaaagaaggc

SEQ ID NO: 204588 - DNA, 392 bp, Homo sapiens
ttttggacggagtctcgctctgttgcctaggctggagtgcagtggcgcggtctcggctcactgcaacctccgcctcctgggttcaagcgattctcctgcctcagcctccggagtagttgggactacaggcgctcgccaccacgctcagctaatttttgtatttttagtagagacggagtttctactaaacatgttggtcaggctggtctcgaactcctgacctcgtgatccacctacctcggcctcccaaagtgctgagattacaggcttgagccaccgcggccggcttacacgtgcccattcttacagcatcctgtatcccttggatgtgcaaacaatagttatgaagagtccatgactcaggtgcatagctacaatccttcccttaaatg

SEQ ID NO: 204589 - DNA, 611 bp, Homo sapiens
tataagataggtactactaatattcacatttcatagatgagaacgctgaggcatgcagtattagacagccgtgagtgtggagacagattcacacggagcccactgagagtctggccttttatgaggaagcttcctccctctcttcaacaagaagtccgggtctgcatcgccctgctgaggatgctactatgcaaacgcagggagtctacagattacaagtgtaataacataatggaatattttatataaaatcttgaaacagacagatttcacatcaggaactgttagcatgatgtcatgtgattctaatgcctattaaattttaaagatcaatcaataaattataaataaacaaatagtgacctacaaatgtctaagtgaaggtgggggctccggggagggggagagaatttgaaaagtctgctcgaccccttggcagcgattccaaggctaagggaagctccctctcaggtgcctgacagcaggagcagccggattttggaaagggaggaggccgggacgcatgcagcttggtgggggctgtgtccgaggtccgcagggagaagctgagcgacagccccagcagggacctactgctggcgcccactccc

SEQ ID NO: 204590 - DNA, 612 bp, Homo sapiens
gtgagttatggtggtgccactgcaatccagcctgggcaacagagtgagaccccatctcaaaaaataaacccacacccaaagtgttggtttacagaggctttccaatgcaataggaagcttctggaaactttagggaaagaggaggattaagcaatggagtctagagaaccctcagtggcttgccactgcctttcatttccagtctagttcccctgggaggcagacaggccgagccctctgacattgctgctggaggctgtctctcctggcaaaggcccagggaaactatcctgctgaggcccatctggagctggcagggagctgacattcacggccacatcttagtcataactcctcccctcccctgacacagccacttcctctttctgctgagaaaagaagttgaatgaaggacaagctctcagaaagttgcaacccctaagaacttgagtacaaggaagagacggatgtttattgcaagaaccgttccccggtgtctcctggctcatagagcagctccaacaacacgtgcttggatgccaagtgtgccatggagaccaatccttgctataatcctgatggaaagaacttccccatctgaaaagaggatgg

SEQ ID NO: 204591 - DNA, 291 bp, Homo sapiens
agggcccctcgctggatgtttcagccactccctcacaggttctcgtgtctgcttggtacagttgagatctgcaagagctgattcatcggcctgattgagattcctttgtaaaaccagatattcaagaatactagtggcaagaatgctttggtgagcgtaagatagcggctcccactggatcacatggctggtcggtgtcagggagatcactgtgggaggtagcaggagtcagtctttaaaaaaattattgggccgggcatggtggctcacacctgtaatctcagcactttg

SEQ ID NO: 204592 - DNA, 389 bp, Homo sapiens
taactggcggtgttaagtgaaacacactctgtcgccgcaaccaaggcctatagcttgcaccctctgaggcagtgacccaagctgtacctgtacatctttcagccaaggtcggagcaggagctggggctgctgggatgcaggcagcagtgtcctgaggctacacacagcagcagggccatggggctggcccaggaaaccattcttctctcctaggtcccaaggcccgtgacagcaagggctgctgcaaacatctctgaaatgcctccaagccttttccccacaattgtcttggctattagcactggcctccactttatgcaaatttctggagacttcatgaattttccccctgaaaatcagcttttctctttgaccatctggccaggctg

SEQ ID NO: 204593 - DNA, 351 bp, Homo sapiens
cagcaagacaaaactgactcatatacatgatacaaaaataatttcctctgactttccatcaaaaataatagaggccagagggcacagggatggcgtatttgaagtactgaaagaaaactctgtcaatcaagaattctatatcccaggtagggccgggcacagtggctcacgcctgtaatcccagtactttgggaggccaaggcgtgtggatcacctgaggccaggagtttgagaccagcctgaactacatgacgaaaccctgtctctactaaaaagacaaaattagccgggcgtggtggtgcacacctgtagtcccaactacttgggaggctgaggcaggagaattgcttg

SEQ ID NO: 204594 - DNA, 527 bp, Homo sapiens
catacattcttacatgaaatccttaccatcagagtattgtttaatgtcttctcattttatgataagcttttattcttcagtattaaattggtctatataatcatttcaggtcagatatttgagcaacatcattacagagaaactttgattttccacaattttcaaaatagagcctggttccagagctcacagagaatgagggttcctaggagttcagccctgagttgctaatttctattttgacattaaacctgggaaatgctttttagactgtcttgagaagatttcgaggaaggagaagaaagagaattcaatcttttattaagccgttaagctggtttgtgaattctaaacatgtggtaggaaaggaatgaagaaagttagtgcttctgaccttcttatccctaaaaatagttattatgtgaataaaaagtttaccatcctgaaaataaatatttcaaagggaagaaaatgtcagaagatttcgagactatgaaaattagttatgtgaatactaacattagaac

SEQ ID NO: 204595 - DNA, 412 bp, Homo sapiens
agtgtggaagagttaagcactagtaatagatgatgaacgaatacttcttaatgtaaggaaaatataaaataggactggaatgctcgtatcagtgagctttagccaggacaaaactccagatctcactggatgtaaattcaaaaagaggtcacaaccacttcctttcctagctctcactctccactccttctcataggtttaaaatcatatcctaggaaggattcattgtcacttgaatattttaaactgatagttcccattttaaaaataaagagggctttcattgtcaagagaattcaaaaataaaaactcaagggtgaaaacgaatctgcatgttaatcagacagaggttttgaggagtgcacaatatgaataaagcacaaacaaagagatgtgcttccaaagtactgtg

SEQ ID NO: 204596 - DNA, 517 bp, Homo sapiens
acccctacccttccgccacctctggtgtgctctccaacctgggatgagaagctgtctgtctagccccaagcccatggaatctgatcaaacaaggatggaaaacgctgccagggaaaggagactcacaacgacacttggcagctcacctcttacatgtggaatgcgtttctgggtttgagcatgctacttcaaacctcagtctctagaaatagatcccaaaataaaccaaccctaagcttgctcccacaggcagacctagtctgaccaaaaaatcagaaggccctgaagttgctgtggtggaccagtgtgggcatcaggcagtggagttcagtcccccaggagccccccacactaaagggctcgctcaaaaggcatcccatctaacatcatgcactgcaaagactgagtgatgcttcctctgctccctacaagttccactggccagaagagaggatatctcccttgaggtatccaggcaggatataagtataactaagcacacactcaacttcgaaac

SEQ ID NO: 204597 - DNA, 502 bp, Homo sapiens
caacacttgtaaatttgtgaaaatgaattttatctttccttaaaaaagaaatgttttaatccatcacatttttcttccctaccctttagtttttgataaatgataaaaatgagccagttatcaaagaagaactagtttttacttcaaaagaaaaataaacataaaaaataagttgccggttcctaacaggaaaaaaattagtaattgtgctgagggaaactgcttacatagacattgcagatcaaatatttggagttaaaatgttagtctacatagatggatgattgtaactttactgccattaaaaagatttcagattgcattcatgcttctgtgtacacataatgaaaaatggacaaataatgaagatctctccttcagtctgctctgtttaattctgctgtctgctcttctctaatgctgcatccctaattgtacacagtttagtgatatctaggagtataaagttgtcacccatcaataaaaatcacaaagctggttt

SEQ ID NO: 204598 - DNA, 405 bp, Homo sapiens
gaaaacaaaagctgccagacttcagttttcatttaattggtcagacctatacaacatatctagcttctccctaactgcagggaaggctctgaaaatcagtgtttaactttttcattgtggctgcttcaggtgagaaggagactgggaatataactcttgtgtcacctagccagtgggttctgctgctgtgcctgagctcccaccactattaagtggcaaagctggaattctaactcagatgtctcttcctccaaagtcctaattctccagttctgcctctcaaagaataaaggctcccgtattataaagatttgaatgaacattatccagcatctacagataggtacagtttttttcttgaaatttttcccttttcaaaataaaaaattttatttacctttttag

SEQ ID NO: 204599 - DNA, 211 bp, Homo sapiens
ataacaaatgacagggcaagtgatttctaacttagttgagttttgcaacagtacctgtgttgttatttcagaaaatattatttctctctttttaactactctttttttttattttagacagagtcgcttgaacccaggaggtggaggttgcagtgagccgagattgtgcccctgcactccaacctgggtgacggagtgagattccatttga

SEQ ID NO: 204600 - DNA, 789 bp, Homo sapiens
attgttcatatgttaggcatgactatggcattatgggtatatgtgtatgagtccttaagtgttagagattcatactgaggtatttaaggctgaaatgttatgcctgtgatttacttttaaatacttaaaaacaaaaggtgggagggatagatgaaacaagattagcaaaatgttggtaaatgtttaatctggatcattaggtacacagggttcattgtgccgttcttactatctttacatatattttaaattttccataataaagttttttaaagtagaaaatcaaaaaaaaaaaaaaaaaaaaaaaaaaaaaaaaaaaaaaaaaaaaaaaaaagacaaaagaaaagaaagaggagaagaagaaaagaaaataaaagagacggagtgcagagacaggagcaagacaccaaaactccatagcacagacgacgacgggctcacccacagcaacgcacgaccgcaccattggccagggccgaaggctgagtgcatccagagggcgcacgcaggaccagcacagcagcgcccccacagacgccaccacctctatcacaagacagacggaggaaccatagcgcgggccgaaccagagctcgcatacatctttcgcccaaacgagcacgtacgccacaagcacgcaaggcggcggatagatccagaccaacacagaccgcacaacgcgcgtcgcgtgacacaaacttatacaattgacccgaggcaggcagatgcgcgcacgatggaacacggaacaatgatcaggtaacaaacgcggaaattgaaacaccgagc

SEQ ID NO: 204601 - DNA, 303 bp, Homo sapiens
tgtatctccaacttagacctccctgctgacctccagactcatacgaccaactacccacttgccattaccacctggatgtccagtaagacatctcaaccttaacatgtccaaaatggaattcccatctctccctcaaaagctgctcatctcagctaatggcaactctcattgttctttttacttggaccgaaaaacctggggtcatcccgaatcctctttcactttttttttttaatttaatttttttattttttagagacagtgtcttagcctgttgcctagactggagtgcagtggcacaat

SEQ ID NO: 204602 - DNA, 543 bp, Homo sapiens
tacaagatgaccacctactcctagactttcaaagactttacagaaattttggtataacttttaaattcatcccacccccagtaggatgatctgactatctacatacagcagaaaggtaaggctggtactactgtgttttgagaacatgtaggaaagtaagatggggatgtgagataatgcctttctaggagttattttcttggcagtatgatactttacaatatgatatacaacagtaccactgcttaaaccacacacgtgcataatgaaaattcaactggcgactttgacttgtgctgtaatggctgtgacactaacctaaacaacaacaacaaccagtctttagtcaatatccacccttcctcattgcactcaccatcacacgcactgagtccggtcagaagggccttgtttacagagtatcatctttggtcatgtcacatgagtgtgagcacatagcgcgtcctcactccaacctggaacatgtagtggagatcctggagagcagcactcgtgtcacaggtgcctggctggtgacccaag

SEQ ID NO: 204603 - DNA, 465 bp, Homo sapiens
caattgaggacaatcaagaggatgaaagaagattaaaatgaataaaagaacaaccaacctcagctataattcagaagaatacttcaaagtgtaattagtattttatttaaaatttaagaatacgtaatgtttaatcatagttgcatttaaaagggggcatagaactagaaaaggttttgaaaattataaaaattttaattgaagagataaaatttcagcatgaatcaagactcaattgttgattttggaattaagaggaggaactgtctgcatatgtaaatcaaaagagaaaataatctggaaaaacttgagggaaaattaaagaagcatggaaaatatatcacagtttttcacatccataagtatgagttctcagagcaagagatttaggaaccatgggaaggatagaataatgaaagaaataattgaagaaaatttcctgagctgtagtaactgtaatgaatt

SEQ ID NO: 204604 - DNA, 305 bp, Homo sapiens
ctggagcttctagtggaccagatactcttgagagtgcttgacgtggtttatctcatcaagccctcacaaccacttacgttacaggcatgatcatcatctctgttttacaggtaagaaacatagcacagagaggtcaagcaacttgcccaaggtcacacagccaggatgagcagtgctgggattccagcccaggtgtcccagggctctaactcccttgggatagcctgtctttccctaaactgcaattagacagtggcctcagcccaatgtgttgcgaggaatgagggctctgcatggactttttg

SEQ ID NO: 204605 - DNA, 209 bp, Homo sapiens
cttcgcaaatataactatccacgtaattatcaccaagataaatgacattttcatcacccgcaaaatgcccccagtcattcctactttctgccactatagataagtttcgtcttttctaggatttcacctaagtggaatcatacagtatattgtgctttgtttggcttttttttttttttttttttttttactcagcataattgtattga

SEQ ID NO: 204606 - DNA, 146 bp, Homo sapiens
agcgcccccagcccaccattcttttccctcaacaggaggcaaatgagaacttctctgggatttttatatttgcagtttctgtcctataccctgggtcgtcaaagagtgcaaagtgaacacatatgaggtgggggaagcttgggagc

SEQ ID NO: 204607 - DNA, 668 bp, Homo sapiens
ccaggcatggtggttcacacctgtaatctgagcactttgagagacccaagcgggtggatcacctaaggtcaggagtttaaaaccagcctggccaagatggtgaaaccccatctctaataaaaatacaaaaattagccaggcatgatggcggtcacctgtaatctgagctactaaggaggctgaggcatgagaatcaattgaacctaggaggtggaggttgcactgagctgagatggtgccactgcacttcagcctgggtgacagagcaagactccacctcaaaaaagaaaaaaaacaagaaaaaagtggtagtcagtatgtattaagatttagctttgcaagataaaaacattctagcaatatgttgcatgacaatgtcaagataattagtgtgacttaactgaatatttaaaaatattttgtggtaaatttgttatttttttgacaagtaaaaataataatacccaaaagagatacagagttatgggagttttaaattatattcaaatccaaaagtgtttctcccacacaaaaatcatatagattcataaataggatgttgaaattacaagaattttataactactcatctacaaaggattagaaaaccattcacaacaaacctatacaacaaatatacaaaaaacaaacaaaaaaaaaccaagggt

SEQ ID NO: 204608 - DNA, 664 bp, Homo sapiens
tactggtcaccagcattaatttcccctcataactacaagaactcaatcaacagaagctactgtgttgaacttgacaaagaaccaaaaaagaactgagcacaatgtattactataaaccactgcttcaagagaaaataaatagctggtgctcaagatctagtataaaatatcattaaatgtccctaaaagtgatcaacagcaatactaaaccagtatgaactacagcctaatagcagcaaaaagatatgcctatttcatacttcgggtcatggctgagggctgggagggataacaaatttttcatttaaaaagattatttggtagtaaataagcataatttagagtctttattattcattaaaagcttatatagaggccaagcgcagtggctcacgcctgcaatcccaagactttgggaagccaaggcaggtggatcacatgaggtcaggagttcgagaccagcctggccaacatggcgaaaccccgtctccactaaaaatacaaaaattagccgggcagcagtggcgcatgcctgtaatcccagctacttgggaggctgaggtagaagaactgcttgaacccgggaggcgaaggttgcagtgagccaagatcacgccactgcactccagtgtgggcgacagagcaagactccgtctcaaaaaaa

SEQ ID NO: 204609 - DNA, 639 bp, Homo sapiens
ggtatggctgctgccataggtagcaattcctctgatggccctgagcaaagtcagtgaaaaactttccggaaaggactcaccattctagatgccattaagaacattcatgaatcatgggaggaggtcagaatatcagcattaacaagagtttggaaaaagttgaatttcaaccctcatggatgactttgagggattcaagacttcaaagaagaaagtaactgcagatgtggtagaaatagcaagagaactagaattagcagtggagcctgaagatggaactgaattgttgcagtattatgataaaacattaatggatgaggagttgctgttttttatctgtttattaaaaagatttttttaaagacaaagtctcattctgttaggctggagcagaatacagtggcacgatcctagctcactgcagccttgaactccctggctaaagcgatcctcccttctcagccttctaagtagctaggaccacagtcacacaccactgtgcctggctaattttttaaaaaaattatcttttgtacagacagggtcttgctttcttgcccaggctgttttcgaactcctcgcttcaggcgatcctcctgctttggcctcccagagtgctgggaatacaggtgtgagcta

SEQ ID NO: 204610 - DNA, 757 bp, Homo sapiens
ggtctggggaaaggttttatacagaaatctgtactatttcaatcttcagagttagggaagttggctctgaaagcagaatgggaaacacagtaccttagaagatctcatactttccaaaaaaacaaaaaaccattctagttgattaaaagaagtagaacttttcctcacattgatgtctgaagggaatttctccaggaagctttagtagatggtggacaattaagctgaagatgattctaaaacacagttcagttagagcagcttcctaaggcttggggcaaaaccaattgatcttaaattcagagctgatggtggtttgggtcttgaaaaattctcgtgtcagactccgctagagagcatcttttcaatgatgtgttttcacttaagagtttagtaagtgaagggcattttggattgcgctgttgtgacctccagcttaccttccactagggatgcagcttatgggtagaatatgaatcttcagatggcaaaacagcttttatagctaataacctcagaacagaagcaaagagagcacacttagactcttcgctgtgctttcactggcacatcagtaatttccatccttctacaaaggggatgctaatttttctcttaaaaagtccttgctttataaatgaaaaacagtgaccagtgacaaattcaggaattaagtaggttaatttgatagggcagcttctcaggtgctgaccctttaaaaaaaaattcaccctttttttcccgctacaggtgattg

SEQ ID NO: 204611 - DNA, 219 bp, Homo sapiens
tgtccctttgtctgcacagcagacagtcgagatgcactgaaactgtccagatgcgactcctgattttcattccatcctccatctctgggactgttacgatagctgtttccctgaagtttctctttctacccgctccatgtcttcctctgcccgaaatccttctgtagcttcctattaaatagcattcccatggttcatttatttagacaaagggaaaca

SEQ ID NO: 204612 - DNA, 366 bp, Homo sapiens
aagcagttaatacagactcagatcaaatgacaaaccaaatggggtaaaatgttaacatcagacaaatcatatatggatgggcctcggactatttttatatttacaacttcttgtaagcttgaaattgtttccaaataagtttattttaaaactccacaaaccgatcaaggcttggatatataattctgcttcctactatccccaggaaaggaggaacctgaaagaatccaagagaggaaagagaaaaagagcacaaggctgggaagagaaaagcagacaaggaggggaagggggagagggacacggagggaacagaagtccaggcctcagtcaccccaccagacttgagtctgtattaactgcttg

SEQ ID NO: 204613 - DNA, 187 bp, Homo sapiens
aggtaacctcattgtttctgcttttcatgatggtctcatcaaggaaggggtaggaataatcatagcctgttgcaaagatgacagagtcgatagcctcaaacatggtcccatcctcaaacacagctgaggtttccgtgaactccttcacactgggcttgatggacagagtgccacacaggatgcggga

SEQ ID NO: 204614 - DNA, 567 bp, Homo sapiens
attatatattatataaatttgcctccctcaaaaaccacacccccaccaaaaaaaaacccttaagaaataatttttaatgacatagacctcaaaggtcgagctagttttcagttaaagaatgactgagggcacaaaggtggacatttttaccatcctaaaaattggaagatatcactcccagggtggctgtgtgatttcaatgacataacatttttaaagtctagcattccattataagtgctcagtaaatgggaagttgctgctgctcttacaagcttctgactaccatacctggttgaactaactcagttaccacaaggtactctatgcccttacatctaatgacaaatatttgttttgaaaaacgtatactccttaaacacacttgagaaacaggaaccagagacccaagtacattttgttctgaatcaaattccagcatgcacagcaaagtgcatgtagaggggtgagagggtgactagggagactgcttcaatgggagattattctgcagtagtgccttaactgtagaacagtgatgatgataaactcatcctaaatttagga

SEQ ID NO: 204615 - DNA, 508 bp, Homo sapiens
caaacaactccagacgcgctgcctttaagagctgtaacactcactgcgaaggtctgcggcttcactcctgaagtcagagaaaccacgaacccagcagaaggaagaaaatccaggcacaccatctttaagaactgtagcactcaccaccagggtctgtggattcattcttgaagtcagcgagaccaagaacccaccaattccggacacagtttgtctgtgtccccacccaaaatctcatcttgaattgtaataatacctgtgtatcaaggacgggaccaggtggagataattgaatcatgagggcggtttccctcaaactgttctcctgatagtaagtgagctctcacaagatctgacggctttatatggggctttccccttcacccagctctcattttctctcctgccaccctgtgaagaggtgccttctgtcatgattgtaagtttcttgaggcctccccagacatgctgaactgtgagtcaattaaagctttttcctttataaatt

SEQ ID NO: 204616 - DNA, 471 bp, Homo sapiens
tgcgagcagtaaagttgatttaactgttgaggtttagggctaagcatagtggggtatctaatcccagtttgggtcttagctattgtgtgttcagatatgttaaagccactttcgtagtctattttgtgtcaactggagttttttacaactcaggtgagttttagctttattggggagggggtgatctaaaacaccctttacgccggcttctattgacttgggtggagataatggggttttctagatatagtatcatgtcatctgcaaacagacagttttacttcctcttttcctatttgaataccccttatttgtttctcttgcctgattttcttggccagaaccacaaatatcgcgatatttatgttctggccaataagatgtatttggggtttttttatttttgtagttgttgtttgtttgcttggtttttttttcaagacagagtctcactctattgcctaggctgga

SEQ ID NO: 204617 - DNA, 282 bp, Homo sapiens
tgaatgaatgaatgaaatttgtctgagagaaccattcattctaaccaacatttatggagtaactactttgaaaagaaccattctgtctttactatcaagccaagatactcaaggaaggcagcagaagtggaagctccatgtgggcagaggagcctagtcttgagatgtgatttagctggtatttgggtgaaacaaataaaccagcctcaaaataacacaaggggccgggtgcagtggctcacgccctggcggtttttaatcaagtagaaaagctgcattata

SEQ ID NO: 204618 - DNA, 223 bp, Homo sapiens
gagagcgagctctctggtgtctcttcttatgaggatggtaattccaccatgtgggccccaccctcctgaccttgtccaaccctaatcacctcccaaaggccccacctcctaatgccattacaatgggagctggggcttcaacatatgaaattagaggagacagagacacaattcagtccatagtacccagaaactgaagatattcagtgttcatcccctggtg

SEQ ID NO: 204619 - DNA, 707 bp, Homo sapiens
agaattgcttgaaccgaggaggcggaggttgcagtgagcagagatcatgccattgcactacagcctgggcgtcaagagcgaaactccatctcaaaaaaacaaaaaacaaaaaccttcactgtgtctttatgtcctccttgatcagctggaatgcctagtctatagtaagggctcactcaatatcatgttaatgacttctgactatctgacttcatgggggaccttaaagaccctccccccactgcccactgcacctgactgctcgtggtgtcctcatgcagacgctctgttatggccaagcaaatatgctgttgtctcttctctcccactcctacccctttgtgactttcttggcctgtcatatgcccttttcctccctgcctcctggcgttaacaatccctttttgttgtccatacctccaagattgcctccagtattctcaactgcctgcaactaatactcctaggcttgcggtactcgctcgtccttactgacttctgttattcacttggccatcagcatttttgaccttttttgtccttactgacttgtgttattcacttggccatcagcgtcttgtaatatgcaaggcaccatgcctcacctgtcaaatgaagtcaagttccccttcacttactgcattgtacaagtcacttggaaactactctcagctcttgcttgtaaaataaaaacacttctcaattgc

SEQ ID NO: 204620 - DNA, 365 bp, Homo sapiens
ggagaataagcttgattgccaagtatcattcttactgggatgaagaaacagaggtcaaagtacaagactaccaaagcagctctaagttgagggagaaaatctcagaaagaagcatgccacagaagagggagccccaagttctctttgcagttttccaaattgtgtacagacagacagtgcttccagaaagcagcatcaggtactaaagaactaagcagagatttcagcagctgcctggtgctgagttttgcatgtaaatgttgctatgttacagggattgataaatacctcaaattttgtgttgaaactgcagaagagctatggttgaggactaagggatttcccaggactaagggcaataagca

SEQ ID NO: 204621 - DNA, 336 bp, Homo sapiens
aaaatagaactgaaaagtaaaaagctaaaacctagcacagctgcaaggctcaatacacgatgatacattgtattcccacacaccagccacaaaaaaagtagaaattataattataataccaaaaaacatgaaatagggataaatttaacaaaatatgtgcaagaactgtaaatgaagcttcagtgaaagaagttaaagacataaatagagaaatatctcatgttcatggaccgaaaaactcactatcgtaaacacggcaaattttccctaagtactccctccacttgtggccagtagccacataagtcaaaaaccggaaacaaaccaaatgtccat

SEQ ID NO: 204622 - DNA, 529 bp, Homo sapiens
gttttctgttcttgtgttagtttgctgagatggtttccagcttcatccatgtccctgcaaaggacatgaactcatccttttttatggctgcatagtattccatggtgtatatgtgccacattttctttatccagtctatcattaatgggcatttgggttggttcccagtctttgttattgtgaatagtactgcagtaaacatacgtgtgcatgtgtctttatagtagaatgatttataatcctttgggtatatacccagtaatgggattgaacttctggttctagatccttgaggaatcgccacactgtcttccacaatggtttgttctcattctttttccttttaaaataaatactgtctaaattgaagtaatagtgcagcatgattcttacaacaagtaatttgtaaagatgtttgttttatttattccctatgaggaaagcagcaatgcgatcatttatttataactagtgactgtacacatggcgacctttattttatataagttgaagccacaacttttctatt

SEQ ID NO: 204623 - DNA, 432 bp, Homo sapiens
gagatcaatgataaggggccctaaatcaaggtgagcttcccccacctccgtgcacttgcattctgtgtgggcaggaggccctgccctgaaagggggctccgtcctgtcaagagcctatggtttcaagacttaaacatctttgttggaacttgcttggaagaggggcctgtgttgccaccttggaaagaaagtttctctgtcctttcagctgggggtggagggagggctgtggaagggggcttgctggcagttgagttccaccaatgttttctcaagccgacactgagccccattcatcctcctgcccatgtgtggctccggcacccctagacggggccagcccagcagcctgaagtccgcatttagaacttgatcccctcttataacgattaaattttagtaagtaaaataaaaatgcttcaaaagaaaaaa

SEQ ID NO: 204624 - DNA, 556 bp, Homo sapiens
cagccctctggacccacccccagcactctggacgtggggggttactatctccaggtcctcgatcaacactcggacccgagctttccgcctcgctcctcgcggagccgggtgaaagaaaacctggcccgagatgcaggtccgcgctgagccttcatccgccgcaacacgagtctctttcctgccggcccgcgcgacccttcttccctctcctcctctcaaatgaggccaaatgggtgcacgtggcgtagaaattctacagcgcccagagcactgtgaggaaagattcgccttttcctccccgtggctgctggaggctgtgcggacttgccctgagccttctccgccactctcggccgtgacgaggcccttcctccactaacccttgccctcgtcttcccttgggaaaagatgtctacaaaccgtcgatgtaccacgaaaatctcagcgcccacagactggcgttcaagagtcatggacatgagacaagagagtaatggaaaatacaaattcttggccatatttctaaaatcatccagccttttttaaaacttgtatt

SEQ ID NO: 204625 - DNA, 550 bp, Homo sapiens
cctcataagatggactaattttatcattgagcagccctttgcctatagccataggactgaatgcatcatgtaccagaacaggatgcattaatttgttaaactttaacaaattaattgaaatgcagaaatacagaaaaccaaaggaacaaacactgccccttcctcaaagtggaatgcagttttggaatggtatttgattatttgagacagggtttaaaaacatgcctctgtttagctgttagatgaaaatactcccattctcctttattttctggactgaggacactcccctgccacctgtggccaaaccactttggctctgtggggtagcatagttaatcacctcagtcacttctgccctctggcagttgcttggggatgagaaatccatttgcacttttatgactttcttaatactccttagaatttatccctgagcctgaacttccaatatcttcaaacttttccacagtcctgtttgaagaatgatctggttcatgtaatggtgcctcctgggggaaagagaggaggtggagttgagggttggaag

SEQ ID NO: 204626 - DNA, 531 bp, Homo sapiens
agccatgcagctatttcactgaagagtattttaggtaaactaaacaacaagactatccatgaaactcaaaagcagaatgagtggtttcgtgcatggccaatatgattgtggctcccagcaactgcggcacagctactctcccatctggcagtctgatccatcctccttttattatttgcctcccgtctgcatggaagaagtctttttcttctttagaatagatttgaaataaaacctccctattttcacaaaacatctgctgaaagagagagacagagaaagagatggaaattataacatctcatgctctaatgaagtagtaatcatagagggggaagcataatacttcattaccatgtctgtagaggaatggaagagcatattatgcaaataagaaatacaaggcattccttgaaccatagtcatccttcagagaagtggaatgtgtctcaagttctgttttatgaagatatcaacatttttgaaaaatatggagatgaaaaatagcaacataaaaataaatctcagacc

SEQ ID NO: 204627 - DNA, 525 bp, Homo sapiens
ctaatataacctatacttcagaaaagaatatatgcaaatgggccactaagcacatgaaaagatgtttaaaagcactgatcagcaagtaaatgtgaattaaaaccacaatgagataccactatgcacttaccagaatgattaaaatgaaaaagattgacaataccagtgctgataaggatctggaactctcaaatattgttgataggaatgtaaaatggtacaaccacttgaaaaacaggttggcagtttcttaagaagttaaacatacatttaccccatatgatgcagttattctacttctaggtatttccttaaaggaaaaggagatacagtcatgcactgcataataatcttttggtcaacaatggactgaatatatgatggtggtcccataaaattatagtggagctgaaaaagtcacagtaatgtgaataatgcacaattcattattcatgtgtttgtagtgatgctggtataaacgaatctactatactgccatataaaagtatagcatacactatgtac

SEQ ID NO: 204628 - DNA, 744 bp, Homo sapiens
tatcgagccggtaccgttgatgtggcttctgagaggcctaaggagtaactcgtaacctttggacatttttctagacctcaagacttcataaataaagctccaagaatgataccaactctgctgatggaggtggagatgaaacagggagagagaccagaggaatgtgagaggatgttagggacgcacctgggtttgtgggatggatgcctaacattttaaaaaattgttaaaattgatagacaaaaataaaattcattacttgggccagaaggaaattcagtcaggaaaaggggagaaaaagaaaatatcacccttgcttcttggccttttggctgagatcaagtatagtgtttgttcttatcagaaatatggtaaataggaaaaatgaaataaaagcataaataagccctaatataccagtagttaaaataaatgtaaatgaccaaaacacactaatcaaaaagagttaaggtccgtgagcaaatagaaaacctaacaatatataaaattacaaatcatgcaccatgtagtatatgtataatatataactctgtgtgcgtgtgtatgatgattgacagtaccatgaggagaaacaaaataccaaaaagtgtggcttgaaatttgaatgcacccctctcgggaatggacaggtcaggtgtgtgaaaaaggagcgaataactagaagactggaatgccacagctctctacctgggcccagagagagcactagacccaacaggcaaa

SEQ ID NO: 204629 - DNA, 323 bp, Homo sapiens
aagaataatacctaaaatcatgttaatatctataaactagagtttccacttaatacaacagtctgccttgtctattttatatcccagtctactatataattagataacatctgatatggtttagctgtgccccacccaaatctcatcttgaattgtagttcttgaatgtaattgaatcatgggggttccccccatcttgttctcatgatagtgagttagttatcataagatgtgatggtttaaaaaggggctttccccttcactgggctctcattctctctcctgctctcctgtgaagaggtgccttctgtcatgattgtaag

SEQ ID NO: 204630 - DNA, 112 bp, Homo sapiens
gtgaggcaattctgctctcgtattttcctcagagatggatgttcacttggatgtcaaaaaatccagggaaataaaatcttaaggtcactgttttgttcactatttatgtcat

SEQ ID NO: 204631 - DNA, 458 bp, Homo sapiens
actgggcaacagggcaaggctctgtctccaaaaaaatgataaaaaataataatttctttaaaaaaagcacccatgcttatttatttatgtgtttctttggctgttctcgtgctacaatggcagagctgagtagctgcaataaaacatacagctctcaaagccaaaaatatttactctctgtccctctgcagagaatttgcgaaccacggtctagaatataaatatagcaactatttagaataaaagactaatacatgaatgttttcttgtcttaaaccatggttcacttgacggatttttagatagttttacacaagtaattgtctaaatttgcaaacattaaaaactctgtttaagggaactccttccgtactcccatcctcatatcctacaatttcaattacctgagaagctacaaataaaatcaccttaaagattgctgcttttaaattctaacc

SEQ ID NO: 204632 - DNA, 443 bp, Homo sapiens
cctgtcacctccactgaagaacaacttcagcttaatgccccgttgtgttcaaaacagtaatgtctctgctgagacatccactccattcctgagagatgagatagtctccatatctctctgacctgtgcatggctgcagacactgaccctcggctcttgttctgggggcttacagggtttccgtgaagctctaaaggcttttgaaatttatcacacatacctggggatactgtcaaacaattatctgaaacagcagagtaatgtagtttagcacatgggatctagagtctattcctggatttaaacactagctctgtcatttaatcttgctgtgccagttttgttatttgtaaaatgggttattctggtaattaacctcagaaagatgttctgcagattaaataacataacatatgcaaagtactgagaacagtgtctagagca

SEQ ID NO: 204633 - DNA, 430 bp, Homo sapiens
ccaaaccctcgggtctctggaacactcgggatggagcagccccaaagggccaatgtctcatcaccaccagctctcaggaagtccttctcactcagctaagagccagggcacgctgctgggaggtttaggttttaatttaaactgtgaggttatcagggtcaaaattaccttgattccacagaactcctcgcaggtgagggccgcaaagaggatggattccaggacgtatgtttgttttaacttgatcggtaacttggctgggtgagctattcaagtcacttgtcccacaattaaaaataacccaaatagcggccaggtgcggtggcttacacctgtaatcccagcactttgcgaggttaaggcaggcagatcacctgaggccagaagttcaagaccagcttggccaacatagcgaaaccccatctctact

SEQ ID NO: 204634 - DNA, 473 bp, Homo sapiens
ccgagtatgtcaattggcaatatcagtccacatatgagctttcaaatgctctctttctaagcccaggcagctgagtgatttgtgtgatatttgatttttagtttttcagcagcccgttttgatttagtgctttctgcatttttatagacatcagcaatcctgtagcaggtcctgtttggctgatacattttacaagttgataatagtaaagggtgtgtagagatagaacctgatatagatgtgttcttttgaagcatcatcattactgagagataagtctacatagaaacaaaacacaaaacagctagcagctatattttaaatttttgattcaaccaaaaaattagatatattgtactaccttgatgtttatccccttttctacatatttgtgatgttttgaatattgaataggaattcatgaagatatttccaaataaaaacaaaaatgatattggaaatttttataaaaa

SEQ ID NO: 204635 - DNA, 382 bp, Homo sapiens
ttctctctcttatcacatccttcttttcctttgacccgctctactaaacgactggtcatttgctcacactaagatgtctccctctcccagaaatctctttttcctcccaggcttttcattgacattggcctgcagtctcttgccacctggcctccacctcacaactcaaatataccatcagggggcatctgggctcccagaagcccacagcccctactggaacagcctttggaaatcttctaatgctggaagggtccttctcctctgatcactgtttgccatctgctgctgcagaaagggtttgagattttgttgcagtttttgctttgcttttctcccaatatcatgaatgagttgactcttagctttcctggtgtatgtg

SEQ ID NO: 204636 - DNA, 1622 bp, Homo sapiens
tcttccttctctgggcttgtcatgtgggggtctcgtgcgcttgcccctcgtggcctggcttgtggaggatcccgggatgggccttcctgcccagggcgggctgcacttcccctcccacccttctcgtcacctgatgaggagtgtgtgccttgccccatagcccatggtccctggtccccgatagagccttcaagccagggggagccgtccttgcctcactgggcgattccaagggctcactttgggtagggaaggtgatgaagcacgaaggccagagctggagtccagaggccctaagaacccccgtgcctgtccagccaccgggctctgttgggctctcacctctgcttccccagcgagtccaacagtggtcagtgggcatgaagcagatggcagtgctgggggctcaggcagggtacagtaagtccacagctgagaagggctgggcactgacaccccctaagtagctgaggctgccactttactttcctggggtcagggagggtaacaagactgtccgccctaatagaaggcaaaaatgcacccgttatgtgatagacaggacgtgggaggagccccaggaggagcagggctgggctgtcccgcccagtcccggcagggacttctctgcttggcctggggcctctgcctggccgggtcacctttgtaatctgccaagcctgctgtgaaagccagggctgctgggactggagtggcttggcctgcactcctgaggctctgcacccaggcacatcaagcctgtataggcggccaggggagaaatagacccatccagccgggccacacattctgatggcagagcagctggggacgtagggatcgcagtttccggcctgtgcccgtaggacaccctggccacctgactcccctccctgccccatgcctgtgtctgctggtcttgctcttgtctccgtgaggtgccacgctcccctcaccttatggctcctcccaagccctgcccatcttgcccattcctagtgtgagctgcctggggtgaaccactgggcctgctgcctccaggtacccgccgggcaccaggttgcccttgcctgcgccctgccagcttgggctttgtgtgtgtctgttgcagtgtgctcttgcctcccctccctttggtgtattcatttggtttcttttctttgaatagcatagcatatcgtcgggtcattcgtgtctatcagtatgaagttggggatgatctgtctggaaggtttttctccttatttctcttcttacctcactgtggctttactgatgcactcttgacatccccaggcggtccaccctgactaacctgccgccctcggctgcttgggaaggaggggtctgtcctcccactgcaccggcacccagcctcctgcccccaggtcctggggggcattttccccggggggacatggcgtgactgtgagtctgacctgctggggtaggaggaagcctggtgccttgccttgctagagcactttgaacctggggagattgcagagctaaccctggctcgccgggttttaaaagggtaggttggggtgaatgtgggtacaggggagcctgggctaaaaccccaccaaggccacacgcaccgtgtgattcgtccctgcacg

SEQ ID NO: 204637 - DNA, 423 bp, Homo sapiens
ttaaagatcatgtgcatttcacaaagaattacaataaatgacagctaacggaagaccaattagagtcttaaattactgttagtcagtcagtaggaaaatatgattcagttcctctgtgttgtaaggggaggtcacgctaccctaaaatgtcacaaaacacaaatagttttatttcttccaaaagtacaagtaatcctggtatccagataaagaagttttaatttgtttttattggtttaccttgcctcagagttctgagtgttggattttcactgtgacaacaaaaataaaatatttcctgcttattgtaaagcggtcaaagagctgaaaagcaataccatcttttagaatgcatttcttacccttctttgatcaacattaagatgcgttgccactctggggtatgattctggtttgatcgag

SEQ ID NO: 204638 - DNA, 674 bp, Homo sapiens
atcacttcataaagaacagttctttgagaaaagaataaaggaatgtattcatttccagaaaaagagggttggggaaagtttgccatgtaggttagtcagaagaaagcaattctattatgcataaaaataaccttaaatatgtaagagagtatctcctctacttaaaagttattatagtagtcacaggcatacagaccacaggaattctatggtcttaacatattttaaaattacatttattttaatgttcttaaagtttatgaagaggagtttaaagcaattcccataattaaatatttactcggcaactaaaaactatttaacacttgtggttaattatacacataaacaaatggcgacagagtagcctcactaccacaattacttcatggttacacctttgctttctaataataggggctccagttgctaaatatatttgtttacttacagtttaagttgagctgattgttgaattctgttattgttcctgaattcaatgagtatataatttgtagagatgttgaatagtttggatcttagtttttaaggctgaaaaatctggctggatttagtttttaaaaatttgcatcatcaagaatattgcagttaatgttcctttttttttttttttaaagacagagtctcactctgtcacccaggctggagtgtac

SEQ ID NO: 204639 - DNA, 398 bp, Homo sapiens
gggttgcatcaggggaattggcagacctgtgtgagcgttagaccctgccgggcgggagagcgggcccggatagcaggaaggaacgcgcctggaaggtgaaaatggggtgcgagaaggtgttgccttgttgtggtctagggctttgttttccctgagcccgcctttatctcactggtggagagaactcccacatatggaagcctggggaatgggatgcttcatttagttgatgggtggtatccctgcattctagcatctctgaactgcttaggtaccagcaggaataactgctatatcggagtccagccctggcattccctttcccgtgaaataggatagtattctggcagtattactccctagtcccaatcacccccaggtcatcatcgcctttaaat

SEQ ID NO: 204640 - DNA, 399 bp, Homo sapiens
atgttgtaattcagtctgagtccgaaggccagagaaactggggccattggtgtaatcttggagtctgaaagctcaatgaagtcacgagaagatggatgtcccagccccaagagggagagaatttgcccttctctttttattctattggaacccttaacagattggatgatgcctgtccatattgatgagggtggttcttctgtactcagtttactgcttcaaatgctagtctcttctgaaaattctctcacagacccacccagaaatgttttaccagctatctggctatcccttaacccagtcaagttgacacataaaattaaccatcacagaatgttatttggattcagattttaatcaacaaagtgtgaaaaaataataagattattggagaaaatt

SEQ ID NO: 204641 - DNA, 412 bp, Homo sapiens
gcagctgggagatggaggttgccgtgagctgagctcacaccattacactctagcctgggcaacagagtgaaagtgagactccgtctcaaaaaaaaaaaaaaaaaatcagtgttgaaatgtgacatttttttccctgtagtggctgtcaaataattcatatttaaaattatttttgctttctcccattttgaagatggagttttatgttataattgttgatattacaacagacatcttacaaatgctaaatctaaatgccaaatatatgatattattgtattcaggagaccaaatctatcaataccactttgtggttaatttatttttaaaaataaacactcttacctcagcaatttaatatgagattaatgataataaattttataggcctttaaaaattagtaggctctgt

SEQ ID NO: 204642 - DNA, 638 bp, Homo sapiens
caaaactctaattagtagctaagccaatattaggacctatctcttctgtctgtagttttgtagggatgctctttccactacacaggggaaagtttacctttgaaaaacatcccaatacaaagaaccttccatgtttctttcaaatatgcttagaagtggctgtatccaaaaactatcatcaggatgaacagaaaacctacagaatgtgagaaaatatttgcaatctatccatctgaaaaatgactaatatccagagtctggaaggaacttaagcatatttacaaaaaaaaactaaccccattaaaaagtgggcaaaggacatgaacagatacttctcaaaagaagacatacatgggccaagaaataggaaaaaaagctcctggggcagtggctcatgcctgtaatcccagcactttggggggctaaggcaggcggattacttcaggtcaggagttcaagaccagcctggccaacacagtgaaacccgatctttacaaaaatacaaaaatttgctaggcatggtggcatgcacctgtaatctcagcttcttggaaggctgaggcaggagaatcacttgaacccaggaggtggaggttgcactgagctgaggtcacaccactgcactccagcctgggcag

SEQ ID NO: 204643 - DNA, 381 bp, Homo sapiens
tttctcatgataagagaccaaccactgtgaactggctctggcctgtttacagaaatggtgcattgtgtgccttcgtgttactgcttcaccttttcatgtatagggcctaactgtaatacatttaaatgttaagcctccaccccaaggtgtaacatgcatgcatcaggactgccttcatgaatattcatgaatccacctgtagcctgttgaatatgtatacttggccaacccattcaatttaaatttctgtcttactcttccttccctagaagtgcctgcctccggtctttgctggaggttacgctttctagcctgcagaatgaccaccttgtaggctgtaaccctttgtaagaaataaagtatcctttccaaatgcatgaa

SEQ ID NO: 204644 - DNA, 268 bp, Homo sapiens
tgcctgtggagctcagtcaggggacctgccttctataggtatatcagctctgggcgaaagggacagaactaagggtttgaatttgtagaaatggattctagatcttaaggcatggtgagcccaatcagatgcagcctttctgtgggtcttgttcaggaaacctgagggcctccctgaaggacacctctattacgaagctctttacctgcagcacactgcaaacaatcattcagggaataatgacataaccacataccctcatcttcaa

SEQ ID NO: 204645 - DNA, 500 bp, Homo sapiens
tttatttcaaggcaaaagctacgcaaaaaaggggagagagtggcaacacaaaattataaaataaaaggagatatagcaacaaatagaggtggccttttttgaaaaagaaaactgctacacatatgccaatgtgttccaaagtgtgcttccacagaaagttaatacatgctccactaaaaaaagcactcagtgtctaagtttgggaaatgctggactaaacaaagtgagcaagctatttctagcactctaggactttacctagtctttaacatgcttataagtgtattgttaatctccaaaagatatatcatttgaccacagaatcatttcatagaatatactcttcaaaaatatttcaatatggaaaaatgcacaaaatgtatttacaaagctagcctaacaccaatgtcaaaaaatttctaacaagtagcacaacaacaaaaaatcaatgcaaaactaccatagtagcctgtagaggctaattaaacaattatgtataa

SEQ ID NO: 204646 - DNA, 441 bp, Homo sapiens
ttcttaagtactgaaaacacatcctttttgaaaactctaaatgctgaaacagtggttatgagcatggacttgggaatccaatgcctgagtttgaatcctggatcaagtaactacctgcaaactagttactttacctccgtgggaagttactttgcttctctttgtcacagtcctcacttgtgaaatgaccataattgtaatgcgtgtttgtagggttgtaaagattaaatgaatgaatccttgtaaagtgcttggaacaatccccagcacagcccatgcacttattgttaccattgtgatttttaaattatttttcaattatgttgagaaagagttaattaagggctatttgaaactaaatatgattatggtgggtaataaaactggataatatcatttttcataaactaaaaacatcagtaaaagtgagatatgactata

SEQ ID NO: 204647 - DNA, 254 bp, Homo sapiens
ctcccagaagcatttaaaaatccacaaaccatggataacttcctgtgaaatggcttagtgggcaaaaattcagaataaggggagtgtgagtccatgtctcctttccagagatgaagaagtttctcttttctgtgcatgaagaagacaatgggatatggatgacactaaacctttgaaagttcctgctaacctccaagtggaaggaaagggcccacggtgatcaataaatgtgtttgctattttttgggtgaaag

SEQ ID NO: 204648 - DNA, 647 bp, Homo sapiens
ttttattgaattgtcagataatcatttcaactttatattgcctattgatcccttaattcatattttcttatttattcattcattgaattatttttcaaaagtaaatgtctgaaatatagcaaacttatgtttactatgttttagaaactgtgataggggttaataatagaacaaagaataaaacagatatggtgttccccataacaaaggctagattctgcctgtagagagacagtaaagaagtgatgacataaaaatcataaaattataattgttagaaatgtcataatgaaagcaatcgttgtatgctgttaaactatattatagggaaaaccaaatgtaaattaagtctggtaaattgggcagttttgagtcaaaactgtgatgggtgatgagacatttctgagatgaaggatcttagtcaatctagtgtagtataacagagaataaaattattaaaatattgggtaaaaagaattagggtagtgttaagtgtatgatcaggtggacagtcatatgaagaatacctgactgaaatattagattgatgcaaaagtaattgcagtttttgccatcaaaagagaaagaaatattaatagattccttgcagtcatcctaaatgaagagcagaatttagttatgtgaag

SEQ ID NO: 204649 - DNA, 334 bp, Homo sapiens
tacacctacaccatctacacctacaccatctgcacctatatccactgcacctacaccttctgcacctgcatcctctgcacctacaccatctgcacctacatccactgcacctataccctctgcacctacacaatctgcacctagatccactgcacctacaccctctgcacctacaccatctgcacctacatccactgcacctacaccttctgcacctacatcatctgcacctacatccactgcacctccaccttctgcacctacatccactgcacctacatcctctgcacctacaccatctgcacctacaccatctgcacctacatccactgca

SEQ ID NO: 204650 - DNA, 401 bp, Homo sapiens
tcagcctagaaatcacctttgaatcctctctgtgcttcagacttcacagagctctacccgcatgatatggtcagaatcatccacaactttccatctccactgctactgccctggtcccagtaaccttcacagcctgcctgaatctctgatatcccccaatcggtctttttgcttctcttgccaccctaccatctactctccatatggcagccagagccaccttttcaaaatatcaagagaccatgcataaaacactacaatggtttcccacacgtttggaataaaatggtcaccatatctcacttaatcttgcccctgcccacctctccaacctcatctccccttcactttctacctgacaatcacagcggcctcctcattcccactgcagggcttctccg

SEQ ID NO: 204651 - DNA, 3677 bp, Homo sapiens
tgaaaagccagtaaagaggccataatacaggccagaataatagtggtttggggcagggtggtggcctcgcaggcatcacgcatgctcagaggtgcaagtcagctccagggggactcacatgcacataggcccacacacacacgtggacaggcaggcgggtgctctcacacccacagcagcacagaaacaaggcacactcaggcagacccacccgtccacaccctctgagtcactccaggactgggaggaagatgtgtgagttaaggcctgaacaaagcacatctttccaccacaaggccctggcaactagtgtggctgggggtggctgggcttccccaggcccagcacagggagcagggagttttctctagatattccctggatctagtgtcctcccaggagtcagatcataaggctccatgcaccccccacctgaactggtctcccctcttcaccacccagcagctgtgagaccttgagctggttatttctcctctctgagcctcagtttccctgctgtagaatgggactcataactgcaacttcacagtatagtagtgaggcatccacaaagtaaacgtttcaagaatctggtctagggcaggagtccagcggagaagggaagaggaggtggtggagagcacaggctctggtacccaacagcctggccttgaatccacctcttgttttaagtgagtgacttgacctctctaaatttcacagtaatgagtagccagcatttatggggcacttactatgtactacttgctttgcaatcgttcaatgatcagtttcatctgtaagtgaggagcactgtaataactaccttatggggtcattctaagagattaaatgaggttctgctcataaagtgtttaacttcatgcctgactctgagtaaacactcaataaatggtgattgttattatcagccaaagcatatttgcttccttccagcatactagctctgttgcctttggttaagttatataaccttgctgtgcctcagtttcctatctgcagcttgggaggaataacagttctgaactcagagggtcgttgtgagtattgaacaagtcagaactcagaacactgcctggtacatagtaaatgctcaataaagtcacctattcattcatacgatggtttttcctctaattctcgcaggtaggcacggcccccaccaggcgccatggactggaagacactccaggccctactgagcggtgtgaacaagtactccacagcgttcgggcgcatctggctgtccgtggtgttcgtcttccgggtgctggtatacgtggtggctgcagagcgcgtgtggggggatgagcagaaggactttgactgcaacaccaagcagcccggctgcaccaacgtctgctacgacaactacttccccatctccaacatccgcctctgggccctgcagctcatcttcgtcacatgcccctcgctgctggtcatcctgcacgtggcctaccgtgaggagcgggagcgccggcaccgccagaaacacggggaccagtgcgccaagctgtacgacaacgcaggcaagaagcacggaggcctgtggtggacctacctgttcagcctcatcttcaagctcatcattgagttcctcttcctctacctgctgcacactctctggcatggcttcaatatgccgcgcctggtgcagtgtgccaacgtggccccctgccccaacatcgtggactgctacattgcccgacctaccgagaagaaaatcttcacctacttcatggtgggcgcctccgccgtctgcatcgtactcaccatctgtgagctctgctacctcatctgccacagggtcctgcgaggcctgcacaaggacaagcctcgagggggttgcagcccctcgtcctccgccagccgagcttccacctgccgctgccaccacaagctggtggaggctggggaggtggatccagacccaggcaataacaagctgcaggcttcagcacccaacctgacccccatctgaccacagggcaggggtggggcaacatgcgggctgccaatgggacatgcagggcggtgtggcaggtggagaggtcctacaggggctgagtgaccccactctgagttcactaagttatgcaactttcgttttggcagatattttttgacactgggaactgggctgtctagccgggtataggtaacccacaggcccagtgccagccctcaaaggacatagactttgaaacaagcgaattaactatctacgctgcctgcaaggggccacttagggcactgctagcagggcttcaaccaggaagggatcaacccaggaagggatgatcaggagaggcttccctgaggacataatgtgtaagagaggtgagaagtgctcccaagcagacacaacagcagcacagaggtctggaggccacacaaaaagtgatgctcgccctgggctagcctcagcagacctaaggcatctctactccctccagaggagccgcccagattcctgcagtggagaggaggtcttccagcagcagcaggtctggagggctgagaatgaacctgactagaggttctggagatacccagaggtcccccaggtcatcacttggctcagtggaagccctctttccccaaatcctactccctcagcctcaggcagtggtgctcccatcttcctccccacaactgtgctcaggctggtgccagcctttcagaccctgctcccagggacttgggtggatgcgctgatagaacatcctcaagacagtttccttgaaatcaataaatactgtgttttatacaggttggctctgtctctggttctcccacactcccacccactgacagaaccctgaaggtagggaaaggtaagccctcagaaagggaaagagttccatggctcggggtggagctagggtgggggctgtggctgtggctgcagctggggcttgagctggagctcggttaggctggggctgatgttgacagccgggagctgggtttgtaccagaggaggaggctggggtggaacctattgatacatatgttgggattctagctgtggccacaagagtgcgctgtgctccctctgcaacggtgcttccagccttcgtaattagacttcaccctgagtacacacacaatcactgccactctcactatagacaaaccacactccctcctctgtcacccagtcactgccatctcaacacacatccccaccctgtgtacacacaatctctgttattcatactctcactccttatgcgcactctcaacagggcatgtagtctgcactcaagcatgccatcccagcctcaccctgcattttattcggctcatcccattttccctgaacattttcgctgaactagggccctggcaggatgctgggactgtgcaaggaggtaggacctatgcccacggagctaagagacaggaacacaggctcatctcccgcactaaccaacccctgggatggctcacagcctgctcccagtgctgtgtcatgacctgaaatttaggggacaccaacacccaaggccagacccaaatggaaagcaaaagaggatgcaaggctatattaacccagtggaacacttagtgactatcacagccgaggccgggagtcagaaattcaggagccagtgagccaagcgccacagccagcaaagacaggtggg

SEQ ID NO: 204652 - DNA, 2218 bp, Homo sapiens
gaacttctttcctggcacaggactcactgtgccccttcccgctgtgggtacaaggtctgccccccaccccagctctccaaagcccaccggcctccctggaggccgaggtcgacggcccgtcgcaccgggagggggggctcccaggggtgccccacgcacggtcaaggtcccgcgccaagcggggaccgggctgggccggaagcgggcacggtactcgcggcaaactagcgtgggcgagtcctgattgcagtcggacctgccgccgcggcacttaacagtttgcagagtgcttcccgcccctgatctcattggagccttcggacagcccagcccatggccaccgatgcccccatttcacgcctgaggaagcggaggctcagacgggccaccagcccctccggaggctggcccgggagcgcctggcagcgtcgggtctaggagccggctccctcctgctccctcctccgcgccgcccggggtgtgcccgccgtctgtgtgcaccactgctgagcccagctccggcgccctcgcctctgctgtgggccccggggacgcggggtcaggccaccgcgttggccaggccgctgcaggtaggcacggcccccaccaggcgccatggactggaagacactccaggccctactgagcggtgtgaacaagtactccacagcgttcgggcgcatctggctgtccgtggtgttcgtcttccgggtgctggtatacgtggtggctgcagagcgcgtgtggggggatgagcagaaggactttgactgcaacaccaagcagcccggctgcaccaacgtctgctacgacaactacttccccatctccaacatccgcctctgggccctgcagctcatcttcgtcacatgcccctcgctgctggtcatcctgcacgtggcctaccgtgaggagcgggagcgccggcaccgccagaaacacggggaccagtgcgccaagctgtacgacaacgcaggcaagaagcacggaggcctgtggtggacctacctgttcagcctcatcttcaagctcatcattgagttcctcttcctctacctgctgcacactctctggcatggcttcaatatgccgcgcctggtgcagtgtgccaacgtggccccctgccccaacatcgtggactgctacattgcccgacctaccgagaagaaaatcttcacctacttcatggtgggcgcctccgccgtctgcatcgtactcaccatctgtgagctctgctacctcatctgccacagggtcctgcgaggcctgcacaaggacaagcctcgagggggttgcagcccctcgtcctccgccagccgagcttccacctgccgctgccaccacaagctggtggaggctggggaggtggatccagacccaggcaataacaagctgcaggcttcagcacccaacctgacccccatctgaccacagggcaggggtggggcaacatgcgggctgccaatgggacatgcagggcggtgtggcaggtggagaggtcctacaggggctgagtgaccccactctgagttcactaagttatgcaactttcgttttggcagatattttttgacactgggaactgggctgtctagccgggtataggtaacccacaggcccagtgccagccctcaaaggacatagactttgaaacaagcgaattaactatctacgctgcctgcaaggggccacttagggcactgctagcagggcttcaaccaggaagggatcaacccaggaagggatgatcaggagaggcttccctgaggacataatgtgtaagagaggtgagaagtgctcccaagcagacacaacagcagcacagaggtctggaggccacacaaaaagtgatgctcgccctgggctagcctcagcagacctaaggcatctctactccctccagaggagccgcccagattcctgcagtggagaggaggtcttccagcagcagcaggtctggagggctgagaatgaacctgactagaggttctggagatacccagaggtcccccaggtcatcacttggctcagtggaagccctctttccccaaatcctactccctcagcctcaggcagtggtgctcccatcttcctccccacaactgtgctcaggctggtgccagcctttcagaccctgctcccagggacttgggtggatgcgctgatagaacatcctcaagacagtttccttgaaatcaataaatactgtgttttatac

SEQ ID NO: 204653 - DNA, 1750 bp, Homo sapiens
gcaccctggtgggcagccatgggagtgtgtcaggtggaagcagccgtcagggtccctctctgctctctgtccggacagacagggctccaaccttcacttcagttcttgtgaactcccaccaggtaggcacggcccccaccaggcgccatggactggaagacactccaggccctactgagcggtgtgaacaagtactccacagcgttcgggcgcatctggctgtccgtggtgttcgtcttccgggtgctggtatacgtggtggctgcagagcgcgtgtggggggatgagcagaaggactttgactgcaacaccaagcagcccggctgcaccaacgtctgctacgacaactacttccccatctccaacatccgcctctgggccctgcagctcatcttcgtcacatgcccctcgctgctggtcatcctgcacgtggcctaccgtgaggagcgggagcgccggcaccgccagaaacacggggaccagtgcgccaagctgtacgacaacgcaggcaagaagcacggaggcctgtggtggacctacctgttcagcctcatcttcaagctcatcattgagttcctcttcctctacctgctgcacactctctggcatggcttcaatatgccgcgcctggtgcagtgtgccaacgtggccccctgccccaacatcgtggactgctacattgcccgacctaccgagaagaaaatcttcacctacttcatggtgggcgcctccgccgtctgcatcgtactcaccatctgtgagctctgctacctcatctgccacagggtcctgcgaggcctgcacaaggacaagcctcgagggggttgcagcccctcgtcctccgccagccgagcttccacctgccgctgccaccacaagctggtggaggctggggaggtggatccagacccaggcaataacaagctgcaggcttcagcacccaacctgacccccatctgaccacagggcaggggtggggcaacatgcgggctgccaatgggacatgcagggcggtgtggcaggtggagaggtcctacaggggctgagtgaccccactctgagttcactaagttatgcaactttcgttttggcagatattttttgacactgggaactgggctgtctagccgggtataggtaacccacaggcccagtgccagccctcaaaggacatagactttgaaacaagcgaattaactatctacgctgcctgcaaggggccacttagggcactgctagcagggcttcaaccaggaagggatcaacccaggaagggatgatcaggagaggcttccctgaggacataatgtgtaagagaggtgagaagtgctcccaagcagacacaacagcagcacagaggtctggaggccacacaaaaagtgatgctcgccctgggctagcctcagcagacctaaggcatctctactccctccagaggagccgcccagattcctgcagtggagaggaggtcttccagcagcagcaggtctggagggctgagaatgaacctgactagaggttctggagatacccagaggtcccccaggtcatcacttggctcagtggaagccctctttccccaaatcctactccctcagcctcaggcagtggtgctcccatcttcctccccacaactgtgctcaggctggtgccagcctttcagaccctgctcccagggacttgggtggatgcgctgatagaacatcctcaagacagtttccttgaaatcaataaatactgtgttttatac

SEQ ID NO: 204654 - DNA, 1466 bp, Homo sapiens
atcattttcttcttccggggacctgtacaccacgagcagccagctgaccctgccggccacacagtgcctagccggcaagtccgtgacatgccacgtgaagcactacacgaatcccagccaggatgtgactgtgccctgcccagttccctcaactccacctaccccatctccctcaactccacctaccccatctctcctcatgctgccacccccagactgtcacgtgcaccgacgcggccctcgaggacctgctcttctgttcagcctcatcttcaagctcatcattgagttcctcttcctctacctgctgcacactctctggcatggcttcaatatgccgcgcctggtgcagtgtgccaacgtggccccctgccccaacatcgtggactgctacattgcccgacctaccgagaagaaaatcttcacctacttcatggtgggcgcctccgccgtctgcatcgtactcaccatctgtgagctctgctacctcatctgccacagggtcctgcgaggcctgcacaaggacaagcctcgagggggttgcagcccctcgtcctccgccagccgagcttccacctgccgctgccaccacaagctggtggaggctggggaggtggatccagacccaggcaataacaagctgcaggcttcagcacccaacctgacccccatctgaccacagggcaggggtggggcaacatgcgggctgccaatgggacatgcagggcggtgtggcaggtggagaggtcctacaggggctgagtgaccccactctgagttcactaagttatgcaactttcgttttggcagatattttttgacactgggaactgggctgtctagccgggtataggtaacccacaggcccagtgccagccctcaaaggacatagactttgaaacaagcgaattaactatctacgctgcctgcaaggggccacttagggcactgctagcagggcttcaaccaggaagggatcaacccaggaagggatgatcaggagaggcttccctgaggacataatgtgtaagagaggtgagaagtgctcccaagcagacacaacagcagcacagaggtctggaggccacacaaaaagtgatgctcgccctgggctagcctcagcagacctaaggcatctctactccctccagaggagccgcccagattcctgcagtggagaggaggtcttccagcagcagcaggtctggagggctgagaatgaacctgactagaggttctggagatacccagaggtcccccaggtcatcacttggctcagtggaagccctctttccccaaatcctactccctcagcctcaggcagtggtgctcccatcttcctccccacaactgtgctcaggctggtgccagcctttcagaccctgctcccagggacttgggtggatgcgctgatagaacatcctcaagacagtttccttgaaatcaataaatactgtgttttatac

SEQ ID NO: 204655 - DNA, 3045 bp, Homo sapiens
gaacttctttcctggcacaggactcactgtgccccttcccgctgtgggtacaaggtctgccccccaccccagctctccaaagcccaccggcctccctggaggccgaggtcgacggcccgtcgcaccgggagggggggctcccaggggtgccccacgcacggtcaaggtcccgcgccaagcggggaccgggctgggccggaagcgggcacggtactcgcggcaaactagcgtgggcgagtcctgattgcagtcggacctgccgccgcggcacttaacagtttgcagagtgcttcccgcccctgatctcattggagccttcggacagcccagcccatggccaccgatgcccccatttcacgcctgaggaagcggaggctcagacgggccaccagcccctccggaggctggcccgggagcgcctggcagcgtcgggtctaggagccggctccctcctgctccctcctccgcgccgcccggggtgtgcccgccgtctgtgtgcaccactgctgagcccagctccggcgccctcgcctctgctgtgggccccggggacgcggggtcaggccaccgcgttggccaggccgctgcaggtaggcacggcccccaccaggcgccatggactggaagacactccaggccctactgagcggtgtgaacaagtactccacagcgttcgggcgcatctggctgtccgtggtgttcgtcttccgggtgctggtatacgtggtggctgcagagcgcgtgtggggggatgagcagaaggactttgactgcaacaccaagcagcccggctgcaccaacgtctgctacgacaactacttccccatctccaacatccgcctctgggccctgcagctcatcttcgtcacatgcccctcgctgctggtcatcctgcacgtggcctaccgtgaggagcgggagcgccggcaccgccagaaacacggggaccagtgcgccaagctgtacgacaacgcaggcaagaagcacggaggcctgtggtggacctacctgttcagcctcatcttcaagctcatcattgagttcctcttcctctacctgctgcacactctctggcatggcttcaatatgccgcgcctggtgcagtgtgccaacgtggccccctgccccaacatcgtggactgctacattgcccgacctaccgagaagaaaatcttcacctacttcatggtgggcgcctccgccgtctgcatcgtactcaccatctgtgagctctgctacctcatctgccacagggtcctgcgaggcctgcacaaggacaagcctcgagggggttgcagcccctcgtcctccgccagccgagcttccacctgccgctgccaccacaagctggtggaggctggggaggtggatccagacccaggcaataacaagctgcaggcttcagcacccaacctgacccccatctgaccacagggcaggggtggggcaacatgcgggctgccaatgggacatgcagggcggtgtggcaggtggagaggtcctacaggggctgagtgaccccactctgagttcactaagttatgcaactttcgttttggcagatattttttgacactgggaactgggctgtctagccgggtataggtaacccacaggcccagtgccagccctcaaaggacatagactttgaaacaagcgaattaactatctacgctgcctgcaaggggccacttagggcactgctagcagggcttcaaccaggaagggatcaacccaggaagggatgatcaggagaggcttccctgaggacataatgtgtaagagaggtgagaagtgctcccaagcagacacaacagcacagacctaaggcatctctactccctccagaggagccgcccagattcctgcagtggagaggaggtcttccagcagcagcaggtctggagggctgagaatgaacctgactagaggttctggagatacccagaggtcccccaggtcatcacttggctcagtggaagccctctttccccaaatcctactccctcagcctcaggcagtggtgctcccatcttcctccccacaactgtgctcaggctggtgccagcctttcagaccctgctcccagggacttgggtggatgcgctgatagaacatcctcaagacagtttccttgaaatcaataaatactgtgttttatacaggttggctctgtctctggttctcccacactcccacccactgacagaaccctgaaggtagggaaaggtaagccctcagaaagggaaagagttccatggctcggggtggagctagggtgggggctgtggctgtggctgcagctggggcttgagctggagctcggttaggctggggctgatgttgacagccgggagctgggtttgtaccagaggaggaggctggggtggaacctattgatacatatgttgggattctagctgtggccacaagagtgcgctgtgctccctctgcaacggtgcttccagccttcgtaattagacttcaccctgagtacacacacaatcactgccactctcactatagacaaaccacactccctcctctgtcacccagtcactgccatctcaacacacatccccaccctgtgtacacacaatctctgttattcatactctcactccttatgcgcactctcaacagggcatgtagtctgcactcaagcatgccatcccagcctcaccctgcattttattcggctcatcccattttccctgaacattttcgctgaactagggccctggcaggatgctgggactgtgcaaggaggtaggacctatgcccacggagctaagagacaggaacacaggctcatctcccgcactaaccaacccctgggatggctcacagcctgctcccagtgctgtgtcatgacctgaaatttaggggacaccaacacccaaggccagacccaaatggaaagcaaaagaggatgcaaggctatattaacccagtggaacacttagtgactatcacagccgaggccgggagtcagaaattcaggagccagtgagccaagcgccacagccagcaaagacaggtggg

SEQ ID NO: 204656 - DNA, 1059 bp, Homo sapiens
gaacttctttcctggcacaggactcactgtgccccttcccgctgtgggtacaaggtctgccccccaccccagctctccaaagcccaccggcctccctggaggccgaggtcgacggcccgtcgcaccgggagggggggctcccaggggtgccccacgcacggtcaaggtcccgcgccaagcggggaccgggctgggccggaagcgggcacggtactcgcggcaaactagcgtgggcgagtcctgattgcagtcggacctgccgccgcggcacttaacagtttgcagagtgcttcccgcccctgatctcattggagccttcggacagcccagcccatggccaccgatgcccccatttcacgcctgaggaagcggaggctcagacgggccaccagcccctccggaggctggcccgggagcgcctggcagcgtcgggtctaggagccggctccctcctgctccctcctccgcgccgcccggggtgtgcccgccgtctgtgtgcaccactgctgagcccagctccggcgccctcgcctctgctgtgggccccggggacgcggggtcaggccaccgcgttggccaggccgctgcaggtaggcacggcccccaccaggcgccatggactggaagacactccaggccctactgagcggtgtgaacaagtactccacagcgttcgggcgcatctggctgtccgtggtgttcgtcttccgggtgctggtatacgtggtggctgcagagcgcgtgtggggggatgagcagaaggactttgactgcaacaccaagcagcccggctgcaccaacgtctgctacgacaactacttccccatctccaacatccgcctctgggccctgcagctcatcttcgtcacatgcccctcgctgctggtcatcctgcacgtggcctcagcctcaggcagtggtgctcccatcttcctccccacaactgtgctcaggctggtgccagcctttcagaccctgctcccagggacttgggtggatgcgctgatagaacatcctcaagacagtttccttgaaatcaataaatactgtgttttatac

SEQ ID NO: 204657 - DNA, 469 bp, Homo sapiens
ggtttctgtcaaataataaccactggcgtatttcctgctccttcctatagtctttagaagacccaacttacaactatgtctatgaggaactctggtaggactatacataataggaaaacataacatttttttcttgataacaggaacatctggctatgctgaacataagagattcaaaacagaggagatttgcaaattatagcttcccttagggcttagaagtgcttagataaaatttgattattccatactggcctgcaatttgactccaagatcccaggatcacatgccccaggcaaaagatttctaattcttctatgtaagacctatacttgctctatccattccgtatgtatccatccacccgtccatgcatgcacatgttaagcttgcattcaacagacatctttttttttttttttttgagatggagtctcgctctgtcacccaggctggagtgcagtggtgt

SEQ ID NO: 204658 - DNA, 481 bp, Homo sapiens
actgaggtcatgaactgaggagtgattcaaatagggtgaggcaggaaggcgctccgtcctgagcactaggctggcttctgccaggaaccagggtgagaaggagggtacagctcccagagccatgcttgcagcctgaccacccaccaaccaggcgagcgccaggggtggtgggaagcaggtgtgtcagagccagttataaccacaaccacagcaacagcggcggcggacatttattgggtggccactgcaggcctgttctgttttacatgcatttaaataatcacaacagcctcttaacccactctcttcacccttcggtgtctgtatgaccttgcgtgggtggctgagctgatgccttcctgggtgactgtgaagtgggtatgtgcacatgtgaaagtgatgggacatattcgtgtgtgagtccagtgcccagtagagtccgtggcacatagtacatcgtattaaatctttgaggaataag

SEQ ID NO: 204659 - DNA, 2089 bp, Homo sapiens
ctttcagctacagcacattctaattttttattttgtttagttcttttgtattcacttctggtctctttaagactgttttaaaagaaatcaatttagggaaccccagttatataatataaactttgtaatctgagagaaaaaatgtatagtaaatctaagtcttgatttttaactttctattgtaaaaaataataatatacagagtttaatagaaggtgatgttttggttttgttttcccagaggctgccatatggtctttgagtacggggatgtcccaaactggcccaccaatgagcatggcggctccggccaggaatgccagagttagcctcccaggcttgcgggtggacatgcctgctccctgccagcctccagtggcctggccaggccctcccgagcctgtctgccctccccaggggtggaggagtctctgggccccaggaggattccctcccggagactcgcacggtgctccctgctcacgcgttgtcacagttagtccggaaatgactgaaaccaggcattctcccggacctcagcgtgggggagcctccaggcagacgctgggtatggagctgtggtgtggtctgtcctgtatggtggccagtgctttctgccagcatttctggatggatatagggactatcattagtatcctaatacacggtgattttaaaacaaccataaaattgattcagagtccactgacccttacagatgtaggtatacccttactggagagggaactctgatgaggagatgctggtaaattatcattttttaaattgctggtgagtctgacacttggtgagttttcagccagtttgttaaacttttaattaagttttgtttataataaaaatataaatggatttgaaagtttccattttttaaagttaccctcgttttcaaaggtattttctaaacagatctttaatggactatttaaaccgaatttaaggaattcacacacgacagttgacaggtcttcacgcaggctggttggtaacgtgctgccagcacagggctgggtgatacgtacaccctaagccgggggtgcctggggctggggggcgctccttgcaatgcccctccagccacagggcagtgaggtgctgcctgtgtgagccgtcgggggagcggccggctgtgggggcagcgcagcaggagcatcgtggggcctttccttctcggctggttctctgtgacggtggcgtcggctcgcctctgctcctttcatctagaaagaagccactgaccctgacagcccacggcgggtacactgagcagctgcattggtgctgtcacttttttaaggctttctgtccagacttcaacactggtttcttttcagagtttcgaaggattaatgacttcctcagcgcccttgctggcgggctgagggtgacagtcacgtccgtttcttctgtattagaaggctgcggtgattcaattagattgtcccactgctgagacctgtagggcagcttctaacatgcttttttcaaggggagaggagtagtgacaagtcgtgtgtcggaattggatttgagaacactctgaatgacccctggaggccgagggggcaggcttcgggcgtgaactgaactccagacccctctttgtgttgggcagtgtcatcttgcttacaaactgtaagacacatttttttgtgtgtttgtttttgttgttgttcttttgcagcactcacgcctctgacagtcttttgggaaagagtaacacccacatacagaatttgtcacatccagagtagcactgttccttaatactggcataatgcttccaggaagtttttcttttttatatttaaaatgttacttttctgtatgatgtgcatgcaagtttaccgtaacttttcttaaactttttagtgccgtttctagtatattcctgtaaatgtcagttactgaaaatgagtccaatgtaagtagtttagcttgtttattgcaatgctggcctcaacacaacagaataaaaatggtagaaagtactctttgatgtttctggtaatcatggacccttctcctggggcatttgttttgttttcataataaaaagcaaaaaaaa

SEQ ID NO: 204660 - DNA, 1864 bp, Homo sapiens
ctttcagctacagcacattctaattttttattttgtttagttcttttgtattcacttctggtctctttaagactgttttaaaagaaatcaatttagggaaccccagttatataatataaactttgtaatctgagagaaaaaatgtatagtaaatctaagtcttgatttttaactttctattgtaaaaaataataatatacagagtttaatagaaggtgatgttttggttttgttttcccagaggctgccatatggtctttgagtacggggatgtcccaaactggcccaccaatgagcatggcggctccggccaggaatgccagagttagcctcccaggcttgcgggtggacatgcctgctccctgccagcctccagtggcctggccaggccctcccgagcctgtctgccctccccaggggtggaggagtctctgggccccaggaggattccctcccggagactcgcacggtgctccctgctcacgcgttgtcacagttagtccggaaatgactgaaaccaggcattctcccggacctcagcgtgggggagcctccaggcagacgctgggtatggagctgtggtgtggtctgtcctgtatggtggccagtgctttctgccagcatttctggatggatatagggactatcattagtatcctaatacacggtgattttaaaacaaccataaaattgattcagagtccactgacccttacagatgtaggtatacccttactggagagggaactctgatgaggagatgctggtaaattatcattttttaaattgctggtgagtctgacacttggtgagttttcagccagtttgttaaacttttaattaagttttgtttataataaaaatataaatggatttgaaagtttccattttttaaagttaccctcgttttcaaaggtattttctaaacagatctttaatggactatttaaaccgaatttaaggaattcacacacgacagttgacaggtcttcacgcaggctggttggtaacgtgctgccagcacagggctgggtgatacgtacaccctaagccgggggtgcctggggctggggggcgctccttgcaatgcccctccagccacagggcagtgaggtgctgcctgtgtgagccgtcgggggagcggccggctgtgggggcagcgcagcaggagcatcgtggggcctttccttctcggctggttctctgtgacggtggcgtcggctcgcctctgctcctttcatctagaaagaagccactgaccctgacagcccacggcgggtacactgagcagctgcattggtgctgtcacttttttaaggctttctgtccagacttcaacactggtttcttttcagagtttcgaaggattaatgacttcctcagcgcccttgctggcgggctgagggtgacagtcacgtccgtttcttctgtattagaaggctgcggtgattcaattagattgtcccactgctgagacctgtagggcagcttctaacatgcttttttcaaggggagaggagtagtgacaagtcgtgtgtcggaattggatttgagaacactctgaatgacccctggaggccgagggggcaggcttcgggcgtgaactgaactccagacccctctttgtgttgggcagtgtcatcttgcttacaaactgtaagacacattttggtgttggtttgggtggtctttgagattcagcttgaggttgggaagaagaaacactttagaatggaatccagtcgtctaaatgatagaccgaaggtttttttaaaggatcgaaggggagcgaattaaaagggagaatgaaggagaagagaagttatgcgaaagtttttcgggttagagaggagggtgtatttga

SEQ ID NO: 204661 - DNA, 437 bp, Homo sapiens
tctttggggttctgcagttcctgcatctccaagtttctgggcgccactgcattccctgatacccacagtggaagctgtttgcagtcggccttgtccagctgcagcctcacagggagctggcacctgtgccggtgcctggagctgcccaccccactgcagctggcatgcttgactgtgtgcagtggccagatcccatgcttgcttgctcacacacccttcactgctctgtacccagctcacccttggcaagtgtgggatccaaaccactagcatgagccgagtggacagaacgaacccagtgggcccgagcaaaacacaggtaaaggcaccaccagccagaggtttcaggcagaaaagtgatgtctcaggattctgtaacacttgtgccctttgacctctcagagcagctggggatcatgataaattctctctcggat

SEQ ID NO: 204662 - DNA, 521 bp, Homo sapiens
tggaagaacattctatgctcatacgtcagaagaattaatatcattaaaatgaccatattacacaaagaaatctacagattcagtgcaattcctatcaaaataccaacatcattttcacagtattataaaaaattaaaatttatatggaaccaaaaaagaaccctaataactaaagtgttcctgagcaaaaataaaaaagctagaatagtgcattacctcacttcggtaatattatgaggcgacagtaagcaaaacaacatggttctggtaaaaaaacagatgcataggtcaatggtacagaatagagaacccagaaataaagccacataaatacagccaagtgatctttgacaaaggcagcaataatatacattgtggaagtgaatcacttttcaataaatggtgctgggaaaattggatagtcatatataaaagaatgaaactagactactttattttgtcatatacaaaaatcaactgagaattaattaaaaacctaaacagaagaccccaaattatta

SEQ ID NO: 204663 - DNA, 519 bp, Homo sapiens
gaactgacacagaatatatttcaattggaaaactctctactttgagaattatatgaggaatcaatttcctgctttaaaaatgctgcaaattctgcattaagtaattaacagttaagagtcacacagctagtaaatgagagacacaggattcagacctaagcctgttctactcagaaatcaatgtactttccacacagaaaaatgtgtcttaggtgttttccaactgctggttttggcctatgaaatcaatttaatagactgcaagcagaatgttttaataaaacaaagctgaattgagaagatcccctacacacaaaggtaagcaaaataacaaattcatataaaaaagcctaaaagaaatgagcaaaaacatagaaaaattcaaattaaaaggaaagcaagggtctttattgcaaggagagcaatatttacattttaaatctctgaaaagcaagattcaaaaagaagagtgctttttaagagtcagggttccactttgtcacccaggctgaagtacag

SEQ ID NO: 204664 - DNA, 485 bp, Homo sapiens
tcttatattctgtcccctaagagacgaatagaaatataggtcaaactaggggaatacaagcccaaatgtctctctaaataaacttttctttgacttctctgagaaaagttgatttggagggatattctcctctttgacactgttttctccaacactctaattaagtaaggtcaaaaactgtctcttattggtcccttaattccaagttcccagtacagtggtttgtacagtgagtacagaatcttttaagtagtgcacatgtaagatgtgatgtggattaaaactctgatgctctaccacatgattcttaaaacccaaaagttctcaacttagcagaaagccagatataggacaatataatattttctaagctttttagtgtttaaagtatttacaactcatttacctcaaattacattcagtggagattccccagaccaaattttagagggtcagggtcagatgggaaggggacagatagattt

SEQ ID NO: 204665 - DNA, 359 bp, Homo sapiens
cagcttctcagtcagtatcagttgggtggtcaactccaggggacactattcatgttatatttaactggaagaatttgccattcacagaaaaggcaatgtgaatgctgctccccagagcaccattcacagaaaatgcaatgtgaatggtgcctcctggagattttgccttgcttagcaaggtgctagagctaaggactcagaaatgtttgttaagtgagtgaatggaatcccaggctacttcttactcattccaacccccaggacgaaaaagaaaagttgacaaggggtgaggagagtgggggaggagaaagggtgatccttagctacaaggcttctatgagattgggtgtgggtcggtg

SEQ ID NO: 204666 - DNA, 594 bp, Homo sapiens
attatacaagtagtaaggataattaaaggtggaagagccttttcagttatggtattgacaaaggcttagtcaaagaaggatgaataggattttgaaactgaaattattctagttagagggggaaagtgtggaagttgaaatgccaagattagttgaggaagcaatctagatctggcgggattatccatatttagtaagggaggaggggtgtctagttgaagacagacgaagatgttaatacagtcacactgtaggtactttcgatgccaagaggctttggtgtttttcctttatgcagtggggttttgaacagggaaaataatgtagtaataaccttgaaaccttaatctagtttcagtatgcaggatggatctgaggaggaaatgtgcgtggcaaccggctccgggatggctggctggggggcctagtcttctgcccgccgatctccctcgggaagtcccggatcagagcagcaggcccatcccccaactgttacaccctgctggcagcagcagaggcacagggatgagttaggaaacagatacagaggtcaagaggtgatgtttattaagttatatatttttttcttgtttt

SEQ ID NO: 204667 - DNA, 421 bp, Homo sapiens
agcagcaaagctgagaaaatggtttcctttggatgactgatcagagtttctacagctaatagcaagagctgtctgaactggactgaataagcagccatgggagtttttgggaacatctggagagagaatgctaatcctagttaatgtttgtgcagcaatttactcctctaagggctttacttatgttaacttgtgttatcattagaataccagaaacaagagtagggaatgttttccattttatagaagagaacccaaaatacagaaacttgtgacttgcccaaagtcctctacctagtaaggggcagaagtccgatttaaacccacgtagtctggctctagaatctgcattcttaactcactgtgctatggtgcctctccaatgtgagagatgggggcttggaaatatattaacttaaat

SEQ ID NO: 204668 - DNA, 413 bp, Homo sapiens
tctctgctgcaagttcaccatgaacatacttgtggaagggctgagaatactgttagcttggcacaagctttcaccaggctttcagctttttggtaggctgcccattaggctgtgcagatgcccaggggagtgctgtggaggggtgtgtggtagaagcaggccctgtgtttgcctggaggaagagtgagataatgggtagaaatgctagaactgaagctctgtggctctgggctgagtccaggcctaaggcccgaggccagtacggtgtctgtatcgggtggccccttctcactgggagagccctagactctggttccttgcttgttgatggaggcacagcaagaataatcaaacacctgagaaacttggaagatgattattgaaaccagaattttttttcagaattctctgga

SEQ ID NO: 204669 - DNA, 402 bp, Homo sapiens
attgttttacttcttcaccaacacttgatatttgacagactttttaatgtttaacaatctggtatataaaatctattgtggttttactttgcatttccttgaaaattaatgacattgaggcatatgttcatatgtttattagtcatttgggtttattattgtgtgatatgcccattcaagactttcgcttatttctctagttgttttggggtccccaagaccactctcatgtttagaaattcactagaaggacttacaagacttagcaaataagtgtactcacagctaagatttattacagtgacatagtaagggcatagctggatcacaagggacaaagatagagagggagtctccaggaacctatatacaggcttccttatgctctctccctcctatcag

SEQ ID NO: 204670 - DNA, 477 bp, Homo sapiens
gtaccaagatttaatttagatttaatgtaagattagatttagatttacattttaaaatctcatttagatttaatgtaatcctattaaggtaggagtattatctaccattttacagaggaagaactgaaggattcgttatttaacttgtccactgttaatcagataatcaacagtgatttctggaatcaaacccatttctgtctagctttaaaacagagacctttaaccaccctgctaatttgtagttattccacttatggaggtttccatgtccagcttgctttaaaagcaccaaaggacttttcacactgcatgccctggccagggttggtgagcttgttgaaggccttaccagcctcctgagaccctcacactcacttttcagtgtctctggagccttgccgtggaggtagtgttcgtcttggcctttgactacctgggagaaaaaataaattatttccataaatacagtgatca

SEQ ID NO: 204671 - DNA, 398 bp, Homo sapiens
cacacacacacgtatttgtgtcatacagagactccgccttcggtaacatcccattctccatcactggcccagtgacaggagcagccattgattatagaaacaagtttctatacacttccacaaaaactgatttcatttctccccagcagccagcaaaggatgctggcggtgttgggtaggtgtggggtgtggggctgggctgcagccctcccctctgctgcaggacgctggagaacttgcccaggctctccagtccttctgcgtaaagccatggctgttgttttatcttcacatatttatgtctttttttttttaaccagaagaaaatgaagtaaggaaaatgcttattttaaaattgctggcattcgtggaagtgtatagaaacttgtttctataat

SEQ ID NO: 204672 - DNA, 195 bp, Homo sapiens
tctgacctctaacccactggagcctcaaggctcagccctcagaccctgcctctatctccctaactgcccgtgtacttaaataccatcaatatgctgcagatggtatttgtatatcaagcctgaacttccccagtcttcccctttactaggaacccagttgaattcccaggaaccctatccctgtgagttccctgg

SEQ ID NO: 204673 - DNA, 232 bp, Homo sapiens
atttctgttctgacatcctggacaaagtctctcattaataagtagatgcctacacacttacgtagtaaaagtataaaagcatgcatgggaaaaacacacaccaactgtaaaacagtggttagcttggtgagagatgagagagagagatgggttggtagtgttttgctgttttatttcttttagggtgatggatcaaatacccgcagatctgaatggtgggtacatgggtgtc

SEQ ID NO: 204674 - DNA, 125 bp, Homo sapiens
tttatttgccatttaatatcttcttgggcatggatgggattttcctttcaaatatctatcagacacttagctagctgggacatactgcagacgattctgtgaaagtcacatataaaatacaaaat

SEQ ID NO: 204675 - DNA, 489 bp, Homo sapiens
gccgtagagagcaaccagaatgggcagagcagagacttagagcccagaggactggaagacgctgccacagccgcacgcactctagcctgatgctacaggcagaacacgtgtgatggacttctcagagaaagccgaaatcagtattcacagcttctaacagtaaattgaacatgaaaaaactccactaactactgatcattggacctgattgcttgtggttctgggagagagaagagacatctgcacaggaattggagccaggccctgccgcatgcagccatcagcctcaatgtgacactatgagctttggctgggaataagacactacatcttggcttggggacacaaacctggagtactaccagagtaaggcaaccaacccaaaagctacttgacagggagaggagtctaccaaaaagaaacaaaacaaacaaattccctcccaaacaagacatcttctgtaaccagaagcactccaagaacaacact

SEQ ID NO: 204676 - DNA, 1170 bp, Homo sapiens
ccaggacccgatggcccccggcgccgtggccgcaagcccacgaaggcgaaacgtgatgggccaccccggccacgggggaggccccggatccgccccctggaggtcccgaccactgcggggcccgcctcggcctccacgcccaccgatggcgccaagaaaccccggggccggggccgaggccggggtcgaaaggctgaggaggcagggggcacccggttggagcccctgaagccacttaagatcaagctgtctgtgcccaaggctggcgagggtctgggaacctcatcgggtgatgccatatcaggcactgaccacaacagcctggactcgagcctgactcgggagaagatcgaggccaagattaaggaggtggaggagaagcagccggagatgaagtcgggtttcatggcctccttcttggacttcctcaagtcaggcaagcgccacccaccactctaccaggcgggcctgacgcctccgctcagccctcccaagagtgtgccaccctctgtgccagcccgaggcctgcagccccagccccctgccacccctgctgtgccacatcccccaccttccggagcctttgggcttgggggcgccctggaggctgcagagagtgagggtctggggcttggctgcccttcaccctgcaagcggcttgatgaggagctgaagcggaacctcgagacgctgccctccttctcctcggatgaggaagactctgtcgccaagaaccgagacctgcaggagagcatctcctccgccatctctgccctcgatgacccaccccttgctgggccaaaagacacttccaccccagatgggccgcccttggcccccgcggctgcagttccagggccaccccctcttccggggctccccagtgccaacagcaatggcactcccggtgagctctgggcaggtggtctgggagtagagcttaaaggttattatgatcactaggtaacagttgtgcaggttacgcactgtttaagagacaccattcacatacatggtgtaagcttgcgtgtttatgaagggactttcctgattacacaagcattttgaggaaggtctatctttttctaattcactcagaggtgctaagtggactaggaggggccccaaggcagacactggagaatgcagggagacagggcaggtgataag

SEQ ID NO: 204677 - DNA, 1127 bp, Homo sapiens
ccaggacccgatggcccccggcgccgtggccgcaagcccacgaaggcgaaacgtgatgggccaccccggccacgggggaggccccggatccgccccctggaggtcccgaccactgcggggcccgcctcggcctccacgcccaccgatggcgccaagaaaccccggggccggggccgaggccggggtcgaaaggctgaggaggcagggggcacccggttggagcccctgaagccacttaagatcaagctgtctgtgcccaaggctggcgagggtctgggaacctcatcgggtgatgccatatcaggcactgaccacaacagcctggactcgagcctgactcgggagaagatcgaggccaagattaaggaggtggaggagaagcagccggagatgaagtcgggtttcatggcctccttcttggacttcctcaagtcaggcaagcgccacccaccactctaccaggcgggcctgacgcctccgctcagccctcccaagagtgtgccaccctctgtgccagcccgaggcctgcagccccagccccctgccacccctgctgtgccacatcccccaccttccggagcctttgggcttgggggcgccctggaggctgcagagagtgagggtctggggcttggctgcccttcaccctgcaagcggcttgatgaggagctgaagcggaacctcgagacgctgccctccttctcctcggatgaggaagactctgtcgccaagaaccgagacctgcaggagagcatctcctccgccatctctgccctcgatgacccaccccttgctgggccaaaagacacttccaccccagatgggccgcccttggcccccgcggctgcagttccagggccaccccctcttccggggctccccagtgccaagccaggccagtggctaactcccgagccccccgctgctggaggagaaaggcgcgcacagcagttgcacgtcctgaccagcgaatccctcgtgtcatcagaggtaacgcgtgatcgcccgataccgcacaacgcaggagaaccaccggactcacacaaggcaagaaaagcaaacccggcacggacccgggcagcggcagctaaaaaaggcggaaggaacagggaacagcggaaacagaa

SEQ ID NO: 204678 - DNA, 203 bp, Homo sapiens
gtagttcctctcttgaagcagtggagctgatgagacaatcataatctaggtgttattaatgtggagtcctttgtttaaaagttttgcagatgtcatagatttgtaaataaaacagcttgtgaatgtgtgtatatctttactgtttgaagatgaaaggttcataacttgaataagatctacagagagattttattaaaaattat

SEQ ID NO: 204679 - DNA, 245 bp, Homo sapiens
tttatttataatatatatattctaatatttggaaacaacttgaatgtctatgttaggttatgtaaatgctgatatgtgatataggacaatgggatattattcatgcaatagaaaaataagtataaaactttttaatggcataggaaaatgtatgttttatgctaaaggaaagaggctgtatataaatctaatggagtactttaaaaaataaaataaaaatatgtactaaaatggtaattgttatc

SEQ ID NO: 204680 - DNA, 544 bp, Homo sapiens
gggactcagatatcttgacacctatgtctgaagcagttttattcacagtagccaaaaggcggagccatcccaggtgctcatccatgaataaacggatgaacacagcgtggtccctgcaggctggaatacaatccattcttaaaaaggaaggaaatcctgatgatgcacgcagctgaaggacattatgctaagtgaaataaactgtcaccaaaggacaagtacggcatgcttccacttggatgaggtgtcttagagtagtcaaaagcagagagacagaaggcagaatggtgggtgccgaggacggggctggggaagtgtggagttgccgctccatggggacagtttgtctgggaagatgaaaaggttcttcacgtggatggtggaggaggctgcacggcgatatggaggtgctgagtccccgtgagccgtacagtcaacagtgggtaaaatggtagcttttatgtttatttttaccatgataacaaaactaaattgccacttcacatattccaatcagaagatgacctcttacaagaggaaatga

SEQ ID NO: 204681 - DNA, 197 bp, Homo sapiens
tgactttttcttgacccctcaatcatctgccctgacaaactccagtcctattattaccttcacttccacactttgctgatgaggccctctgtaaattcattttacagaagtcttgctcttgttcagcaatcctttcatctacatattgttgcctctctgtggaattcgctaatgtaggtattctacaaccattcttc

SEQ ID NO: 204682 - DNA, 940 bp, Homo sapiens
  misc_feature (15)..(15): n is a, c, g, or t
  misc_feature (28)..(29): n is a, c, g, or t
  misc_feature (34)..(34): n is a, c, g, or t
  misc_feature (46)..(46): n is a, c, g, or t
gatctacgaccgaanacagtggtggcannatctnaaggccagcaanagcagcaccagagaaagctcaaagtaaaaaaatccctgggagggatttttccttcccttaggaagtagctgacctgaagcgttaacctcagttccagattggagcagggcccttccaggctgtcagatgcccgtccagctccttggctctggaagaccacatgggacagacagggccctgcacagaaggggaaggtcacctctccaagggaggcagagaaaatagtacccgaagacagtggtggccaaaatctgaaggccagcaacaagcagcaccagagaaagctcaaagtaaaaaaatccctgggagggatttttccttcccttaggaagtagctgacctgaagcgttaacctcagttccagattggagcagggcccttccaggctgtcagatgcccgtccagctccttggctctgaaagaatgggaaatggcaggcgctggctcctgactgacttttctcctggaaaatatttagccgggccccagccccagaggcatctgtgggagtcaggagcctagactgggcacatgggcagttcctggttgcttttataagcatgctaccgccagaggagccactgtgataacaattccaaacaagaggatattttaacaatcaacatcactgagcaatgtgttaatatctccaagggacatgcaatagaattattttcaggatcttccagtttggctctgatgtcagaggagaaaatgcatggtgtccagttctgtgcttcctttgtccatccctcccaccagactgtaagctccatgaaggcagaaaccatgtctaactagtcaccctcatgaccgcagcacctgctgtcacaccagacacttagtcagtgtgcaataaatacacagaggaaagaggaagtggggaaggggcaa

SEQ ID NO: 204683 - DNA, 529 bp, Homo sapiens
  misc_feature (15)..(15): n is a, c, g, or t
  misc_feature (28)..(29): n is a, c, g, or t
  misc_feature (34)..(34): n is a, c, g, or t
  misc_feature (46)..(46): n is a, c, g, or t
  misc_feature (458)..(458): n is a, c, g, or t
  misc_feature (483)..(484): n is a, c, g, or t
  misc_feature (492)..(492): n is a, c, g, or t
gatctacgaccgaanacagtggtggcannatctnaaggccagcaanagcagcaccagagaaagctcaaagtaaaaaaatccctgggagggatttttccttcccttaggaagtagctgacctgaagcgttaacctcagttccagattggagcagggcccttccaggctgtcagatgcccgtccagctccttggctctggaagaccacatgggacagacagggccctgcacagaaggggaaggtcacctctccaagggaggcagagaaaatagtacccgaagacagtggtggccaaaatctgaaggccagcaacaagcagcaccagagaaagctcaaagtaaaaaaatccctgggagggatttttccttcccttaggaagtagctgacctgaagcgttaacctcagttccagattggagcagggcccttccaggctgtcagatgcggtcttcgggtcgtntaaacgacccgaagacatttatttnnaaaatcanttctcaatggaggagagattgtatccatagaacgtca

SEQ ID NO: 204684 - DNA, 393 bp, Homo sapiens
gagtaaagagacgagagagatgaatagtaaacttaaaggagttctgacatacaaaacttaaacctttgcaaagttcactccttcaataactactttttaaatacatacgacatttcacacactgtgcttaggccctgatttttcagagtttgaataaagcacatatgagccctcacctcacagaactgaaatctaccggaaaacacagtaaatagcacaaaaagtgtacggaaagttgcaataaataagtactagaggaaaagacacatatctccaagggaacacgaacttaggagggaccacagatggaacggtcatgaaagtctccaaggcatgacatcaaagctgacgacagaaggaagaactcgcaccttggccaggcacagtggctca

SEQ ID NO: 204685 - DNA, 374 bp, Homo sapiens
tgctttggcacagtctgaacttgacctcagagaacaatgtcagaggcctcttaccctccacccctgatctcttacttccccatgtccctttaagttttccgtagatcttgccttcctcctgcatcctagcttgctactgccttgctatatggcctgctgctcagtgatggcccacctatacaccctaacgtctgcaggggccaatttcagcagacatcatgtgcctgcattgtaaactgcactgctgatggtccctactgaaatttctcctaaaaactagccacactcatgaaagctgcaaaatatatgacagtttccatttggaatttctaaggaacttggaaaaccaagatttcttcaagacaaaggatcca

SEQ ID NO: 204686 - DNA, 367 bp, Homo sapiens
caaaaaacaaaacaaaattgtaaaaagccccactacacatagactgtaagatacttaaactccgtataaaggctgagaaaagcaacacttttaagtttgtccaggccgatttcaaaaattcttcagcgccaacaatatatagacaggtattccctccttaagtatcaagaacaaaatcaagaacttttaaccatcaacatgaaaggtagagtcagacagaccatctgcctaattttaaggaatgtagttatcacttaaataacatacaaagccaaatcagttcatgccattgcttctcagacctgtaatagctcatacaccaaaaacttgtacttcttgctcataagctttaaagtagaaagaattt

SEQ ID NO: 204687 - DNA, 449 bp, Homo sapiens
cacctccttataaaatgatctatatattggttccctagcatcctacaaaggtaatatatgagcccatgggttggatttgtttaaatctattacagtatctttccccctctttggtcagagtaagcccctctgggtcagcttctgtgtccctctgacaggaccctcattggtttctctggtaattttttttatagatatttgtaggcaataactccattgtctttgatagctgccttgctttctgataagaaaaaagtgtttcaggcttacatcatttgtttcctgccccagacatagagtcagctatttctctaaggagccatatttcattttagtgggaaataatatttagaaataacaatctgagtggtaaggatgttcattgctactgcattgaccgttgtttgtagtcttattcctcggagacagctgaaacctttcctcccctt

SEQ ID NO: 204688 - DNA, 705 bp, Homo sapiens
ggcctgggtgtgggctgggcattcccctggggtaggatgcagggctccagaaagagagggtgagtggagggtaagaggtgactgggaaggaccgggaggaacaggaggaagtgagatgtggcagggccaggcctctgctggtcaagacagccttgaagccacggtgctacaactctggcagggtcagccctctggctatcccagaagagggcaggttgccacagagcctgggcaaatacccagctgccctctgaaccaggtgttccagggacacctccgaatactgcttacactgagacaatgagacaaaaagtgccagcagcttcctggctgggacacaccttcaggagtattagcctggagcagaggctgaacccatcctaacagcttgcccatgtccccagccccgggctaccgggcaagtgctcacatcccctggggacaggtggatggcacacagggtcatggcggagggctgctcactgggtccagagccagggtctgggaagagggagggagatgcaggaatctgacaggcttgagcctcacagggcccagggctctggcttctctcagatccagctctgggcaatgtttcagttcaacactctccctgggaggctgtgtagcctggggctcagggctttggtggcgtcctgtctgcagaaaagccccactccccactaagagacaactccccatacc

SEQ ID NO: 204689 - DNA, 382 bp, Homo sapiens
tctgccctggccaagacttctgtggcaatgtcagatgccagtggaggctgctggcaggcgtggacgtctcagatgtctgatccttcaggagccccctccacggggccctggctaggcagtgaccaggatgtttctgaatccccttaagttaatggtggccacttaggcagcggaagtgtcatgaaagactcttctgtccccatggctgggccaaaccagggaagacgctgacatcaagcacaattgagaacaagcagcagtaggcaatgttctggggctattaattcatcctgggggaaaaaacctcacagtggattaaattggtttatgtaaagtgctgagaagagcccagcctgggcaacatgatgaaatcttgtatcta

SEQ ID NO: 204690 - DNA, 565 bp, Homo sapiens
agtgccttgagccttattgtggaaaaggaaatatcttcacataaaaactaagcagaagcattctgacaaacttctttgagttgtatgcattcatctcacggagttgcacatttctttagattgagcagctttgatacactctttttggagaatctgtcagtggacatttggagcactttgaaggctatagaagaaaagaaaatatcttcacataaaaacgagacagaagcattctgacaaacttctttgtgatgtgtgcattaatctcacagagttgaaccttacttttcattgatcagttttgaaacactgtttttgtagaatctgtaagcggacatttggagcaattggaggcctatggtggaaaaggaaatatcttcatataaaaagtagacaaaaggcacagcaccgccgcaggcaccgggaggtgcagagcaccgccccaggcgctgggaggcacacagcaccaccacaggcccagtctccactccccagctgtgaaaggatcactgactgaacccccaaggtagcccaccaggcctccatagagctgcccagcatggcc

SEQ ID NO: 204691 - DNA, 381 bp, Homo sapiens
aaatgaacaaatctgtagctagaccaaagatgaaaaacagagaaaacacatataaaatcagaataaaaaagacattatcaccaatgttataggaaaataaaagaattagaaaggaataccatcaaaagcagtatgccaattagataccttatacaaaatgtttgtttttaggaagacacaaacaaccaaatctgacacaagaaaaaaaacctgaatacttacaaaaacagaattgaaggccgagcacggtgcctcgagcctgtaatcccagccaacaatgggaaatattttcaaactgctaaagtaaaaagaatgccaactgcatattctgtatctagcaaaactatccttcacaaacaaaagagaaattatggcatttgc

SEQ ID NO: 204692 - DNA, 281 bp, Homo sapiens
gagctatgaagccaggtacagaatgcaatgcagatttcgatttctagggtaaagaataggagagatgcactgaacgcttactgcgtgccagcactgggccacgtgctgcacatgtgtctcttgccttctcattctcatgaaataagcagcactacaaccgcttaattgcaggtgaggaatgtgagacaccaagcggccaggatcctcatttcatttcagttggattagaaatatttatggagtacctactatgtgccatgctctgttgtaggcccttggaa

SEQ ID NO: 204693 - DNA, 296 bp, Homo sapiens
tataaaagttaggttgacaccgtactgtagtctattaggtgtggaatagcattatgtctaaaagacaatgtacataacttcattaaacatagtttattgctattatatgctgcataattttattacaacatattttatggctaaaaatgcttatgatcatctgattatctattatgaccttcagcaagtcataatcttaaactttttgctggtgaagggtcttgcttcaatgttgaggctgctggctgctaagtaagggtagtggttgctaaaggttgaggtggctatggtaattt

SEQ ID NO: 204694 - DNA, 270 bp, Homo sapiens
aggaaggttgtcgttataagaataatgggtctgaagtggtactccagctagtgtcttagcaaaaggaggggtgcttagggcagtctgaaatttatgagtgcttttgtatagctttcaaagctgagcttttcctgtgtacattagggtttatgaaatatcgtgggtcagagcatccgttacaggcgctgtgggagctgtcatagatacctggctctttccgtgggtgtaaaataggtttagtccttaggatgtctgtgtagggaatgtgct

SEQ ID NO: 204695 - DNA, 262 bp, Homo sapiens
taatttgttggcctaagattacacagctactaaatggcagagccaggatccggtttttcctttgtaccatgcttcctctagtaatattattaatatgtagcattaatatttattcatcatatattatgttaagaagttgtaaagcagacttgagtgtaattgttcaaatattcccatctagtccagttatcagtcttactctctgataaatacatatacagttactaaacttctgagatttatgtacatatgagtagcctaa

SEQ ID NO: 204696 - DNA, 581 bp, Homo sapiens
gaaagggttaatgagacaagcatctgcttctgcttcctgggagaatgatcccacttggtaaggtggcgttcccagggctacctggtgcccaccccatctggctgctcaggtctctttgtggtggccgtttcatcatggtgcagagaagctctcacccagggccctgttgtgttgtcagaagcttccggggtctgtctgttgatggttagcgcctgcgtggtgccagccgtgctggcccactgaggccattctcgctctctgtgggtctctgggatattttctgccacagccctgggcgctcctggaactgcgtgttgaacaccatgtccttactctgtgaggggcaggcctaggtgaggacagggtaggtgagaatccctgtgaggtgggaaaacagtaaagaacattttgaaaatagaattttccaggcaaggattgtaacaaaaagacctaagaaacgtagtatttgtcctcctgtgtttatcaccctttcggggccaattttaataacttcttgtttaatgttgcaaaactagatttcctaggaagattgttctgatgtatgagtgtggagcgttgct

SEQ ID NO: 204697 - DNA, 566 bp, Homo sapiens
cctaccctaactaatccatccaccactgtgacatgttcctgccctaccctaactaatccatccaccttgtgatatgttccttccctaccctaagtaatccatccaccttgtgatatgttcctgcccttccccaactaatccatccaccttgtgatatgttcctgcccttccccaactaatccatccaccttgtgacatgttcctgccctaccctaactaatccatccaccactgtgacatgttcctgccctaccctaactaatccatccgccttgtgatatgttccttccctaccctaattaatccatccaccttgtgatatgttcctgcccttccccaactaatccatccaccttgtgatatcgtgccttatgacttcccccaccttgtgactatgcaccttgtaacattcttcccctgcccaaaaaaactgcccctaactgtaactttccactacctaccccaaacctatagaaccagttccactcccaccacccttcgctgactcctttctctgactcagcccacttgcacccaagtgaataaacagccttgttgctccacta

SEQ ID NO: 204698 - DNA, 733 bp, Homo sapiens
gtgtttagatgcaggtcagtgggagttgggggaggaatctacttgctggagtagcatgcctagatttgctctccaaaggaacaaacaagatcccagtggaagaagaacaactaggggtaaaaaggctctaaacctgacatccttgggataaaagctaatggctggggagcttggcctggagaagagatgacttggaggtaggccaggttactgccttcaaagctgaggggctacgggggcaagcgaggaagcagatgtgctctgcgtgctccagagagcagtgctagaacaagtgggtgtgactggctgacctggaatctcagctctgcaactacctgtgtaaaactggcaaatctcttaaccttactgagcctcagtttctccatttatgcaattagaactgtaatactgacctcagcacattgctgtaaggatttaatgtgaagatgtacatcaagtgcctagcacatgtttggcacatgggagatgctcatgttaggctctttatgactctaaaatgaatactgagatgggtgagaaacataccggcaggggtagcttggagggaggagggaaacaagaataatttcagcttcgaacacaaacacaattctcttcgcttcctattttgggaattgctgcggaggccaggagggagggaaagattccgattttagcgcaacccgccttctcactgggtctgtgacttccaatactccaaccagcctctgga

SEQ ID NO: 204699 - DNA, 511 bp, Homo sapiens
atatttagttataagaaataactgcgtcccagggacagtgcaaggacagggcaggcagtgaggatatccaaaaactgtttgtgtctgtgaagatcatccatccaggctcctccttgtggctttgcaggttaaattcatgaatgttcaggcttattttcatcctgaaatgtaggtcctagagctcctgtgttggctggaacctcatttaagaccagtacagttggccgggcgcagtggctcatgcctgtaatcccagcactttgggaggctgaacaggtggatcatgaggtcaggagttcaagaccagcctgaccaacatggtaaaaccatgtgtctactaaaaatacaaaaattagctgggtgtggtggtgggcgcctgtaatcccggctcctcaggagcctgaggcaggagaatcgcttgaaccctggaggcggaggttgcagtgagccaagatcacaccactgtactccagcctgggtgacagagcgagactccgtctcaaagaaaaag

SEQ ID NO: 204700 - DNA, 1326 bp, Homo sapiens
cacctccaacacgagtcatttatttatgaaaagtgaataggatacaaattaaaagcttgggcgcaggagccagactgctgtgacttgaatcctggctcctccatttccaacttcccccagcctcagttgtctatctgtaaaatgggtctcatagtaggatctgccacacaggattgtgtattaaaagagataatcaatatcgagtatttggcacagtgcctggcacatggggctcccaacacatggtgttggtggtgttcctatttgttgtttttctcttgtagcaatgctgaatccagtctgctcccacttacagtttacatgatggaagaattagagacttgaacacagaaatgaattatccctgttaaccctaaccccagaacattgaggccacaggaaatacaaccgcagtgacctggacttctgcgttagtcatgatcagtacgtattaggtcacagctagtctacgctttatcacatggtggtgacattccagtttcatatgagagggctctcagttaagtaagtgcactaaaaatgcatactggaaaacacccgtgatctatctaaaacattgttccagtgccctcgtttttttgttttgctttgtttttttaaatcccagagagcaataccataaaatatttcattagacctttttattcaagatccatcttaaaaagttgaggctgtacctcaaatatcttttattttccttgctgacttgttacatgacccccactggcctgtgaatatatccaaagatttttctgtgttttaatctgaactcactttgaagctatttatatgtttggcatggtaacacaatggaggtaataaacaccatgcaggtctgactcagctttgaaagcagctttctgagtgacaccttcctcaggattccctgagctaactttatgggatctgaggtaagtaacttcatattcactccatagcacttacgatctcccaatcatttcctgcagatctagcctggaagctaaattttaaaactagctgtgaatttagaagatgattcataagctctgtgcataccatggttatgactggtggaaggcagagattcttacatcagtcttctttacattttaacagcaaggaaaataacaggttagaggagtacttggtatctaccctcccttgcttccggcaaattaatgaaagccaaataaattgcaacactttgatatctgtgtctctgtaacgttaaagacagccctgggctgcgagagatgaacgtggtagagcacctccgggccagcttcccagtggagcaatggtattggagaggtggacaacgtg

SEQ ID NO: 204701 - DNA, 688 bp, Homo sapiens
tatggatcacaacgtcggtgcgtgggtctgtctgggcaatggagaacatgctaatttaggacaaggacaaggataattagaaacgggttgaacgtttaagatgtcaacatcctatagaccgtccctctttggtggctgcaccttgggttcccgtgcatatccaggacacgctctgcccctggtttactctttagaggggagttcctctcaaccacgttttgtcttctactctgctctttggagctgctttgactatatccggagctcataagctgtagtcttttcaccaaatgtcaacccgtttttcatgttgagttttagaagcagaaagactaggtggccttctgaagttttgccacagggtgcttgtttaacaaggatcatatctgaagggctgtcagtcccaatgacgctgaatgaattcttagcttcgttgtactctgaatggctcctactcagaagtcaaggtaacatttaactgttcagtagtccccaacacacaaagggtttgatttttttgttgttgttcattaagtattattttgctttcatctgaggactaggcttcctgcatggcattatacctgacacaatgccaacctccagttatttctttggagggtcagatttacatctgctttgcaaatgggagccagccattgtgcccgagtaaatggtggcttggcgg

SEQ ID NO: 204702 - DNA, 438 bp, Homo sapiens
ctagggggcgacgtgagcccacctaacaaacagcctggcttccttcccacagggatggcaccacctggtcatttgtatttaaacaattcccatctgctttacacagaaggggcaaaccaaacccaccacccccattctcagcctatcttcttaaattatcaacacccagtagctggaataggacttgaaatggataaacctaccaacacttgactgcagtgagcccagaaatggacaaggcaggatttcctgtttaccccacatagggtggggagtgcggggactaaggggtcctaagaagagacagcatttgccggaggaaacagtggggtttccagtttgtgtctggttccggctggtggcggggggtttctagtgactcgtctcactgcataggagcctgccctcagaggacgcaggcaggtgtcatttcaggcc

SEQ ID NO: 204703 - DNA, 263 bp, Homo sapiens
ctcctttttcctcctccagcactggaatgagaagaggcagaacggtagagaggccaaatgattgcttaaagacacctcttagattgcaacagagcttgaccagcaaaataacctccagcaaaactttcttaagcagttatctgaggcaattgtaaaaattggttggttacagcaaagtggctaaagtcacatttgaattactgtaaaagtaccctgagttatataatctccatttgtgtgtgtgtgtgtgtgtttgtgtgtgt

SEQ ID NO: 204704 - DNA, 553 bp, Homo sapiens
tggcttcaaataaatatttgcatatgaaaattaacgaaacatctgctttcttccagtgataggcgttctacaggcgaggatgcccacggccaacctgatgactcctggcatttaggtgcgaatgagcccgggctgccagatttactcattcccatcctcccctagaatgaaaaccctccaccctaaaacagtcccactatgacctggaccacaggtttaatcctgcaacaaaaatgactgcaacccaaactgactgtgcccgaggcacaggcgctggggccctggcagttagcaaaataccggctcgaccgcaacgccatctggggctcccagcaggcatcttgctcatctgttttctttataaactaactcaagccaaagaatctcgagtccctgtgactggagctgtggaacagaatgccccccccagcctccttagccttccttctcccttgcaaattgcttgtgggcacctgtcttcttgcccttaggaaggagtggacagtcccagcaatggccatgctgggaagccaaacgcagcttgagaggggac

SEQ ID NO: 204705 - DNA, 421 bp, Homo sapiens
aaatatcctcctgcctaagccaactacgtagctgggaccacaggaccatgtaccacacctgcttaatgctcaaaagtttttggtgatggggtaagcaaccaaagtttggagaccactggtctacacgactcattgtcactgaactttcatttttatcagctccctcccaagagttaatctatggaagtaagtcctgatgctgaaaaagaaacagaagaaaaactgtttcaaactattttgaactcccaacaagctaaagatgacaaatcactagcaagaatatatggaattgaatactaatatgctattgacgggaatttcaaatagacatcctatctaaagggcatcttgagtatatccacatttaaaacacacataccctttgacctaataagcccttttttttttttttttttttttt

SEQ ID NO: 204706 - DNA, 243 bp, Homo sapiens
tgtagaggatcccgctgaccgcttacgcatgcttcaggttgtagcaacagcacaaaggcaaaacttccagacgatagccatgctgaggacttaactataagcatggtaccatctttggtgttttacatatgctacaccacttaattttctcagtgagctcatgagatggccatcagtatctctgtttcacatatgaggaaactgaggcaagttaagttccttgcccaaagtctcccacttagc

SEQ ID NO: 204707 - DNA, 371 bp, Homo sapiens
tccaaatccttgcctcatatctggcttttggcccaatcacaccaacaaaataactcttgctaaggttactgtgacctccatgatgataaaagccaaaatatgtttttcaatcttcatgttatttaaattctagaaatttctatcacaaatcattcttttgcttctgagacattcttccagtcctccttcctttcttctgtatctcctgtaggttcacctgttcttcaccattaaatgttggaactagtcaaggttctgacttagctgaccttacccacacctatggctcaattcatgtatatacaaattatgcccaattttatattcccaacacaaatctctcttctgagcacaaagctgtatttcaaact

SEQ ID NO: 204708 - DNA, 579 bp, Homo sapiens
ccctgtagccgcctgatgtggtgctagatgatatgagtgaagacgtggacaagagagatgtggaaactcccagagattgcattcaactgtgggagacagaaaataacaaagcaaacaagtcaaaggaaaggcccagctataggtaaatcctctaaattaggggtgtccaatcttttggcttccctgggccacactggaagaatgattgtcttgggccacacataaaatacactaatgatagctgatgagctaaaaaaaaaactcataatattttaagaaactgtaggaatttgtgttgggctgcattcaaagctgtcctctgccacatgccggccaagagccgcaggttgcaagagcttgctctgaaggaaactaaagaagacaatggggtgcagggtggccaggaggggagggccagagcagcgggcagggtctgcattctccagggccttccagacagtcagggtgcaaagcagagagggcctctggacgcagctgtgtctcctgctactctgggcctttaacatttcaacaaaattgtcactgtaaaccaaaaacagaattctaagctccacccca

SEQ ID NO: 204709 - DNA, 518 bp, Homo sapiens
agatctgaaaccatctttaattgaaacttcagggatcgacaagcacagaaagcatatgggtaatttctccctaggccctccacaccagctgagatgtcaggagggcagctgcagcctttgggcagctcattagggcagagagtgaggatggatggagtgagacagaaagcctcttcctgctgaatcaccagcaccagttccaagatctgcctgggccatcctcacaggctgcttggccaaggactgactaagcacaaggctgtagaactggcagagagtcaagaatggtggggctgggcaatagctaaaggagtgacatttgtgaatgagtgtgatgaattgtttctgtttgtttagactaaaccccagctccgcctcacgcaagtggagcaaccaagtgtgagacactgagatcctggaaatgaaaggattgtctgaccagctgttcaaattggtggctgaagctctccggtaagaacagctaacactcaggtctcactcagagtcttatagataac

SEQ ID NO: 204710 - DNA, 375 bp, Homo sapiens
catgtcccttctgtcctcaccccagatgcatgcagaagtaatgtagtttactggcatagattctgaaagcaaagtacctgagttcaagtcttggctttctcatctcagatgaatcccttgacttccctgtgtgtcagtttcctcatctgtaaaatgggggataataccatctacctcatagggttgctacgaagattgaatgagataatatctacacagcagttagaacagtgcctggtacccagtgagtactatgttcctgcaggaggccccctccccaaatttctatgccctatgagttgccatctatagttctttgggagatgatgggggcatcataaggtagttcctagtcatggaaaatagggccagaac

SEQ ID NO: 204711 - DNA, 145 bp, Homo sapiens
taagagcgtctgcagggaggctgggagtaggcagcaaggaggtaaggaaggccagcctggagctgagagcagtgacgggcctcccaagctgagccctctgtactcttcacactgctttctagcaaaaagagcactggatacagag

SEQ ID NO: 204712 - DNA, 431 bp, Homo sapiens
tgagaaataaatttctgtggtttataagccacccagtctatgatattttcttatatcagcccgaacagactaagagtacagtagctttcaagggcaactggatcaaggggaaggagaactttttttatttgttaaagatgtcagcaactggccgggtatggtggctcaccctttaatcccagcactttgcgaggccgaggcaggcagatcacctgaggtcaggagttcgaaaccagtctgaccaacatggtgaaaccccgtctctactataataaaaaattagctgggtgtggtggtgtgtgcctgtaatcccagctacttgggaagctgaggtatgagaattgcttgaacccgggaggtggagtttgcagtgagctgagattgtatgactgcactctagcctgggtgatagagagtgactccagctcaaa

SEQ ID NO: 204713 - DNA, 285 bp, Homo sapiens
agcctcccagtaactgggattacaggtgcacaccaccatgcctggctaatttttgtatttttagtagagacgaggttttagcatgttggccaggctggtcacaaacttctgacctgaagtgatccactcgcctcagcctcccacagtgctgggattacaggcgtgagccaccatgcctggcccccatttgagtttcttagcatcttatcaaatagcaattgtgaccatttatttcaccttctaccttgggcacagacacatccatatcccctttgactagagtgg

SEQ ID NO: 204714 - DNA, 352 bp, Homo sapiens
tttttggtaaagatggggtctcactatgttgccaagctggtcttgaactcctgagctccagtgatcttcctgtctcagcctcccaaagtgctgggatttcagatgtgagccactgcatttggcctcagtcctattttcttcactcagggagcatgctggactctgcccttgttccccttagactctccttccctgttacatttcttggaaacactgtttagggattaagcctggataatcacaggactcacctcacttgtttcccatctcccaaggaatcactatcgttcactgcctgatgcccagtaacttaaaaactattgtttcatatattttttctttttttctttct

SEQ ID NO: 204715 - DNA, 353 bp, Homo sapiens
  misc_feature (323)..(323): n is a, c, g, or t
  misc_feature (332)..(332): n is a, c, g, or t
tttttggtaaagatggggtctcactatgttgccaagctggtcttgaactcctgagctccagtgatcttcctgtctcagcctcccaaagtgctgggatttcagatgtgagccactgcatttggcctcagtcctattttcttcactcagggagcatgctggactctgcccttgttccccttagactctccttccctgttacatttcttggaaacactgtttagggattaagcctggataatcacaggactcacctcacttgtttcccatctcccaaggaatcactatcgttcactgtcatgataggtggtggtggccgtgctggnctttaattnttagaatggtgaggttcatca

SEQ ID NO: 204716 - DNA, 467 bp, Homo sapiens
tttctccctctaagacatatgtggcttttcactttattttcaactgaatgctttcgctgttttgggtttagcaagcttttggtcttaaaaatatccaacaatgcagttaagaggccagatgactttatgcatgaaacattgttaagatgaggaattttcccatagaaaggtgaccagatttgaggaaattatttagtcagtataaacatttctctggatgtaaacagtacagattttactttcaggctttcctaataaagtttctaacagacctggaaaggagaaggaagagtaacatctgttgcaaaaccccagttacgtgtaggacaaataagaatctgggagagaggtgacttgcccaagtgacacaccgatttgggatatattagggagaaccattaattcttgtccataaggcttgatttagaattgttttttattttaatggaagttctgtagaaagaaag

SEQ ID NO: 204717 - DNA, 474 bp, Homo sapiens
agtacagtggcgcagtcacagctccctacagccttgacctcctcaggctcaggtaatcctcccacctcatcctcccacaggtgcaacaccagcattcccagctcatttaaaaaaatgtttagagacagggttttgccatgttgtccaggctagtctggaattcctgggctcaagcaatctgccctgtccttccaaagtgctgggattactggcgtgagctaccacccctacttgaggtttctcttaataaatattttgcttagtgtcctggtgaacccagttgtcagtaagagccatttgcctcctgccttggttagtaggtggaggaaatagatgcctcatatgctctgtaaggaaagcagggctgggtgcagtaactcacacctgtaatcccagtgatttgggaggccaaggtgagagtattgcttgaggccaggagtttgataccagcctgggcaaccccatttgtacaaa

SEQ ID NO: 204718 - DNA, 405 bp, Homo sapiens
gaagaaatctgattaattcattcaaatatttattgagctctattctgtttcaggcaagtctaaatgcttagggatacaggagttcctaagagagaaaaattcccccctatatagtggacaaatacaaagaagagagtacctaatatatattaaatggtgatttaagtgccttggagtgagtaaagtgagggtggtagagaggaagttggcagctggagggagacagggaggaggcttcatcaagaggacaaggtccaagacaaggcctcaaaaatgcactggtacacattacaacagctaccgtgtcctgtatgaccaccactgcaaggagatgcatgtcaagcccttcgcttatgtcatctcatttaatcctcacaataaccatgtgcagctggcatcaaggaa

SEQ ID NO: 204719 - DNA, 371 bp, Homo sapiens
ggagacttcatggagaagaacaagatggcttagattaacagtcacagttgtatctgagagaatgactgaaaatatgggttatacatcatatattccatttaatcagcaaagttatattaagcatctattctgtgcagaaactaggataagagataaggataaaaagatggaatcagaaatatgagcttatagtctggaacagggaataagacatttatataaacagttaaaatagaaagtaaagaattataacacatgacagagaggagatgcagatgaagtgactaccccaggatcggtagagatgaacatctaagaggaagaagcacatgtaaaggcaagtggtcgagaaagcattgagtacatacagg

SEQ ID NO: 204720 - DNA, 669 bp, Homo sapiens
cactaacaccagcctgtcatccaagctgacacccttctatggtcctggacaaggctcagttcccttgctttgtccttggggagctgagcagaacaattgctttgagtctcacaatcttctgaaccaattcagcttcctaataatgatatttaaatcaaactcactttgagtagatggctgagccatctcctttatgaaggagaaaaatccctagcacataccataaaccccacataaaccaagcaatatcaaatattcagatcaaggtgaataatatgcaaaataaagatttcttctacatgtacaataatggtgctttggaattcatttttcaaatttgcgtcttaaagttacgttctccaggccaaaaaataattgcaagttcatctcagcaggttgagagaaactcagattttgtctgagaagatacttttgcaatttgtggaggatggcatttgggaggatattaggttctacagtagttaggatcaggcgttaatagccacatgtaatcagatccaaaataacgctaaagctaatggaagatacagcttttgtcaattctcaagaatgccaatcttcccaaatagaatttcattcacctgcccaattttcactgggtcaaatcacatcagatattttataatcaccaattcccagacagccaag

SEQ ID NO: 204721 - DNA, 612 bp, Homo sapiens
ctttccagacacaactgccaggtaattttaatggtcatttaaatctgtaataccttgggtgaaagtccactgtttgaaaggtgaatggtatcgcttgtgatagtatggtccaaatttggctttcagaatttacctatagtgcctcctgtatagaagtccttatgtgaggtccacaaggctgcacaggcagctgttccacagcgataaccttggggcaggggaatgttactgaggggaatctcttctcctttctgtctttcacatactggagttcttctaatgtttagtgttttttaaacagctttactgagatataatcgttatacagaaaactgtacgcatttaatgtctataatctgaagtgtggacatacgcatatacccatgaaaccatcaccacaatctagacaataaacatacccctcactaccaaaagggtccttgtgcccttttgttggttgttttctttgttttttaatgttcagttttacaatgtggtacttctgaaatcagaaaaaggaaatttacaaaatggaggaatgctggggaatttaaagatactatattaaaaaaatgtttaaagcaagtgtagtttttcctgaagcctaagaac

SEQ ID NO: 204722 - DNA, 475 bp, Homo sapiens
agttactagaactgaaccctttatatagtaaatcaagacatatgttcatgaatctctgagtcagtacatgccttaagtcacttaaaacgttgccttgcaatttcttcctttgcaaaataaggatcatacccactctgccttttacagagaagtagtctgtgaataaaatgatatggtgaatattaaagtatttggaaactgtagggagaaagaaattgattgttgctttgtaaccatgtttataggcatcaaagaaaactcaaagcctcctgccttcttaattctgcttctggagatcccacttactttctttagattctttaaataacattaacaatacaaaccaggctgggcaagccttctctttctaaaagtctcccttggcaggcttggtggctcacacctataattctaatgctttgggaggctgagcttggaggatcccttgaggccaggagtttgagaccttggcaag

SEQ ID NO: 204723 - DNA, 424 bp, Homo sapiens
caaaaatcagctgtctaattatccttcttgcatctgaattgcaagaaccaaaatctgtcctaatgataagtttgaagaatatcaatccagttaaccgtgatgccagaactttccttggactttactgcaacatgtaccagttgcattgagtttgattaaactggtagtaattcttcctcgctaacactaacctatacaagcaacgctgagacgcgcgattttgctcgggttacactgagattcttgtttctatgggagaaaaaaactgcataagacaagttttgtcttcctctagggcctgtaaccatcacggacaatcatgaaaagcaatgcctggagtcacagggggccagttctgctacatcccatacctaacgcgttaagcaaagaacagtttttttgtcaatgaccacaccacgttgtt

SEQ ID NO: 204724 - DNA, 246 bp, Homo sapiens
cacccacgcccttttcaaaggagacttttcatccactcagaattctaaaaatgatcaaaactctctaccataatggatattttccttgggtgaagacagccctaagccattctttcatatttaataacagcctatttgaaaaaagccaagttcctccacacaggcctccaacttgtgccatctgatggcagaagagggatgctgtcattacccaagtgtacagatgtacactaacacttcggacag

SEQ ID NO: 204725 - DNA, 227 bp, Homo sapiens
agccctaaacctcagtatgtcagaacttgactatgtttggagatagggcctttaaagagaggagagttaaaatgagatcattaggatatccctaatccaatctgacctgtgtccttataagaagaggaaatttagagtcacagccattcaggaatgtacatgtacagaggatagaccatgtgaagacacagtgaggaggtggccatctgcaagccatggggaggggc

SEQ ID NO: 204726 - DNA, 565 bp, Homo sapiens
cagcaactagcatatgcaaccatcattccctgcctagactacagccatatcctctctcccagctggtctccttacatccattcttcgtttcttaaatccattgtccacacacaaccagtaagtgtaaaccccttattgttcgtttacttcaaactatttagtggcctctcattaaacttaaattctaaactccttaaactgatccccatgtccttgcaagatcttactcacttttctccaggcttatcccatgcccccttttcctttccttaccatgcttgagccaaactgatctcttctcactaccttgtcacaagctcctttccagttttgcacttgatgttgttctttctctcagttgtcaacccttattcttaagtcttggcttgtatctcttcctgaaagcactatttctttttacttcagaatagatcagaccacccatagtatgtgctgccagcctgcagtacttctctcttgttggcttatcacaattgtaatcctgtaaattgtcttgtgataactgtatccccattaaactgtaaactccatatggacaagaact

SEQ ID NO: 204727 - DNA, 509 bp, Homo sapiens
caagaaaatgaagcctgagcaagcttggaacatgctttgcacaacagtagcagggcagagactcaaggccaaggccaagcccaagtggttgctgaggcccaagtcctgtcctggacagctcccccacccaaatttggagtccaaaatcccaagctgtaggtctgggcctgggccacacttggtttcctcatcgatcaagggatcagaatgccgagctctgggcgtggcttgaaggctgccctccaggtgaaaggcatttggtgaccctcagcacctcagggatgtgaacagggctgataataatttctccatccaagagaatgggaagacttcatgggggaggaggctgggagctgggctttcaggacgagcaggatccagagggtggagaagggaaaagggacattccaggctggaagcagggaccggctgtgcaaaggctgggtgcgggggtggggggggtcagtcaggggcaggaccactgtgttttggccgggacataaacactt

SEQ ID NO: 204728 - DNA, 548 bp, Homo sapiens
aaaggattcagtcccaactcctcagtgtggtatagtcaggccccaccttatccggcatcccacatcccataaatccacaggtacaccctgattccacagattccagaacacgccacaggcctccacacctctctgcctgcacgcactgttcctcctcactaagatatccttccaccttttttgcccagagaattcctgctgttccccaagcccagcctcagtgccacttccttgagaaggcctcctgatgaccccagcagaagtcatttatcacccactcattcattcaaccagcactaggcacccaccacataccagcccctgggcggggcacaagtatggttcttgcttagtgggatgaggagtcaggctaacctaggctcaaaagcacctaggagctacttgaccttgaacaagtttttatttaatctgtctgtaaattgaggaccctaacgtcctccattcccaaggggtagattaagtgaggtggatgcacaagaaatacacagatcatggtaggcgctcaataaatgtggccatcctttctc

SEQ ID NO: 204729 - DNA, 164 bp, Homo sapiens
aaagttcagactcaataatatggccaatggaaaggcacagaaaggttttaaccagaggattccattacagttcacataactgtttctgataccttttaatccatttaacaatatttattaacacatcaggcaattctaacgaatgagtttggacttaactgctg

SEQ ID NO: 204730 - DNA, 803 bp, Homo sapiens
tgatagcaatatccaaaaaagcttcagtaaagaacaatttatatcaaagatctttcttcactgtggagaatcacagacttccttggaaatatactttagatggtcaaatgatacatcatttaaacttaattctatttgggtccatgcatgtatatcatgggcttgggaagaagtgaggttcttcctttcaagttatgtctgtagcctttgatattatcactttgttatatttttatgtccaggtctttaaaaggtttatgttaggaaatacttaaatatacccaaaagtgtataagaataatgttaattaaaacgttaacacttatgttatcaatacctaaatttgacagatgtgaatattatgtatattttcaatctacctgttttatatttctataacttgctttgttttgactaatgctatgactttcaagtttgcccatgctaatagatgtagcactatttctataatactcaattgctgagtatccattttctgttgatgaatatgtatgctatttccaatatattgctattatgaacagttctgtaatgtttaagtttatacatattttcttggagactcattcattcatccatccagcaaacactaattttgccactggtacatattaagccatatagcaggcattagaaaaatatatatatataaacttggttcagctcttgagaagtccagacactagtggaggagaaagatgtgcaaacaaattagtgtaatacagcttgctagtgcaatattagatacatgtatgtatgtatatgtacatgtctatctgttt

SEQ ID NO: 204731 - DNA, 347 bp, Homo sapiens
taatacccatgagactatgattgatgtccacacatctgtcattttctcttatcaatcaagccatttgattcataggttaaagaacaattttctttgcagattttgcatgtatggtaaaagcttgagcctccgagtttaacagtcctgggttttaattctaactgacacattgtgtgaccttgaatatgttcctttactgaaaatcgaattcctcatctctaaaatggagatgacacctacctccgtcgcattgttagagtatataggagatactcatggatgtataaaagtaattgttattaatatctcatgttactaaaggggtgctttgggtgggtatttagtgt

SEQ ID NO: 204732 - DNA, 299 bp, Homo sapiens
tggtgcgctctcggctcactgcaattccgcctctcaggttcaagtgattctcctgcctcagcctcctgagtagctgggattacaggcgcccgccaccacgcccggctaatttttgcatttttagtagagacggggtttcaccatgttggccagggtggtctcctactcctgacctcaagtgatctgcccacctcggcctcccaaagtgctgggattacaggcgtgagccaccgtgcctggcctggctgtgattttaaaaatcattattatggacatgacaatggctgatgtgatttttt

SEQ ID NO: 204733 - DNA, 379 bp, Homo sapiens
ttgtattctgctatggataacagaaaatcctactagtggtttaaacacataagcactttcttttccttatgtaacaggaagtctggaggttgttggcattggttcagtgtctcagggaggtcagggctcagttcactgtttctatttttttttccctcacaggctcacaatggctgttgaagctctagccatcaagtgcagtgtccaaacagaaagaaacaagggctggaaaagggaagggcagtaactatatttagaaaacaagacttttccagaaatcctcagtagacttctacttaggtctcattgttccacaaagtcttgcctgctgcaaaagagtttttggctttgcagcctttatactagaggaaagaagaaa

SEQ ID NO: 204734 - DNA, 702 bp, Homo sapiens
tcaaaaccagatgagttcatatttatttctgtatcttcatgacgcttgctgctttttttctcttcattttcacatgcgagggtataactgagtgttcagggttttctctgaaagcctgaagggattgtgtacttttacattgaacttgactgcagttagaaccattaacctagatgacttcagccaaattatgtattgtttttgtttttgtttttttgagacagggtctcctgtcacccaggctggagtgcagtggcacagtcatggctcatgacagcctcaacttcctgggcttcagctgtcctcccacctcaacctccatagtagctgggactgtagtgcacaccaccatgcctggctggctaattttttttttttttttttttttgagacagagtttcattcttgttgcccaggttggagtacagtggtgccatcttggctcactgcaacctccgcctcctgggttcaagcgagtctcctgcctcaacctcgagagtagctgggattacaggcgcccaccaccacacccagctaatttttgtgtttttagtagagacggggttttgccatgttagccaggctggtctggaactcctgacctcaggtgatccacctgcctcggcctcccaaagtgctgggattacaggcgtgagccaccatgcccggccaattttttggtattttttgtagagacggggt

SEQ ID NO: 204735 - DNA, 768 bp, Homo sapiens
tggcttgtgctgctgatcttgaggatccccggtgtaacggatcaggtttcagtgtggagatccagagaaggcctgcctgccttactaaaaggaaggagtagtttagaggaaatgggcaggagtaagctgagaatgagttgtcagaagtcacaagcccttagagaagggtggcaagaaattagcccactgataagaaaaaggctgaaacaccaatgtgctgccctctaaagtgagaggaacactcagagccagctacaggcaggaggagccctgaggaagaagttgggaatgccgtgaagactatgtgggccatctctccagtcaagggagaaaaggagcccaaaaggggacggcaagccagaagaggcatcggctctgcacaattgtcaccagagtaacttctaaaatttaaaattgggattcattccctagggtgtacagacgggctacaggtgtctgaaaatgttttgctgtcagaagcaaaattgtttgtgtctaggtatttttctggggagagtctctatagctttcatcagattctccaagggaggtctttgcaccataaagagctccaccgagactcaccaccgacatacttggaggaagatattataattatagaggacacaacccatttactgaataatctctcagataagctgatcatcatctaacagagaagagctactgaaggagctgaactagtgctgctatgggaaatgcctggttccttctcccttcgttataaatctttttggcccggttgat

SEQ ID NO: 204736 - DNA, 503 bp, Homo sapiens
ggtgctctagaggagtcgggatgaggaacgtcatcaggttctttttggatataatgctgaattctgggtgttatcatatgctttttttctattctaatcttttattctttgttaaaaaatatggtcatgtttataaaatcacaacttctacatttaaagggtaggttgaccaattaaagcagcctttccaacctaagtgcatctggctaggtaattctctctgagctttattatttgttttagagcttagatcagagtttgacaatgtagtgtatatactaagatttcttaaagatttatctgtgtattccaaggtgtgcttatctgtgtaaaaaactcagcaagacatggcattgccacaggctatcaaacatttgaaatattcctttggagttattttctggaattaggccacttttcaataattagatgactttgagctcttggagtcatctcctagaaccacctttggaatagagctgcctctgtgctcgtcttaccag

SEQ ID NO: 204737 - DNA, 828 bp, Homo sapiens
agttatttctcctagaaggtattctgattcttgttactctgttagccagaagtggaatcccctcccccaacctgtaaagttttcattagcattattacacctattgttactgactactatccaataattcctttgtttctcgaattcttgaaaagggaacggcagccaaatagagctcagacaaaaaagatacttctgatgttgttcagtgtctcttgaagcccacataattccagaaaattgcaaatcaatcagatacaggcttagagctagaagtaggtcagctaccatagcacaagatgatggtgtgaaaatattttagtgacagcttgtgcatgataatatatcctttcttgttcagggttctttttggatataatgctgaattctgggtgttatcatatgctttttttctattctaatcttttattctttgttaaaaaatatggtcatgtttataaaatcacaacttctacatttaaagggtaggttgaccaattaaagcagcctttccaacctaagtgcatctggctaggtaattctctctgagctttattatttgttttagagcttagatcagagtttgacaatgtagtgtatatactaagatttcttaaagatttatctgtgtattccaaggtgtgcttatctgtgtaaaaaactcagcaagacatggcattgccacaggctatcaaacatttgaaatattcctttggagttattttctggaattaggccacttttcaataattagatgactttgagctcttggagtcatctcctagaaccacctttggaatagagctgcctctgtgctcgtcttaccag

SEQ ID NO: 204738 - DNA, 454 bp, Homo sapiens
tccgtgaacctcttcagaccggatgatgtgtgttacatccagaaaacctcagaggccctagccatctgcaaccgtgggtttgctgtcctgtgtatttatgttgcattgtttcatgtgtcagagccctctgcagacctgttactgtgtcccctgtgagtctagtactcagggaagccctccctggcagtagcactttgccctggggaaggagaaggagacgcagcaatctgtaggtgtggcgcccgcatgtgggtaagagccagcagccggttctggaaccccgcgactagcacatctgtttggatggccagtgggtgttagctgttgagatctctggcagggcttctgtggatccttcttctcactcagcttagactttcaggctcccattttgggtgctgtcagctttcagcgtatcagctctgtggcaccatacattatgcacaaaatcata

SEQ ID NO: 204739 - DNA, 285 bp, Homo sapiens
ccgctgcagctaaatgcgccctgcgcctgagactgcggggaggctccacgcgaggtggtgctctggagacatccacaggcttcaacacagcaccagatgaggtcagcagtgggaaaggggctgggtttacaagccttggatcacctgggatctcccagcaagccaccaccaaagtcttcagtgcccacctcaacagggataaaacagttatgaaaattttcgcaaagagccctgtcattagaatacatgtatacaaagaaagacagctgctaatatgtcacctga

SEQ ID NO: 204740 - DNA, 355 bp, Homo sapiens
tccctttgccccactctgatgtgctcactactgtatcctgcatcaatctcagggctggcacacagtaggtactcaatgtatactaagggacgctcaacaggcgtcctctccagactccatcctctggagtgacatcacctttcagatccccattcaccttgacctctaatggctgcaggatcaggctctcagcagatctacatctgaatagaaatcaaagactctggcgcaaaggccaaagggaggaattgtccgcaaaggacctttggggaagacacctaaaaccacggcggaggggtgaaattaaagactttcaaaacttaaaaataaataaataaataaaaaataaaaccac

SEQ ID NO: 204741 - DNA, 567 bp, Homo sapiens
ggtgagatttctaaccaagatgcctacgtcattgtcttccttgaaatgctcttcaaattttaacatgaaacaccctctgaggatggtttgtgtttgtttttgtttttgagacggagtcttgctctgttgcccaggctggagtgcagtggcgcgatcttggctcactgcaacctccgcctaccgaattcaagccattctcctgcctcagcctcccgagtagctgggactacaggcatgcaccaccacacctggctcatttttgtattttcagtagagatgtggtttcactacgttggccaggctggtcttgaactcctgacctcgtgatctgcctgcttcggcctcccaaagtgctagaattacaggcttgagccaccacgcccgggctggggacagttctgacacagaagtgagcttatactcccgagagctctagagctttggcctggacatttcttcccagcctggaaatttcttggaagtgtcctttattcatgctcaaaattcctgggaatgctgcaacctcttccaccatgaaatgatagcattgcagactcttgttttact

SEQ ID NO: 204742 - DNA, 502 bp, Homo sapiens
cttattagaaaagtcagcgtgctccatcttccctccagccacaaggctgtaggcagcacgcgcgtgctcggcagtcggctagtctaagggtgattgagcgtcgggagctgctccccatgaccggactctcggtgctgtccccgtgcctgatgtttcctcctggtggatgaggggctcctccaggtgggcgggcaggctcacttaggaaacaagcccaccgcgggggatggagcaggagagattgccattctcgccagggctgccttcccgctgtctcctcctccctcctgtgccatagcaaggtctggaagaggcagcgcatgctctccctggacgtgcctcccggcgccctctgaactctgctgtcctctggctctcctttctcagtgctctgcgtctttcgccagccaggtggggccctttggcatttctctagcaggcatgatggagttcccgctcctgccgagcttccaggatgcggtgttaaggtgaagagatgtgc

SEQ ID NO: 204743 - DNA, 263 bp, Homo sapiens
tccttattcatgagtcacttttgataattcgtatttcctagatcatttcttttagattttcaaatctgttactatataggtgtgtataatcttttgtcattaagatctgtggtattcatttccttttttttattagtgatttcactatttttctgaatttgccaaatgtttgtctacttagtggttttttttactaaccagctttgagatttacttattgtattggtttttttttgtttgttttctgaatgcctgatttctac

SEQ ID NO: 204744 - DNA, 1106 bp, Homo sapiens
tactggacatgctggagcctgcccgtgtccttgtggaccatggaatttgcccggggttggggggcaggggtggagagaaataaaacttcctgtgatctatgtatcggcccagtacatagatcctggatagaggcgattgagctaagcatgggaccaagcatttctgtgcagtgcctgcagaattgagtttccttctggctatgggagattcttctgagctgtctcagttgtctgacatctggcatctgccatgggccaggacgtctggggcaggggcagaagaggacaggaggagactgccctagaggattctgggaaaacgggaaaacagcaaaacagagctacccaccaatctcaggctgatgcattattaataaaagtgactgttgactgagtttgtagacataatatgtttgaggtacctggcctagtaagcaccatacaagtgctattatttctaaatgattttatcaagataaaagacaccagccaggcatagtggctgccgcctgtaatccctttgggaggtcgaggcaggaggatctcttgagatcgtaagttggagaccaacctgggcaacatagcgagtccccatctatgcaaaaaatttaaaaattagctgggcatggtggtgcacacgtgtagtcctagctcctcaggaggccaaggcaggacaatcccttgagtccgggaggtcaaggctgcagtgtgctgtgatcacaccactgcactccagcctgggcgacacaaggagaccctggatctaaaagtaaaaatgaaaaaaaaaagaaatgaagcagcagggcgtgatgactcacctttaatcccaaagctttgggagggaagatgggaggactgcttgagctcaggagttccagaccagcctgggtaacatggtgagaccctatctctattaaaaaaatataaaaattggctgggcgcggtggctcacgcctgtaatcccagcactttgggaggccaaggcagccagatcatgaggtcaggaggtcgcgaccatcctggctaacactgtgaaaccccacctctactaaaaatataaaaaattagccgggcgtggtggtgggcagctgtagtcccagctactc

SEQ ID NO: 204745 - DNA, 943 bp, Homo sapiens
tactggacatgctggagcctgcccgtgtccttgtggaccatggaatttgcccggggttggggggcaggggtggagagaaataaaacttcctgtgatctatgtatcggcccagtacatagatcctggatagaggcgattgagctaagcatgggaccaagcatttctgtgcagtgcctgcagaattgagtttccttctggctatgggagattcttctgagctgtctcagttgtctgacatctggcatctgccatgggccaggacgtctggggcaggggcagaagaggacaggaggagactgccctagaggattctgggaaaacgggaaaacagcaaaacagagctacccaccaatctcaggctgatgcattattaataaaagtgactgttgactgagtttgtagacataatatgtttgaggtacctggcctagtaagcaccatacaagtgctattatttctaaatgattttatcaagataaaagacaccagccaggcatagtggctgccgcctgtaatccctttgggaggtcgaggcaggaggatctcttgagatcgtaagttggagaccaacagcctgggcgacacaaggagaccctggatctaaaagtaaaaatgaaaaaaaaaagaaatgaagcagcagggcgtgatgactcacctttaatcccaaagctttgggagggaagatgggaggactgcttgagctcaggagttccagaccagcctgggtaacatggtgagaccctatctctattaaaaaaatataaaaattggctgggcgcggtggctcacgcctgtaatcccagcactttgggaggccaaggcagccagatcatgaggtcaggaggtcgcgaccatcctggctaacactgtgaaaccccacctctactaaaaatataaaaaattagccgggcgtggtggtgggcagctgtagtcccagctactc

SEQ ID NO: 204746 - DNA, 856 bp, Homo sapiens
tactggacatgctggagcctgcccgtgtccttgtggaccatggaatttgcccggggttggggggcaggggtggagagaaataaaacttcctgtgatctatgtatcggcccagtacatagatcctggatagaggcgattgagctaagcatgggaccaagcatttctgtgcagtgcctgcagaattgagtttccttctggctatgggagattcttctgagctgtctcagttgtctgacatctggcatctgccatgggccaggacgtctggggcaggggcagaagaggacaggaggagactgccctagaggattctgggaaaacgggaaaacagcaaaacagagctacccaccaatctcaggctgatgcattattaataaaagtgactgttgactgagtttgtagacataatatgtttgaggtacctggcctagtaagcaccatacaagtgctattatttctaaatgattttatcaagataaaagacagcctgggcgacacaaggagaccctggatctaaaagtaaaaatgaaaaaaaaaagaaatgaagcagcagggcgtgatgactcacctttaatcccaaagctttgggagggaagatgggaggactgcttgagctcaggagttccagaccagcctgggtaacatggtgagaccctatctctattaaaaaaatataaaaattggctgggcgcggtggctcacgcctgtaatcccagcactttgggaggccaaggcagccagatcatgaggtcaggaggtcgcgaccatcctggctaacactgtgaaaccccacctctactaaaaatataaaaaattagccgggcgtggtggtgggcagctgtagtcccagctactc

SEQ ID NO: 204747 - DNA, 213 bp, Homo sapiens
gccacctaaatgatgatgttataattattcttttaattgctatattgctaacagtcaccatatgtagaacttagaagccagaacttgactaagtttgttttcctgttttaaaattccatttgggtacatgacctcacaattaagttttgttttgaaaaatacaaagttttctgaaggaaaaaagcaatagttaaaactttatttgctttgttc

SEQ ID NO: 204748 - DNA, 303 bp, Homo sapiens
gctatggttattttcttgctcttaaattaaggaaaaaacaactctactaaattatgtgaattttctctctggaatatttagttgttttacgtattctctattattgtaacatattaaatagtgctccgaaagcccaaacagatcactctctgctaacttaacacacttgagaatggcaggaaaattccaccctgagtcataataaattatgttagctaacagaataaccaattaaatagaattttatagatgttttattttaaaatataatatattgtaatatcttatagaatctgttccttt

SEQ ID NO: 204749 - DNA, 164 bp, Homo sapiens
attcaaaattactactgcaaaggtcactttttgagctatgcttcatggagaataaagtcttctagaagaggagcatgggtcagaactcagtggagaggagagctctgggaagtgtccacatctcatgctctgggctgctgccttggtagggaaaatgagtgtgt

SEQ ID NO: 204750 - DNA, 587 bp, Homo sapiens
tcgtgatccgcccgcttcggcctcccaaagtgctgggattacaggtgtgagccaccgcgcccagcggattattgtcttaatttgccacttgggggaaatgaacacataaagttgagtgccacatacaaagtttcatagcagagtcatctctaaaacctaggtttaaagttctcttagggcagtatgactttaggtaagtcacttctctgaatctgtattctcaactatataatgaggaaaaatatctaccttgaagctatggtaaatattagatatgtgaaagtactattcgtttatcaaatacaattctaacatgactcctgattggtcaatcccacaactatctctcccactctccagccgtccttttcagaagcaagcctccaggagagttgataccactattcccaccttcctcctgtgcatccaccaatctacctcacattctcctcccctgcacccagcacccctggaatgctaccaccctgctccagccaggaggccagaagggtgatgtaggaagattgcagcactaccatggaagttctcaacagcacccccgacccaggaccccaggttcccactgg

SEQ ID NO: 204751 - DNA, 431 bp, Homo sapiens
cagtcactgttctcaaattgtccattatctaaaacacattacatgaccatgctggccactgatcgaggcacctttcccaggggctttttttgtgaattaagaaaacaaggtaattcaccagttattgccaagatagtttggcttcttggctcatgtggatatcacctaggccagtacttttgtgatttactgtgtactccactttaacggcctgcgatcttctagagaagaacccgccagggagcagtgagaggcctccctggtagactgagacactgactgtccctccccctatccttttcgtctttctggccagcagaccagcaggtggccctgccactggctctgccacaggcatttcctttctgtgcagctgtgctggcctggctgggggttggtgcgaaggggtccccaaaatactaccttaaaca

SEQ ID NO: 204752 - DNA, 479 bp, Homo sapiens
ctgtaggtattattcatcttggaatctctcggtctcagtgcagagcctggcatacaggacacgcattttttaaaaataagcgaatgactatgacttggtagcactcatttcgttggctcctttcccaggggctttttttgtgaattaagaaaacaaggtaattcaccagttattgccaagatagtttggcttcttggctcatgtggatatcacctaggccagtacttttgtgatttactgtgtactccactttaacggcctgcgatcttctagagaagaacccgccagggagcagtgagaggcctccctggtagactgagacactgactgtccctccccctatccttttcgtctttctggccagcagaccagcaggtggccctgccactggctctgccacaggcatttcctttctgtgcagctgtgctggcctggctgggggttggtgcgaaggggtccccaaaatactaccttaaaca

SEQ ID NO: 204753 - DNA, 516 bp, Homo sapiens
taaggtgcgtagaaatggttatacttaagtttggggcacaatgggcgtggggctaagaaagatctcacatgtatcattaggctcatgaaaatcattcagagacttttctgcagcacagcatattgctagttccttccagccctcccttcgctaattctattttcagatctaagctaatatgcacatatttatcttcctcaagagacgccactgtctcagcaattaataaaataattgcttattgaagaaagatatctgtttctggtattgccagaatcacttgtgacctcatagggatgttgatcagagccttatattctaaggccaaggacaggggtgtgagttttgtatgggccacttcccaaaatctgcatcattgttcttatactacatgcgtgtaggtttcgtattaaatatgagtccttggtcacagtagcaataactgacaatggatacaatggtgcagatcatctgctcctggaaaaacaaagtctatgccctccagattaatggaat

SEQ ID NO: 204754 - DNA, 847 bp, Homo sapiens
tgcgttctctgactgtggaatggtattctttcatgcaaagtactttcaaaacttcccataaagaaactaaactagagattgtctttattaattaatggaactctgggtatgattaagggaattaaattagaaagtagaataacctagttaaaatcattatattagttatacatgagagtcagtgaacgatgacttgatttttacatgacatttgaattctgtcactatctgattcttgacctaaaggtttctttgctaaatctgatatttattatagtataatatgataatttggagctcctgttgcatctcactgccccaaaaatgttggaatgccatatgatacagggaaaagattggagttcatcaccgtggaattttgatctgtcttaatgacacaacttaattttcatgatgatagatctctgaatgattaatccagaatgatttggtacagtgactggaagaaattgtttttctgggaatttgcttcccataatgacctgatatacaggtgaccttagtataattgaaattaattataattttaattagaacatgctctgtttacagattataattgcgcagcattttaaaaaaatatacataattatgaggatgagagaattgcaaacttgaacagttcttttgttttctctccttttacttgaaaagctttcagaaagcttttgaaagatgacacagttttcatagcaacagtatgcaaattaggtttttctgccaagaaactcataaactaaagtatggaataacacaaatgcttaatcttaatcttggctttggattttgtaagcaaaagcattttctgcatcaatttttttcagta

SEQ ID NO: 204755 - DNA, 793 bp, Homo sapiens
tgcgttctctgactgtggaatggtattctttcatgcaaagtactttcaaaacttcccataaagaaactaaactagagattgtctttattaattaatggaactctgggtatgattaagggaattaaattagaaagtagaataacctagttaaaatcattatattagttatacatgagagtcagtgaacgatgacttgatttttacatgacatttgaattctgtcactatctgattcttgacctaaaggtttctttgctaaatctgatatttattatagtataatatgataatttggagctcctgttgcatctcactgccccaaaaatgttggaatgccatatgatacagggaattttcatgatgatagatctctgaatgattaatccagaatgatttggtacagtgactggaagaaattgtttttctgggaatttgcttcccataatgacctgatatacaggtgaccttagtataattgaaattaattataattttaattagaacatgctctgtttacagattataattgcgcagcattttaaaaaaatatacataattatgaggatgagagaattgcaaacttgaacagttcttttgttttctctccttttacttgaaaagctttcagaaagcttttgaaagatgacacagttttcatagcaacagtatgcaaattaggtttttctgccaagaaactcataaactaaagtatggaataacacaaatgcttaatcttaatcttggctttggattttgtaagcaaaagcattttctgcatcaatttttttcagta

SEQ ID NO: 204756 - DNA, 173 bp, Homo sapiens
atttacggataagaaaagttaattaaaagtgtgttgtttggggggcagacatttagtaattgtggaaattactgacttaccaaccctaaagatgccacattctttacgaacgaagtgagacgtttcatttggatgtaagaagcttttgagtcatctcaaagttgaaaagtacc

SEQ ID NO: 204757 - DNA, 445 bp, Homo sapiens
tgtttttcgcatatcagctaagtacttacataaaagtatctcaaatgatattggttctgggaatttcatttcattcttcactagccactcttagttgcctgaaattgatcattatcatcatcaaatatctatggaaagactatgggatacatagaagtgttgattcagggctgggcacggtggttcatgcctgtaatcccagcactttgggaggtcgaggcaggaggatcacaaggtcaggagttcgagaccagcctggccaatatggtgaaaccccgtctctactaaaaatacaaaaaattagctgggcatggtggcacgtgcctgtaatcccagctgaggggaggcaggagaattgcttgaacccgggaggcagaggttgcagtgagctgaaattgagccactgcactccagcctgggcgacagagggagactccgtctcaaa

SEQ ID NO: 204758 - DNA, 365 bp, Homo sapiens
ttgtatgtttccattttttaaagcaaacaaaatctccttagggtcagtgtctttaaaactgtatataaattcgaaggtacgatttagtgttgaacacattatacattattctagtatccttgattttgctattttaacgggaagaatggtgagtaccaatttgaactcctatttgaactcctatttaaggcagatctgggttctcctggctctacttcttacttgctggttgaacaaagttacttacattttctttcctattgtataaaatctgaggtgaataaggctctttatttctgaaatgcaccatatgagcacctaccctcttaatcactcgtaatggtcgtctactgtgatagcccgaa

SEQ ID NO: 204759 - DNA, 444 bp, Homo sapiens
gccgccacctaaatcagactcaggcggagagaattgaccgagtcggaggaggggtaaacagccctgcccctcgctcccactgtcccgccagagaacgcgccgcggaaaccccgagggcgggtcaagggccaggtacccgagtgggagtggactctcgtgccggggtggtaggggctaccctagcggtccagggccagagcctgcacgcggcgcccccacccccaccgctgggctgatcttgggtgtgtcagatcttgcccaagcctcactttcctccacggtggaggtgagaatgaggacgagcctggagctgcgtgaaccccggcgcccagcaagctctcaggaatcgccggcctgtaggtggacgcagagcctgaaagtgaggggcctgggtcgtgcatacggaaataaatatgggactctaaataaagcgagtttctgcag

SEQ ID NO: 204760 - DNA, 157 bp, Homo sapiens
atacctgcttgattgtaatgtactttctgaaaagtaataaataaatcagggaaacattccaaactaagtttctctcagttgtctcacaaaaactttgatggctttttaagcattttcacaaacttatggacactgaatatgatagcaacacttaaag

SEQ ID NO: 204761 - DNA, 580 bp, Homo sapiens
agcaatcagcgagattccgtgggcgtaggaccctccgagccaggtgtgagatatagtctcgtggtgcgccattttttaagccggtctgaaaagcgcaatattcgggtgggagtgacccgattttccagggtggactatccttttgctgagcaggactgaaatataaaacagaaaacctgagagggaagaagtaacgctatatagaagacaattcataatgtaaaaaggtctgcatggaagaggattgaagagccagatgacagatgagagccaaaaggtttggagatgctggcagaagacccaagactcctggatcagagacaaaagatttattactcacagcacagcaaacagtggtcccataagaatgtccagacaagctttatgtgaatatccctcttgcaggaacaagggtcaaaaactggagccaggatctgtctactgtattcgtgataagcattacctttgctgtccattctgcttcatgatttctcctgccatgatgagtgagcacctttccaagcggcacctgtcacagaaacaactgtcctcgcacgaccgtctatgtgacatcctcaag

SEQ ID NO: 204762 - DNA, 443 bp, Homo sapiens
tgaaaatatgtttttctctcctgccaatattttgattgcaacttcatgagagaccctgagctggaaccgtctagctgtgctgcttccaaattcctgacacgcaaaaactgagaaatcataaatgtgttgttttaagccactacattttgggctaatttgatatgtagcaagaaatgagtcatttcctccttcaagcacagttgaaactgagttgtaggtaattaacatacaacctaactttaaaagatgtatctatgtctttttttctttctctttcggacaccggctttcactctgttgcccaggttggagtgcagtggcatgactgaggctcacggccgcctccacctcccaggttcatgcgatcctcctgcctaagcctaactcaacagctgtgactagaggggtgcaccatcacactcagctaactttttatttatttt

SEQ ID NO: 204763 - DNA, 321 bp, Homo sapiens
gccatggaggtgctgctcaggcccttcctgccctccgtgcatcctcctcctgccctttctcagcagcccccagtatgactgccctctggggatcacccaaatagccttgtttcaagagctagagctagtatcattttcaacttagtagaaatgtcactggtacacttctaacaagcttgtcatttaccaagatgatcctgagccaacaatttaaggacacaaatatctcctaagttactacacaaacagttctagctagtgatactttcctttaatggaaggggaagtaagcagttcatatccaactggtctttccatttc

SEQ ID NO: 204764 - DNA, 460 bp, Homo sapiens
agggcattttcctggataatgagaagactctaaaatcaaataaagcttttgaacattgaagatgtttgccactgttccgttgaagaatcctatagatttatagtgattctaaaaggtgtcttatatccactatattaactagctttttagaagcttatgaacattgtagcttttattgattctagggaattggacccaacaataagcaataaaagtcgatggtaactttcttcccatatagggttgtgcagatcaatacttcgaatttactgtaatttgctggtaatggatggaagaactgaaaaaattgtggagccttgtggggcacagctgtgcggtgttgcctttttatctaagctcactgtaggtcacaggctttcccaagtaacaagaaacatagttaagtggcagggctgatacgcatatttatcaagagccttcataaatcattctaggaaaa

SEQ ID NO: 204765 - DNA, 375 bp, Homo sapiens
agaaggaaactagcatatcctacaaaggaaacttttcaaaggcttccggctttccatcacttggttcttccatctctcctgatatgcaaaatccatcctgggagggtgtaatagaggaaggcatatacgtactcctgcttgttcctgccaaagcccagggcttaaactccagatctatgtcacagcatcctgtctcaccttaataaaaacagtctctgagctacaccaaggcagaaagaaaaaagcaacagatggagacccagggtgtctgggttctcgctccaccactgtgtgaccttcaccaggcccccatttccctacctctgacattcctggagtctgtaactccctggaaactgtgtcagtccttcccag

SEQ ID NO: 204766 - DNA, 307 bp, Homo sapiens
cttcctctactacaactgctctaatatttattaatggtatcaccattaatgagtgagcaccttgatatctaagaatcatctttgattattcccttccctttacctaacatccatttctgtcatttcatacttcaaaatgctcccttcttttctactccttttgtattcccacatctttatagtaatagcatcctaagtccatctctaaccttccctttcaagttcattctatatagtacctaaattttctgaaaatgctcctttacttttctgaatctttactgttcggtatctgtcagggtactgc

SEQ ID NO: 204767 - DNA, 522 bp, Homo sapiens
gggagcagttgtcagatgctgaccggcagccacccctctcccagtggccccggccctgccacacataccagcagccctgccacacttgactcattcctggaaggaacctggtgcctggacacctgagtgtgcagcgccactgaagctcaacgcttactgtcgctcagggcctcgaggctcagaaagtgtgtgacttaaacacgtcacggaggccaggcacacagtggggccaacactacggcttcctgagctgtccagcaggtttctgcttctcaacgcggccctgcctggttctgtaagagcaggagcaggagcaggtgattaggacgtccgcgcaggagccgtggcaaaaacgcttccagacaatggggaactcagacgtctggaagggacgggggcagaacgtcagcgccacagacaaatgtgaatcaggcttattacacatctattgagtgagtcagctgcacacctcaagccttttcctgattctgatttttaaatggaatttcaaattctttcttt

SEQ ID NO: 204768 - DNA, 281 bp, Homo sapiens
ccctgtcctctggtgggacaatgcaaaggcgtgttccaccctgtttctcagaaggtctccagtgggactgagctcactgacacattcttaatggcttttctccttttccagtctctctttcccataccctcactccacttcctagaatcacttcccccaaaaccttcccacacccaaaccttgaagctgatattttgatctttatccatctgactcttattaccatctctcaattgattctgaacaatctcctatgatgaaagatgaggatttaagtgggg

SEQ ID NO: 204769 - DNA, 349 bp, Homo sapiens
ttacctgaggcctcaccagaagctgagcagatgccttgcaccatgcttcttgtacaacttgcagaattgtgaaccaattaaacctttttaccttataaattatccagtcgcaggtatttctttatagcaaattagagaataggttaacacagaaaaagttgaattcactattatagttggagacttcaacactcctctatcagaatgaagagatccatcaagcagaaaatcaggaagtcaacagagaaaattgataaaaccaaaagctggtttttgaaaaattgataaaatcagtaaacctctgtcaagccagactgagagagacaaaaattaatatcagagatgaaag

SEQ ID NO: 204770 - DNA, 410 bp, Homo sapiens
atgtgattctcttgctgtgtgtgataaagttgaataaaaccaacttgatgggttgaactggaaggagtaagattcgatgggagggcaataggtaatacggggaaagaaaggttggccaggatggctgtaacccagagatggggtcataggcagagatatttaatatattggggccttttgggcaacagatccatggggacaaatggttgctgtggaggtgtgcgccctcatcctttacatcttgaaccctaggttactaggagaaatgttctctatgctgattatgccctgttgtatgctctgcacaaaggtgttcttgtgagtggaaggagtttatcaatatattgcagcctactgagggagttgaatgcaagagagggagtagaaaggaggaggccagagttgggttt

SEQ ID NO: 204771 - DNA, 445 bp, Homo sapiens
aggtaatccttctagaaataaaactaattgttattgggcacttgtatgtaccagacactacactaagcatggtacttgggtttttaatttattacatgtaatgtcagtaggttcaattatatgatcgtaacatcttcatgaccagcagcatgtattttagagttagaaatgtagtctggtttttgagaagttttacaaggtgtatgtccaaaattgttctttcctcacatgtcagtgggggataaatacagcattgctctcacttctttgactctgggtgctttttcggatacattttcttcaacactgttaaggggcctcactgtcagattaaccaattatttttccacagttggtcaccagactttggaaaaaatccacctcaccaaaattttggatatcctgatctgtgttcatgaaatgctcttctttttgtaaaatctat

SEQ ID NO: 204772 - DNA, 570 bp, Homo sapiens
cattgcctatatctacagttgtaattagcctccccagagaacagaaaatcgtatatcttatgcatagagggtgtgaactttcccaccaacatgtaaagcattaacaaacctagaccatgtatagctataaacagccctttccatgtgttgatttggattattagttttgggatttttttttgtgtgtgtgttactgttgtttttgtatgatgaggccttcctttgattaagttggattatttcattccagttaagcatgaaatagcataacctggatccacattttccaaaaaatagaaagtcctcatgtgaacgtggatattttcttctgtttggtaggagattcatctccatttggtccattaggttcaagtaaacttttaggctatggaggattaggacagtggccctatgctccattctgggagtattggcagtaagggcagggtccattcataaaatggatcctcttcaaggaaagcaaactttttaagggaaggggttgtagaaaaatgtatagatatgtgtgtgtcaggagaagggaaatagttcggagttcacgaagcacac

SEQ ID NO: 204773 - DNA, 755 bp, Homo sapiens
caggctttttcttatatttccaagatcagactaataagcctagtcatgtagttggatttatagatttaataagttgaaacagaagaataggtaaacaaaatgtggcctatccctacaatgggctactattcagcaataaaacaaatgaactcttgatatatgctgcaatatgtatgaacctcaaaaccttgtgccaagtgaaggaagccagtcactgaagaccacacaccatgtatttccatttatagagatgcccagaaaaggcaaacccataaagatggcaggcaggtgagtggttgcctcgggctagcagtgggaactggacatgactgcagatgggcagcctaggccttttgggggtgatggaaatggtaagaaactggattgtggagattgtcatacaactctgtacatgtactaaaaatcattaaattgtacacttacaaagagtacattttatggcatgtaacatatacctcaataaaacttttttaaaaagaaaattctggacatcatctctaaaattagagtaaattaaacagccagtggcctaaatacgagtcctgctgcgtctactgggaaatgttttctgtgtttacattacttgtacaaagcttagcgccagggccagtgggtgctaggatgagcacatttctttgatactgaaacactttcttcctgggaagtctatctgagctgtgatctctgttatgaaaacaagcaaacttaggttgtttccggatgcgacaacataa

SEQ ID NO: 204774 - DNA, 430 bp, Homo sapiens
gtgactctacaggatcccccttgtcttagaaatactaattctgagccacataattagctaaccacatgatccagcattatacaacgaaacacttcaaaaaaaccaacacaagttgggcgcggtggtgcacacctcaagctgcctctagttccagctaatgcagaggttgaggcaggaggatcacttgactccagaagtttaaggctttagtgacctatgattgggcctctgaatagccactgcactacagcctaggcaatgtagtgagactctgtttctaagtttaaaaaaacaagtccttaaattgttgtatgtcttaaaagccagtggtaataatggtaacagctcattttaaatagtgcttaagtgttcaacactgttctaagtgctttatatgtattaaccacaataaataaaatgtttaaaaaca

SEQ ID NO: 204775 - DNA, 387 bp, Homo sapiens
cagggtgtgagaatcctacagaactcttggtgcattttgtaaaaccacaaacttcttgagtttggaaagaattctggagtctttcagtcctaagtcacagaccccagcattgattatggagtctacagcagcacagaattccagagtcacagaaatcaaagctccaggacagtcctggaaagaaacaggagagcgtggccacccatctgcccagccaccaaggcctaacccaccagcggggctatattggcttcttcttggggacgcccagtacagcaggccccctggtcctccctccccaggcctgtgtctcacgtccccacagtgggattgcaagcaagctgtccccatgcagcagataaataaataaataaataaagagcatga

SEQ ID NO: 204776 - DNA, 1015 bp, Homo sapiens
gcaattctcctgtctcagcctcccaagtagctaagattacaggaatgtgccaccacacctggctaatttttgtatttttagtagagacggtttcaccatgttggccaggatggtcacgatctcctgaccttgtgatccatccgcctcggcctcccaaagtgctgggattacaggtgtgagcctcctcgcctggactcttattgagattttttaagataattactttgaattctctgttagacattttctagatctgtgttttattgttagttgttcctggagcatttttagtttctttttgtgctgttaggtttgcctgatccttcataatctgtgaagccttgttttgatgttcttgcatctgaaggagtaaatacttctttcagtcattacagactagtttagggaggtaaatatcttctattggttttctgggctgatgagattttcactaggatcacagtcaactgcattggatcctggtcacataactactactgggtctacagtgaagttaatgcttggcagacctgttatttaagcatcagacagttgaggattccattttctgaggagactgaactttctttaagatcttgatcaataagactggtgctgagaaaaaaaaaacccagttaatatctgcaaatggagatgctgatacaataaatatgagtaggtgtggctcctgctgtttggctcttgcgagatgtttggaaatgctctaacctagtcattggacaggtttctagatgaccgttactgagcgttgatcacagctgagagggtgtgaaactaattcatagggctgcttcaggatacacagctgagaccaaagtcttcaggtttgttctgggttcatgacatttctccctccagatttctaggtgggcaggacttctccctgcctctagctgccagggactggagcttggttataggactgcttcacaattcacggtgggaataaagtcagccagcatgcctacagggacacatgtagctgtgcttttgg

SEQ ID NO: 204777 - DNA, 516 bp, Homo sapiens
gagcctctgggcatcaggctgcccaaggtgcaggctctgatggggaagaaaccggtgccgtcatggggacctcaggtagccagatgtggcctgaggagtctgtgctgtggcctcctctgtcctcaaggttaggctccagctggggaggagtgattcactcttgtaaattacagggaggctccagggaggcagatgctcccagcctgatgactggcagcaattctggggcccttacctaggttctccctgccactgcgggctccgggagctctccatggtgacctaggaactcccctgggtgcttatgctccgccgagagttgctctgttgcacattcattcaacaaacatttgtttagtgcctgtcacatgggctcagagtcagctttttgggttctgatcccagtcagggccacttcctgtggccttgggccatggcttaacgctgagcctcagcctcagaagtgccggccttgtagaggatcgatgccatcgggccagtgctcggctagggctg

SEQ ID NO: 204778 - DNA, 369 bp, Homo sapiens
gtatagtgttgaagggctgacaagagttcctaagtgcaagaaggctgcgatgtgccttgcagagaaaataggtgtattagataagcttcacttaggcatgagttacagtgctgttggctatgagttcaaggtcaataaatcaacactatatattaaggtttatttaaacagagacacacataaaacaaggttataaacagatcattaacaaaaatcttatgactagaggctcacaggaacctacccctgtatttcccccaggaacattacttcactacttgctatttcactgttaacttgactctgtagaactaatatgaataacaagattcgactatttctaaacaaacttatatgcacaagcttgat

SEQ ID NO: 204779 - DNA, 245 bp, Homo sapiens
gaagattgtgcagtatgagaacttttagcagaaagcagaaatatcagaaatctatgccttagcatcctagaagctcaaagttggagaatagtttagaggttttacatccaatgcttgatctaatgctttaatttctttaaacttacgaatgactgcgtctgttgacagtactcactgtattcttattaagtgacctattgcatgtctgatcacccaaaaattctctcattttgcttaaggatcaa

SEQ ID NO: 204780 - DNA, 416 bp, Homo sapiens
tggcaacatggatggaccttgaaagcagtatgttaagtgaaataagccagaaaaaaaaggctgcagggattctaatttagtgcacagacacctattcagcaatataactgaaacacaggaggagcaataatacaagtattcgttatgtatgataaatgaatcaaagtacaaaagtggagaataagctgaatcagccagctaaaataattgcagtgttggggctaactttgaacccaacctaatatttctgtttcagtggagcagtgttactggctttctgaatgacaggtttaaaaattactgtatggcaatgggaatatgtgattcatgagatgccaacagttagtttggctgccagcctcttacccaatatcagtttctctcttggggccatggcaagaaacaattctgactga

SEQ ID NO: 204781 - DNA, 409 bp, Homo sapiens
ctcctgacctcaggtgatctgcccacctcagcctcccaaagtgctgggattacaggcatgagccactgcacctggtcaggatgtctttccacttatttattccttcgctgatttctttcagcaatgttttgcagttttcatgtacaagtcttttcttccttagttaagtttattcataagtattttattctttttggtactattgtaaatggtgttgctttcttagtttccattttggattgttcattgttagtgtatggaaatgcaactaatttttgcatgctgactctgtagtttgcaactttactaaatttgttttttctaacattttttgaaatctttagggctttttacatttatgactatatcatctgcaaaaacagatagttttacttttcctttatgactt

SEQ ID NO: 204782 - DNA, 337 bp, Homo sapiens
cctgcgtaggggcacaactccataggtagcttggccgtgccatatgcaagcaaggccaaggtcatccgctgagggtgagagaggagctaggaagggtgactgagaagagtggagaagttcgaagtagtcatcagagagagcaagctgaccaggaaaacacagtggggttgccaggcagcactgcacgcccatttaaggatgttgagcatgaacgcaatgtgatactaagctgccctggtatgtgacttcctcagggaggtcctgactgccctggtgtgaccctggggaaagccagtggtgggttcacctaagattggcacttggcctgatgatgcaa

SEQ ID NO: 204783 - DNA, 273 bp, Homo sapiens
gctttcattcaagcaagcttcttcatcgaaagggtttggacaatgtcggattttcaaagagaagtgggggggaaaaaattaaaagtagccaagcaaaataaagtgcatggtaagaaacctgaaagcagtacaaaatattccctgatgtcaacacttcatttcaatagatcttaaaactcctattcatttccaatgaaggtactgtgagccttgccatgggcaacataactgcatgatcatattttgaaatatttggggaccacatagctttaa

SEQ ID NO: 204784 - DNA, 436 bp, Homo sapiens
ggacaatgagtagccagatgtagttaccagctgagccggttttactcaccgctttctctctgtgtctggatccagcagaaactggactgggtccaacagaaggtcttaagaaggcagggtttagggaagacaaagaatcatgagttcatctgtatccaggtagtctggaacctctccatctgggactctagctacgttcatgtataaaaattatggacccagaacctgtgtttttctaaataaatgtgtaaactttactaaagacaacttagaattacactggtcacagtgaagaaattttaacctaaacagttattcatctataagctacattgaaagagaagtgatcttaaatgcctcaaaaaaatgagatatgtttttaattggcatgcagaagcttctaaaagactaagcaaatcaaaacttgcctttctta

SEQ ID NO: 204785 - DNA, 390 bp, Homo sapiens
cagtggcatgaaagccaagacatgacgcaggtaaacgagcaagctagagagtgttctaggcaaatgtaaaagcctcaaggtagaagtctgtctgtttttgaggaaggccagagtggctggagcagagtgagtgagggagaggatggtaggaaatcagggcagggagattaataggggaccggttagtagggaccccaggaggccactgtagtgttggatattcctggatcagagtttctcaaatcattctccacaggtaatgtctattctccaagagagttttccttggcctgtggccaggctgctcaaatagaatgcagaaacaaagaatttgcctgaattctgctagccactctccaaggtcttctcctgcgatgggtggagggactt

SEQ ID NO: 204786 - DNA, 125 bp, Homo sapiens
gatgatgtcctgggatatatggttaagaaggcacccagccacacttactctgtcttgctaaggggtacaggttgatcaaaaccatttgtggccaggcgtgttggctcacgcctgtaatcccagca

SEQ ID NO: 204787 - DNA, 367 bp, Homo sapiens
aatatgtcctcagaggttatggtcaggtttcacttagggtaagaaagagaagggatgttccccttcctgtgtccatgtgatctcattgttcaattcccacctatgagtgagaatatgcgatgtttggttttttgttcttgcggtagtttactgagaatgatatatcccttggggaaaatattgcctaagtatgcaggaaaaaaaaaaatatatatatatatataaaacattaataagagagattagattgatttatagctatgctataaatgaaatgagatagattttatattgtcttataaccttatatggtaaatgttcatattacaaagttaaataaaagtttcagtggatccaatttgttgtt

SEQ ID NO: 204788 - DNA, 522 bp, Homo sapiens
ccatacttacttctcattcttggtcaataaaacaatatccacaattccagctctcactgtacaaggtctctacatgagctacagtgagtgagtgagtgagtgataaggaagagggtgaatggcaggtgcaggaatgcccatataattggtgagctctttctccagccactgtgtccaggatctatgctcagatcttaagacaatccctgtagtcctcggtagaaagcctcttaggaatcactctttcatatttagatttattcctgggaaacttaaagctacctcaaacccagttcttttgctcagagttctcaacacaattctctgagttgtctagtgagtagaaatagaagccagaggttcatggaagtccataaacgcagtgtacatgttaagcgtttaagaaaatgctgtccgtcttgaaagcagatcaggaatctaagagtcagggtcattctctgtgactgcagtcaagatgagagcaaccaactggccctcacaggaagttttgggaggcagaaa

SEQ ID NO: 204789 - DNA, 492 bp, Homo sapiens
agcacaatggttgcagagccagtgccttgaattcatatcttctgatcccagttccaggtttaggataacacgccactgctgtctctacttcggtgagagcaaaggatgatttttacttccaccactgcccccttcaacccatttttgttcagtcccagaagaccaacttgttaggaatttgaaagttttactgtgtcagccacacgtgcaaggaaaatcactccaataaaatgagaaattcttctctagaaggtaaaaatagaatcccagcagcagggcaactacaaagataaagaaaaaatagcctttaggctaaaggcaggttggtaagttaaggtggcatctaacaaacacattgggatttcctgggacttgagtgggactgcttactgaagcatttaatagaacagagtgctagattgcttagcccagattacagataaaaaagatttgaaaagaccattacataagcctaaatcttcattcaccaaa

SEQ ID NO: 204790 - DNA, 968 bp, Homo sapiens
actgcatccaacgccgcgggggagcgtgcccacatcaccctcggctgtgcagctgacgtagaggccgtgcagacgggccttgacctcttagagattctgcggcaggagaagggggggcagcgaggcgaggaggtgggcgagctaagctggggcaaagctctattccttggggcaatgggcggggttggatgcagtcagcggcgttggatgcagtcagcggcgttggatgcagtcggcgggcgttggatgcagtcagcggcgttggatgcagtcagcggcgttggatgcagtcagcggcgttggatgcagtcagcggcgttggatgcagtcggcggcgttggatgcagtcgactgcatccagccgcaggtgcagatcttggtggtagtagcaaatattcaaacgagaactttgaaggccgaagtggagaagggttccatgtgaacagcagttgaacatgggtcagtcggtcctgagagatgggcgagcgccgttccgaagggacgggcgatggcctccgttgccctcggccgatcgaaagggagtcgggttcagatccccgaatccggagtggcggagatgggcgccgcgaggcgtccagtgcggtaacgcgaccgatcccggagaagccggcgggagccccggggagacgtcgcggttccggcggcgtccggtgagctctcgctggcccttgaaaatccgggggagagggtgtaaatctcgcgccgggccgtacccatatccgcagcaggtctccaaggtgaacagcctctggcatgtttggactctgggcactgtttgaactctgggcactgtttggactctgggcactgtttggactctgggcactgtttggactctgggcactgtttggactctgggcactgtttggactctgggcactgtttggactctgggcactgtttggactctgggcactgtttggactctgggcactgtttggactctg

SEQ ID NO: 204791 - DNA, 1016 bp, Homo sapiens
  misc_feature (282)..(282): n is a, c, g, or t
cgatcgagcgcggtaccggtgttatcgatgcacagaaacactcacctaatccaggctctttgctcccgattattaaagatacttctttctacaaaagtaacaagcagacagccttgttcctgggctaagaaagcagagcgggaacctccctaagctctgatctcacgtagagagcacgaaagcttagcacgtgggctcacaaggcatggctgctcttctccagtggaatgtcagatgaaggcgacgcgcaggacacagatcccagccatgtccctccacaanacaccccaaagtggttacaggtgagccaactgatggactctcttccgctctccaagccaggcctctacccctgcatgccctgaaaatacactcatttcctaaatgagccacctggggaaagcgctggccgcaggtgcagatcttggtggtagtagcaaatattcaaacgagaactttgaaggccgaagtggagaagggttccatgtgaacagcagttgaacatgggtcagtcggtcctgagagatgggcgagcgccgttccgaagggacgggcgatggcctccgttgccctcggccgatcgaaagggagtcgggttcagatccccgaatccggagtggcggagatgggcgccgcgaggcgtccagtgcggtaacgcgaccgatcccggagaagccggcgggagccccggggagacgtcgcggttccggcggcgtccggtgagctctcgctggcccttgaaaatccgggggagagggtgtaaatctcgcgccgggccgtacccatatccgcagcaggtctccaaggtgaacagcctctggcatgtttggactctgggcactgtttgaactctgggcactgtttggactctgggcactgtttggactctgggcactgtttggactctgggcactgtttggactctgggcactgtttggactctgggcactgtttggactctgggcactgtttggactctgggcactgtttggactctgggcactgtttggactctg

SEQ ID NO: 204792 - DNA, 770 bp, Homo sapiens
gtacacgcgcccgttacatcgctggctcagcctcagtgccctctgccttctcgggaatcgggtccccaagccggtcaggacgatggctggtgctcccacagagaccatgtgctggtgcactggtgatcgagtgaatgggacagatggaaaaacagcaagcaggggagggagagaacgtggcctggtgccgttctgagcaaggccttttggtccagtccccttgataggaaataaccttccctccttccctcttgggtggcgctgcgggtgaagggatatgggctggcgggagcccctgcctgtgtatgatgggcgcgtaagggccagcagccgatcgaaagggagtcgggttcagatccccgaatccggagtggcggagatgggcgccgcgaggcgtccagtgcggtaacgcgaccgatcccggagaagccggcgggagccccggggagacgtcgcggttccggcggcgtccggtgagctctcgctggcccttgaaaatccgggggagagggtgtaaatctcgcgccgggccgtacccatatccgcagcaggtctccaaggtgaacagcctctggcatgtttggactctgggcactgtttgaactctgggcactgtttggactctgggcactgtttggactctgggcactgtttggactctgggcactgtttggactctgggcactgtttggactctgggcactgtttggactctgggcactgtttggactctgggcactgtttggactctgggcactgtttggactctg

SEQ ID NO: 204793 - DNA, 829 bp, Homo sapiens
gactgcatcaacgccgccggtgcaaaatcgtatacgtcctcatcgatgacttcaggctccaacgcaggcatgacgctgagaagctgggccacttcctggagcacgtgctgggctccggcatggtgaccgatgggaccatggccaccgaccagaggaaagtcaagatgctgtgggccctgaggggaaggatcacagaggcgctgagccgggatggctacgtgtacaagtacgatctctccctccctgtggagcggctctacgacatcgtgactgagatgagagcccgcctcggcccgcacgccaagcacgtggtgggctatggccaccttggagatgggatgggcgagcgccgttccgaagggacgggcgatggcctccgttgccctcggccgatcgaaagggagtcgggttcagatccccgaatccggagtggcggagatgggcgccgcgaggcgtccagtgcggtaacgcgaccgatcccggagaagccggcgggagccccggggagacgtcgcggttccggcggcgtccggtgagctctcgctggcccttgaaaatccgggggagagggtgtaaatctcgcgccgggccgtacccatatccgcagcaggtctccaaggtgaacagcctctggcatgtttggactctgggcactgtttgaactctgggcactgtttggactctgggcactgtttggactctgggcactgtttggactctgggcactgtttggactctgggcactgtttggactctgggcactgtttggactctgggcactgtttggactctgggcactgtttggactctgggcactgtttggactctg

SEQ ID NO: 204794 - DNA, 175 bp, Homo sapiens
cggtaacgcgaccgatcccggagaagccggcgggagccccggggagagttctcttttctttgtgaagggcagggcgccctggaatgggttcgccccgagagaggggcccgtgccttggaaagcgtcgcggttccggcggcgtccggtgagctctcgctggcccttgaaaatccgg

SEQ ID NO: 204795 - DNA, 700 bp, Homo sapiens
  misc_feature (123)..(123): n is a, c, g, or t
ggatacaggttggttccaaacacatctttctgactcagacataggcattgggtctgcccacaagtgacaatgcggtcggtcttgggagcccagtcaatacctggtgatgtgtccggtggtctncttgagttcatgagctttcaaccactggctcccgttcttcttatagatttgcccttcgggattattgggacttggggccatcttggtacgatccctgttcccaggcattacagggtggattggctctagtaaaaaactgttgcagtgacatttattctttagcgttttcaaaaggagagaaagctgggatcgggggagtccggacgggctcggagcggaggattcgcggactctgggcagtcgacgcgaacaggctccgtcgcggttccggcggcgtccggtgagctctcgctggcccttgaaaatccgggggagagggtgtaaatctcgcgccgggccgtacccatatccgcagcaggtctccaaggtgaacagcctctggcatgtttggactctgggcactgtttgaactctgggcactgtttggactctgggcactgtttggactctgggcactgtttggactctgggcactgtttggactctgggcactgtttggactctgggcactgtttggactctgggcactgtttggactctgggcactgtttggactctgggcactgtttggactctg

SEQ ID NO: 204796 - DNA, 779 bp, Homo sapiens
gtaatctagaggatccctcttgcgtccatcaggaagaagaaacgaggaagcagcaagaactcgaagccttgcagaaagagccagaaggaagctgaactgacccgtgaactggtagaaacagaaggaaaataagctgatgggagaagactggccatcttgctcccaatcagggccgcaggtgcagatcttggtggtagtagcaaatattcaaacgagaactttgaaggccgaagtggagaagggttccatgtgaacagcagttgaacatgggtcagtcggtcctgagagatgggcgagcgccgttccgaagggacgggcgatggcctccgttgccctcggccgatcgaaagggagtcgggttcagatccccgaatccggagtggcggagatgggcgccgcgaggcgtccagtgcggtaacgcgaccgatcccggagaagccggcgggagccccggggagacgtcgcggttccggcggcgtccggtgagctctcgctggcccttgaaaatccgggggagagggtgtaaatctcgcgccgggccgtacccatatccgcagcaggtctccaaggtgaacagcctctggcatgtttggactctgggcactgtttgaactctgggcactgtttggactctgggcactgtttggactctgggcactgtttggactctgggcactgtttggactctgggcactgtttggactctgggcactgtttggactctgggcactgtttggactctgggcactgtttggactctgggcactgtttggactctg

SEQ ID NO: 204797 - DNA, 615 bp, Homo sapiens
aaagatcctcccacctcagccttccaagtagttcagactacaggcacgcaccaccatacgtagctaacttttgtacttttttatagagccagagtcttgctttgttgcctgggctggtctcaaactcctggcctcaaatgatcctcccacctcagcctcctgaagtactgggactaaagatgcatgcaccccacccggcctcagtcagtatttgtcattgattatcatcttgtctttcatcatcattaatgatgcctgactcagaagaggaaaccagtggctattagttgaacaaacggggataataatattataataatgactgatgtttgttaccactattatttgaagcatgtagcagtcacagggcacacccaccatgtgccaagtacgtcggacacttccagccaagagtacatgagccatggtttccttgtgcctctgttgtgaggaacatcactaatagaggtacctgtcccaccccacccgccagcctccaaagtccctggcaggcatatctcctcctttggctcaaaccactgctcccagagcacttaccagcctgtacaattctctgttggcatgggtctggcttttagatcaccttggaattcc

SEQ ID NO: 204798 - DNA, 922 bp, Homo sapiens
  misc_feature (665)..(665): n is a, c, g, or t
tggcgactctcgcatggatggcggcatgagtatctgggatgtgaagagcttggagtcagccttgaaggacctcaagatcaaatgacctgtgaggaatatgttgccttcatcctagctgctggggaagcggggagaggggtcagggaggctaatggttgctttgctgaatgtttctggggtaccaatacgagttcccataggggctgctccctcaaaaagggaggggacagatggggagcttttcttacctattcaaggaatacgtgcctttttcttaaatgctttcatttattgaaaaaaaaaaaaaatgcccccaaagcaaaaaaaaaaaaaaaaaaaaaaaaaaaaaaaaaaaaaaaaaaaaaaaaaaaaaaaagaggggcgggccgcccaaaaaattcccccgggggggccccattggcgcccccccgctttttttgtacacaagggggggcgccccattatgaagcgagcggcgcatattattaatgacgacagaggaagcgcagacgcccgccgtggtatataaaacaagcgccgcgcgacgagcagggaagaaacgcggtcgccccacctggggagaactccctttgggggaaaaaaggaaccacaccacagtgtctgagggggggggggggcaagaccaatatagttggcgggcgaancaactctcatcccctccggaggaatatgtattaaacagccccatcgagcgggggaaaaatatatacaaacaacgttcttaaaggggggttgtacattacttggggtggtgcacacccaaacacggctgcgcatatatattcgcctgcggcgggcatgtgggagaaaaacctgttgtcctctcaccgccgagtagtgttgttctgttacgagacaactattttttcgcccggggggcgcggttgtctagaaataatgt

SEQ ID NO: 204799 - DNA, 352 bp, Homo sapiens
ggcatgagtatctgggatgtgaagagcttggagtcagccttgaaggacctcaagatcaaatgacctgtgaggaatatgttgccttcatcctagctgctggggaagcggggagaggggtcagggaggctaatggttgctttgctgaatgtttctggggtaccaatacgagttcccataggggctgctccctcaaaaagggaggggacagatggggagcttttcttacctattcaaggaatacgtgcctttttcttaaatgctttcatttattgaaaaaaaaaaaaaatgcccccaaagcactatgctggtcatgaactgcttcaaaatgtggaggtaataaaatgcaactgtg

SEQ ID NO: 204800 - DNA, 291 bp, Homo sapiens
cgaggttacaaaagtgcactcttctacatctacgtggtatcatctccctggttcattcaggcccttatcatgcctcatctttttaaaaaggttttattaattttaattggcacataataattatacatattaatggggtacaatgtgatgttttgatacatgtatacattgtgtaatgatcaaatcagggtaattaggatatctgtcatcttaaatatttattgtttctttgtggtaagaacattgaaaatccttcattctagctatgttgaaacatacaacacattatta

SEQ ID NO: 204801 - DNA, 672 bp, Homo sapiens
ttggtgcatttttacagagtgctgattggtgcatttacaatcctttagccacagagtgctgattggtgcatttacaatcctttagctagacacagagcactgattggtgcattgttatagagtgctgcttggtgcatttacaatcctttagctagacacagagcgctgattggtgcgtttttacagagtgctgattggtatatttacaatcctttagctagacacagagcactgattggtgtgtttataatcctctagctagacagaaaagttccccaagtccccactcgacccaggaagtccagctggtttcacctctcactagtaggaggagattaaaaacgaatgccaaatcaaacataaaattatagaaatctatcataggattatattagaagactgactttatttatataagtagttctaaatttagtctgccttttaactggatctctgagcttctggcagagcccacactgaattccgggtctccaaaaagagaattattatgaggctaagaccatgtgatggttttatgagtgcactctccttttttttttttttaacaaaaatgtttctctaagtgtctgaactactctcttcctaactttaaacacccaacagtaacctctgttgttactctttgactaaaataattattttagttaaaaa

SEQ ID NO: 204802 - DNA, 450 bp, Homo sapiens
taattgcagtttttgccactgaaagtaatggaaaaaccacaattacttttgcaccaacctaataatttgtaaaatcttagcaacaggttgtcacctaatacagtcagctattgtttattgagtagtttcttttggctaggcttttttgtattttttgggtcttagctaattttcattataaccttgtgtgccaagtaacatgactataccctgcttagatggggaaattcaggcaggaaaaagcgtcaacttcctcaaggctgcaagaggagtaattctttgcagtgttatttgaacctgtgcttttagtgactggtccattttggctttccatgtagcatatagataggcaaagaatttgagagcaaagaatcacttctctttgctcccaaatttctgggccttcatttagctcatttgtaaaatttatgtgagtagatgagtgagtct

SEQ ID NO: 204803 - DNA, 375 bp, Homo sapiens
acatggacctactcagtatcagatttcagttcttagatttaccatcaacattctaccgacttaaaggccttaccttcctgctgcagaagttggagtattttaaaaacaagagaacacttgaaagtggatgcagaatactacttttataatagaacgtgaggttgctctttttattttctccctccaggtgccgattttatataatttttaggttattctctgatgataagagatttggttatttctatatacttacttggaagaataaatttactcttgatattttaaaattgttgaaatgttctgcgtcagaaatttttcttttcaactgcaattgttctctgtagtctttatggattaagagggcattttaaa

SEQ ID NO: 204804 - DNA, 313 bp, Homo sapiens
aaaggagagaaagacaactatcttagaaacatatttaaagcacatgatgaaaaagaagaggtttttaaaaactgttgaaaatacattttctttgtaccaggtaccagatgttgatgttggcagtgcctcagagggtcacagggcatttaaaatcactaggctgtagggagtaaaattccagatctcttgcactgaaaattatttaaaaattatctttacttagcgataagtagtacaagagtactttttctatgaattcctcttaaataggtaccttagaaatacatgatcaatgaaattgccagaaaaaaaa

SEQ ID NO: 204805 - DNA, 211 bp, Homo sapiens
ctggctccagcttaccctattactcccagtctgagagagaacatcagctgagccctccttgggggccggaggcagaatgggtctccctgggcaggtgaggagcagcactacattagagcctgctgttgcccctcaacccttgctgtgctaccctccagccaggaggctcctgctctccagctctggctggtttactgctttcctcttccca

SEQ ID NO: 204806 - DNA, 292 bp, Homo sapiens
gccgggattgtgccactacactccagcctggtgacagagtgggactccatctcaaaaaaaactttaatagcttcctgtaatgcggagcataaaactcaaactccttaacagggatgagttggttttctgccttttcatttgaatcaaccatttagccccatgggccgtctgtgtgccttctaaaatggcaagttctttcctgtctcaagtctttttgtgctattctgccctgcagctctcttctccacattgttcagatagctgacttcttatcctctagaccagatacatc

SEQ ID NO: 204807 - DNA, 161 bp, Homo sapiens
gtggaaagaaataaaataaaattaaaaaatcctggaagcttgtaaagaatgtgagcaaaggggaggaagttgtgaaaaaaatgaataaagggcaccgatccagagtattgaagaaggcagagtggagagcctagtaatgagtatctggtacctcagtatcc

SEQ ID NO: 204808 - DNA, 659 bp, Homo sapiens
gttaggtgaaagaaaagcacctaaatgtttctcacaaagctttggttcttaattctaatatgagacaacagaatggcgtgggagttgacttagccctaaacattctagatctttaaagttttcgttggtccttccacagactgcagactgagctcacaggagtgtgtccatgatgcaaacagaagtatcttataggtgccaaaggatggacttaccttttcctgccttttaccaacatatttgcaacagaaaaaggatcatgtgaacagatatcacctagggtagctgtcatttggaatttgtgtaattattagaatttgtacaaaacacagaatatccctttttttaaatccattcattctacatttgcactcttttccctcccactatcccaggaagttacttaattattcagtggctcttctagctgttatgcattaagaattcctattgttggcacaaaatccatcatttaagcctcatcttgaggaggttgtcatcttcttatttctgatatgtctgtgaaatactgcattttttagcatatttgtgtgtaccctggagggttgtttgcaaatacatattgcctgtgttgtgcatttatctgtaaaatgccggaatttcttacacttttaatgggtcttgagtaatgactttgt

SEQ ID NO: 204809 - DNA, 441 bp, Homo sapiens
gttaggtgaaagaaaagcacctaaatgtttctcacaaagctttggttcttaattctaatatgagacaacagaatggcgtgggagttgacttagccctaaacattctagatctttaaagttttcgttggtccttccacagactgcagactgagctcacaggagtgtgtccatgatgcaaacagaagtatcttataggtgccaaaggatggacttaccttttcctgccttttaccaacatatttgcaacagaaaaaggatcatgtgaacagatatcacctagggtagctgtcatttggaatttggattgataggaatgttcacataaacaccagcagtggctaactgttacacaacattcaaagtattcgagagaactgcctggagacagagagcgagggtccacagacacattagcaccatactgatatgccattcttgctg

SEQ ID NO: 204810 - DNA, 668 bp, Homo sapiens
gaccctataatcacggctacatgtcctgtgtggataggcgtgttgcaccacgtcgtgtactcggtgatcatcccgggggcttttacactctaactttaatattcctcaaacacaccaagctcattgctacctcagagtctttatacttcctgtttctgttaccaagaatattcttctgatggctcatactttcatatcactgagatctctaatcaaaagttacttccttagagctgatttccctcactaccctactatcaggaatagccctcaaaaaaaccactattacctctttactctttattctcttgccttattattctttatcatacttatcattgtctggcattatgtcatttatttgtttattgtcttctcccctatttctttttacttctgtatccgcagcaccttgaacagtgcctagaacaatgtgggcacttagtaataatacattaaataaaataatctatatgccagtatgtctaatttcctttacgagactgcaagctactcaagggcagaatttgtgttgtttcatcagtgtatgctcacagcacctactacaaaatggcacaaagtaagcatttatcatactgcctaaggaccaggtgccagtcctctcagcatgtgacacagctaattattcctttcttcttttttttttt

SEQ ID NO: 204811 - DNA, 682 bp, Homo sapiens
ctatctcccatccactcctccttactgtggcctacaaggtcctgtgtgatatggccctgctgctcctcactttatttcctatcattcctggagcttttacactctaactttaatattcctcaaacacaccaagctcattgctacctcagagtctttatacttcctgtttctgttaccaagaatattcttctgatggctcatactttcatatcactgagatctctaatcaaaagttacttccttagagctgatttccctcactaccctactatcaggaatagccctcaaaaaaaccactattacctctttactctttattctcttgccttattattctttatcatacttatcattgtctggcattatgtcatttatttgtttattgtcttctcccctatttctttttacttctgtatccgcagcaccttgaacagtgcctagaacaatgtgggcacttagtaataatacattaaataaaataatctatatgccagtatgtctaatttcctttacgagactgcaagctactcaagggcagaatttgtgttgtttcatcagtgtatgctcacagcacctactacaaaatggcacaaagtaagcatttatcatactgcctaaggaccaggtgccagtcctctcagcatgtgacacagctaattattcctttcttcttttttttttt

SEQ ID NO: 204812 - DNA, 302 bp, Homo sapiens
caatgaaagtacagcataccaaaactcctgagatacagcaaaaatagtggtaaaagggaagtttatagcaatgaatgcctacattaaaaagaagaaaaaccacaaataaaaaacctaactctataccacaaggaactagaataataaaaacaaattaaacccacagttatcagaagaaggaaataatacagattacagcagaaggaaacaagatagagaataaaataacaatagaaaaacatcaatgaaactcaggttggctttttgaaagacaaaattgacaaacctttagctagactaag

SEQ ID NO: 204813 - DNA, 130 bp, Homo sapiens
ggggagggggtgttgctggagcccgagtctaacagagtctaacagaaagctcattaagacccacagcaagttgaggcctgtcagtaatgagtacttttatgctgttttctacagaaatttcacttcaaaa

SEQ ID NO: 204814 - DNA, 691 bp, Homo sapiens
aaaattctagtgaggtgtgaccttgcaaagatttttccagagtatttctggaggatgccgaacttgagtgaattgttaacatgtctaacagtattcctgtggtcactcctgaattggatttttaactatgttagctccagatgcgaagaaagtatataataatagaaaatgactgttctccatcttttaaacagaaaatttgttaataaaaatttcttcaggccatctcactacatggtccccgaagcactttctcctgagtaaaccaataggctctgactctttctcaacctcttatgataaaaactgttttgatgtactgttggattcagtttgccagtattttgttgaggattttgtatcgatgttcataaaggatattggcctgaagttttcttcttttatgtgtctctgccaggttttaatatcaggatgatgctggcctcatagaatgagttagggaggagtccctcttcctcaatttttggaatagtttcagcaggaatggtaccagctcttctttgtacatctggtagaattcagctgtgtatctatctggttctgggtttttatgttaagtaagctatttattactgactcagtttcagagctcattattggtctgttcaagatttaatttctccctggttcagtcttgggagggtgtatgtgtccaggaatttatccattt

SEQ ID NO: 204815 - DNA, 528 bp, Homo sapiens
aactgcacggcttctccctgtcctgttcaaacgcagaagcaaatgtcacacttttctgcttcaggagatacctaaaattcatgtggccattgcaggaaatcactgaaccccagacagatctgcaagcggagaattcagacctccaagtggatagagttattacatttttcctcacacctgctgtctttcaatctaagacctcttcctcttgaaaattcttaattttgtgccacgccagcaccctctgctggtactagtgtcgtcattcaggtggtttctgtgcccctggagttgcgttctttcctgaaactaacttctcttaccttaaatcctggactagtggatagtgctcttcattgccttccatcaagacacacacacaaatgaagcaagatgaagtgtaaaaaggttgtgagttaattaaaatcacatttcagtttattgtacttttgcctgagcaacccctttgtttgtgtatttcatattattttgaaatataggataattaaaagtggttttattttctgg

SEQ ID NO: 204816 - DNA, 783 bp, Homo sapiens
gaggcagggaaatcgcttgaacccgggaggcagaagttggagtgagctgacatcatgccactgcactccagcctggtgacagagcgagacttcatcccaaaaaaaaaaagaaaagaaaaagaaaaaaagctagctttctgtgctacccagagaggggtccatacagtgttgttctggattcctgttgtaacttaaagggaaactttcacaatgtccagagcccttgatgtcctcaaatttcttgcagcaggaagtcacttaggtgacactaactttgatttccaaatggaatgatagtacatctaaaaatgaaggtgatggcatctatatcataatcttttttttttctaacaagatccaaagtccacaaatatatcataaatctgaagaggaactgggagaagcttctgctggcagctcatgccattgttgccattgaaaaccctgctgatgtgtcatatcctgcaggaatactagctagtgggctgtgctgaagtttgctgctgctgctggagccacatgtattgctggtcacttcacttctggaacctttgctaaccagatccaatcatcttctgccacccacatcttctggtggttactgattctagggctaactatcagcctctctcaggggcttcttatggtaacctacctacctaccactgctgtatgtaacagattctcctctgagctatgtggatattgtcatcccatgcaacaacaaggaagctcaatcactgagtctaatgtagtggatgctggcccaggaagctctgtgca

SEQ ID NO: 204817 - DNA, 2230 bp, Homo sapiens
  misc_feature (59)..(59): n is a, c, g, or t
  misc_feature (131)..(131): n is a, c, g, or t
cccatttcaggtgggacttgtggcataggagaggtcttgggactggtgcccagcctggngcagtcccctcccaaagcctccctctcccacacagccgtgagagcctgtgggcctagaggactcagctggcnggttgcagggaggcgcagccttttgcaatcccccagggccacaggttaccctccttctctctctagacccccagctctaccaggagatccaggagcggggcctgaacaccagccaggagtctgatgacgacatcctcgatgagtcctccagccccgagggaacccagaaggtggacgccaccattgtggtcaagagctaccggcccgcccaggtcacctggagccagctcccggaggtggtggaattgggcatcctggaccagctctccactgaggagcggaaaaggcaggaggccatgttcgagatcctcacgtcggagttctcctaccagcacagcctgagcatcctggtggaggagttcctgcagtccaaggagctgcgggcgaccgtgacccagatggagcaccaccacctcttctccaacatcctggatgtcctgggtgccagtcagaggttcttcgaggacctggagcagcggcacaaggcccaggtgctggtcgaggacatcagtgacatcctggaggagcacgctgagaagtacttccacccctacatcgcctactgctccaacgaggtctaccaacagcgcacgctgcagaagctgataagcagcaacgccgccttccgagaggccctgagagagattgagaggcggccggcgtgcgggggcctgcccatgctctccttcctgatcctccccatgcagcgggtgacccggctgcccctcctgatggatacgctctgcctcaagacccagggccactccgaaaggtacaaggctgccagccgtgcactgaaggccatcagcaagctggtgaggcagtgcaacgagggggcccacaggatggagcgcatggagcagatgtacacgctgcacacacagctggacttcagcaaggtcaagtccctcccactgatctccgcctcccggtggctgctgaagcgcggagagctgttcttagtggaagaaaccggactttttcgaaaaattgccagccggccaacgtgctaccttttcctgttcaacgatgtcctggttgtgaccaagaagaagagcgaggagagctacatggtccaggactacgcccagatgaaccacatccaggtagagaagatagagccgtctgagctccctctgcccgggggcggcaaccgtagctcctccgtgccccaccccttccaggtgaccctgcttcgcaacagcgagggccgccaggagcagctcctgctctcctcggactccgcgagtgaccgggcacggtggatcgtggcgctcacacacagtgagagacagtggcagggcctctccagcaaaggagacctgccccaggtggagatcaccaaggccttcttcgcgaagcaagcagacgaggtcacactgcagcaggcggacgtggtcctggttctgcagcaggaggatgggtggctctatggcgagaggctccgggacggagagacgggatggttccccgaggactttgcccgcttcatcaccagccgtgtggccgtggagggcaatgtccgcaggatggagcgtctgcgggtggagacggacgtgtagccctggcgaggccagccggcggcagcacagcctgtccccaatcagcaagtggtcgtgcctggctctagagagcgtggggagctggtctcaaggacccagcatggttccctggggcttcccaagagcctgtggctgtggtgccgggctccagacacttcacggaaggaagatcacatgtccccagagaggcacccccaggcaagctcgagggggccacaccgtgtcccagggagcccagcctattcccgttggctggctgggcccctctcagctgctgggccccacctccccactgcacccaggggacaactccacctggactgatgggcacaggaggcaccaatagcgattattgggggcaatgcgaggtctcctcctatgcccttcctacccctgagtgggacaagaagggccttgagtgcccaggagtgccccacgttctgagaaggggccggccggagggaggggacccggcagggagatttcggttttgaggtttctaaatacattaaagttatttcttaagaaaaaagattt

SEQ ID NO: 204818 - DNA, 2809 bp, Homo sapiens
agcgaagcggctgcaggacaggacaggacccggcgctggaagctgcaccgccagcgcgccgcccctccgtccctccgccccgcggcgcaggtgagcctgggggacaggtgagccgggggacaggaccccacagccgcccagcatggcccagcggcactcagacagctccttggaggagaagctcctgggacaccgcttccactcggagctccggctcgatgccggggggaacccagcctccgggctcccaatggtccgtggctccccgcgtgttagagacgatgccgccttccagccccaggtcccggcacccccacagcctcggcccccggggcacgaggagccatggcccatcgtcctgagcacagagagcccggcggccctcaagctgggcacccaacagctgatccctaagagcctggctgtggccagcaaggcaaagaccccagcccgccaccagagcttcggggcggctgtacttagcagggaggccgcccggcgggaccctaagctcctcccagcccccagcttctccctggatgacatggacgtggacaaggaccccgggggcatgctgaggcggaacctgcggaaccaatcctaccgggcggccatgaagggcctggggaagccaggtggccagggagatgccatccagctaagccctaagctccaggctctggctgaggaacccagccagcctcatactcggagcccggccaaaaacaagaagacgctggggaggaaacgtgggcacaagggttccttcaaggacgacccccagctctaccaggagatccaggagcggggcctgaacaccagccaggagtctgatgacgacatcctcgatgagtcctccagccccgagggaacccagaaggtggacgccaccattgtggtcaagagctaccggcccgcccaggtcacctggagccagctcccggaggtggtggaattgggcatcctggaccagctctccactgaggagcggaaaaggcaggaggccatgttcgagatcctcacgtcggagttctcctaccagcacagcctgagcatcctggtggaggagttcctgcagtccaaggagctgcgggcgaccgtgacccagatggagcaccaccacctcttctccaacatcctggatgtcctgggtgccagtcagaggttcttcgaggacctggagcagcggcacaaggcccaggtgctggtcgaggacatcagtgacatcctggaggagcacgctgagaagtacttccacccctacatcgcctactgctccaacgaggtctaccaacagcgcacgctgcagaagctgataagcagcaacgccgccttccgagaggccctgagagagattgagaggcggccggcgtgcgggggcctgcccatgctctccttcctgatcctccccatgcagcgggtgacccggctgcccctcctgatggatacgctctgcctcaagacccagggccactccgaaaggtacaaggctgccagccgtgcactgaaggccatcagcaagctggtgaggcagtgcaacgagggggcccacaggatggagcgcatggagcagatgtacacgctgcacacacagctggacttcagcaaggtcaagtccctcccactgatctccgcctcccggtggctgctgaagcgcggagagctgttcttagtggaagaaaccggactttttcgaaaaattgccagccggccaacgtgctaccttttcctgttcaacgatgtcctggttgtgaccaagaagaagagcgaggagagctacatggtccaggactacgcccagatgaaccacatccaggtagagaagatagagccgtctgagctccctctgcccgggggcggcaaccgtagctcctccgtgccccaccccttccaggtgaccctgcttcgcaacagcgagggccgccaggagcagctcctgctctcctcggactccgcgagtgaccgggcacggtggatcgtggcgctcacacacagtgagagacagtggcagggcctctccagcaaaggagacctgccccaggtggagatcaccaaggccttcttcgcgaagcaagcagacgaggtcacactgcagcaggcggacgtggtcctggttctgcagcaggaggatgggtggctctatggcgagaggctccgggacggagagacgggatggttccccgaggactttgcccgcttcatcaccagccgtgtggccgtggagggcaatgtccgcaggatggagcgtctgcgggtggagacggacgtgtagccctggcgaggccagccggcggcagcacagcctgtccccaatcagcaagtggtcgtgcctggctctagagagcgtggggagctggtctcaaggacccagcatggttccctggggcttcccaagagcctgtggctgtggtgccgggctccagacacttcacggaaggaagatcacatgtccccagagaggcacccccaggcaagctcgagggggccacaccgtgtcccagggagcccagcctattcccgttggctggctgggcccctctcagctgctgggccccacctccccactgcacccaggggacaactccacctggactgatgggcacaggaggcaccaatagcgattattgggggcaatgcgaggtctcctcctatgcccttcctacccctgagtgggacaagaagggccttgagtgcccaggagtgccccacgttctgagaaggggccggccggagggaggggacccggcagggagatttcggttttgaggtttctaaatacattaaagttatttcttaagaaaaaagattt

SEQ ID NO: 204819 - DNA, 2776 bp, Homo sapiens
agcgaagcggctgcaggacaggacaggacccggcgctggaagctgcaccgccagcgcgccgcccctccgtccctccgccccgcggcgcaggaccccacagccgcccagcatggcccagcggcactcagacagctccttggaggagaagctcctgggacaccgcttccactcggagctccggctcgatgccggggggaacccagcctccgggctcccaatggtccgtggctccccgcgtgttagagacgatgccgccttccagccccaggtcccggcacccccacagcctcggcccccggggcacgaggagccatggcccatcgtcctgagcacagagagcccggcggccctcaagctgggcacccaacagctgatccctaagagcctggctgtggccagcaaggcaaagaccccagcccgccaccagagcttcggggcggctgtacttagcagggaggccgcccggcgggaccctaagctcctcccagcccccagcttctccctggatgacatggacgtggacaaggaccccgggggcatgctgaggcggaacctgcggaaccaatcctaccgggcggccatgaagggcctggggaagccaggtggccagggagatgccatccagctaagccctaagctccaggctctggctgaggaacccagccagcctcatactcggagcccggccaaaaacaagaagacgctggggaggaaacgtgggcacaagggttccttcaaggacgacccccagctctaccaggagatccaggagcggggcctgaacaccagccaggagtctgatgacgacatcctcgatgagtcctccagccccgagggaacccagaaggtggacgccaccattgtggtcaagagctaccggcccgcccaggtcacctggagccagctcccggaggtggtggaattgggcatcctggaccagctctccactgaggagcggaaaaggcaggaggccatgttcgagatcctcacgtcggagttctcctaccagcacagcctgagcatcctggtggaggagttcctgcagtccaaggagctgcgggcgaccgtgacccagatggagcaccaccacctcttctccaacatcctggatgtcctgggtgccagtcagaggttcttcgaggacctggagcagcggcacaaggcccaggtgctggtcgaggacatcagtgacatcctggaggagcacgctgagaagtacttccacccctacatcgcctactgctccaacgaggtctaccaacagcgcacgctgcagaagctgataagcagcaacgccgccttccgagaggccctgagagagattgagaggcggccggcgtgcgggggcctgcccatgctctccttcctgatcctccccatgcagcgggtgacccggctgcccctcctgatggatacgctctgcctcaagacccagggccactccgaaaggtacaaggctgccagccgtgcactgaaggccatcagcaagctggtgaggcagtgcaacgagggggcccacaggatggagcgcatggagcagatgtacacgctgcacacacagctggacttcagcaaggtcaagtccctcccactgatctccgcctcccggtggctgctgaagcgcggagagctgttcttagtggaagaaaccggactttttcgaaaaattgccagccggccaacgtgctaccttttcctgttcaacgatgtcctggttgtgaccaagaagaagagcgaggagagctacatggtccaggactacgcccagatgaaccacatccaggtagagaagatagagccgtctgagctccctctgcccgggggcggcaaccgtagctcctccgtgccccaccccttccaggtgaccctgcttcgcaacagcgagggccgccaggagcagctcctgctctcctcggactccgcgagtgaccgggcacggtggatcgtggcgctcacacacagtgagagacagtggcagggcctctccagcaaaggagacctgccccaggtggagatcaccaaggccttcttcgcgaagcaagcagacgaggtcacactgcagcaggcggacgtggtcctggttctgcagcaggaggatgggtggctctatggcgagaggctccgggacggagagacgggatggttccccgaggactttgcccgcttcatcaccagccgtgtggccgtggagggcaatgtccgcaggatggagcgtctgcgggtggagacggacgtgtagccctggcgaggccagccggcggcagcacagcctgtccccaatcagcaagtggtcgtgcctggctctagagagcgtggggagctggtctcaaggacccagcatggttccctggggcttcccaagagcctgtggctgtggtgccgggctccagacacttcacggaaggaagatcacatgtccccagagaggcacccccaggcaagctcgagggggccacaccgtgtcccagggagcccagcctattcccgttggctggctgggcccctctcagctgctgggccccacctccccactgcacccaggggacaactccacctggactgatgggcacaggaggcaccaatagcgattattgggggcaatgcgaggtctcctcctatgcccttcctacccctgagtgggacaagaagggccttgagtgcccaggagtgccccacgttctgagaaggggccggccggagggaggggacccggcagggagatttcggttttgaggtttctaaatacattaaagttatttcttaagaaaaaagattt

SEQ ID NO: 204820 - DNA, 1464 bp, Homo sapiens
agcgaagcggctgcaggacaggacaggacccggcgctggaagctgcaccgccagcgcgccgcccctccgtccctccgccccgcggcgcaggtgagcctgggggacaggtgagccgggggacaggaccccacagccgcccagcatggcccagcggcactcagacagctccttggaggagaagctcctgggacaccgcttccactcggagctccggctcgatgccggggggaacccagcctccgggctcccaatggtccgtggctccccgcgtgttagagacgatgccgccttccagccccaggtcccggcacccccacagcctcggcccccggggcacgaggagccatggcccatcgtcctgagcacagagagcccggcggccctcaagctgggcacccaacagctgatccctaagagcctggctgtggccagcaaggcaaagaccccagcccgccaccagagcttcggggcggctgtacttagcagggaggccgcccggcgggaccctaagctcctcccagcccccagcttctccctggatgacatggacgtggacaaggaccccgggggcatgctgaggcggaacctgcggaaccaatcctaccgggcggccatgaagggcctggggaagccaggtggccagggagatgccatccagctaagccctaagctccaggctctggctgaggaacccagccagcctcatactcggagcccggccaaaaacaagaagacgctggggaggaaacgtgggcacaagggttccttcaaggacgacccccagctctaccaggagatccaggagcggggcctgaacaccagccaggagtctgatgacgacatcctcgatgagtcctccagccccgagggaacccagaaggtggacgccaccattgtggtcaagagctaccggcccgcccaggtcacctggagccagctcccggaggtggtggaattgggcatcctggaccagctctccactgaggagcggaaaaggcaggaggccatgttcgagatcctcacgtcggagttctcctaccagcacagcctgagcatcctggtggaggagttcctgcagtccaaggagctgcgggcgaccgtgacccagatggagcaccaccacctcttctccaacatcctggatgtcctgggtgccagtcagaggttcttcgaggacctggagcagcggcacaaggcccaggtgctggtcgaggacatcagtgacatcctggaggagcacgctgagaagtacttccacccctacatcgcctactgctccaacgaggtctaccaacagcgcacgctgcagaagctgatagcagacacgcgccttcgagaggcctgagagaatgaaagcggcgcgtgcggggcctgcatggtccctcgaacccccggcggggaccggtgcctctgaggacgctgctcaacggccccaggcagggcccccccgcgccacatgggctc

SEQ ID NO: 204821 - DNA, 2588 bp, Homo sapiens
agcgaagcggctgcaggacaggacaggacccggcgctggaagctgcaccgccagcgcgccgcccctccgtccctccgccccgcggcgcaggtgagcctgggggacaggtgagccgggggacaggaccccacagccgcccagcatggcccagcggcactcagacagctccttggaggagaagctcctgggacaccgcttccactcggagctccggctcgatgccggggggaacccagcctccgggctcccaatggtccgtggctccccgcgtgttagagacgatgccgccttccagccccaggtcccggcacccccacagcctcggcccccggggcacgaggagccatggcccatcgtcctgagcacagagagcccggcggccctcaagctgggcacccaacagctgatccctaagagcctggctgtggccagcaaggcaaagaccccagcccgccaccagagcttcggggcggctgtacttagcagggaggccgcccggcgggaccctaagctcctcccagcccccagcttctccctggatgacatggacgtggacaaggaccccgggggcatgctgaggcggaacctgcggaaccaatcctaccgggcggccatgaagggcctggggaagccaggtggccagggagatgccatccagctaagccctaagctccaggctctggctgaggaacccagccagcctcatactcggagcccggccaaaaacaagaagacgctggggaggaaacgtgggcacaagggttccttcaaggacgacccccagctctaccaggagatccaggagcggggcctgaacaccagccaggagtctgatgacgacatcctcgatgagtcctccagccccgagggaacccagaaggtggacgccaccattgtggtcaagagctaccggcccgcccaggtcacctggagccagctcccggaggtggtggaattgggcatcctggaccagctctccactgaggagcggaaaaggcaggaggccatgttcgagatcctcacgtcggagttctcctaccagcacagcctgagcatcctggtggaggagttcctgcagtccaaggagctgcgggcgaccgtgacccagatggagcaccaccacctcttctccaacatcctggatgtcctgggtgccagtcagaggttcttcgaggacctggagcagcggcacaaggcccaggtgctggtcgaggacatcagtgacatcctggaggagcacgctgagaagtacttccacccctacatcgcctactgctccaacgaggtctaccaacagcgcacgctgcagaagctgataagcagcaacgccgccttccgagaggccctgagagagattgagaggcggccggcgtgcgggggcctgcccatgctctccttcctgatcctccccatgcagcgggtgacccggctgcccctcctgatggatacgctctgcctcaagacccagggccactccgaaaggtacaaggctgccagccgtgcactgaaggccatcagcaagctggtgaggcagtgcaacgagggggcccacaggatggagcgcatggagcagatgtacacgctgcacacacagctggacttcagcaaggtcaagtccctcccactgatctccgcctcccggtggctgctgaagcgcggagagctgttcttagtggaagaaaccggactttttcgaaaaattgccagccggccaacgtgctaccttttcctgttcaacgatgtcctggttgtgaccaagaagaagagcgaggagagctacatggtccaggactacgcccagatgaaccacatccaggtagagaagatagagccgtctgagctccctctgcccgggggcggcaaccgtagctcctccgtgccccaccccttccaggtgaccctgcttcgcaacagcgagggccgccaggagcagctcctgctctcctcggactccgcgagtgaccgggcacggtggatcgtggcgctcacacacagtgagagacagtggcagggcctctccagcaaaggagacctgccccaggtggagatcaccaaggccttcttcgcgaagcaagcagacgaggtcacactgcagcaggcggacgtggtcctggttctgcagcaggaggatgggtggctctatggcgagaggctccgggacggagagacgggatggttccccgaggactttgcccgcttcatcaccagccgtgtggccgtggagggcaatgtccgcaggatggagcgtctgcgggtggagacggacgtgtagccctggcgaggccagccggcggcagcacagcctgtccccaatcagcaagtggtcgtgcctggctctagagagcgtggggagctggtctcaaggacccagcatggttccctggggcttcccaatagcgattattgggggcaatgcgaggtctcctcctatgcccttcctacccctgagtgggacaagaagggccttgagtgcccaggagtgccccacgttctgagaaggggccggccggagggaggggacccggcagggagatttcggttttgaggtttctaaatacattaaagttatttcttaagaaaaaagattt

SEQ ID NO: 204822 - DNA, 592 bp, Homo sapiens
ttttatcttctccagcattttgtccctgtcagcacatcagagctaaacataagtcatcagtcaaaaggcagtctcagccaggtgcagtggctcacacctgtaatcccagcactttcgtattagagcctttcttcaaatgcctgctgacctttggttgtccattcataaattgactaattagtccattaaaaagtcgactgaaagctctgtgtttgtggatgtggcttgttctctgagggatttcatagcaagatgattggttggggacctgatcatttcattaggaaacctccagatgtcattatctgtatgtattttagctagagctttcagcttctccagaggtaagtctgtatctgctgccagtgtcttggaaccaagttggtttagagatctgactccatgccaccagcaggttttcttcagtctctctgtgttcagtaaaatgcttcattgcttcctttgctgggcctggcacaccgaagtgtagagcctctctggttcaattttatgagaaaacaaacttcctgttccttatgatggtagaataagaatagttgctggctctatgagaggaaggtatgaatcagag

SEQ ID NO: 204823 - DNA, 479 bp, Homo sapiens
caatagtacaccagataggtcaaccatgaataatataaaatagtaataaaaatagataacacagcacacagatacaaacacaaggtgataaaaaaaaccaagaggataaggggagggaggcacatgtgcatgaggaaggcacagtaagaaagctgaatcctcaaccagggcgggaagtcagttctcaaaatccaaagctaagaagtcaagacagatagacaaagttatttaaaaacacagcggcaaataccaaaaggaagaattttaaagctatgaatattctggtgtatttcaggatttcttagtgggaaaaaatctttttcattgttgtttgaggaaatttactcagcagactatattcaataacgtaacctaaggttttatttctcagaccttctctttccagtacctcctatctatatagataatttggaagccagggagaagaatgggaaccgaagatctatgagcccttatgg

SEQ ID NO: 204824 - DNA, 1385 bp, Homo sapiens
  misc_feature (1024)..(1024): n is a, c, g, or t
  misc_feature (1026)..(1026): n is a, c, g, or t
ccagcagctacacctacacgctgaccatcacaggcacacagaggcacatccacctcacatccacctcatacttgtgtactctcagggttcagtctttcatcctatccctctctgatctgtgcctcccaataccttccaagatgtttacagagacccttctccctgtgcagttaggagtgtaaggcaagagagcccctacttcatggggcagatcaagagctgagaccaaagatggtctatgttgctgaccttgtcctgtcctcctgctgtcttaaactatgatccctgctgcggtcactgaagcctttccctgtgagcagtggtgtgtgagagccaggcgtccctctgcctgcccactcagtggcaacacccgggagctgttttgtcctttgtggagcctcagcagttccctctttcagaactcactgccaagagccctgaacaggagccaccatgcagtgcttcagcttcattaagaccatgatgatcctcttcaatttgctcatctttctgtgtggtgcagccctgttggcagtgggcatctgggtgtcaatcgatggggcatcctttctgaagatcttcgggccactgtcgtccagtgccatgcagtttgtcaacgtgggctacttcctcatcgcagccggcgttgtggtctttgctcttggtttcctgggctgctatggtgctaagactgagagcaagtgtgccctcgtgacgttcttcttcatcctcctcctcatcttcattgctgaggttgcagctgctgtggtcgccttggtgtacaccacaatggctgagcacttcctgacgttgctggtagtgcctgccatcaagaaagattatggttcccaggaagacttcactcaagtgtggaacaccaccatgaaagggctcaagtgctgtggttcaccaactatacggattttgaggactcaccctacttcaaagagaacagtgcctttcccccattctgttgcaatgacaacgtcaccaacacaggcaatgaaactgcaccaagcaaaangntcacgaccaaaaagtagagggttgcttcaatcagcttttgtatgacatccgaaactaatgcagtcaccgtgggtggtgtggcagctggaattggggggcctcgaagctggtgccatgatttgggtccatgtatcggtactgcaatcctaaataagtccactttctgccttctgccactactggttgcacatgggaactgtgaagaggcacctggaaagcagcagtgattgcgggcagcgggcaccggactctaccactgttcccttggggccaaagggcctgcccttttgctccagacttggggccaatagggccactcccttaaggcgagctgatttcctccatggggcggaggggcg

SEQ ID NO: 204825 - DNA, 1231 bp, Homo sapiens
ccagcagctacacctacacgctgaccatcacaggcacacagaggcacatccacctcacatccacctcatacttgtgtactctcagggttcagtctttcatcctatccctctctgatctgtgcctcccaataccttccaagatgtttacagagacccttctccctgtgcagttaggagtgtaaggcaagagagcccctacttcatggggcagatcaagagctgagaccaaagatggtctatgttgctgaccttgtcctgtcctcctgctgtcttaaactatgatccctgctgcggtcactgaagcctttccctgtgagcagtggtgtgtgagagccaggcgtccctctgcctgcccactcagtggcaacacccgggagctgttttgtcctttgtggagcctcagcagttccctctttcagaactcactgccaagagccctgaacaggagccaccatgcagtgcttcagcttcattaagaccatgatgatcctcttcaatttgctcatctttctgtgtggtgcagccctgttggcagtgggcatctgggtgtcaatcgatggggcatcctttctgaagatcttcgggccactgtcgtccagtgccatgcagtttgtcaacgtgggctacttcctcatcgcagccggcgttgtggtctttgctcttggtttcctgggctgctatggtgctaagactgagagcaagtgtgccctcgtgacgttcttcttcatcctcctcctcatcttcattgctgaggttgcagctgctgtggtcgccttggtgtacaccacaatggctgagcacttcctgacgttgctggtagtgcctgccatcaagaaagattatggttcccaggaagacttcactcaagtgtggaacaccaccatgaaagggggttgcttcaatcagcttttgtatgacatccgaaactaatgcagtcaccgtgggtggtgtggcagctggaattggggggcctcgaagctggtgccatgatttgggtccatgtatcggtactgcaatcctaaataagtccactttctgccttctgccactactggttgcacatgggaactgtgaagaggcacctggaaagcagcagtgattgcgggcagcgggcaccggactctaccactgttcccttggggccaaagggcctgcccttttgctccagacttggggccaatagggccactcccttaaggcgagctgatttcctccatggggcggaggggcg

SEQ ID NO: 204826 - DNA, 1448 bp, Homo sapiens
  misc_feature (1087)..(1087): n is a, c, g, or t
  misc_feature (1089)..(1089): n is a, c, g, or t
ccagcagctacacctacacgctgaccatcacaggcacacagaggcacatccacctcacatccacctcatacttgtgtactctcagggttcagtctttcatcctatccctctctgatctgtgcctcccaataccttccaagatgtttacagagacccttctccctgtgcagttaggagtgtaaggcaagagagcccctacttcatggggcagatcaagagctgagaccaaagatggtctatgttgctgaccttgtcctgtcctcctgctgtcttaaactatgatccctgctgcggtcactgaagcctttccctgagccaccatgcagtgcttcagcttcattaagaccatgatgatcctcttcaatttgctcatctttctgtgtggtgcagccctgttggcagtgggcatctgggtgtcaatcgatggggcatcctttctgaagatcttcgggccactgtcgtccagtgccatgcagtttgtcaacgtgggctacttcctcatcgcagccggcgttgtggtctttgctcttggtttcctgggctgctatggtgctaagactgagagcaagtgtgccctcgtgacggtgtgtgaaacccagctccacaggctgatgaccaagagtcccctcgcccttgacaccaggccctgggattcccaaaccctgctttggacccccctaggctcaggcttctgtctcacttttcccgggggggggattagggcaaggagggcatgagggactgtctctccctaaaaccagacccctgttccccactcagttcttcttcatcctcctcctcatcttcattgctgaggttgcagctgctgtggtcgccttggtgtacaccacaatggctgagcacttcctgacgttgctggtagtgcctgccatcaagaaagattatggttcccaggaagacttcactcaagtgtggaacaccaccatgaaagggctcaagtgctgtggttcaccaactatacggattttgaggactcaccctacttcaaagagaacagtgcctttcccccattctgttgcaatgacaacgtcaccaacacaggcaatgaaactgcaccaagcaaaangntcacgaccaaaaagtagagggttgcttcaatcagcttttgtatgacatccgaaactaatgcagtcaccgtgggtggtgtggcagctggaattggggggcctcgaagctggtgccatgatttgggtccatgtatcggtactgcaatcctaaataagtccactttctgccttctgccactactggttgcacatgggaactgtgaagaggcacctggaaagcagcagtgattgcgggcagcgggcaccggactctaccactgttcccttggggccaaagggcctgcccttttgctccagacttggggccaatagggccactcccttaaggcgagctgatttcctccatggggcggaggggcg

SEQ ID NO: 204827 - DNA, 739 bp, Homo sapiens
  misc_feature (689)..(689): n is a, c, g, or t
ccagcagctacacctacacgctgaccatcacaggcacacagaggcacatccacctcacatccacctcatacttgtgtactctcagggttcagtctttcatcctatccctctctgatctgtgcctcccaataccttccaagatgtttacagagacccttctccctgtgcagttaggagtgtaaggcaagagagcccctacttcatggggcagatcaagagctgagaccaaagatggtctatgttgctgaccttgtcctgtcctcctgctgtcttaaactatgatccctgctgcggtcactgaagcctttccctgtgagcagtggtgtgtgagagccaggcgtccctctgcctgcccactcagtggcaacacccgggagctgttttgtcctttgtggagcctcagcagttccctctttcagaactcactgccaagagccctgaacaggagccaccatgcagtgcttcagcttcattaagaccatgatgatcctcttcaatttgctcatctttctgtgtggtgcagccctgttggcagtgggcatctgggtgtcaatcgatggggcatcctttctgaagatcttcgggccactgtcgtccagtgccatgcagtttgtcaacgtgggctgccatgattgtgtccatgtatctgtactgcaatctacaataagtgaaatcagcagagcctctgnggtggatgtgtagaaggcacttcaaaatgcataaacctgttacaatgtta

SEQ ID NO: 204828 - DNA, 1504 bp, Homo sapiens
  misc_feature (1143)..(1143): n is a, c, g, or t
  misc_feature (1145)..(1145): n is a, c, g, or t
ccagcagctacacctacacgctgaccatcacaggcacacagaggcacatccacctcacatccacctcatacttgtgtactctcagggttcagtctttcatcctatccctctctgatctgtgcctcccaataccttccaagatgtttacagagacccttctccctgtgcagttaggagtgtaaggcaagagagcccctacttcatggggcagatcaagagctgagaccaaagatggtctatgttgctgaccttgtcctgtcctcctgctgtcttaaactatgatccctgctgcggtcactgaagcctttccctccaatccatcctccattaaggctgtcagcactttggggtgcctgccatcaggagtcccccatatatgtaggggtgctatttcacagagatcatcctttggcgtgcctaaacagaaccaggtgagcagtggtgtgtgagagccaggcgtccctctgcctgcccactcagtggcaacacccgggagctgttttgtcctttgtggagcctcagcagttccctctttcagaactcactgccaagagccctgaacaggagccaccatgcagtgcttcagcttcattaagaccatgatgatcctcttcaatttgctcatctttctgtgtggtgcagccctgttggcagtgggcatctgggtgtcaatcgatggggcatcctttctgaagatcttcgggccactgtcgtccagtgccatgcagtttgtcaacgtgggctacttcctcatcgcagccggcgttgtggtctttgctcttggtttcctgggctgctatggtgctaagactgagagcaagtgtgccctcgtgacgttcttcttcatcctcctcctcatcttcattgctgaggttgcagctgctgtggtcgccttggtgtacaccacaatggctgagcacttcctgacgttgctggtagtgcctgccatcaagaaagattatggttcccaggaagacttcactcaagtgtggaacaccaccatgaaagggctcaagtgctgtggttcaccaactatacggattttgaggactcaccctacttcaaagagaacagtgcctttcccccattctgttgcaatgacaacgtcaccaacacaggcaatgaaactgcaccaagcaaaangntcacgaccaaaaagtagagggttgcttcaatcagcttttgtatgacatccgaaactaatgcagtcaccgtgggtggtgtggcagctggaattggggggcctcgaagctggtgccatgatttgggtccatgtatcggtactgcaatcctaaataagtccactttctgccttctgccactactggttgcacatgggaactgtgaagaggcacctggaaagcagcagtgattgcgggcagcgggcaccggactctaccactgttcccttggggccaaagggcctgcccttttgctccagacttggggccaatagggccactcccttaaggcgagctgatttcctccatggggcggaggggcg

SEQ ID NO: 204829 - DNA, 1144 bp, Homo sapiens
  misc_feature (783)..(783): n is a, c, g, or t
  misc_feature (785)..(785): n is a, c, g, or t
aggctaactggccacgggtggggccagcaggcgggcagaaggaggctttaaagcgcctaccctgcctgcaggtgagcagtggtgtgtgagagccaggcgtccctctgcctgcccactcagtggcaacacccgggagctgttttgtcctttgtggagcctcagcagttccctctttcagaactcactgccaagagccctgaacaggagccaccatgcagtgcttcagcttcattaagaccatgatgatcctcttcaatttgctcatctttctgtgtggtgcagccctgttggcagtgggcatctgggtgtcaatcgatggggcatcctttctgaagatcttcgggccactgtcgtccagtgccatgcagtttgtcaacgtgggctacttcctcatcgcagccggcgttgtggtctttgctcttggtttcctgggctgctatggtgctaagactgagagcaagtgtgccctcgtgacgttcttcttcatcctcctcctcatcttcattgctgaggttgcagctgctgtggtcgccttggtgtacaccacaatggctgagcacttcctgacgttgctggtagtgcctgccatcaagaaagattatggttcccaggaagacttcactcaagtgtggaacaccaccatgaaagggctcaagtgctgtggttcaccaactatacggattttgaggactcaccctacttcaaagagaacagtgcctttcccccattctgttgcaatgacaacgtcaccaacacaggcaatgaaactgcaccaagcaaaangntcacgaccaaaaagtagagggttgcttcaatcagcttttgtatgacatccgaaactaatgcagtcaccgtgggtggtgtggcagctggaattggggggcctcgaagctggtgccatgatttgggtccatgtatcggtactgcaatcctaaataagtccactttctgccttctgccactactggttgcacatgggaactgtgaagaggcacctggaaagcagcagtgattgcgggcagcgggcaccggactctaccactgttcccttggggccaaagggcctgcccttttgctccagacttggggccaatagggccactcccttaaggcgagctgatttcctccatggggcggaggggcg

SEQ ID NO: 204830 - DNA, 1252 bp, Homo sapiens
  misc_feature (891)..(891): n is a, c, g, or t
  misc_feature (893)..(893): n is a, c, g, or t
ccagcagctacacctacacgctgaccatcacaggcacacagaggcacatccacctcacatccacctcatacttgtgtactctcagggttcagtctttcatcctatccctctctgatctgtgcctcccaataccttccaagatgtttacagagacccttctccctgtgcagttaggagtgtaaggcaagagagcccctacttcatggggcagatcaagagctgagaccaaagatggtctatgttgctgaccttgtcctgtcctcctgctgtcttaaactatgatccctgctgcggtcactgaagcctttccctgagccaccatgcagtgcttcagcttcattaagaccatgatgatcctcttcaatttgctcatctttctgtgtggtgcagccctgttggcagtgggcatctgggtgtcaatcgatggggcatcctttctgaagatcttcgggccactgtcgtccagtgccatgcagtttgtcaacgtgggctacttcctcatcgcagccggcgttgtggtctttgctcttggtttcctgggctgctatggtgctaagactgagagcaagtgtgccctcgtgacgttcttcttcatcctcctcctcatcttcattgctgaggttgcagctgctgtggtcgccttggtgtacaccacaatggctgagcacttcctgacgttgctggtagtgcctgccatcaagaaagattatggttcccaggaagacttcactcaagtgtggaacaccaccatgaaagggctcaagtgctgtggttcaccaactatacggattttgaggactcaccctacttcaaagagaacagtgcctttcccccattctgttgcaatgacaacgtcaccaacacaggcaatgaaactgcaccaagcaaaangntcacgaccaaaaagtagagggttgcttcaatcagcttttgtatgacatccgaaactaatgcagtcaccgtgggtggtgtggcagctggaattggggggcctcgaagctggtgccatgatttgggtccatgtatcggtactgcaatcctaaataagtccactttctgccttctgccactactggttgcacatgggaactgtgaagaggcacctggaaagcagcagtgattgcgggcagcgggcaccggactctaccactgttcccttggggccaaagggcctgcccttttgctccagacttggggccaatagggccactcccttaaggcgagctgatttcctccatggggcggaggggcg

SEQ ID NO: 204831 - DNA, 318 bp, Homo sapiens
acatcttccggaaagcaagcctccaggcttgcttggccttgcacccaggctcaactctctttccttctttcctacctgacaagtcctgctgagcctcagctgggcccctgaacttttcagacagctttgctgctcttttcttctaggtgttagcagcacctgctgcctgccgtggtggtatacgctctgtgcctgcctctctccccattgcaccgagcccgatggaggcagctactgcgtcctctgctagagcgccagtgcctgggacagagcagccagttgttcatgtactgcccgaagctgttcctgtagttctga

SEQ ID NO: 204832 - DNA, 428 bp, Homo sapiens
ttagccaagtagaggccattttatatatagaaactatacatttcttggtgtcttaaggaatcagcacttttagtagtaattccatagatgaaggccttatataccatatagtaagtttgtgatagattcaaagatttcctataggtttgcattcaagaagaggtacaacttttcctcttggagtatctgattattactgtggataagaaagccctgtaattaacgggaacattaatatgccttatttttagttctgatctcaaaaatgattagcagccaacttcataatacagttctctcattttgtaatattttcttctttgctcaaccaaaagaaggtttaaatttatgattgatgaatttttctaactgaaggctaaaaaaaggctgattgatataaagtaggtagaatgtaagagttctttctg

SEQ ID NO: 204833 - DNA, 228 bp, Homo sapiens
atagctatttattgtacatacgttttgcaatcttcagcagcctcgggtgcacatttatttctagagctgagggtggtagacataatactctcagcttctacttaatgaaggcatcagaattttagctccttcaagatgtaagggaataaaattgtgtgattcaagagtcgtcagctggatgacaattttagatgtgtctttagagagaaggtgatattggtgaaatag

SEQ ID NO: 204834 - DNA, 363 bp, Homo sapiens
cactctactctcaggtgcgctggctccacttcatcactgaactgctcgggccgcataggcccatcatttcaggaggctgtacatagcgccttggtcctaggccacatataggtcgatcttcctcgccaactcatatttcacacagataaatctcagtagaggaaccggttcctcttacaaagggggatgagtagggcctgaaatgtttgactccttacctgtttaaatttgccttgtcacctttcacagatacgtgatctctgggcctttaggagagcctttggcacaaatagttttccacctttttcctacaatatattattcctgaggctctgaatgtcgtctgctttttgttcgccaagt

SEQ ID NO: 204835 - DNA, 316 bp, Homo sapiens
aaggaaacactgacaaattcaacaatataataaccaaatatctctgtataggaaaatacgataaagtccagtgacaagggagagaagcttaaaatgcatactacatacaaaggactgttttccttaatatttcaaattggaaatatagaaatggattttttaaaaagagcgacagtccaatcaaaaatgtaaatggtatcaacagctagttcacacgcagcacgtttactgaacactccctcatgccagacgtagagttggtggctggcacacttgagaggccagacagacaacagtccctaccccttgcaatcga

SEQ ID NO: 204836 - DNA, 174 bp, Homo sapiens
agttcaccctctgcacactggctggagtggagtttagagtcattctgtttgaaatgactggtaaagtgtccattcagggcagctctgctatgaatgcaaggaagtggtctttggagctcttgtgtagtatttgaaagtacttcgtgttactgcagacagccaaagaactgaaat

SEQ ID NO: 204837 - DNA, 739 bp, Homo sapiens
gtccttgtcttcctagtaccttcctatccacatgtccccggcaagactgatttggaatggcaggcactcacagttgtgtttatttgagggtaccacaggaagtgggggcccccaaattggctaaggagccccagggtggagggaggtagaagcacactgggtctgtctgggagcctgagcaccttctctgtgggctccttcctacccatggattccaacccccacccacctccccactgcccacccactcacccatctcttctgctttccttctccctgtgccccaggccacaccattcctctgtgcaccctgcactttcccctctacacctttgtccttgacacctcctctgccctttatcttcctcctcctcctcctcacagcctttccccctccccatcaggattctggctgcccttgctctgcaaccctgcctggaacttcaggtccctgatcttacagcctaaaaaaaccaaatattcattgacacctcattttgcttcagcaccatgctgaatgctggggacacaggggacacgaaatagtccctaccacatggaactaaaactctggaggtgaagagagaagatgaatcaaagaataatatataggccgggtgcggtggctcacacctataatcccaacattttgggaggctgaggcaggtggatcatctgaggtcaggggttcaagaccagactgaccaacatggcaaaaccctgcctctactaaaaatac

SEQ ID NO: 204838 - DNA, 100 bp, Homo sapiens
aggaaagagaaatctgctaataaaaaggagaatgacatagtttgagggtctacttattgtaaagcaagagaaagaacagtaactggagtaaaatgagctc

SEQ ID NO: 204839 - DNA, 590 bp, Homo sapiens
ccctgacttgaggcaggctggtctaggggtcttgtgtgctggccctggagtcagaccagctggggaagatcccagtgccacactggctgtgtgatctggggcacacttcttaagtgctctgagccttggttcccttatccgtaaaatggaatagtaagagcaccttagggaagtggtggtgaggattgaatgagatagtgcaagttgagcagggttgatacactattaataattcaggtggggcttgtaccgcttcttccccaatttactcccgtccattgtgttgtcaggtgcaggtttccaaagcacaccttggttcgtctctctgcgttttgtgggatgcctcctctagctcgccattgcctacttattcagtattttgtcattcagggctgcccttgtggcttatgtgacccagcccccagctgctcttgctgggcctctccatgtagccttctttccaggagaaaacgtgcgggatctctccagactccagacctcgatgatctaccggcccgttcagtcggttgtaaccttgtcccctggaacgcctgccggatcattactctcaagtgtcgtagggctagagt

SEQ ID NO: 204840 - DNA, 511 bp, Homo sapiens
caagcagtatatacagactcagcattcacacactcagccacccttggcctctgtccccattccaagccctgtctactctccctcacttggttcctccattcctcctctcctgccctgttgtctcagcctggactggtgcagtgcgcttcagtgggccctgccttccagccgctccctggtaattctctgccactgtaaccacctctgcctcttagaagatggcatggtcatcccgtgatacttggacatttgccgggagtagctagttggcccagctggtcccctgtgtctctaggaggctgggtagccagtcagctcgaaacctgtaggctaatatgcgtagcgcactgagaaccccacagcccttcctggggcccagaaggatgagaatggtgagggaaacagtgtgctgtgaggaaatggccacaggagtcccagaaacattcccccataaagagaggatatgaccagtggagaagagaagcgagaggaagaagcccaaacaaagggc

SEQ ID NO: 204841 - DNA, 449 bp, Homo sapiens
cgttttacactgttcgtcggtttacagtgtctaacagagatatactcaggaaacagctactactttgaagtctactgatgtggcaaattacactgattaatttttgcatttgaactaatcttgcattcatagggtaaatcctacttggtcatgatttacttttctttttatgtatcacaggatttggtttgctaatattttgttgaagatttttggtcctgtgttcatcaaggatattatttgtaattttcttataatgtttttgttttctggttttcgtataaggacaatgctatcatcataaaatgggatgagaagtgttccctcctcttgcactttcttgaaacgcttgtgtagaattgctgtgatttattccttagatggttggtagaactccccagtgaagccatctggaccttcagtaggttattaactacaaattttatttc

SEQ ID NO: 204842 - DNA, 382 bp, Homo sapiens
ggcaagagaatcgcttgaacccgggaggcggaggttgtaatgagctgagatcacaccattgccctccaccctgggcaacaagagtgaaactcagtctcaaaacaaacaaacaaacaaaaaaaaaaacaagaggggtgcaactagcatctagtgagtagaggccagggggtttgctaaacatctacaatgcatgagacggcaccccaaaatcaagactgtcagtcatgcaaggttgagagactgctctagattttgcctttgccttgtccttctcaagtggactctctctggctgctaatcacaccctagcatgtacagcacaaaatggaaggaagaaaaagatagaacaagtttgttctacagaaacatcagtagttttgga

SEQ ID NO: 204843 - DNA, 197 bp, Homo sapiens
tctgaatatgatctgtatataaacaaacatatactgatgctactcaagatgggcgttctgtgaaacggcagcgtgggcatctccaagaaggtttttagaaaagtagaatctcaggccccattccagatctgttgaatcagaattcgcattttgtcaagatcattggatgattcacattaaagtttgagaaacactga

SEQ ID NO: 204844 - DNA, 361 bp, Homo sapiens
tctgacccccttaaaggtgactggggagccacagaggatctgctgcatggagatgtcaaatcctagtgagcagtctggatatctgtgacttgctcggagtggctgcaggggctggtgggttacactattcatgtggacactccctgtagggagaggccagggattctgacagatgcaccactttttttcaccctgtttgatattactctccagctaggtgagagtgatggaaatcatgcagcaaacaatttaatgattatctgctttggggttcttgcaccagaataactgagtgttgagttgtcatgagcaggcaagaaaggctagagctgcatgtcgtgcaggcagagagtctgtcaga

SEQ ID NO: 204845 - DNA, 547 bp, Homo sapiens
aatacattaaacagactcatagcataagtaagattgtaaaggtgatgtctgatagattgagaacaagcttttaaagggcttaatcactttgtgtgcaaatatatcctgcgaaatacaagtgagtgtgacaggtttggcggaacattttgttagcagctagcttgtgctcctctttgtactttataaacgttaggctgcacaatttcagactgactggctctccttcctccctatccccacaaccaccattagtttgaattaatgagatcttagtgaacagttactttgttgtttcctttctaatcttcagacatctccccactgagtttaccaaataattcaaccctttcacttaaagcagcttagacctgcataactcaggtagataactgtagtctgaaacaggtctatagacactgttgtgtgttcaataataggtttatttcaaatactgtctccctacccatttccattgtgctggcattgaaggtttttacttagacttggccttatctcccagctgtttactgttcttttccagttagta

SEQ ID NO: 204846 - DNA, 581 bp, Homo sapiens
gaaagtttgagggattagagaagtaatgacaaatgtatcttaaccaagtcttgaatagatgacctgtactacatagttattttccttggaaaatatttcaaaatttaaaaacttatttttgacatttcacatctaaatatctagagtagtttgaagggttttctttatttcttttatttgtcacaaagtcaataaaattaaattccgttgtggttttaattttattccagaaaggaaaaaaacaaaatgatttgtgtttcaaagataaataagaacttagatcatgctgtggattgaaactccaaccctgttgaaagaaaggggtctcctgaactttagtggaccttgtttgtcagccttactcccaaccttggggcatggcctcttgacataacctactgaaggtaagaggctgagggaaggagacaggccagaaggcagagaaaccatatgccagccagtctcaagaagagaagtgaaatgaagctttctaagtccaagggcctgctttttacagctcatcaggcttagggcaattgccaaaaagggaaaaaaaagatccccattaggcacaacctaag

SEQ ID NO: 204847 - DNA, 530 bp, Homo sapiens
agaataactgtttcaaagaggcaaccggtaactcctgaaaaacatcgagctagaaaaagacagtcatggctttgggaagaagacaggaatttgagatctggcgtgaggaaatatggagagggaaactggtctaaaatactactgcattataaattcaacaaccggacaagtgtcatgttaaaagacagatggaggaccatgaagaaactaaaactgatttgctcagacagcgaagactgattgtgtttctaaaagctttatgaaaggacagttaagtattttgatcactgcattttgtttgaaacttgtgtcattgatgtattttaaaacttctgtttaaagcattacagtatttttctgtgaccatcaattaatatgagggtttgtgctataagagttaaagcatatgctatcattgtattctttaagaactttattttgataaaatgtaaatttgttgaaccctgccacatttagtatccccacccccaaaacctgttccaatgaaaaaattaaaacctgttatgaaa

SEQ ID NO: 204848 - DNA, 361 bp, Homo sapiens
tataatgtctcagatttggcttcaaaataatagagcaaaggataaagtggatggaatgaggtgaagattagacaagaattaaagttgttgaagctgagagatgggtacacagggctcactatactactgtctacttctgaatatgtttaaaaatataagttttaaaaagcttttatggaaatagcttaaaaataaagatacaccagtttcacaaatgggaattatattcaatacaggtctaatccaaatcccaacaggccttatggaaaacctgacaaactaattttaaaactgatctgtaatagtcaaggactaagactggccaaaacacgacaaaaggtgaacaaagacaaagggatct

SEQ ID NO: 204849 - DNA, 244 bp, Homo sapiens
tgctgggatgataggcatgagccaacgtgcctggccagaatatgctgtattataaagaatcttacatgttacttgatgcctgtgatctattttcttagtaagaagagaaacttctctccactcagcctcagtccactgtacccactcttttgtgtgtcaggatgttcaggggagaagagggcttagcatctctgtcctgtgttgagttgtggttgcccgtcactgggctgtaaagtgccttgcc

SEQ ID NO: 204850 - DNA, 248 bp, Homo sapiens
aggactcagagcttggggtggagactgaaggaacagaccgcagagaaagaagaaagatttgggatgagtcgcattgggagcagagactaaggagggaccagtgtatgaaacaatgcctggatgtcaggcacatcagacccatttgcccatttttcaacaaaaatcatccaggtcttgtaaaatggagaaatcaaaagtgtcattttctagctatttagaaccattattgagtttgtattggggccaag

SEQ ID NO: 204851 - DNA, 435 bp, Homo sapiens
ctccgcaaaaaccctaaatggagttcaaagagcttccaggaccctgaaaacccccaaagcaggaataacagctaacacttattgactggaatctgagctcactaaaagcctccatcctggagttgctggctctgtcaccgctgagatgagtctgcatgtcctgcagttttgacttcaaaccaacatctgtggtcagctctccactccctgccaatacagccagcactgttctgacagcagtcactaagcttgaggttcagtagcactgggggtgtgtaccgggggccctgttgaatgggtcttctaggagactcatggcctatattttaactcacactatcacaaatgtgccctctgaatgtggtgaacatctaccaagccagtttcacataaggtcatgggtaagctcataaacaatgcaagcatcctcttatt

SEQ ID NO: 204852 - DNA, 331 bp, Homo sapiens
tggagttgttttgatcatgatttgaagtaatatatgtaaagtgttcagtgtagggcctggtagagaattggtggttaatcagcgtagctcttattactgtgattagaccctctcttagtcttggctacacctccggggacttcagagtccattgtgcctgccccctgccaggctgaacagccctgaactgcacttcctagggcaggtcttggccccctgcccatctctctgctttggcctcccccggctgtctctgcggaatggtgccaccctctgccatgcctagagctgtgcctgactctcccactgggggtgtttgcgaaggagagtg

SEQ ID NO: 204853 - DNA, 208 bp, Homo sapiens
gaccctgtggtaggcatcgcacataaatagatgatttcatgctagctcttgagagatgtaaaatcagcgggcaacacaggctacgaaaagataaattacactacagtgtggaaaggtccaaagagtaataaggagacatattgttgtgccaatggtggtttctccattgattagggttctgtttcttggtgcactgggatgctgagtt

SEQ ID NO: 204854 - DNA, 175 bp, Homo sapiens
acctgattgtaaggtcatgacttaatttgtttaatatacacactatatgtttatataattcagtgtgacatgctgatttgcattaataaaaacatgtatctttggccagtaattactgttaagtgggcttccttaagaagccaataacagccaggcccgggcacggtggctcacg

SEQ ID NO: 204855 - DNA, 410 bp, Homo sapiens
ctcttaaaggccggactccatgaccttcaaggatggagccaaatctccctgttcctcgtgtgatcttcctgtgcccccctttggcctgaacctactgtgtggttcacccagggacttcaccctactttactactgtgtggttccctggagactgggggcttaatccgtctctgatatctccttgattgaatagaatttataattggccaacaatttaacaaacgaatgcattgtttaaagaattatttaaagttttaaaaaatgtttgattcagccatcttaggaagggatcaaaataagaatgtatctggaaatgcttcatggactgcaaagatcaatatgatttaaagaaatgccattttatacatggttcttcgaattttttttgattgagaggattctgtgcaatt

SEQ ID NO: 204856 - DNA, 621 bp, Homo sapiens
gggtatcgcaaggtgcttctgaagatgaactcagataaggtatgcagtgaccacaacgtctggtacaaggtaaccacttattaaatagctggtgctgtggttacactgatcgctggccctggctttccgtggcactgcttggtgcctcctaaggaagtacttcgaccaagtgctgctgccgatggcctgaagaaggcagccggattaagggaggaggaaaggaatcaagatcaaaaacccagattgaagcgcagctgatatgcctatctcagccacctacagcagctgacaaagtactagtgcacactccaaaccagttcatccaactaaaggggccgaagctgccaaaaaaaatgcctcaagtgttccttggatgcctgaagcagaaagaacgattagagatttcacagattaaattcctgcctgcatgtctatcgtcagctgtagtcatttgttgaagcgaaacacgcagtttcaaagccattaatgccccaggtttgaacattttatctctattttctttaatcaggtgacatttcttaaggaagaaaaaagctgggatggtgtcaattaaaacaaaagcatccctcaccacaatttgaaagtaaaaacgatctggtg

SEQ ID NO: 204857 - DNA, 221 bp, Homo sapiens
aaagtgctgggattacaggcgtgagccaccgcgcccagccccagctgctgctttttaaaaaaagactaaatagcattctgaaatctttattttattttattcctgtatttattttagagacagggtcctgctatattgaccaactggttttgaactcctggcctcaagcaaaagttaacctctatgtataaaaatattaaacagttttactcccttcaaca

SEQ ID NO: 204858 - DNA, 686 bp, Homo sapiens
ccctgagtctgatatctgctggacctttttgagtctcctatgcacatgcattgagactttgggtaaaccagaagcatataaagggcttctgtctcttcagtctccactgcccatatgcacagcctcagccagcaatatgctgtctctgatcacaactgcaacttcaggctgatggagctgatggccctcccaactcactcccatccaagatgatcatttctattgacaactttgcttggtgtctgcactgcccagctcttcaaactggttgagtctccttcaacatctacagagaagctactggtcatcatggcttgctgtaccttggcagaacctataggctgggttgaggtggatgagaggagccctaggtcagaacatctcagattcccagtgttcctgagtgatgtcccatgatttttaaaaaataaacacgtctcaggttgtcataggcctttggctgatttccagagcacaaatagttgaagtttccaactttgcacagctctatcattgcattttgggaagaggatttacccaacctcctcctagagtcatagctaaaagtccactctttgccttgggttttgactcgtctctctcttcttccttcattttcccctttcacacacttaagtccaacacttgctagtggctctagagcaataaaatctttcttgcacata

SEQ ID NO: 204859 - DNA, 503 bp, Homo sapiens
tgaggaagaaggactccttcctaattcattccatgagccgaataattctgatatcaaaacctggcaaagacataatgaaaaagaaaactacaggtcaatatccttgatgagcatagatggaagaatcctcaacaaagggttgagtgtggtggctcatccctgtaatcccagcactttgagaagacgacacaagaggatctcttgagactaagaactcttgccatcagctgcatgtctgagtgctaaatattcagcaaagaaagaatctcttaaagccccattgaaaaagactatgcaaggtactctgttctcatcctgctcataaagacatacctgagactgggtaatttataaaggaaatgggtttaattgactcagttacgcagggctggggaggcctggggaaactaacaatcatagcacaaggggaagcaaacatgtccttcttcacatggtggcaggagagagaggtgccaagcaaagggggaaaagccccttattga

SEQ ID NO: 204860 - DNA, 218 bp, Homo sapiens
tcaccaactgagtctaacaggaaaagactgtgggcagagaggcacagggcctcacccaactcagggcaagcccggtgggggcagggtaaacccagaaaacaatcatgggatggtaatcccgagttcaggatgacggtcactcctgggagcacaggagaaagggacccacattgtggaagcgatgcagggcttccactgtatttgacaagtcttttttt

SEQ ID NO: 204861 - DNA, 1508 bp, Homo sapiens
ccgtctccctcagtggccgcagcgcctcccgtgagagcggtttctcctccttgtactgctggacctggccccgtatcttcgtggcagaggccaagcaaggggactccgatgccggggcgtaggggggtttgggtcaaaggatgggggcagagttcaaagtgcagggggcgggctcgtttaatggcgaagtcctggcaccgcgccccagggaggaggctccggaggccagtggaaccccgctagacttcaggggtcttggttggggacgcggggcgttttgaccccctaggcctgaggatcctaggcctgagtaacccatcggatttggagggaagggtggggtttaggtgaaatgtaaatactgcgtggtttccatttggcaaagagcaagcttgtaaaggggtcaccctcgggtctgggctgcgaagtgcagccgggacctgtttccttgggaaccacaagataagaccgctgtagattgttatgtccggaaaccgcttatcagagccctgcacctgggttggaaatggagacggattctctgtgtccaagaaaatcagaccctccggccggaaaagggaagtttattcttactgataaaatgtcaatcactgtgtatgattgtaatgggcaaggaaggcatttagcgagctagaagacattgatggctcagaaaaaggtgttcttggcaaaaatactgttttctgttaattttccaactgataccatctgggtctgtcctcccagcctgatgaatgtgtaggcagatactttctcagtcggagttgatttttattatcttgattgctgcatcctgtgcacagaggttttctgctcagctgggcttcatcctggggtcccagtcctggccccaagccttaatcagctctcgggtgatattaggcaagttgccaagcccctaagtgcctcagtttccaggtctgtaaaatacataacattacctgcatttgtcaaatagtgctgtgtgtggattattattggcagctcatcatcaccattatcaccctcctgtaaacgtcttggaccccttaagtgaagacagcagggttacggcggataaaatgatggacttcagagaaaagactctaagaccaaatagagtctaaagcagtgattatcaaagaggggaggagaaattttacgcccaggggacactggacaatgtctgcagacttggttgtcacaaccggggatggggttggggcgactggcatccagtggatgaggaggtctagggtgctgctcaacaccctgcaatgaatagcacgccagtcttttggatttgagcccaccttaatctcattttaatcgaattgcctctttaaaggcctatcttcaaataccttctgaggtactgtgggttaggccttcaccttacggatttgtggggacgcaattcacccgttaacgctatacatacacaaaaattcatagactacacctcaaaagaaaaattcaacatgaccatataatactataaaataaaa

SEQ ID NO: 204862 - DNA, 801 bp, Homo sapiens
tccccggatggcgaccattcaatctgcatcaaattcttggtttaaagggtttttttttgtttgtgtttgtttttttgttttttttttaaatggagtcttgctcttgtcatccaggctggagtgcaatggtgcgatttcggctcagtgcaacctccgcctcctagggtcaagtgatccacctgcctcggcctcccaaagtgctggaattacaggtttgagccaccgcatctggcctgcagtgaagctttctaagtctatcttttcctttctcctttccttcctcgtgtcccaaaggcaggaatatgcccctcctcttgaagttcctctgattgtccagtcctccacggaaaatcttattatttgtttatcagaccagaagcaaaataaatgcccttgaaaggtgacaagcaacagcgtgaggaggacctcgcttgcccaggcagcttcctccaatcccacccttgccccacaccagaacagaggataatttcagcacccgtgcctgggaagacacccaaaatgagtgtctgtagtttgtcccctctttgaaagaatgcagggcttgagaaggctcactttccctgcaggcctctgtctggtgccagatgtaggctctgtgaaaagaagcacagctataaccgggagccttaaaatagtcaaagtttctataacagaaattattagtggtgtaggggagcaaaaacaggcaaaagaatagctgctttgagcttcaggctttcattgtggttaatagacaattgaaatcaaagaaacatgtttacttcttttttcttttctttt

SEQ ID NO: 204863 - DNA, 800 bp, Homo sapiens
tccccggatggcgaccattcaatctgcatcaaattcttggtttaaagggtttttttttgtttgtgtttgtttttttgttttttttttaaatggagtcttgctcttgtcatccaggctggagtgcaatggtgcgatttcggctcagtgcaacctccgcctcctagggtcaagtgattccatgcctcagcctcctgaatagctgggattacaggtttgagccaccgcatctggcctgcagtgaagctttctaagtctatcttttcctttctcctttccttcctcgtgtcccaaaggcaggaatatgcccctcctcttgaagttcctctgattgtccagtcctccacggaaaatcttattatttgtttatcagaccagaagcaaaataaatgcccttgaaaggtgacaagcaacagcgtgaggaggacctcgcttgcccaggcagcttcctccaatcccacccttgccccacaccagaacagaggataatttcagcacccgtgcctgggaagacacccaaaatgagtgtctgtagtttgtcccctctttgaaagaatgcagggcttgagaaggctcactttccctgcaggcctctgtctggtgccagatgtaggctctgtgaaaagaagcacagctataaccgggagccttaaaatagtcaaagtttctataacagaaattattagtggtgtaggggagcaaaaacaggcaaaagaatagctgctttgagcttcaggctttcattgtggttaatagacaattgaaatcaaagaaacatgtttacttcttttttcttttctttt

SEQ ID NO: 204864 - DNA, 741 bp, Homo sapiens
cggctcagtgcaacctccgcctcctagggtcaagtgattccatgcctcagcctcctgaatagctgggattacagatgcctgccaccacacccggctaatttttgtatttttagtagagacgggttttcactggtctcgaactcctgacttcaggtgatccacctgcctcggcctcccaaagtgctggaattacaggtttgagccaccgcatctggcctgcagtgaagctttctaagtctatcttttcctttctcctttccttcctcgtgtcccaaaggcaggaatatgcccctcctcttgaagttcctctgattgtccagtcctccacggaaaatcttattatttgtttatcagaccagaagcaaaataaatgcccttgaaaggtgacaagcaacagcgtgaggaggacctcgcttgcccaggcagcttcctccaatcccacccttgccccacaccagaacagaggataatttcagcacccgtgcctgggaagacacccaaaatgagtgtctgtagtttgtcccctctttgaaagaatgcagggcttgagaaggctcactttccctgcaggcctctgtctggtgccagatgtaggctctgtgaaaagaagcacagctataaccgggagccttaaaatagtcaaagtttctataacagaaattattagtggtgtaggggagcaaaaacaggcaaaagaatagctgctttgagcttcaggctttcattgtggttaatagacaa

SEQ ID NO: 204865 - DNA, 891 bp, Homo sapiens
ccatattctacctaaagctgctaattctttacagaattcataagcccaggggatagtaagtagtcatttagttttggaaagttcttaagagaatgctatcttctacagtctcatgaagcagtttttcaagattagaatctgtggtcagctataacgtacagtcctaatatccaaccacctgagaagctcatcctaagctgagaaagcctaaaatgttagagaatgtttagagaaaacacctgaaattttttttaagagaacaacctaggttttattgtagagaacaatcaaaatactcctgaacctttctatagaatctttaggagagaggctgacaaaaagaatccttctgttacaactttcttttctaatgtaacaaccagggacaatggtgatctgtcacgcatctgcccatctagcttctcaatcggcccacggttttatttcaggataaaatttgagaaactagtatcactggggaaggaagaaacctaagctgtaaaattatgcttttcccctcaagggattcaataaagcttatttttcatgaaaacaagcctataaatactgactttccttaaacctaatcaaattgtgttcctccaaggtatagctttagaaggatcttctttcagttgctctttcaaacttttccttgttagaaaagaaaaactaatacaaattgttaaaaaattaaagcatgagcagagagcatggattttagatgattttaagtttcctcatcttcatgaatctcatatttggatcatccttcactgcagcatccctcaaaggaacattcattctcccaagaacaagaggaattgtttgcagataaattattcaaggtagcaaaatggagcatgcttcaatctcctcatcctgtccaca

SEQ ID NO: 204866 - DNA, 521 bp, Homo sapiens
caatcggcccacggttttatttcaggataaaatttgagaaactagtatcactggggaaggaagaaacctaagctgtaaaattatgcttttcccctcaagggattcaataaagcttatttttcatgaaaacaagcctataaatactgactttccttaaacctaatcaaattgtgttcctccaaggtatagctttagaaggatcttctttcagttgctctttcaaacttttccttgttagaaaagaaaaactaatacaaattgttaaaaaattaaagcatgagcagagagcatggattttagatgattttaagtttcctcatcttcatgaaaagaagaacctaatactctgagaagtaatgcctgtccagaatgcacactaaacatctcatatttggatcatccttcactgcagcatccctcaaaggaacattcattctcccaagaacaagaggaattgtttgcagataaattattcaaggtagcaaaatggagcatgcttcaatctcctcatcctgtccaca

SEQ ID NO: 204867 - DNA, 397 bp, Homo sapiens
cgaagattcggaatgaattgtcttacctggggcagctcggcctctgcagagccagggccctgggacattttgggcagggtgccttcacagcaactgttcagatcaaccggctttcccctccaaatcccattcttcctctgtttgttccctagaattcccgaaactttctgacactctgcttttccacctttctctctgtcactttctttctcagcactcttttgtctcactctcctgtctgagccccaatctcaaagctggggggtgtgtaggacttgaagatctggcctctcagagctacactgggaggctgggtgacctggaatacaggggctagcagggtgctgagtatagatgcaccttcgtatctgtttgaagttgagaattctttttatct

SEQ ID NO: 204868 - DNA, 605 bp, Homo sapiens
ttatccaaattcataactctctattggtgaaatgccaaccatggtggcaatatggggaatagctagccagtatgcttacagtgcttttagaaatagccagagagaacagcaatagtagaaacagattacataaattcagtttattcatcatgtatttgggcacctctggatgccagaaaggttactaggtgctggggaattaatgatacaataatgtagagatgacaaattaatagccaaaggccagatgcagtggcttatgcctgtaatcccagcactttgggaggccaaggcaggtggattgctcgaggccaagagtttgagaccagcctggccaacatggtggaacctcgtctctaccaaaaacacaaaaattagctgggtatggtggtgcatgcctgtaatcccagctactcagaaggctgagacatgagaatcgcttgaacctgggaggtggaattgtagtgagccaagattgtgccactgcactccagcctgggcaacagagcaagaccctgtctgaaagaaagaaagaaagaaagaaagagagaaagagagaaagagagaaagagagaaagagagaaagagaaagaaagaaagaaaga

SEQ ID NO: 204869 - DNA, 483 bp, Homo sapiens
  misc_feature (464)..(464): n is a, c, g, or t
cagtaccttcccattaactgtgctactcaaccccttactccacactaattatcactactgaccttttaattttcagattctcttataatttgcctgcatcatctgacatcaatcaccactcccttcttaaacctgcctatcttgcattcatattttccttattttcttcctatctctctgaccatctctcttgggttacatttctgacatcttttctatgttctgtaactaccaactctgtattggtagtttggaattcccaaatgaccatatgctattaaatatcactaccctggatatataaaagacatactcaaaagagatttgcctgttactccatccatcctactcttccatcttccttgtattgactagtagtgccacccatctagctagtttttcaagtcagaaacctgtgagttatcttactttctctaattcattatctaccatacactcactcnaaccaaagtctacagatct

SEQ ID NO: 204870 - DNA, 385 bp, Homo sapiens
  misc_feature (366)..(366): n is a, c, g, or t
gggatcccctgctgctgtcgctcccttcttaaacctgcctatcttgcattcatattttccttattttcttcctatctctctgaccatctctcttgggttacatttctgacatcttttctatgttctgtaactaccaactctgtattggtagtttggaattcccaaatgaccatatgctattaaatatcactaccctggatatataaaagacatactcaaaagagatttgcctgttactccatccatcctactcttccatcttccttgtattgactagtagtgccacccatctagctagtttttcaagtcagaaacctgtgagttatcttactttctctaattcattatctaccatacactcactcnaaccaaagtctacagatct

SEQ ID NO: 204871 - DNA, 477 bp, Homo sapiens
cccaacaccactatcaacttcccaacaaggccaggcctaattaacagtcagctgcatttatcatatggcttgagtgcaaatgaactaacagcacctgcatcccatctgaaataacatcagaatcaggaaggagagaaatgcggttaatttccatcctgactgcaggccacaaccctcacgtaactttgggaaaacaattcctgaattattttctgagtaacttggattagaagtaaatcaaagcatattcctgagttggagatcatttataagctaccctatatatctgtttgagaatgaaagagaaactaaggaaacttgtcattctgaatttctaacaattattctaaactactcatgaacaattacagcaaaactcaccccaaatgttaaggaaagatcctagggtcactgaagtctgattttcagggcaaataaagccaccacttaaaaggtttttcctgacctaactatctg

SEQ ID NO: 204872 - DNA, 224 bp, Homo sapiens
agacacacacaccacacacacacacacacacacacacaaagagacttgaacaaaccctagcatagtttttattcgctcaaggccatttccctagtatgacaattgacaattccagccctcttaaaatgccttcctgagacagttcaatgctgccaaaaggccatttccctaggatgacaatcccagctccccttaaaatgccttcctgagacagttcactgctg

SEQ ID NO: 204873 - DNA, 173 bp, Homo sapiens
agacacacacaccacacacacacacacacacacacacaaagagacttgaacaaaccctagcatagtttttattcgctcaaggccatttccctagtatgacaattgacaattccagccctcttaaaatgccttcctgagtctgtattaactgcttgggggtcctctagagtcaa

SEQ ID NO: 204874 - DNA, 506 bp, Homo sapiens
tctaacaagggccattagccaaatgttagagactcattagcagagatggaggcttcctctctttatgagaaggattacaggagaattaagaaaggaatagccttctaatggtgggattccatgttcctgaaaacctttttgtaaatcatcttccacattgctgggaggacttgggaaagggctgtggagggctttgaattccgagctaaagggattgttgcatttgttgcatttgcagaaaagcccttgggataccttttggggggttatttaggggtacaggagtagtttctgcagcagaatatattgatgaatagggcgtccctgtcccccagcgggtgggaaattcccatttaggcaaaaactccctcttcggtccagcgattggcaagaggcaggcataagcctctgatcccctgcgcccaggcctgtctttgaacaggcactgaatagcatccattcctcaggagatgtcctgcactgctcgagctcctgagagctcttgg

SEQ ID NO: 204875 - DNA, 485 bp, Homo sapiens
agtcatcctcctcagtagttgtcaaatggtagttctctatttccatccttctcgctacacttctgggttggcatcctactttgaaagagttttcctttttctctgtatcaacacggacttgcatattcctattttattcaatgggttgtaatccgttatcgtcgttgtttacttcatgctcaaattgtcccttatttggcccatgggagtcccttcaagctggctcttaacactgcaacaatttaaagtatatatactgctaaaattcatccgtgttgtgtgtatggctgcagttcattaactttgactgcttgtaatatgccattttgtgaatatgccacagtttattggtccactcatccactattccttcgacgggcacttgggttgtttccaggttattgctattgtgttttgctattctagctctttaatgttaaattttgaatattaaaaatttgtattaacatcataaacttcaggtc

SEQ ID NO: 204876 - DNA, 372 bp, Homo sapiens
tgtttgtagagccagggtttcgccatgttgcccaggctggtctcgaactcctaggctcaagcgatctgcccacgttggcctcccaaagtgctgggattacaggcgtgagctgccgcacctagcttcctttcatatgttatcattttttttctcatttcaaaagtaatgagtacaacataaaattttaaataaaaaagtagaaagttaaggtcctcaatatagtatctgttaacagttgggtgggtggtgaaagacgttgttaacagttttatatatttttttcagccctttttattttattttattttttaaaggaaaccaagtttattaagaaagtaaaggaataaaagaacggctacttcataggcagag

SEQ ID NO: 204877 - DNA, 250 bp, Homo sapiens
catgaccgattaatttttgtatttttagtagagacggggtttcactatgttggccaggctggtttcgaactcctgatctcaggtgatcccaccctcattgttctcccaaagtgctgggattacaagtgtgagtcactgtgctggccagaagaattttaaccaaatgtgtagacccatggattcattccatcctatgcagagtcctggtcttccatatttaattagcacaaatgccataaaactgccttcc

SEQ ID NO: 204878 - DNA, 455 bp, Homo sapiens
ccaagtaactgggactacaggcatgcaccaccatacccagctaattttaaaatttttttagtagagacaatgtctcactatgttgctcaggctagtcttgaactcctggattcaagcagtcctccaaccttggcctcccaaagttctgggattgcaggcatgagccaccatacctggccctaagtcttttatatgtagcagtgggcagcttctgaaaaggcccccagtggtccctgcctcccagtgctcacacttttgagtaatccccttcctctgaatttgagctggacatagtgatttttaatagaataggggaacagtgatgggatgtcactctcaagattaggttacaaaagactatgattcctgtcttgtttctctttctcttcccaccatcacccccactttctctttttggcttggcttcctggctttgatggggccagctgccatgc

SEQ ID NO: 204879 - DNA, 542 bp, Homo sapiens
agtgcctagaagtgaaattgctgagtcatatagccattgtatgttccattgttttagaaactgccaaactattttccagagtgactgtaccattttacattctcaccagcagcatatgagtgatctagctttcttacatcctctccagcatttgtggggtcaccgttttttatgtcagccattctgatagatgtctagtggtatgtcattatgcctttgatttacattaccctaatggctagtgatgttgaatatctttctatgtgtttatttgccatccatctgtcttcttcagtcaaatgtctcttcatgtcttctgcccatattcaaatgagatcatttgtatttttgtcgttcagttaattcctttgattaatgtttgtgtggtataccttcttctatcttcttactttcaaccttcctgtatgttatatttgaaatgagtttcttggagacagcgtataattgagtcatatgtttttaatcaactatgctgttctccatctttaaatcgtaatgctttaaatgtaattattgatatg

SEQ ID NO: 204880 - DNA, 501 bp, Homo sapiens
  misc_feature (460)..(460): n is a, c, g, or t
atcttctcctgaggtccagcggctcttcccgatagtcaggccatcctctgaagtccagctgtccctccaatgtcaagtcacctctctccagtcaagctgcttctctctctctactggctgagtctggggtctttataggcacaggacaggggttgggccgtggggccggccgtaggtagttttggaaaaggcaacattcgattggtaaaaagacatttagaaagaaccaatcaggagagagcaggcaaacagagatagaagttctcactttgggcaatgggtttcaggcttttcatcttgaaggtggggtttcgccaggacccacccctgtctgcctagtatttctctgccttctgtctctatcatcagcacttggggaggcttgaggcagaatgattgcttgagttcaggagatggagaccagcctgggcaatatggtgagtttgctctgaaggctgcntttctattattactttcgtatatcgatatatgttatttttt

SEQ ID NO: 204881 - DNA, 1273 bp, Homo sapiens
ggtgtgaacagcataaggtactgagcaggagcacagttaacactcatcagaatttaaaatagcatcggtggtgttaaagataaagaaattgatacattttttcttattttcattacttatataaatgtattatgtactcagtttcacaaaatcattgtatttaaatatgataaaaatctctgccgcaacctgtttagaaaattagcaaaaatgaaggacattgcttttcatcttccctgtacagttattttttctatcttaagtttattactgctataaattatttttatgctcataaccatattctttctaaattagtaaggactgtctttccttggaaacaattcatttttatttggagagaaattttcaccaaagtttatgtagttagccccttaaccttacttaatttattctgtgaatagagccttttataagactcactttcttgaactcctggcctcaaattctcctcctgcctcagcttcctgagtagctgagattacaggctcaggccaccacacccagcttaaaagtcactttcttaccaaaaaaaaaaaaaaaaaaaaaaaaaaaccctttttttaaaaaagggcccccaaaggggtgcccacaacaattggggcgcacctctcctaaggagagcgcctggcgcgctggggaaaacacactggggtgcacaagcgcggggagtgtggattgccgcggcccccattcaaaaatggtggccgtacaagcaatttcttggggacagaactcgtcggcagaaataggccgccagaggaggggcgccaaggagtggtgccccgggggcgcccccacagagagggggtcgtcaaaccacacacgcggcggtaggagggacaacagccagatatcaccagacggtgcggcgagaagatcccccatataaaaggcggcataaagcgcgcgctctttatataacgaacagaacggccaagtattgtggcggcgggcggagcgccccaacggcgtcgggcgcggttgggagaaacccaatacgcgccgggggcagcctcgggacaatgagaacataggcggccaggggggccaccacttttaaccacacacgaactccttgtgggaaaagagaggggccgaattgggctaaacacggccaaggacccaggcggcggggacacccaagaagagcggcggggatcgggggcagactcctgtgcccccaagatatgcgcctcttggaacaggactcgtccctctccagtaccaaaccggggtctcccgcggaaaa

SEQ ID NO: 204882 - DNA, 430 bp, Homo sapiens
tagaccgcaaagactttatatcttgtttctactttttccacaagaaaacacatttttctctccattgacagctccttccactgccttttctttggaatggaggtcagggagcaatggaaactgaattcctgttatagatgttcagcagaagaagaacacagggaactggggagaggcaaggaaaaaaatctattgaattaaattctgcctgttagtagctgtgctgaaagtctggtgccaaagaaggaagaatttcttccagtattaattgaagcataattagaaggatatatggcacaggcagaatggaagggacatgtgtatgacccagtgaagtggttctaaacccgtgattttgcaaacctggtcatgtgtcagaccccctgtgtgggacatgaataaatcaaatgattgagactttcccagacgt

SEQ ID NO: 204883 - DNA, 566 bp, Homo sapiens
  misc_feature (22)..(22): n is a, c, g, or t
tacatcagctcggtaccggatnacgccacgtggtaagggagctacagatctgagtggaacagataatgggaaaggcagcgagcagattagactacctgatgagaaggaagagtggaagcccaaagagaaacagagggccagaggcacaacactctggaatagcccaacttcctcaaggagggtccctggtccgtcgtcacagggagggaaccatgatggaagaagatatggaggtgggattaagaagcaaccactgaaacatcaagtaggctgggcacaatggagaaagcggcaaattgttatgaatggtgaacacctgtaaaaagcaaaataataataccccatgctgaaacagagaagggggcataaattcatcctctgcccttctcttccttactcaattctcctaacctttggcacccttgagatatcccagatatactatatttgagggtacatctacacatctttctactccggttctacagtaccttccattagcccttgagtcttcccggatactaggagagacgggattaggtgtgtgtatgagacgtggcgtctgt

SEQ ID NO: 204884 - DNA, 1079 bp, Homo sapiens
ttctttgtctgctctttctctgtgatcagaagtagatatctgcaatcagaaccctgatatttggaggaagtggctattattgtccaccctggctgcagcaagctgacccagaaatgtggggttgtgtctccacagctgcctgccatggagtgggtggggatgggtagctgctacttcactgaaggctgaaatccaccaatgttaactgcaatttaccactcagaatttcccctagaagctacaagtgttcagatggactcatgtgctcccaaaataatcactttaggaactttctgccgatgtaattattatctaggtggagaggtggattcctgggccactctatccatgtctttgatttttcctgctttcttgaagatttcttcaactttatcttccagctctactattaaatgttgtgaatgtttttatctctgctgtcatatttttatttccaagtgcattatctgattctttcttccttttttctaattggttttgtttcataggtgaaatattttttctctgagcatgttaattatagtgtctttctgtgttattctgctccctgcattatccctgtttcctttgagttgttttcacctgttttctgtctctcacactggaggctttcctgaagcctctgatgatctttgactatttatatttaagagcagggctctaaaaagctgattggaaggtgttttaggtacttcagcaccatccaacagtaatataatgtgagccacatacataatttcaaattttctagtagccacttttagaaaataaaacaggtaaaattaaaaatgtattttacttcacccaatatatccataatattatttcatcatgtaatcaatgtaaaaaagtattgagacattttgttttttgcactatttttgaaatctggtatgtaatgtgttaatctacacacaaaattttcatttgtaatacataactcacatttagatttataaaacgtagagttgataagtagattcacatagttcttccaaacatactttgttgttgttctaaatatacttaattttccaataactgaatcaagtatccag

SEQ ID NO: 204885 - DNA, 365 bp, Homo sapiens
aagaagtgaatgatgaatatataactgtacatgagctacatggatttcttttaaactttttattttgaaataattgtagatttacacgcacttgtaagaaataatactgagaggtcgggtgtaccctttatctaatttcccttaacaataagatcatacaaatctataagatggtatcacagccagaatattgatattgatacagttccccatccttgttcagatttcctcagttttacatgtgtgtatatttaggtctatgaaattttcccatgtcggtttatatatccaccacaatggtcaagattgaagaagtgttatcatgaggctacattatcacagctacttccctcccatcccccttc

SEQ ID NO: 204886 - DNA, 427 bp, Homo sapiens
agcaccagccctctacgtcccataaactaggaattaaggttaacacagaccaagagcctacacagctctaagtaaatacaaagtacttaactcctgaaaacctaaggactgcaggattcatcctacatcaattgaatgcaaatcgaacactttaattaagctaaatcctcactagattggtgggattacatacccacgacacttatagttaacagccaaacaccctaatcaactggattcaatctacttctcccgccgcaggaaaaaaaaggcgggagaagtcccggcaggagaatcacttgaacccacgaagtggaggttgcagtgagctgagatttcaccattgcattcgatcctggcaacaagaacacaattccatctcaaaaaaaaacccccataaaactaaaaaacaaagtgaacactcggg

SEQ ID NO: 204887 - DNA, 403 bp, Homo sapiens
agatttttacctccagaactgtaagataataaattcgtgttgtattaagccaccaagtttgttgtaatttatgacagcagccataagaaactaatacagtggggcccattaatgtcttactaatacctcccagaattatagttctgtgttacaatttttagagaaatgctattcaacctgtaacaggggcccacatcagactgtcaatcaataaatattatagactgaataattcattttttttgtatgagaattgttagtatttggtcattaagccagcccatctgttagcctatttcactatctttgcattttataacaacaatttctaccagccattttgaatcatgaagcaaaaatgcatttactttaaatgatgctaaaataaacggtatggaataga

SEQ ID NO: 204888 - DNA, 288 bp, Homo sapiens
tggctgagtgtggcggagcttagctggacttgttcatacatctgtggttcattatgggtcaggcaggtagctctgtagctctgctgatcttgactgacttacatctctgggtatcagttggatgttgatgaatctaggataatttggggtatgggactgggatgactgaggtgactcaactcttttccttgtgttaaatcttctactagagtagtctaagcatgttcccgtgacatgccataggaataggagtgaaagctaagtaagggcttttttaagcctctgcat

SEQ ID NO: 204889 - DNA, 637 bp, Homo sapiens
aattctgacacacgctacgacacagatgaaccttaaagacgttatgttaagtgaaataagctagatacaaaaggacagatatagtacgattccacatatataaagtacctaaagtagtcaaatttattgagacagaagtagaatggtaattgccaaggactgggtggggattgaaggagtttagttggtaccaagtttcaatttgagaagataaaaaggttacagagatgatggttgcacaacaatgtaaatgtgcttaattccattctgtacacttaaaaatggttaaaatggtaaattttatgttttgtatattttaccacaataagaaaaaaatgtttaagttaataatgatcattatgacaagagataattaaggccaggtacgtaagcagaaacactgatttcattcactgctagtattcagtaacatgcaaaagttttggaaagatgatacatcaaatgatcttttactttactatacaaaggagtagcttgagaaaccctttaaatagacagcttgacttccagttccaagatggcaaaatgaagaaatatctgtccccttctactctaaaaaatcaattcacaacaaataggagggaaaaaaaagaaacccaagtacaatttgggtgaa

SEQ ID NO: 204890 - DNA, 488 bp, Homo sapiens
aattcatactgaagagaaaccctacaaatgtgaagaatgtggcaaagcctttaaccagttctcaagccttactcgtcataaaagaattcatactggagagaaacgctacaaatgtaaagaatgtggaaaaggtttttaccaatcctcaatccatagttaaaaggactactgactcaaactctgcctcttgagttcatggttcaccacttccagcctggtgacttggtgctgattaaaacttggaaagaagacaagctccacccaagttgggaagctccctatcaagtgctcctgaccactaagatggctggatgtgcaaacagctgaacaaaggtggactcactacactcaagtcaagggactggtaaaagggaccccagaaggcaaggaaaaagaccagtggaaagtgcatgggtcacctgaggaacccttaaagttaactcttggaaaaatctaaaaggaaaacatgggctggccccatttctgga

SEQ ID NO: 204891 - DNA, 214 bp, Homo sapiens
agaagataatatattattcgtatcacaattgatttttttctgactttttcctctgaaaggaaaagtgtatcaacttcaaaacctttgggtatttcttgacatgacttcttcactctgtcacaaacagctttgaaatatccatcattcctctcagatgataaacaactatattgctctttttttttttttgagacggagtcttgcactgtcaccc

SEQ ID NO: 204892 - DNA, 654 bp, Homo sapiens
tcaagaggtagggtctttttctttggctagtagcaaacatgacacagagtttgaaacatgcctgtgccttaggacagggcccattcttgcagcctgagaccacagtgcagagaagctgggctggcctccagaggtccaggcaacagccctgcaagccccacaggaactgccagacatgtgaatgaggcagtctggctgccaggtgactgcagaacatgtgtgatcccaggcaagaccagcagaagaaccaccagttaaatctggcccgaactgctgagccacagaattgggaacaaatagaatggtgtatttcacactactaaattttggggtggtttgttaagcagtgataaataactgatataatcatgcaggttgaaaaacatgtgcatatttgaagtggccacaggctgctagtttgagaccctctgctttagataaatgggcttaaacaacctccaagggtccccaggctccagcatactgcagtagcagcagaattattgcctgtgtatgaggtgctagcacagactgggccagaccaaaggggacatgttgataggaaacatgctggtagcaaaccatgtggactgatgcctacggaccgggcagctgataggaaacctcagcatatgtcagcatagacagatggca

SEQ ID NO: 204893 - DNA, 211 bp, Homo sapiens
tgttgatcaattttgtttcattgatacagtgccatctactgacaaaaattggtaatcataaggctttaagtctgtcagaagtcaaagagttgggtccgggcacggtagctcatgcctgttaattccagagttttgggaaaccaaaacgggcagatcacttgaggtcaggagttcgagaccagcctggccaacatgctgaaaccccatctct

SEQ ID NO: 204894 - DNA, 468 bp, Homo sapiens
ctgaaattctgtacctattaagcactaactttccatttccccctttctgggtttcttttcatccctcaaaggagctctgctgccttccacagagttcttatatacatgctaatctctccatctgaaacacacttcctctcccctttgcctagttagcctcctgtgattcccaacaccagcctagaagcttctgtaaattctcccaaaacccctgctcctccctgaagagcagtttgtatttatacaggtgtttgattgtttgaagggtgctctcaccctgcctcctctcttaacatagtttttcgtgtcaggaattcctcgctttgtccacaacccctggcacatagcaggtgctcaatacttgctaaatgaataaatggacggactctgctacctacctaatctccttccagccagtcatccatctgtgggtgcctcggtccccagcttggggtgtgtccccctggg

SEQ ID NO: 204895 - DNA, 401 bp, Homo sapiens
aaagaaatgagaagggaactagcatcaactgttccaagtacttcatatacatcatttgttgaatcccaatcaacagtcttacaaagtcttattacctctgttttgaaaataacatagccaaggatcaaagaacctaacagacttgccagtaaagctgtttgtcttcagaactgcccaggtctacattattgacaactcattaatctccctggcaaacttatattctactgtcaacaaaattataccatacatttgggtattttcttatgttattgagtttatgtcattcttaaatcacttatattattacagcaaagctgatgttttccttaaattttcatcaacaactctaactgctgagaatattttgtgccgaataaaatagtcatgtaaatagatca

SEQ ID NO: 204896 - DNA, 178 bp, Homo sapiens
ttggggatttcaagatggcagctattcacatatgtgcgttagcaataaagaaagacagggaaaagggaatacagagagccatttgaaatgtcaaacaaaaatcaatggagcaaatcaggaaaaaaaagaaatatgtgtcaggagcagtggctcacacctgtaatcccagcactgtggg

SEQ ID NO: 204897 - DNA, 536 bp, Homo sapiens
taactctatgcccacaaatttaataatttagatgaaatggaccaattccttcaaagacataatatgccaaaactcatacaagaagaaacagacttactgttattaaataaattaaatcaatagttattaaccttccaaaacagaaagcatgaggtccagatggattcagtggtgaaatgtaccaactattaaaggaagaaattatctataatgtattttagaggacagatgtagagggaatatttccagaatcattctacgaggtcagcaaaaaacttgacaaagatattacaagaaaactacaaaccattatctctaatgaacacagatgcaaaaatcctcaacaaaatattagccaatcaaatccaacaatgtattatgcggtgtaaaagaattatacgccacaaccaagtgggatttattacaggtatacaagactggttcaacatttcaaaatcaattattgtaatccatcacaccaacaggctaaaaaagaaagacagatgatcatatcatagatgcagaaaaagcatctg

SEQ ID NO: 204898 - DNA, 440 bp, Homo sapiens
aatatccctccctagtgcttagcctgttctcatggagttagaaatgaccatttgcaaatgtcctttactgagtaactgaagaaatccctgcagcagtgtgacacctctcacattttacaacaattatcaagatgaaggcaagatcaaagacgtgaagtgctttcgttttaacagagcatttggcgaaatatttcatgatacccatgtgaatgaattagagaagtatgacttaaacaaaatcagttggttgaataattaaaaaaaaatccaaagaatattgactacagatcactgtaaacttgaagggaagactcttttctagtcagttaccacatctttaaagtgaagggagtgttccaatatttggtgtaaaagatgatttttggttgtgcatgagggatttttaaaaatatttaatgtgtttattttaatgtatagta

SEQ ID NO: 204899 - DNA, 349 bp, Homo sapiens
cccctctgcaggtcagtgtacttatccataagatgggccacagtgatagcaccaaccccatggtggttactgcaatgattacatatttgagtgaatatatgtaaagcacttagaacagtaccaggcacatagtaagtgttcaagaaatttcagtcatctttctaaacatttgtatgtgtctataaacattgttttgtgggtttaaaaatgtctataaatgggattaatatctttaaaatttatatattttaaagtcagaaacacatgtatgtagtttaaagaatgaagtagttctagaaggcttgttataaaaaacagcagttccctgattctagaaccctccttctcc

SEQ ID NO: 204900 - DNA, 786 bp, Homo sapiens
gcctcacgctcgacctcttcatgctcggctacttccagctaccggagatgggcctgagccgcgaggatcgcaagttccgccacctactgtgctacgagatgttccaccggctggacagccacccgtgggagcgcatccgcctcttccaccgcgtggtgctggaggaggtggaggccggccggcgcggctggagcgacggcttcgaggacctcaggcacaggttcttcggaaacggcctggaggctgggccggcccccgaagaacaggcgaagaaaaaggaagagaaggggaaagaacaggagcggaccgaagaggccgctccggttcagaagggggacccgcccaaggggcagcgcgaggccctggcccctgtgccgcagccgccgccaccgcccgccgcgcctccccggatctcagactctccgggttccgaagcccccgccgaagaccctttggaactagtgtctgagatgggcgaattcagcaacgaggacatctgccgctacatcgaccgcagcttctccttctggaaggagaaggaggcagagctgtttgacatctgagcagcggaattcggaattcgcagttcaccctcgagcgtcttaacgtgggcctggacgcctgtctgacgccctccagaggcgtgaagcagcgggaagaacccaggactgtggccttgagcagcccggagggcccaggaccaggctgcctcagcctctgaggtcccatcgtgagcaggttgtgtggggcgttggtcggataggcagggcaggcacagaacaaacc

SEQ ID NO: 204901 - DNA, 551 bp, Homo sapiens
tgagattacctcaactaggatggatccatgggaatggaaatagggagtgagaaatactaaagacagtaaattaaaagcaaaaagtcttggtgactgacaggttgttgaggctgtggtagagagaggagtcaaggttgaccacaaagatttaaatcagaatagatgggaaaataatgtaattaatggaatacatcattcaagtcaggaagaggaacataatgtttgagactcgaagattttgaagttgtggcaggaatctgagtgggttgccaagcagattgttgaaagttcaagacagaagcttgggtgagagtttggaactgaaggtaccaatttggtggtcatgttcaaggaagtgaggcttggaatcttgttagttcatagtcatcaagctgtagagttgagagagcaatgtgaaaatagccaaagacataacaaggggagttgcttgaggaatgagagaagtgatagagtgcccactcagtgttgaaagacaggacatttaaacattgctaagtgctagttgctaaatgtaattaagaaatattatt

SEQ ID NO: 204902 - DNA, 546 bp, Homo sapiens
agagaaaaatgggtgataatgcttttattatttaaaagtgtttttttttcctgagtcttattttgaaaaattatacagaatagtttgcatggcatattccttgcatcatagaacttgctctgcttcaggccaaattgaaatagagacagaaaagaaagagaccaagaaagaggatatggagaatatcagccatttgtttcctttcccgtattcaaagacaaacatctcagttgcctggatctcttgaaattagtacttgtaaaagcttttaagtgttactggaatacattgttaaagccatatctggttgaaattttctgattaagcacaattaaataattgtttcagcaattacacagttcatgattatggtatgtgatgggacattatttttttaaaatctattattaagtaaaatatgtattggtggccaagtataagttttagtacaacttgctatatcttggacattttgcatatatagcttaaagaccagtggggtagactgggaagttttgtcagcttcataattttggaaaacagaaa

SEQ ID NO: 204903 - DNA, 177 bp, Homo sapiens
gactacaggtgtgtaccatagtgtctgacttgggttaagacttaaatgtaaaaaaaaccctgtaactagtataagaaaatataggtaaaaaaataacctcaaggtggagagggcctttctaaatataaaaccaaaggaagaggccaggcaccgtggctcatgcctgtaatcccagca

SEQ ID NO: 204904 - DNA, 396 bp, Homo sapiens
tcacctgaacctgggaggcggaggttgcggtgagccgagattgcaccgttgcactccagcctgggcaactagagtgaaactctgtctcaaaataaaataaaataaaataatttagccaggtttggttggtggcaagtgcacctgtagtcccagctacttgggaggctgaagtgggaggatcacctgagcctgaggaggtcgaggctgcagtgagccatgattatgccaccgcactccagcctgggtgacagagtgagaccttatctccaaaaacaaaggaaaattcatatgtaagtttttgtgtgtacatatgttttcacttctcttgggtatttacttaggagtgaaattgctgggtcatacgccagttaagcatactcggtaagtttaaccttt

SEQ ID NO: 204905 - DNA, 452 bp, Homo sapiens
ctgacgctggacaacaggctcgactcccagggcgtcctcagcaccccgtacttccccagctactactcgccccaaacccactgctcctggcacctcacggtgccctctctggactacggcttggccctctggtttgatgcctatgcactgaggaggcagaagtatgatttgccgtgcacccagggccagtggacgatccagaacaggagagtttgaatatctaagatgccagtcttggaagatgccaaaattggaaggctctggggctctagaattcttggatttctggggtgtgtgttcccaatcaccaacacttgtaatttgcttgttggctgatcctattcaaaaggatcatccagacaaaaggtgacgaagaatgacaaggtttgcttgactcctttttgcaatttatctgggactaggattaaaagaaaggagaagaaatactcatg

SEQ ID NO: 204906 - DNA, 767 bp, Homo sapiens
tacttcagttccaggcatgccttcactgtgcagctgccttgggctcctgccggctcctgcccagggctaattcctaaattcccaattcaccaactagggccaatctttagagatgaaactacagcaatggattcagagtgggggggtggtcacagaactgcactctgagatgagaagcatgaatgagaacgggctgtcaggctcctctgtcagttgactgagttatttttacttaagttagctagatcattcaaacgcttcattctactatctagccctctctatgactgcacacccaccccctaggaaattcctttttctttcctttgtgatttaaaagctaaaaccaaaatgcttcataggaataaggtatgtacccttagccctcctttctcacagaaaaaagcatttattcaaagtacttcacatggtaggacgaaagtagtatttaatgatgacacccaattaaatggcttctggccttccaaagccacatgactatcctcgagttccctgagggtgaggcccctcagaagccctgtctgcctcagtgaccactgcacataaggtcatgcagaagcctctggtgccagcaccacctgcaggcctctggacacctttgctcggcctgggacagtcacatggccatgcagttctgtccatccactccaagacacggagttaggggcaggggagaacagatttgagagaccatcatccagcattccttctcccagcctggggcccaggtacacaggtgaggaccc

SEQ ID NO: 204907 - DNA, 778 bp, Homo sapiens
ggaataattgtttgaggccaggagttccagatcagcctgggcaacatcatgcgaccccatctctaaaaacatctttttaaaaatgagccaggtgtggtagcatgcacccgtagtctcagctactcaggagcctgaggcaggaggatggtttcaacataggagatcgaggctgctgtgagctatgatcgtgctactgcactccagcctgggtgacacagcaagttcctgtttccaaacaacaacaagaaaacaaaacaaaacaaaacaaaaaatagatagaatagtgacaataaaaatggagaaaaagtaggctgactcaggaaatgcttagaaagtacagccatacctcaaagatattgtagatttgattcgagaccaccacaataaagcagatattgctacaaagtgagtcacacaaattgttttgtttccttgtgaatatgaagttatattggctgggtgtgatggctcatgcctataatcccagtactttaggagacggaggcgggagggtcacttgagcccaggaattgtgagatcaacctgggcatatagggagatcctgtctctatttaaaaaaagaagctatgtttacactacactatagtctatttaaagtgtgaaatggcgttatgtccttaattttaaaactcttgatgctggctgggttcggtggctcatgcctgtaatcccatcactttgggaggccaagacaggttgattacttgaattcaggagttcaagaccagcctggacaacatggcaaaacacgtcttta

SEQ ID NO: 204908 - DNA, 181 bp, Homo sapiens
cattagcatgggtagtcatgacctaattgggtgagccattcaaaaaagtcaagagagatctgaatccagagaaactctcctgctggtcttaagggaacacaatggcaggttgtggagatgaatggggcagaaaatggccagcagcctcaagaacctaaggatacccccagttgacaaccag

SEQ ID NO: 204909 - DNA, 322 bp, Homo sapiens
aacaagcatgtgggtaaatcagtgtgcataaagcatgggagcacgggatggggaaagaaagggagtggaggttcacagcagatgcccaggctgtatttcagaatgaaaggaaacacatacgcagcctgtctcaaagttacatcttgagattaaggaggaaggaggaaggaggaaggaaaacaaagtttgaaaacacggtttgaagccacgctgctcctttacaaaacctcatgggcacctctcagactcctcttctatgaatgaaatgtgtctcttttctttaaccttgtctccagagtgattttttaacctgttttcatca

SEQ ID NO: 204910 - DNA, 436 bp, Homo sapiens
aaagtccatacatgtagcgcaagtaaagctaaactaagtgtatattacagaaataaaaacatttttttaaaaaaatcacagggaataatatatataaaaaataaacccactaaatctatttttcctgtggttttaaaaactgcccaaactgaccttgcccatgaacttccaaattctaatactttttaaattgaacactacagataatgttagtcagtttctttttacattataaatttacatgagccttccctcaattatgtccttgctggatactacatgcatacttttctcataagtctatggtctacacaaagtacactaagagagaaactaaggtggctttgattggagtaaagatagaacaggggaaataaaagttaaaagagttcattattattgagtacatactatatgctagaggtaatccttactt

SEQ ID NO: 204911 - DNA, 520 bp, Homo sapiens
aaggtgatggcacccacctttaaacacggggctggtaactcagctcacacccgaccaatcaggtattaaaaaaagggctcactaaaataccaatcaggctaaaagcaggaggtaaagaaatagtcaatcatctatcgcctgagggcacagggggagggacaatgatcaggatataaacccagggcattcgagcaggcagtggcaaccccctttgggtcccctcccgttgtatgggagctctgttttcactctattaaatcttgcaactgcaaaaaaaaaaaaaaaaaaaaaaaaaaagctattgcattgcatgtctgagtaactctctgacatcactttctatcattctccccaactttcattctgttccaacctctcaactaccattgctgtccttagaattcactaattataatcttgacccaagggcttggtcctcactgttccttctgcctggaatgtcttccctcaactatctgcatagcttgttctctcacttcaattaaagccctgcataaat

SEQ ID NO: 204912 - DNA, 119 bp, Homo sapiens
gattccatttgattccatttgataatgattctactagagtccattcaatgactccattcgagtccattcaacaattccattcgactccatttgatgattccattggattccatttgatg

SEQ ID NO: 204913 - DNA, 313 bp, Homo sapiens
gctccaatttacatctcaccataactcaatgggttagacactagccctactctcattttcacaggaggaaactgaggcacagcggaagtgactgagccagtgaatgagctcaaacccaggtctgcctggcctcagaaccacctttagccatctctctatactgtctctccttaacacagaaatgacatcagctcaaggtcagatactggaaagaaaaatctgggccaatgacaataagtgaagggtggtgggatttggtgttttagtttttgtgtttttcctctctctcttggtttctattagatttgtgcag

SEQ ID NO: 204914 - DNA, 446 bp, Homo sapiens
tcatattgtatgattctatttatatgaaaggcccagaataggcagagagacagatagcagagtggtatttgctggaagcttcaggtggggagaggattgcagggtgaggggctgataactattgggtgaaatttctttgtaagtaataaaagtgtttgattaggcatggtgactcacgcctttaatcccagcactttgggaggctgaggcgggcggatcacttgaggccaggagttcaaaaccagcctggtcaacatggtgaaaccccatctctactaaaaatacaaaaattagccgaatgtggtggcgggcacctgtaatcccagctacttgggaggctgaggcacaagaatcacttgaacctgggaggcggaggttgcagtgagccgagatggtgccactgcactccagcctgggtgacagagtgagaccctgtctcaaaaaaa

SEQ ID NO: 204915 - DNA, 449 bp, Homo sapiens
aagcaattctccttgatttttactcatctactcctcttcaactgctcactccattatgatagggacatgcctgtttactcacctagcacatgggagttgccctatactgatggtgaaacttaatgcttgcgccctttgttgagtcatctctcagagcccttcagcccatataaaatatttgagaagctgcccttttggaaactgtgtatgatgctgtcacagggtattatatccccagtcatatgtagctgttcagctaaagtgtgatccatggactagcagcatcaggatcacctggcagcttgttaaaaatgcagaatctcgtccgggcacggtagctcacgcctgtaatcccagcactttgggaggccgaggtggtcagatcacgaggtcgggagatcgagaccatcctggctaacatggtgaaaccccgtctctactaaaaatac

SEQ ID NO: 204916 - DNA, 368 bp, Homo sapiens
cagccggccccagtgtagactaactattagtggcaggttagttgtatagggctcatggtaggggtaaaaggagggcaatttctagatcaaataataagaaggtaatagctactaagaagaattttatggagaaagggacgcgggcggggggttaggtctacctggccaggtagacctaactatgcactacagccaaaatgtggtgctgcatgaattccaaagaggcaggggcaacacatctagttggaacatcagagatagcttcatgcttgacggctatgggtcctgaagaactgagtgagttttaacaggaatatatagtccacatcaaagaaacaacataagcaaacatgcacgggaaagacaga

SEQ ID NO: 204917 - DNA, 498 bp, Homo sapiens
gattaatacccttttactagtttagtttttctattattgcctgaaaagcatttttctgctttagaaaacagtccagttgacttttgattgttctgtgttttgaggacgtatcttgagtaatttaagaaataaagtgttttgggtttaaaagctcccatgtcttaagttggtgaaatttgaaaaggtatttttaaaaagagggatattcagggctgggtgctgtggctcatgcctgtaatcccaacactttggaagacagaggcaggaggatcgcttgaacccaggagttggagaccagcctgggcgacatagtctgtacaaaacaaacaaacaaacaaacaaaattggctgggcgtggtggtgtgcacctgtagtactagctatttggaaagctgagacaggagaatcgcttcagcccagaaggttgaggctgcagtgagccaagatcacgccactgcactccagcctgggcaacagagcaagagcctgtcttaaaaa

SEQ ID NO: 204918 - DNA, 280 bp, Homo sapiens
ctcccaaagtgctgggattacaggcgtaagccactgtgcccggccataacattttaaacgtcatagaagtcataatgggaatgataaaaaagaaaaaagggatatatttggattaagatataaataaaaacttcatagttatcgaacaggaggcaaaaataaaagattgttgtgagttttaaagcttcggtgatatagagaaagctattttcagtgatggctatagggtggtcagtaagaggattgttcacataaagtctaggagacttccttttgactg

SEQ ID NO: 204919 - DNA, 713 bp, Homo sapiens
ctattgttgtagtacgaaagcagccatagacaatatggaaatgaacaagggtggccgtgttccagtcaaactgtgtttacagaaacaggcagtgggctggatctagcccgaaggccatagtttgccgaccccgatctagaagatagctacttctgataaatatttatctaaaagatcagtatgtgactgtgtatgtaatctagaagacagatacatgccagttgctgggatgagtggtaagtgacaaatgtgtggtccctggcctcataaagttctcagagttatggagggagacagctgtaataaccacaccagtagtgagtcagtacatttgtgacaagtgccatgatggaaaaacacaaggtgctctgaaagggtttaacgggtgcctttgggaatgaaaagtggcctctcattgctcttagctgacaatgtttttgtttcactgaggaaaaaaagcaatcagaagaaactttgttttcttcctttgtctagttttgcctgcatcatccatccatacctgtactgggctttccctcctgttagtggataaactgtccttgatcctctcctagcccagcccttgctccctgcattccatgccctctcaagaacttgttgaacatttacccccttctcttttacatcatcagtttctctcctggattattcctgccagcatgcaaacatgtcaccagttgcaaaagttttct

SEQ ID NO: 204920 - DNA, 720 bp, Homo sapiens
actgcattttcaatccatggtgaatataaggatacagagtctataaattcagagcttgcatacaagagtagatagaatgccaattgctggtggaaatatataaaaaataattttttgttcatttatgccatgccttgttttaaaaaatacttacaggacaggcatgttggctcacacctgtattcctagcactttgggaagccaaggctggaggattgcctgcgctcaggagttccatacgagcttggacaacatggcaaaatcacatctctacaaaaaatacaactagctgggtgtggtggtgcgcacctgtagtctcagctacctgggagactgagacaggaggattgcttgagcctgggaagatgaggctgcagtgatctgtattcacgccactgcactctagcctgggtgacaaagtgagaccctctctcaaaacaaaaacaaaaactccaaagatttgattatagggaccccatgggtcctcttgggttactggggtgcattagggtatctgtggatcccctttacttgcaggcagtcttgtctacagtttctgcatacatatttcacatatactttctggggggacagttttgggcttcatccaattctcaggcaaattgagtcccaaatgggttttaacaacactgatctagggtaatgatttccaatatttttggatcatggacccccaacagttgaaaattgagcacacag

SEQ ID NO: 204921 - DNA, 464 bp, Homo sapiens
aaaatgctgtagtatttcacatatcccatgtacatcctcctgtatactttaaattatatgttgcttataatacctcatacagtgtaaatgctatggagctatattgtttagggaataatgacaaggaaaaaagtctatacatgttcagtatagacacaaccactcgggaccctctctcaaaacaaaaacaaaaactccaaagatttgattatagggaccccatgggtcctcttgggttactggggtgcattagggtatctgtggatcccctttacttgcaggcagtcttgtctacagtttctgcatacatatttcacatatactttctggggggacagttttgggcttcatccaattctcaggcaaattgagtcccaaatgggttttaacaacactgatctagggtaatgatttccaatatttttggatcatggacccccaacagttgaaaattgagcacacag

SEQ ID NO: 204922 - DNA, 210 bp, Homo sapiens
gtgtttcgtttcttaagcaggagagtgtagacagtttacagggccatttccaagagtgaataggcctgtttttcttcagcaactctaaagtattatcagtagtaaaactgtaaacctatatctgcccaataaaaactagtattgatatttattccccaagaagttccccaacatggacccgtactaaggaaatttacagacatttaagct

SEQ ID NO: 204923 - DNA, 169 bp, Homo sapiens
tgtctctacgtggtggtaattgtggtcactagcagttctacatttatagcattgttttaactaataatcctcccccaaaagagagagtatctttcttgatagtttcagccaaagtcttcgggtgggggagaagtctcattgacgttttgtgtcacatgttcattcttga

SEQ ID NO: 204924 - DNA, 1126 bp, Homo sapiens
aaatattctaggcattcatacctcatgagtcatccattgatggcttctttctggacaactcgttcctccttcacctacattggagttcagttttatttactgagatatgaggtgacagacatcaaaataaaagtttctgaaataggtgtggaaaccattcaggttggggagtgatctgtgagttagctcagaacttaaagagtagaaagagtaaagtatataaagataggttgggggagaagaaaaagaatcagcaacggatgtcaaggactattcatagagaataaacaggacagataaggtaacatttcaggatatggtggcaacatcaagtggagaaaggcaaagcaaatcaggctaaagaaaaagccactgagcttaacactgacaatgagagggcagttccagtgaggtgtggtggtgaagccagaatgtaagggatggggcacttggtacattacttagtggcctgtctgacaccgcatacacgcaggagtgtacatttctgatcacattaacaagtcatgtgtaattactaagacaaactaaagaaaattttggccttggagttatttataaggtctcttatgatccttttgcttttaagtctcctatcctacttttatgagggtactacagagcactttatttttggcaggcaagagtaaccctttagttccacagctatcaaagcaactttcccttttattgtagcttttaaccattcaaagtactgcaagtcttcagtggttgtgattcatctagtcttcagcccctttgttacaatcactgtcccccataattaaaacatactctgtaggaactcagtacactgtgatgccagccctaatggtagaataagatactgctcaccctttacaagggcactgatttgcctcctatctgtgtcacacctccaaacctttgaaacactcacgtgcagcagggagacttatttgagcacccataactatctttctgaacactgcaactcagtagtaatgctttgggttcaagactaaaaaacaatacatcacagcttccaaagggaaaatataatacaagtaaaacattgcttggccatgcgtgtggctcatgcctgtaatcccagcactttggcaggcca

SEQ ID NO: 204925 - DNA, 126 bp, Homo sapiens
aagaggtggtatatcatcctccccacctgtgaaaagaaatgattagattgaacagggttaatctaattgtggttaatctttgggactcaaatacaggcttcctgaaatgtttctttgttgaaatat

SEQ ID NO: 204926 - DNA, 813 bp, Homo sapiens
gtcaggagtttgagaccagcctggacaacatagtacgggcctgtctctacaaaaaaagaaaattcaaaaacttagttgggcatggtggtatgtgcctgtagtcccagctactcaggaggctgaggcatgaagattgcttgagcccggaattttaaggttgcagtgagctatgatggcaccactgcactccagcctgggtgacagagtgagcccttgtcctaaaaaaaataaaaaaaaaataaaaaaataaaaaaaaaaaaaagaaaaatataaagaaagaattagaatacttgaaacctagccaaaaccttatccttacttagggtgatcctgtgcttccatttgctaatccatagatactcctaatatcttccttctcttcttcataagtgaggagataagatgaaataaggaattcgtaaatacaaagagagtcataaagcatcacataaatgttatgtttattttatattgaaatgtccacctgaaaaactttctctggcagagtgcagggccagatgaaattcacatgaaggaggaacacctgatctgtatggccctgtcattattatgcatacccatggaaccagctgggcactcagggttatatgtggtagccacagcagggtgatttgcaacccccactcctatatccatcaagacaaggccaccacgaggccccctatcctgctgtagatgacctgaaatacgctgtccccttagaggttgctttctttggaattgatcatgaacatctgtttggtttattgcagaacccacagaggccaacacagtgcctggcacattctaatt

SEQ ID NO: 204927 - DNA, 511 bp, Homo sapiens
tccatgtgtgaaccttgagtgatactaatcatgtaaagtaagagttctcttatgtattattttcggaagaggggtgtggtgactcctttatattcgtactgcactttgtttttccaaggaaatcagtgtcttttacgttgttatgatgaatcccacatggggccggtgatggtatgctgaagttcagccgttgaacacataggaatgtctgtggggtgactctactgtgctttatcttttaacattaagtgcctttggttcagaggggcagtcataagctctgtttccccctctccccaaagccttcagcgaacgtgaaatgtgcgctaaacggggaaacctgtttaattctagatatagggaaaaaggaacgaggaccttgaatgagctatattcagggtatccggtattttgtaatagggaataggaaaccttgttggctgtggaatatccgatgctttgaatcatgcactgtgttgaataaacgtatctgctaaatcaggaaaaaaaa

SEQ ID NO: 204928 - DNA, 240 bp, Homo sapiens
atcatactaaaagcaatgtttaaatcaaactaaagattaaaaattaaaattcgtttttccaataatgacaaatgccctgcacctacccacatgcactcgtgtgagacaaggcccataggtatggcccccccttccccctcccagtactagttaattttgagtaattgtattgtcagaaaagtgattagtactagttttttttttgttgtttcaaaaaaaatttttttgtgtgtgtttttt

SEQ ID NO: 204929 - DNA, 465 bp, Homo sapiens
tcagaaagatgtgtttggtaacatatattaaaaggcagaaatatgcaaatgcataaacaatagaatttgacataattatgtgataaagtgaaatgctcctgcagttagttattgaacatgaaggacctctctaattcttcagagaaactgtgagataatctctaccatttatgcttagcaaggagccatgctgcagaggaaaagtagaaatacacacgagtgacaaaagcaaaaaaatatatatatgaaaaactctgaaaccaccctcaatgaaaagtaatatgtctgtatttaaagagtaggtaaatcatatagtgaatttagaaggtaaaaaacgaggtctataattacatgagtatatagaaaatgttaagtgttttcgtgaaaaggtatataaacaataatgaataatcatttcacattgaaaataatttaattttaaaaggagatagtacaaataacaaa

SEQ ID NO: 204930 - DNA, 510 bp, Homo sapiens
aagcagttaatacagaccagctccaggtaaagtcagaaacttctccctcaatttctccagtgggggcatgtgttcaggatagcaggctctctcttacccacttccactgttggggcactcacaatatttggggtgtctcccaggtcctacaggagcagtccccttccttcagagggtctgtggggcctcttgagattgttggtttgtccttgcagttctggagttaaaattcaccatgtgagtcttcacacactgctctctctggagctgcaatctagtcgtgtctcctgtctgccatgattatcctagaggtccgcgaatgtccctaagaattcattactttgggaatctagttgtactggagcagtgacattacacagttctctaagttactcatatgcccttaagaagaagcaatctaaacaacataaaattgacacctctaaatatttttatcctacaaaagcatgcattagatgacaagtgagttatgtgagtctgtattaactg

SEQ ID NO: 204931 - DNA, 340 bp, Homo sapiens
gctgcagcagccctggagtggggagtccagcatctctgggcttcattgcttccagagcatgagaattctagagccgaggtgctcgtgacttccttagagtaagttaaaattaaaagcagcccagccccagctagagtcagtgccatgtgtgcacatgccggcagcagagccgggagcagtgggtctgggagggtcttcagaggtttccaaggcgaacacaccaaaggccagaaggaaccactttcctgcctctccgtctggtggtccaggggctgcatttgtgtgctagagtcagacttttgagttttcctttaaattggaaaaaggaaacaataatgat

SEQ ID NO: 204932 - DNA, 543 bp, Homo sapiens
aatagtaaacacaaactcaaatgtaaatactgaagtcccttcatggttctctattataaggaggtggttgttataccaaatgtgttcatatgtatactccagattacccctgaaattaaacacaacattgaatgtcttttagaaaacaatttcttttgcatccaaggacaactaggtacctgggtattcaagtttaagaattactgattttagatgttgaatcacactttgaatcctaatgtaatatataagtgggaaaatttttagccattttgacctgtttttttttttgttcctcttagcttatcaagattaggcaagcacttgccgtctttcttaaagaatggtgcacaggagtagcaattttttatgggaagaaaatctgcttaatacaaagggttgtgtcagtggaaatttcaaattaggtacagggagaaatgatgatcttattattacatttaaatcctgctgaaattttgggtaaaaaaaaattcaaacatgaataaaatgtttctcgtgctgactgagcgaatttactgtgaa

SEQ ID NO: 204933 - DNA, 374 bp, Homo sapiens
accactacatccactctcgcattctatcagtgaacacctggacctaattgacaacacctgccctcttaggaaaaccctgctccaaagaggcagcctggtactgtgggaacgacagtttagggactctgtagaaccacagacctccatgcagatctcagctctaccatccaagcgctttataacctcaagcagtttccccctgtgagcttagttcctcatctgcaaaataagaatggggttaatggcaataacctttccatgtttgtgtaaagactaaatacgataagatatggaaacaacctagcacagggcctgtcacagaccaagggatcaataccaccaagtcaccctaaaagggaagcacagcacattga

SEQ ID NO: 204934 - DNA, 404 bp, Homo sapiens
gtacaaaagctgataaacttaggacacagtgagtggtgtctggtgtctagtgtctagctttcatttacatttagtaagcaagtggtatagaggtggtatagcctctataccaccagagttagtgtgtgggggtgcattttaatcaaccacgttggccaatgctgcctacctggagtgaccccaacccccaactaaactgtgagctgtggaaatgaacaaaagccagccaaatgaggagcaaaggctatttattcagagcttgtgctagcgagggagtcagccaccatcccttgtgttttggcagaaactcagaggcaggtaggggagtgggaaagcctcaaagaagaaagaaaggaagccttcgggttgccctgagtggagggtgttggcctggggaaaatgaa

SEQ ID NO: 204935 - DNA, 300 bp, Homo sapiens
ctcctgactctgcctttttagttgcttaatgagatctttcatagagcagaaatttttaattttaatgaagtccaatttatcttttttttctgttacggattatataaagttttatcataggtgttgaattttgtcaaataccttttatgaattttgtcaaatatcttttatgatcatgtgatttgtcttatttgccctgttaatatggtgaattacatagatttttaaatattaaaccagccttgcatccctgaaataaaccccacttggtcataatgtatgattttttaaaatgttact

SEQ ID NO: 204936 - DNA, 383 bp, Homo sapiens
aaatataagctactatatacataggatatcatttaaaagttggatttcaatggaagtgaagacataaggaaaggcagaaagaccatgtttcttgaaactatttctggtctggttcttgagggtttctagattcttgggtcttgtgcatatttatattatcttatcaatattaatcaggcaatggctctaaaaattttacccgtctaaaaagtgttgtataaaaaggcctcggaaaatggaaaccattaacgaagtatcttctacttcactttaaactctgctttaagcatcaactagtctgtcttgaaattcactgtaaagcttgactgcctggattcgaatctatagtataagcaaattttgtgaatgcataaactggtatc

SEQ ID NO: 204937 - DNA, 622 bp, Homo sapiens
atacgttttttttagagacagggtcttacgctgtcagccaggctagaatacagtggtacagtcatagctcactgcagccttgaccacctgggctcaagtgatcctcctgcctcagcctcctgagtagctggtgctacaggcatgcaccaccatgcctggctaaatttttttttttgtatttttggtagagacggggccttgctatttgccttgaatgcacaagttgtgtggttgtggtttcctgtgaatgggggccccatagcaaagtaaggtcagttatagaatgtaaaggggattatccatgttgagtaccatctcctagggtttcaaggcctagcctacagtcctaggattgcagaccagagcccaacaggatgagcttagggaagaagggacaatttcctggccaaggacctcctgggacaaaagtccagacagctggttttatgaaaggtgggagcatagcgccaccccgtggcagttggtgtgagtgcccccagcttctggaacggcacccacaggtgcagttctgattcctagaagcagagctcccagtgccaatggcaaagggtggtcagcccaaaaccaggggctaatgaagaacacagcagagcctcagagg

SEQ ID NO: 204938 - DNA, 626 bp, Homo sapiens
ggctagagtttacactatcccaatcaaagaattacagtacacatctccagaatccataaatgtgttcctggcccactctgtaatagttcagtagaattaccattaattacatacagattttacctatccacaatagtcagaaaacaacttggcatttctatactttacaggaaaaaaaattctgttgttccattttatgcagaagcatattttgctggtttgaaagattatgatgcatacagttttctagcaattttctttgtttctttttacagcattgtctttgctgtactcttgctgatggctgctagattttaatttatttgtttccctacttgataatattagtgattctgatttcagtttttcatttgttttgcttttgtttttttcctcatgtaacattggtgaaggatccaggaatatgacacaaaggtggaataaacattaattttgtgcattctttggtaattttttttgttttttgtaactacaaagctttgctacaaatttatgcatttcattcaaatcagtgatctatgtttgtgtgatttcctaaacataattgtggattataaaaaatgtaacatcataattacattcctaactagaattagtatgtctgt

SEQ ID NO: 204939 - DNA, 384 bp, Homo sapiens
acactcactgttattgttgttgtttttgagacagagtcttactctattactcaggctggagtgcagtggcatgatcttggctcactgcaacctccacctcccgggctcaagtgatcctcccacctcagcacctcccaagtagctgggactacaggcacatgccaccacacccaactaatttttgtattttttgtagagacagggttttgccatgttgcccaggctagcacttttttcttttacaaggtttcaggaagagtagatagagttcaagatgggagcctgtgaaagtgaggccaaaccaagggaaagggttcctagagtcctgtcctcatcttacagacgaggagactgggtccacagggggctttctgcgtgtcagca

SEQ ID NO: 204940 - DNA, 606 bp, Homo sapiens
taatctgatgagtacgaaatagtatctataataggcatttatcattcttttaggctgcacagtacttgaatctcattgcaatgattagaactaatttgtggggaaccatcatctttataatttataaacatagtttctctgaccatatattcagatttttcaattttcagtaaggtttatcatgtattctttaaaaattttgtaccttatatagatatattcctttatatttaatgtcttttattgttataaatggcatttttcaaattatatatattttttggttttggtggtagtacacagcatacaataaacttacagtactaactacatacatcagaaaaagagaaaaagtttcaaatcaataatctaagctgtaccttaagaatctagaaagagaagagcaaaataaacccaaaacaagcagaaggaaggaaataataaaagagcagaactcaatacaattgaaaacaggaaaacaacagaaaaaaatgagtgaaatgatgaactggtttttctgaagatatctagacaggtgaaaaaactccagcaattatcaacatcaataataaaacagaacaccactgcataccctaaaaaaaataa

SEQ ID NO: 204941 - DNA, 343 bp, Homo sapiens
tccagcctgggctatagaacaagactccatctcaaaaaaaaacaaaagagatttggtccatatgaagaatacatgatttcaaaattcaaattaatacaaatccaacatgaagaatacatgatttcaaaattcaaattaatacaaatccatcatttcgggtcagacatctcaagggcaaacaattcattgcttattaagaaatatgcatggacgctccagaattgtcctgccagaacaacactgcttccttagttaatctgtctgactcagtcactcacattcaatttcccttaagtatggctttaaatctaaggttgagaatttcagcagtcaaactgaatat

SEQ ID NO: 204942 - DNA, 253 bp, Homo sapiens
caaaggccattgcctgtgaagacttctacccttcctgccaacagggtaaagagttcttcgtcctctatctgctcatcatcacctagggaccacactcagcatcacacatggtggacagctggccttaagtgcctcctgccaacctcaaaggaagaggctggggcacgaaatataatttgaagagtttacttgagtcaaagtgaggacagctgctgagaagactcagaatcaagtaacctcagatatgagctcc

SEQ ID NO: 204943 - DNA, 294 bp, Homo sapiens
agcctgggcagcaagagcaaaactcggtctcaaaaaaaaaaaaaaaaaaaaaaaagaaagaaagaaagaaagaaagaaaaagaaaagaaatgaattcttgggaattattggtgagcaaatgtaaatataatgtaaccacacaaattaatacataatcacagtaagaaatgctataaagaaaggggttgtgaaagattagggggagatactgacccagtctgtgatcatgggaagtatctttgaagaagaaatatttgaacagagatagatggagtgtgatttaaccaggaaaaa

SEQ ID NO: 204944 - DNA, 422 bp, Homo sapiens
aatttagaaattttagaatttatatttaaaattttaatctctaaaaataaaattttaaagtttagacatttttccataaaaaatttttataaccattggtaacaaattattataatatgtcctctttataatctatgtccaaaagtatttgagctcctgtttcaatttttttagtagaacttttacatattattttaagagacagatgtacaatgctaggagttagagcaccttggtggtattaagtttttccttattaataggaatttttaaaataaactatgtgactggattttaatatattagtgtattagtatagttatcctgttttaagtgaggaccaatcattcatatctgttttaaatgaaggatgctaatcttaatgctgtaagcagtgacatcggtgtaggaacttgatatac

SEQ ID NO: 204945 - DNA, 604 bp, Homo sapiens
  misc_feature (580)..(580): n is a, c, g, or t
acctgcacacgccgagggtccagaccgcatgagctaaagtctcgatggacgaagttgttgcaggtcacggtggacgaagttgttgcaggtcagggtggacgaagttgttgcaagtcgttatggacgaagttgttgctgcacacgccgaaagcccaaactcagccccatggagaatatagtcaactcagtcggtggctgttgttgcctctgcatgtgttccccaacttgttgagaaaagagagaaaaagaaacaactagcaatggattcgtgtatttggaacttgagtaccttaaattcatgtccttgtcttttcctggtctctgcttgtcatgtaaggtaaaaatgctaagagtgaccttaacacatatggctttcaacttacttttgttgttgttgttttgtcttgtttgtttccatgaaaaatatttatattattttttttctaacctccagctgattaaacaggtaccttacacttattaatttggaggaaaaataatagtagctgcctgacataccttctcactttgaagagtctctacttttttaatttaaattttttttatttttaagtatgtnactcgcgtttcaggtaccgactga

SEQ ID NO: 204946 - DNA, 857 bp, Homo sapiens
acctgcacacgccgagggtccagaccgcatgagctaaagtctcgatggacgaagttgttgcaggtcacggtggacgaagttgttgcaggtcagggtggacgaagttgttgcaagtcgttatggacgaagttgttgctgcacacgccgaaagcccaaactcagccccatggagaatatagtcaactcagtcggtggctgttgttgcctctgcatgtgttccccaacttgttgagaaaagagagaaaaagaaacaactagcaatggattcgtgtatttggaacttgagtaccttaaattcatgtccttgtcttttcctggtctctgcttgtcatgtaaggtaaaaatgctaagagtgaccttaacacatatggctttcaacttacttttgttgttgttgttttgtcttgtttgtttccatgaaaaatatttatattattttttttctaacctccagctgattaaacaggtaccttacacttattaatttggaggaaaaataatagtagctgcctgacataccttctcactttgaagagtctctacttttttaatttaaattttttttatttttaattctggggtacatgtgcgggtttgttacgtaggtaaatgtgtgccgtggtggtttgctgcacctatccaccagtcacctagatattaagcccagcatgcattggctatttttcctaatattctccctccctccccaccccccgacaggcccggtgtatgttgttcctctctctgtgtccgtgttcaacttacttttgttcttcatctaggatgtcaaactttctagagactgagggtcaaatagaaaatctgggtttagaattgtccttattctcttgctcctg

SEQ ID NO: 204947 - DNA, 257 bp, Homo sapiens
  misc_feature (33)..(33): n is a, c, g, or t
tcttctctagaggactccctgagagaccgtgtngcatgtgcatagaaagtgtccagtggagtgtgttgctgtcatcctgaggaggacttaggacacacctgactgaggaggtcacatttgagcagagagacttgaatgaggggaggccatgagtttcatggatacaggggaaaagtgtcccaggaagaggcagcagcaagtgctgagcctttctgagctgcggatcctgcacctccccagctctcgactctccaaag

SEQ ID NO: 204948 - DNA, 351 bp, Homo sapiens
gccaggaagcaactcaggcagaaagatgtgggaagcctttgacctggaggggcatggcttcaggtgaccagaactgtggctggttctggggaatgtgagcgaggtgctagccacatctgctatagtaaccatgagagcttcctgaaaagtagttatttactgataaactactcaagaatacaaaagtagttgaataaaaagtgtgccacagccaaataagcatagaatgaagcaaaacaatttttataaatatttacaatagtaagcaaatgtaaaaaaaagtattgccatggtaaatgcataatttaaaagattaataaaaataatcccataatctcagttataccaata

SEQ ID NO: 204949 - DNA, 593 bp, Homo sapiens
aactatgtttttgagagtctatcattcatctgttttttgttttatttagagataggatcttcctctgttccccaggtggaagtgcagtagcacaatcatagctctctgtagcctcaaacccctgggctcaagggatcctccttactcaacctccctagtagctaggattactgggatgtacgaacctaagtttcttattttttgttgaggtgggatcttgctatgttgcccaggctggctcaaactcctggcctcaagcaatcctgcctcagcttcctaaagcactgggaatacaggcaggagccactgtacccagccctcatgtctatttttaagtgaaccaacccatattcctttggggacatattcttaagttacagtatattgccggaaaacctgtcccatagaaaagcatacattttatgtgaccaaaagaagcaagttcattcaaattagatgtggagtcttagttgtgcaggcagtgagagaccttttgtgaggtcagggagtggatacttgtggaatgctattctttgaaggtccccactggctttttatctgtcttcattctctatagcatttgataatcattt

SEQ ID NO: 204950 - DNA, 362 bp, Homo sapiens
aaaggacttgctttagctagatacatggatatttcatccacagtaacagaagaaaatataaaatatacatgcatagatacaggttatgaatgtacgtggtaacaggatattatgaaacatctctttcaatttcctcaatttttcagtggagaactatggtcatgagctaagagaaaagatgtgaaaaaatatattaaatgaaagtgaaggaagtataaaagagttggtcagaagagtgggccaggtaacataacaggaaaaatttaatgattgcaaggcaagaataagggcacaaatgagatgagtgctcatgaatttaaaatgagaccagtgtaggtttcttttttttcatcaaccacatt

SEQ ID NO: 204951 - DNA, 314 bp, Homo sapiens
cgcccggggaccagaggctgccccgggtacaaggttgcgccggggaacgggaggctgcgttggcaacaaggctgcgcctggggacggtaggctatgtccctggggagacgctccgcccggcatgggacgctgcgccgggggacggcaggctgcgcccgggatgaggctgggcccgggcaggggaggctgccttgggaggggacgctgtgccacgggagtggagactgcgttggggacgagtctgcgccctggacggtcctgcgtgtccttccgagggcgcagtgtccgcgcgggatgctctgcgccgcgggcgg

SEQ ID NO: 204952 - DNA, 433 bp, Homo sapiens
tgtggaatgaaaagctctgatttaacccgtctttaagcctggtatgcatattcctctctgttccggccaccttgtctagacacactacactgaggcagtgcccatcttagatgatgttgatacattgtcaaaaaatgggcaaaccaggcgcggtggctcacacttgtaatcccagcacttttggaagccgatgccgacagataaccagaggtgaggaggttgagatcagcctggccaacatggtgaaacctgtctgtttttctgtaaaaatacagaaacaatgagctgggtgtgggagtgcacttctgtaattccagctacttgcggggctgaggcaggagaatcacttgaaccgggatggtggaggttccagtgagccgagatcacgacactacactccagcctgggcgacagagtgagactccgactcaaa

SEQ ID NO: 204953 - DNA, 465 bp, Homo sapiens
gccttatgcagagcagaggatcctcatcccagtggtccctcgactgccatggggttcactcttgtttttattcacttattaccaccaagtatttatttagaactttctacgggcaggctccattccaggctctgaagatagtctttcctctcatggagctgacattaggggtagagggaatgtggtgatgggcaacacagaaatagttacgttatgtcagtggtccagtggcgtgctaagataaaaataaagcagggtaggagggccatggacggatgctgtgtgtgtatgtggggagtgatattttagataagttggtcaaggaaggcctttcggttagggtaacatttgggtagaggccagaatgaaatgagacagccaacttttaagggaatctgcagcaggaggctttcaggcagaggagcagcaaatgcaaagaccctgaggcaggactgtgtttgaaga

SEQ ID NO: 204954 - DNA, 482 bp, Homo sapiens
gcgatctagaggcccccacaccacctgagtccagcagtatctctgctgttccctgactgctcactgccgcccccaacccagacgactctgtcaggggcctaattaagctccagggatcctcagaccacagtgtagaaaaagacgcaggactttctctagaacaagctcccagtaacacaaagaaaaatataagctagagaaccttcaggcaacagcaatgacttacagcaggaagacttgtaagtaatgccttataagacgttagtgtacaagtttgcacgtcaagaaaggccaacatcacctttaggagtattttttttaaataacataaatactttgttttaccagaaacaaaaccatctatcactgtttcagaagccataaagagacctatttaaggtatactctctccctataccactcatcctgatctcaccacccaagggccaaggcatatacccctctccgactcaggtggtgtg

SEQ ID NO: 204955 - DNA, 613 bp, Homo sapiens
acccatcccagcaattggaatttgagttctggctagccccaccactgaggcctaaagcactctggggtcctaaataaacttgaaaggcagtctaggctacaaggactgcaagtcttgatcaagttctggtgctgtgctgggcttggagccagtggatttggggtgcacatgacacaatgagacaactgccagggtggccaaaggaatgcttgcatcactactcccccaatcccaggcagtgcagctcccagctctaggagggaatccctcttttggcttgaggagaggagagggaagagtaaagaggatattgtcttataacttggatatcagctcagccacagtagagtagggcaccagggagagtccttaggcccccattccaggccctagctcctggatgacattgttagatacaccctgggccagaaggaaactcatttccttgaagagaaggacctggtcctgacaggattaatcatttactgactaaacagtccttatgccttgagtaaacatcagtggtacccaggaaatacttaccatgggcttcaggccttgggtgaaacccagggccttgttcacttcagatgtgaccagtgcattcccagat

SEQ ID NO: 204956 - DNA, 356 bp, Homo sapiens
ctcaatattgaaatcccctccagattcaatgcagtgacggcagaaagtgtatgggcatgaagattcaaagaaaaagatgcggccgttgaaagatttatatgctcctttgctccaggagaaatctcttgagacctcactcagagtgcacatccttaccacagtacaaggctaatgagcttggatcgatggtgttctcagcccagtggactgaaaacaatagattgaagatttgtggcaaccctgtgactaccaactctattgaaaccatttctccaatagcatgagctcacttcaggtctttgtatcacattttcataattctcacaatatttcaaatttattattattattatacc

SEQ ID NO: 204957 - DNA, 518 bp, Homo sapiens
ctaggctggttttaactggaatgacttgggtgacttgactctgctccatgtgcctcatcctcaaataaggcagcccagatatggtctcatgagggtgggagaggtgcaagagagaaattcaaaccagcaagcacttctccaaatgcctgtatgtctcatgtctgctaacatctcttagtcacacggaacagagtgtagagatggagaaagtcaaagaattgattcatgcattaatctaacataggatcccaaatctcataattatctacattgacatggtcccaggaaactacagccaagaggaaggtgacaagtagggcttagaattctttcccttaatttgcttcatttagaaaaccaccagttgtatgaaatttcaccagctgggaggatgattggaagacagaccatgcaatgaatttctggaaaaaaaaaatctctatctatatagcagcaatgcacaggaaggcagtgagtggatgcagttccatccagaaccctgtgtgggaatcggtggg

SEQ ID NO: 204958 - DNA, 315 bp, Homo sapiens
actcctaccccacgccagcttaggctcaactttgtatatgactcactcactccatgatcaacaatgtctgcatatccatcactccccagcctgcctgacttagccagtaattttacattcctattgcatacctgcttttatctattcttgaattttagccttatattctcaaatagattacatgtttcttgaaagcaacaaatggaatttacactgctttgcattccacacaacatgtagcacaaacgacaggctcttaaaaaagatccacaaaagtactgatgaaatttaacattgccccgtggatttgtaggc

SEQ ID NO: 204959 - DNA, 984 bp, Homo sapiens
tttgcctattctggacactttgtataaagggaatcctataatatgtagtttaggggactgacttttttcacttagtgttgtcgtctaaaaactcaccagtggcgaggcacggtggctgacgcctgtaatcctagcactttaggaggccaaggcgggcagatcacgaggtcaggagatcgagaccatcctggctaacacggtgagaccccatctctactaaaaatacaaaaaattagccgggcgtgttggcaggtgcctatagtcccagctacttgggaggctgaggcgggagaatggcgtgaacacaggaggcggagcttgcagtgagctgagatcgcgccactgtactccagcctgggcgacagagtgagattgcatctcaaaaaaaaaaaaaacaaagaaaaactcaccagcatggctaaatgatagaaaggagagttttatttgccatatcagtttgcagacccggaagagagagtctctagcatggactgaggtgctctctttgaagaggggaagggcagtttgagttttatgcctcccaaggtccatatcacacaatagagtcatacatattcagcaggtttggggaaaagccatacatatttatgaggggacccgagaacatatgcaatagataaacatacatgtaacatacatcccatgttcactttggggcagggttttagcattaaaatgaggtagaatctggatctttccatcagaaggtgagctctaggacacagttggagtgcagcctctatgaactgctgaaactggcttatggtctgtagttgcttatcagaaaagagtgtttgaaggctggttctctgtccagtcagggttgtggtggtctgggctgtcaagagttaggagggtctgataacgtgtgtgatctctactgttgtgagggagtttatcaagactgtggtttttcttgtagctgtaggaatttagggagttgctgagacagctgccctgaac

SEQ ID NO: 204960 - DNA, 227 bp, Homo sapiens
ttctcttgttctagtttgctagtggattgatttgggtctttactgagagaagggagtgtttttgtaagtaatacatgtataaatgttcacttttaaagatgtaaactatactgagtatggagagtaaaaatatgaaagtttattttcagcagctcagggaaactggaaaaggcaattatcctaatcctctgaggtttcaaccgtacaaataacagaaagttaacaaa

SEQ ID NO: 204961 - DNA, 694 bp, Homo sapiens
gtgtctccgcttatctcaaaatattgcaacattagaaattagtaataatctgactcactttaaggttcaggatggggaaaagaaataccatgaaaatcaactaatgttacatgggaccaggtggctgattcccaggcacacctacctactatagactctaaaagcaaccatctcctaaactgaaagggtgataccttttcttctgccaaccacaaatcagataagtgattgaacttttaccaggcaccgaaagccccagagatttccaagcactgaaccatcaagatcaagataacttagggtccgttttacaagcaactgtggcttggttcccagttagtcgagcaccaaaactacagataaacttgttcttaatctccacatataaaggaaaccgttttcttctttgcaaaaccagctcatggcaagtggaaaacgaaccctaacagaattctagaataaggtcactggattgctcataatgaggtagtacctttaaaggtcagagattccccaaatttgttcttagaactttcttaccgcatttcaatttatcgggagatgttacaaatactcctacaatggaaaaaaaatgtaatcttatttaatgtaaaaaaaaaataacacacacacacacacacacaaacacacccatttgtgtatttgggtgcacagccatcacaaaaatcaaaga

SEQ ID NO: 204962 - DNA, 430 bp, Homo sapiens
cagggatattgtaaggatgaaagattagctgttggaactgtgcctggtgcagagaaactacttcatgtgtgctttgcacacccgaaaccttcttttttatatttatttatccttggcctgggggctgtctcctctcactcagtggtgtgtctcatttgttctcctctgtgcctgagccagcacatggcacatcatattttctcagtaaatatctggcagaaaaatgtattcatcagcctggccaacatggtgaaaccccatctctactaataatacaaaaattagccaggcgtggtggcgggcacctgtaatcccaactacttgggaggctgaggaggaagaatcgcttgaacccgggaggcagaggttgcagtgagccaagatcacgccactgcactccagccagggcgacagagtgagactctgtctc

SEQ ID NO: 204963 - DNA, 299 bp, Homo sapiens
caggcatgagccctgccaaatgttggcagttattaaactgtatagatttgttccttaaatattttgactattccatgagaaaggtttgtccagcatcttgatttctatctacaaaacaaaaacaagactaaagggttcagtaatttaacatcttggtcagatggcgtgaagaaattaaattttcttactcctatagtcgcgatgtagtgtacctcttaccttttaagtctcgtttcagtgaagttgaatgcatattctagcaactaataaaacaataccaatgaacattttttaattga

SEQ ID NO: 204964 - DNA, 357 bp, Homo sapiens
cttgagtacttcaatgttcaagcatgtttagtccaggaaattggaatgaaagtattgacattctatgattaggaagggtggggattttctcagtatttttgacataataccaaatttgcctgtggaatcactaaaaaagttttatgatttgaaaatattttaaaatcaaacattcaaataatttttagcttatgagatcaaatattcatttcattaaaatgatgtgttcacttgcttgctctgaagtggttagaaaatgggaatggaaactcagtatgtttggcccatttccaaattttctgctttaatccatggttctcctaatgatatgaccccatatgagaaggaaaaaatagc

SEQ ID NO: 204965 - DNA, 1021 bp, Homo sapiens
aggcaggccacaggacactcaaattactggaagagcctcagaaggaagcttcttaactcgagtgcctgcagcccagcccatggctccaaagacaacacaggtcctacccctgcaccacggcttgttacagctcctatttgggcacaccaagatgggcctgggtttcaaggcaccctcaaatctggccctactttagtaaaagggaaacaaaagccaatgttataaaattccagccagaaacacttcttgcaaaaggtcggtacgctctcttgaaagggagagagaaacaattgctagaagcaacacctgcaccaaaataagcctttccactggaaggattgaaggcgacctgaaaagaaaacagcctggctgtgtggctccatgtctgctcctgtatcacggttatcacccctccctaaccctggccttcacccacctctgcctgctcagcacaagggcattccaacctgcacagggcctggcacaggatgcttgataaacatgtctccaataaaagcatcccacagccaaacgcttgcttagatgttgtcattgactcctcgctagttgttttcatgtttgttaggtttgtttcacccactagggatatatcttctgttgtgtctccccaaatatgtcacagtgatgggcatgaaaccagatgttccacagaacactaatcaacggacaaaaaaggttgctactctgcaaaacaaacaaacacatacatgcctccaaggaaatcccacccacacaatagatcacaggtaagtagcacagcagaaaaagcatcttctgaagcaggaaattccctatcatttgaaaaaagctaaccatgaaaagtcacccgttagagggtaccttatctagacacttcatatgaatgaaagtgtacagtatgtccataaaaggcaaatcaatagacacaggaagtagatgagtggctgcttggtactgggggtgggaatggggagtgatgggtaaaaggatctttaggggatgatgaaaatgttctaaaatt

SEQ ID NO: 204966 - DNA, 304 bp, Homo sapiens
aaccttaacccccatttccaccaccccacagacctcttcccatccctcagtgaactaaaatctctggaggatccagtttctcagatgcccagtatttttctggccttgccattgccatttttgggggaaatcacttatccacaccaattaaaggaatgtcagatgaagttttctgttagtcttcctaaattgtggcagccagtgtctccccatgagttgcgtgcaaacccccacatggctctgtacaactttctctttgcaaaattaatatttttagtatataaaatgatatgccagatgtatg

SEQ ID NO: 204967 - DNA, 485 bp, Homo sapiens
actcacttgaatccaggagtttgaggccagtctgagtaacataacaagattccattcctttaaaaaaaaaatcgtggtatacctgtatagagcacttactatgaatggagcttgtaggactggaagttgttctgggtgggtcagtgagtgagtggtgtatgaatggagcttgtaggactggaagttgttctgggtgggtcagtgagtgagtggtgaatgaatgttaaggcctaggacattacactattgtagattttataaatactatacttgggctacatttaatttaacagtttttaaattcagtaataacttactgtaacttttaactttataaactttttaatttttttactttttgactcttgttatagcacttagcttaaaacacatcatacagctgtccaaaatattttctttatattcttattctataagttttttctatttacatttttgtttttactttcctaaactttttttta

SEQ ID NO: 204968 - DNA, 473 bp, Homo sapiens
gcggggagagggaggcggccccgcacaggccagggaggccccagcacacatgaggccggggtggaggccctggctctgcggtgccacctgtcctccccagggcgcacccaagcccaagggttccttcccaaccgtggggtctgagtttgtcatcttccagctttctcaagtcccctgagtcatgagaacttcctctacacacaggcaggtctgtgttttatatgaaccatgtttccatggtaaatagattttaagaattcccaaaggacagacagtgtcaccaacagcagagagtggagcctctggctgcctcatgtttgaaagtgttaaaaataaagacaacactgacatttggggttgtaatgtgacggaattacagtcttttaaaggcaagaaccacttatctacactacatgcaatattcagtgttttgttcacttgtctaattggattaaaatatttagctcccttta

SEQ ID NO: 204969 - DNA, 406 bp, Homo sapiens
tttcagtatgtatctctaacaattacagacacattaaagaagtctgtttctcctaaaatttttcccttaataaacggctcaagccaaaaccttggagtcatccttaactcatctttctctcatacctcacagccaatccaacagccaatactggataatttggaaccttcactgctaccactgtaatctaagttacaatcgccttttacgtgtattatggccacagctccttcattggtctccttaatgcccctgaaacttcagtctttgtacttcttcctgctgcctgaaatacttttattccaaaaaaaactaggtctgtcacttccttgaggtctcttgaatttcatcctattagaaagacttgccctgaccatcctatctatacacgatactaatgttagaa

SEQ ID NO: 204970 - DNA, 369 bp, Homo sapiens
ggaaagaaaaatttgtgtgtgtgtgtatctcataagcctctggctgctctccaaactcttatttagtcttatccagtagaaacacattaaccatcaaataaatccttgatttttactgaaaaataaagaagcttatatttagcaaatgtactatcacaatagtacttctcaaaaagttcctgtttaatgcattatgtcatcaactgattaatgaaaagggactcacaacaaacgtgagtcgtatctgaagctacaaaatagagctattctatcatcctccttctgatgaaaattatctagactatgtattgtattatatacatattttgtatatgtcattatattaaaatatataccgttttagactgt

SEQ ID NO: 204971 - DNA, 232 bp, Homo sapiens
ctaaaccaaattccgtctctttttctctctctctttttctacgtgttgaaaaagttgactggtctgttctgcaggacaaagtttctcacagtctgaatgttgctgatcacaatattgctgtatttcgtagtagttagattttgaggttaaagtgggttcacgtgtgattattttggccacactacttttagggttgccaggcttagtaaataaaaatacaagatgcccagtt

SEQ ID NO: 204972 - DNA, 709 bp, Homo sapiens
aggcttaaactcatacgatagaaagaatgagaaaggagatattagccagtttggaagctagcgagtggtaaaggaagtgggatctcaaattgctagtgaagaaagcagagaaccaacctagtttaaactgcagaatcccctccaggctcaggaatgggcaggccagggctccagaggcgggcttgtggggccgtgaaatgaggaggatgtgttcaagtgcgtttaaaaagcagtgactctgtccttccctagagaaggacaggcctactctctggggagggtagagcagggtctctgggtttgggcaccaggcacagttgaaggtggggatactggcaaaatgggggattgagccaatacatatttttttggttgtgatttgctagttttcccctttgtcaatgaaagagcccactaatggggacaggcacagtggctcacgcctgtaatcctggcactatgcaaggccaaggtgggaggatcccttgagttcaggagttcaagaccaggttgggcaacacagggagacctcgactctacacaaaacaaaaattagccgggtgtggtggcacgcgcctgtggtccccagctactcgggaggctgagatgggaggatcccttgagcccaggaggttggggctgcagtaaggcgagatcgcaccactgtgccccagcctgggtggcagagtgagaccctgtctcaaaaaaa

SEQ ID NO: 204973 - DNA, 325 bp, Homo sapiens
gactgtggtaagccgtgatcacaccactgcactccagcctgggcaaaagaacaagaccctgtctcaaaaatcaaaaatttttaaaaattgagagaaaagaaaggtagatactatattagaaatactgtactggttttgttgtatatttttctctttttccttctgtcatctcccaccttctacaacatatattcagatagctatatccttccttcattataccacaagaaatgaggctacttattgggggaagaaataactagaatgttctcctaacatttcactaaagaaggaaaaaaacatggttttctagaatatacctaac

SEQ ID NO: 204974 - DNA, 128 bp, Homo sapiens
gcaaggcttagttgagtgattcagtcataatactctgtataattgtctattattgctcttatattgcattgtaatcattagcttttttattgtacttagacacagataaccaaagatttgctttagtg

SEQ ID NO: 204975 - DNA, 467 bp, Homo sapiens
gatcatgaggtcaagagatcaagaccatggtgaaactccatctctactaaaaatacaaaaattagctgggcgtggtggtgcgcacctgtagtcccagctactagggaggctgaggcaggagaatcgcatgaacccaggaggcagaggttgcagtgaactgagatcacaccactgcactccagcctggcgacacagtgagactccatctcaaaaaaaaaaagagtcttaatatcaaaagtaaactgatgcaaaactagaatttggtcttctctgtgaaaatgacagttttctttttaaagagtattgctccagtttttaaaagtgattgtgaaaaattttcctttcccttgtaactaatcggcctacaaaatgaagattttgtgttttctcaaaataattctttgtgcttcgtgttgcctttttttggtctttaattacttaagaaaattgaatcttcccaacaaaag

SEQ ID NO: 204976 - DNA, 405 bp, Homo sapiens
  misc_feature (1)..(1): n is a, c, g, or t
naaactctgcgcggcgggcagaggctgcaatctccgcactttgtggggccaaggcaggcggctgggaggtggaggttatagcgagccgagatcacgccactgcactccagcctggacaccattgagcactgagttaacgagactccgcgagtgatccgccagcctcggcatcccgaggtgccgggattgcggacggagtctcgttaactctgcactccagcctgggaggcagaggttgcagtgagccaagatcatgccactgcactccagcctgggcgacagagagagactctgtctcaaaaaataaaaaaggaaaaaaaagaaaattgaggagccatgttaaagacctgccatagtaatgggatttcaaggtcaaaggagagggagagactgagaaagaacatt

SEQ ID NO: 204977 - DNA, 495 bp, Homo sapiens
actaagaaaccaagagagaaatcaatgggacacaaagagttcatgctacccagaagcacaaaccaaattttcaaatacctagaatcatgccctcgggtgaagttggtaatttaagcatttccttttaatgcatatttagcagagatattttcccagtaattaattactacaggcagttaaatatctttctcttcttcctctgttttgtttaggtttttgttgagacagggtctcgctctgtcgcccaggatggagggcagtggtgtgatctcagctcactacagcctcaacctcctaggctcaagtgatcctcccacctcaagcctcctgagtagctgagaccaaaggcacgtatcaccatgcccggctaattttggttatgatttctttttttggtagacaggaggttttgccatgttgtcaaaactggcctcaaacttctaagctcaagtgttccacccgccttggcttcccaaagagctgggattataggta

SEQ ID NO: 204978 - DNA, 386 bp, Homo sapiens
aagcagttatacagactcattttaacttgatgttgatcttacataaagtgtgggtggaaaagtatatctgctgggcagcatctagtgcatcaaataacgaatcctaaagttaaagtggaaattatttttaggttgtctgggcaaatagcacagaaggtggggggaatccagagatatgacctcagatgtgacacatgcagacacacgacacaccacacatacacacacacacacacacacacacacacgcatatgggtacacacaaatgcaccttctctcttccttctgcccccacactagcagctccttcctggcttcctccgcccctcactcacacaaagggccaaagcaaatacttcagcactgagtctgtattaactgcttg

SEQ ID NO: 204979 - DNA, 693 bp, Homo sapiens
gttcacatacttcaagccatcctgagtgatctttttatcaaggaattctagtgatcatgacgtcatgtatatcaaaatcttagaaatctaaagaaaaccaggcccagattaaagttccaccccctacacacacacaccccagtcagtgtgcaaggggaaaatttaccaggtctttatgttctgctagaagatcttcaacatcagagaagcgcgatgctggctactgtgatgaacaagctgacaacagccagttcacacacaaaaatgtttgagccccttgatgaagtaggtgctatattgctcaggtgggatatcagaacagggggagtctcttcctttatgaagcacaaactctaaagtggtgaggcatacataaaacatggatgggggctttcacagtggaggtctgaatggtggttgctgacatgagttgactgatttccactgtgggatatcagaggttggacctctgacagcagccatttgaacatatattgccatttattttataaggttagaaagaaggtttaatgctgagattagctaatgcatgtgaacagcctacttttgaactttaactggtatgtgtgtacatttacataaacaatcatccatatctacaaccaaacaggtgaccagagaaaaataacatccatttacagaagtttcgaaacaaaagactcagagtgttgt

SEQ ID NO: 204980 - DNA, 653 bp, Homo sapiens
tttcatttttcagagcttcttttcatttagtcagtcacttatttccagagatttcctggtgatgttgcctcacatttatttgtggaaatgccagtatgttttaagcttgcaggtcaaactcccaagagtttgaggtcgaatttgatggaacacccagatgtcctcagctgccatggagaatacttaccatatttgcttgcatattttccctattatactggcagacacttttagttgttaacatagaggaaagaggtatttaggttgtaacttcctcaagcagttctttccacatcatgtagctctggtccatgccatgtgtgccaatggtaaccaaacctttcatcctgaccatcactaactggattggcgtcccagccaaaagcaaccaatctctgtggagaaaagagaagccaacgtcctctgagaagtcttttgcaggttttttgtatcatggttatattcatatcataaaatgaattgggaacctctggtttcagctccaacatagagctgaagttgcaaggtagaccaccactctgaaattgggagagacaggcaaatccagagaagtacagctaatatttgcatatctggagcagaagccacttggagccataaactgttaggaacacttaaatggtaattttgat

SEQ ID NO: 204981 - DNA, 874 bp, Homo sapiens
ttaagtagataggttcaaaagaaattcactggtcattggcaatatctgatatacttcacttccttacctttatttttagtaaaaatgatcaaatgaggtaccttagtgtaaacaatctgcacgacaatagcttgcttttggaaatgaatgcctcttaaatcacaatgcagttctatacagcaacaggcaattcaacttgatatgagctgaagtaattgaactgacacccaaacgtgggtttatagcaatatatagttacagtggatagactgacttttctggccgtttgttaatttaagggagtttctggctgaaaaacctaaattattaaagctctgctgagatgtgtatggtagtatttgaagcatttggaactgttgataaccaatcatcgcaacaggtaacagttgagagtggtgctgtgcatgatgaatgttcagaaacagctaaaactaataggaaagcagtaacatttcctgttgctgtcaacatataaaaacaccattaagtgggggagggattgtacatctagggaatgttgttattttgagtattatgttcagccataagcacatttgcctgaagaaacagtggattataaagcaccactgtcttctgtgatagagctttcaaatactttaatgattttgtacattgcaaaaatgagaaattttgtctaacaagggttgataatgattcagtaatgaacaatttgcaacagaaagtgtgtttatatattcatgtatatattttgaagtgttttatgctgaatcagttaatgtttcttttatgaattgcagaaatctcctgtggatatgtcaatatgggaaagagggcttttcttatgtttcgagtgaaataagtacatcttttt

SEQ ID NO: 204982 - DNA, 708 bp, Homo sapiens
ttaagtagataggttcaaaagaaattcactggtcattggcaatatctgatatacttcacttccttacctttatttttagtaaaaatgatcaaatgaggtaccttagtgtaaacaatctgcacgacaatagcttgcttttggaaatgaatgcctcttaaatcacaatgcagttctatacagcaacaggcaattcaacttgatatgagctgaagtaattgaactgacacccaaacgtgggtttatagcaatatatagttacagtggatagactgacttttctggccgtttgttaatttaagggagtttctggctgaaaaacctaaattattaaagctctgctgagatgtgtatggtagtatttgaagcatttggaactgttgataaccaatcatcgcaacagccagctgagacccccgctgcgcatgaccgatgcccaccccagctccccctactccgccacgaccctccctccctcccgctcccacctcatcacctcccccctcacctccccaggcctcttcacctccacctcttccgctcatcccctcctgccgcctcaccctcctccccgctctcttcccccaccgcccccttcctctcctcccatctcccccgcccatcccgccctcctcactctcttccccccccgcctcctccccccagccttcctcctctcccacacctcaccttttcctccctccccttccc

SEQ ID NO: 204983 - DNA, 396 bp, Homo sapiens
caaattcctcaaacttgcaggattaagtctaaactctttggaaagactttgattcctttcccatctgcttttttagcttaatctctttttaggctcacctacaacctggacactccagcagtgtccctaatcctttctggttccctaaatgttttatgcttttcatgcatctttgtgtatctgcacagactttggtcccgtgttcctgacaaagttctgttaacttattccatatcttgctttccctgcctgtgataaaactaatcattgatttctttgtaaatagttttgtgtcttgtaaaactctacaattgtacattgcctctgatactgtaataatgtatctatctatctgtcttatattaaacagaaagtcttttagggcagatatggagt

SEQ ID NO: 204984 - DNA, 847 bp, Homo sapiens
gatgtgtgccagggagcacagattcaagggatgggattgagtcagacctgtgttcttactcagtgtcagaaataactctgtggagctcctagagtaagacatttccggaagcaccacataattactgttgggctcttagggtagcccttttagggaattgagcattcccatgttttaccaacaattattctgctgctgtgttttattatattgccaatggttttgagacactcatcatgctcttatttagtgatttcttttcatgagcagagcaacagctcatccagcatggtttccaaatggagaaatttgggtcttctgtagaaaccacacaaattctccaatggcctacagccttatggttggcacactagttggccctatagggtggaaataaagctgtaagatgttaaactgcatttgatacttctcttgaacgctgagcaaggaagcaaaatagttcttgtctttacttaagcttctaagacattttggggcaaaggaccttacagatggcgtctgttgaaagtaacagcaacgtgccagggagaaatgtgggggaaatctcatcaaattctgccacctcaaatgtgttgtccagaagtcagtgttattcagggggccctgtgaaacttgaccaccagcttgcgccatcaacactcagcctttatccagcctgctctcagcttttgtgtttctgttagaaactcagataggtaagtatttttattcagtagactacctttcttatcttttcagcttaatatagctgcatcttctttctcaaagccaaactaagatattccctattaaaatgtccatgagcctagcattgagtgtctggcat

SEQ ID NO: 204985 - DNA, 558 bp, Homo sapiens
gaacaggttgaatcctgcttggataacttgctagctgttaggcaagtaatagctagttagtagaccttgattttttcacctatcatggtactgtgaaatagaactttctaccataatggaaatgttctatatctatgctgtcccctagagtagtcgtgagccatgttgctgttgagtgcttgaaatgtggctagtgtgactgaggaactggatttttttattttatttcaataaatcttaaataaccagtgtgtggctcttgtctactctgttggacagtgcagatccacaatgacgatgatcatatgcaccctaatatttagcttctaataaaataagatcataaaatacttcctaaatacaaatgattaatgtatatttatttgtgtatgtatatgtattacatggtgggataggatttaaatattcaataatcacatataaatatagctttaaaaatgaaatattggcaaggattaaaatttaaaagccgttttttaatacatttataggtgacatgaacaggttgataatgtgcataaatgaataactgttttg

SEQ ID NO: 204986 - DNA, 288 bp, Homo sapiens
atgaaagctataatagtcattccccagaaaaatacatatggacacatctacctaccccacccagaggtagccactgttaactgtgtggcgtgtttccttctgtactttttaggtatacatatatatgtactctttaacataaattgggtcatctatttaatacatactgttttacagttttttccacttggatgtctgtgagattttttgtataccattacatctcagtttatctttccaattttaatgcccacatatattctatagcatggattattcttttctcta

SEQ ID NO: 204987 - DNA, 501 bp, Homo sapiens
cctgatttggccagtatttcctgagatcctgtagagtgcccggctctggtccagaggcgaggggtgccaggatgtctcagacacagacagcggccttgtgcttaggcgttcattatctcatggggtagcccattttgaagcagtgcagaagggcacatattcagtagaggtgcagacccagaggctctgtgagctgcactagagagatgaggaggcatctcccccggcgactgacgatgggctggcatgcctccacctccgcccctccgccccctcgccctcccaaccaccaccttccctctctgcctgctactcccctcttactttcccattgatatttttgttgttgtttaagcaaattattattatttttttaaattttagcctcaagagtcttcataattttttaagggaacactagaggtactgcaaaaccagaaggatataaatgttgagaggaagacaatttgtgttgcatagaccctgagggactgtcagacc

SEQ ID NO: 204988 - DNA, 387 bp, Homo sapiens
ggtccggaatttctaccgtcggcccacgcgtcctgggctggatgtaacctgaaaaggaaaggtgggtagccaagtctttgtgatcttgttgatagtgttggacttgggttatcccagtacatgtgccacaggaaagaatactaaggccactcacccatcctaggatagaccctatcttgacttccctgtctttcaatcatacatctggcagcacatctactggtattgccaggaaaggcatcccccagacatatttccagaagaaaacaggctaaaaaacaagaagactgggtctgtttatttgtttttaaagtatagaagattcaggtgacaataagaacaagaaactaaggcctttatgttgcgacataggaatccatctcagtg

SEQ ID NO: 204989 - DNA, 530 bp, Homo sapiens
tcatccatcaaaaatgcagctctccattgattcttcccgaattgtcaatttccaagcagcctcagggataagcctcattctgtgagacgcaatccttgataaggaaaaagataaagtgataaatgatttttctggtcttttcctttgggaacgatagccaacttgctaagtcttagactcaggcaatagccattcatgagctacctgcacacaaggagtttgtgatgttagtaatgtgaatttggcaatagtgttttcagcaaaaaaaaaaagtcactacttaaatacaaacccctatacatgactggccttggagaaaactagcaaagctcagaaacaaactgacttaaagtacgttgccaaacacagcatcatatgttggctgaatacaatattttaaaggaactgaaaatattataacaaaataaacctcccatctgggtctatgagccaataaactaaaataattctcagtaaatatcttaaatgtaatcacatctagtgctaagaagaattatattcaataagaa

SEQ ID NO: 204990 - DNA, 450 bp, Homo sapiens
ggaggagggaagaagagggaccagagactaagcaagcctggtccaaaagccaaggttactcccttattctgaagtctaggagaagcaaatcagaatttgatggccttttaatacagaaaatactgtcttgaggtttgagtatagtacttatgatttctattttaatgacaaggaaactgaggctgacagtgactaaataattcatcccagaaacaataaatgagtggcatgactaatatataaacccagtttggctcccaaccttgtgttcttcccccacatacacaatgactcttggtttcattcttactgccatgtaatagaaatagcaacctctcacttgtagggcccctgtctgcttcggcacagggaactccttcacacctgtccatacttccacgaggaaagggagtgctgtcctcttctccacgaccacagcagatcttgttg

SEQ ID NO: 204991 - DNA, 285 bp, Homo sapiens
cctccagccagttgccacctggtccagctttgggagatgtggagaatgactttcgcagtgatttccactgggccatggcattgaaacagctgcaggaggggacacagctggtgccacccctactccgtccattagagctgctgtgaaggaatgccaccctccccatggggagtgagggggccctacttgctgtggttggttccagggaccatgggaagaggcaaacccctattttcaagggcacaagttggcttttattaaaataaaatttcatcatcacttatt

SEQ ID NO: 204992 - DNA, 357 bp, Homo sapiens
gtcatcaaccctccatttaaaccactctccccaagttagcaaatgaaatctaaaaggtggataagagctctttattagccaggcatggtggctcacacctagggtttcgatgaccatcgaaaccctacaagtagaccactacagccaattaacgcggttatttggggggctcctctatcatgtttcttgagggcacaaagctttattgcactccaagaagctgcagaggtgaaagaaggaaccgtgcccacttcatctctgaagtcatgtttatggcaggtgtttgtttatttatttaaattcattcattcaaccaaaaagcattctttgagcagggtttgagtctggggttgctta

SEQ ID NO: 204993 - DNA, 506 bp, Homo sapiens
ggtaaacgctacagtagtaactgttacaggcagaagccaacaatggatgctaaaattagtgggtaagaagatattggcatagtctcaaagagacttattaattagaaaggaaaaaaatagcaactttttagtgaagaaaactggcagacagcaccttaatgaagtgatcaaagttaacatcaccagcaataagacaaaatggtaccatgtacccctgcttcactgacatgatgtaattagaagggcacaacatagtttctgtggtattcctgacagaaatacacagcctcaatggaatccctaagaaacattagacaaacccaaactgatggacattctactaaactggctagctagtactcttgacaatgtgccaaggaaagatgcagacagagtaactgtcacagatggagaaggctaaggatacttgacaactaaaagcaatgtgggaaactggatcataaaaggaccttcatagcaaaactagagataccggaccggtctat

SEQ ID NO: 204994 - DNA, 486 bp, Homo sapiens
cctttgcttttatcgatttgcaaatcaaataagggggacatattgggaacagcaccccccccccccaaaatctggccataaactggtcccaaaactggccataaacaaaatctctgcagcactgacatgttcatgatggtcttaatgcccacgctggaaggttgtgggtttaccagaatgagagcaaggaacacctggcccacccagggtggaaaaccacttaaaggcattcttaaaccacaaacaatagcatgagtgatctgtgccttaaggctgtgctactgctgcagataactagcccaacccatccctttatttcagcccatcccttcgtttcccataagggatacttttaattaatctaatatgtatagaaagaatgctaatgagtggcttgctgttaataaataacgtgggtaaatctctgttggaggctctcagctctgaaggctgtgagaccccggatttcccacttcacacctctgt

SEQ ID NO: 204995 - DNA, 384 bp, Homo sapiens
agaggatccccacagcataaactattacagcataaactattacagcataaactattgagctatcattttattttgttttacctctgggtgccctgggcacagttccctattctgtgcctactctggggacacatatattaggatcagaggtggcaagactatctgtaaaaggaaattgaaaagacatttaaaaacctaaaggaagattagtgatttcccagagaaactcaatggcagatgtcactggaatcaagaaccattgctctcatgcctggaaaacctgtttccaaaatgttcccttttgctgccaagggatcagctgctccagtagctcagcatcttggcaattgtgggaagaggacagaggtgaagaatctctgggct

SEQ ID NO: 204996 - DNA, 206 bp, Homo sapiens
gcagccttgagggtccttgagacattgttatagctcgaaaagttcaagtccaggctgaaaacattctatttgtcaaaggcagtagatattccaaacctagcatggtagcccacacgacctccatatttcgactaaaagattttataattctgaaattaggcatgatgcctgtattaaggaggttaagtggaagaagaaaaatatca

SEQ ID NO: 204997 - DNA, 344 bp, Homo sapiens
agttaaaggaaagcaatgttatgtcgagctttcagtaattgcttgtgtgggctatctatagtccctggatggaataatgcttgagtagatgaatacaaatacatgaatgaattataatatttagacaatgaagattgtaaccttatttttagcataattccctaaagctatttgtgttatatgttcgaatacatttcaatatgaacttggtaacagtcatttctattttaagacttcagtgacctgggaggagaaaataattggctctggtggttatcattactagattttcctttgcttggaatctaggcatgtgtctttcatctgttggaataaaaacatta

SEQ ID NO: 204998 - DNA, 411 bp, Homo sapiens
cacccattttaaatggcgtgagagaacatcaaaagatgaaaacttatggccaataaactgattttggcctggtgtggtggctcatgcctataatcctagaactttgggaggtcaagacaagatgatcgcttgagccgaagaattcaataccagcttggtcaacatactgagaccccatctctacaaacagactttttttttttaaattagcagggtggcacatgcctgtagtctcagctacttggatggctgaagcaggaagatcacttgagcccaggaggtcaagactgtagtgagctgtgatcacaccactaccctccagcctgggagacagagagaccctgtctctccccaaaaaaggggtgggtaggttttgttttaaatccaactctaagtattcttatctgggtg

SEQ ID NO: 204999 - DNA, 634 bp, Homo sapiens
ccctagactcaggctggtctctttgtctttccagcagctgtgactcaggcgggaagtagtgagtggcaggacaagggtgtggtgctggcagccaggcaggaagcagggggaacaacgggacagaggcaggggcacagcccaggagcagctccagcagagaagggggacaggagcagaggtgggtggagccccaggatggcatctgggtggaatgggtggggtgaagagctctcgggcagcccacaggctaagtgccctggcagctgtggggtagtagcttcactctccccatctctggctgggtcctctttccatcaggacctgagggatgccccctaccagataagctggcaagaggcttatctgtgagttttgcacacacccagctcccctcgcacctgcctctcagaggggtggctgagtccagattttttttttgaaacacagtctcgctctgttgctcaggctggagtgcaatagcatgatcttggctcactgcaacctttgcctcccggttcaacctctgcctcccggttcaagcaattctcctgcctcagcctccccagtagctgggactacaggcatgtgccaccacgcccggctaatttttgtatttttagtagagacagggttt

SEQ ID NO: 205000 - DNA, 336 bp, Homo sapiens
gcaacctctgcctcccaggttcacatgattctcttgccgcagcctcctgagtagctgggattataggcgcaccaccacgcccggctaatttttttgtacttttagtagagatggggttttgccatgttagccaggctggtctcaaactcctgacctcaggtgatccgcccacctcggcctcccaaagtgctgggcttacaggtatgagccaccacacccggccccacttgctttaggtttagttgactcctgttgtccaggatcttaagacgaaaggtcaggtcactgatttgagatctttcttctcttgagacaggatctcgctctcggaagtgg

SEQ ID NO: 205001 - DNA, 521 bp, Homo sapiens
gaaggagaagtggcttggagggtgttggtgggaatagccaaggtatgactgtgatttcaggtaagataatttgaggagctgacaatttacctgcgtggaagtatccagcaggcatttgggaatatgtaattggctcctgaatcagacatgtcagtgaggtgatactcatataggagtcagttacctaaaagtgacagctaaaccttatgaaggcaatgaattccaggttagtgcagagcctctgcacagttccaaacccaggggatgctcttctcattctcttatctgaagttaagctccagggcttatcattcacataaactacattatgaacaatgctgtttccatctctctatcatgccagatgtcatatactagatgaggtctctcagaagagctagacagaagtataaggactcacctttatatatacaaagtgaggaacaagacaatatgtacaaggactcatattaacatatgcaggatgaaaggggaaaaagaggtcagttaattggttttaa

SEQ ID NO: 205002 - DNA, 602 bp, Homo sapiens
gatttccttaatagagaatacttctagctagctagcaagttcaaacttttcccagtttttagcccttcattctgcctgtttttttggagctgttctacttctgactgaagttccctattcttgggctgagctaaaccatctcctggattcctgaactctgtcttcttttggcctttaatatcaaagaccttttctatctttatttttttcctggaaggcttctgtttttctcctagcttcttgctttccctgtgatcttttgtgcttttagaatagatctttttccagatgttctcccaggcccatatatacccaatgtcaaatcactttttatgtatacaccaaaaaggcactcaatattaggacctatcccatatccaggcacacagtagggaaccgtactccaaagtgactatctgctaggccagaaaagaccaagataaccttgttagtctccttaccacttagaaatattgttatggttttagaatctatttttacaaaaatggttttctctaccatatataaatccatgaaaaatattgatgttaatattctttcattcctgagtttagtcaaaatcttggggtaattaatcaact

SEQ ID NO: 205003 - DNA, 503 bp, Homo sapiens
ggagtggggtagattccactgaagaaatgttcccatgccagtcatcttgggaggaagtttgtcctggggtagaaattgagaactcaagatgtggacctttggggtgagaaagaagtgtgttctctctctctctctctctctctctctctctctcaacaaagttgggtctgccctacaagggaagacatgttccaggcaacctgagagaaggggctgggctggaccctgctgatggggaacaagctggggctgaacagctaggtggtcctatgagattatctgggtaccaacctgggctctgagaaaatccacattggtcactgtgttgagtatgtatttctttgtattttattcttcttccatggtgcccaaatttaatcagctcctgctagacactgcatctggtttctgttgagtatgatgcactgaggggaaggctctggccatgcttggggctgagtggccaccataccttggccttgccatatgcaatagaacttttc

SEQ ID NO: 205004 - DNA, 548 bp, Homo sapiens
tttgacctgacagcactgggtggtagggaaggtattgtctggaggagcagggttgacagtgccaccgttccctcatacgcctgcagggctggggtttggggcagcagtaggtcaagtctggttcctcaaggtctcctattctcagtagcaaaaagcagccggtgggggtggggtgtaatggcttaaagctttcaacagctgtccccactgggcctacagtcccctcatctttgtttcaaaagccgctcaggccctgttgtagccagaattggaaatcaatcagtgccacctaaagacttgagaaaacacatctatttattatctatgtgaccaaccgagttgctttaacactcgttaatttgcatttccaaggagagcaatttagttttaattatttgatcaggcacacacgtcctctccaaacataattagttccttcctaaggggattattggtggctatgagcactcctactatggacctaccagttccttaaactcatgtcccttcatagcctgatttaaaatactccaaatctttccttaaac

SEQ ID NO: 205005 - DNA, 525 bp, Homo sapiens
tgtgcctcgcccatttcccccagggcattcgccattctgctgtatacccacagagtcctgttgcaagtacctgagactctgcctgaggacttctcttggtttgtgttggcacaagctgagagtaccagggagttagtgcccctgggacagctctcagccagtggaagtgggaggatagataccccagcttcctcactcagtgagggacaactctaaggcacattctacctatttctcagggttccctgtgggagtgaacctctctaagctcccagtaacaattaacgtacacttccttggcttctttctcttcctacctggcttccagctcctcttctgtattttcctgatcaggactgggactagggtgatgagcctttattcttgggttcatctaagtgcaaggttggcacccgtatgaacctgagagggtctctttacattctgtaccctaggcatatcatttgcattgccctgattctggccctgtcctggatcacttcccaaataaagttatttgcattc

SEQ ID NO: 205006 - DNA, 1126 bp, Homo sapiens
gcaggatgcccgatatggagagatagtgagtaaaatcgagcaagcagaccagagccagatggcagggcaactgtgagacatttcaagcaggaaggtgaaatagaatttcctttataagatagtttctctgttgtgagagcaccactgaggtagggtgggaatgaattcaagaatttcacatagggccaggtggggtggctcatgcctgttaatcccaacactttcagaggcagaggcaggaggattacttgagcccagtagtttgagaccaccctgggcaacacagtgagatcccatctctacaagaaaatttaaaaaaaataagggaatttcctgtaggaggacagtacagtaatccaggaagaaaagatgaatggctcagctgagacaggacagtagggctgggggaaaagtgctggcgtggagagattatggagacagaaccaacagttctcagctggcatttgggagtagaagcaggctatggtttaatcaccaggtttctgtcttgggaaaacaagacatggaaaaagtgttttgggtggaagaagatagtgaaactggcttgagactttctgagatggagatgtaggtggaacacttaggtggatatgtggttttaaaaaaaatgtctagaccaatagaaatatattgagcagcaaagagaagccacctatgtaatttttaatgttctatcagccacattttaaaaagtaaaaggaaacagatgacaccaacttttataatatttttaacctagtacagccaaaatatgatttcaacaagtataaaaaatagtaatgatttccttgacattcttttttttcgcatcttgtgtgtattttgcaggataacacatctcagtgcaagcaaggcaggtgcccgggagccacatgtagcccgtggttgccatgtagaccttcagagagaggctgggcaggaggtgtctgctggggatggactaggataaaaaccttctctgaaggtacagatcaaagattgctgaggcagggagggtgcagcagaggtgagcttgtcccagtggcaggagagaggaaggaattgccgaagctgccccgacctctttcttctatttttgagggtgtaggatgtgagattggagtct

SEQ ID NO: 205007 - DNA, 641 bp, Homo sapiens
cttcgtggcctcccaggtttcgccctgaccctgtctgggatggacggaggccggaccgcggttcgtggcgcctgtgcagagaggggcagcctcccgcgctgacgaccctggaaacaggatagatgggcgggtgacctgtggccacgtacccacgagtttgggtccgctgaggcatctctccaggcctctgcctgtaagaagaaaaagaggaaagataagaagagaaaaagagaagaagatgaagaaacccagtttgatatgttggaatctggtgaacagtaacaaactttggtgaaatttcaggaaccatagccattgaaatggatgagggaacctatatacatgcactcgacaatggcctttttaccctgggagctccacacaaagaattgccctgaaatctggctatggaaaatatcttggtataaattcagatgaacttgttgttgggcgttcagatgcaattggaccaagagaacaatgggaaccagtctttcaaaatgtttaaatcgccttgggccacaccgctgtgttccagagctcaccaggagccatccagatgagagaccacccagcccttgtgacttgactaagaaattaaatccatgttatcagcacgtttttaactggatgtgatataa

SEQ ID NO: 205008 - DNA, 681 bp, Homo sapiens
tgacattccagatcagccaacccaaccttggcaaccaagacagtagcagatgtcatggtagatccacttcctatcagagaaggcagacccaggaacaaccagtggcagctgggtagaggggaagatgtcaaaacagaagtgtcacaaaagaaaattaaatggctttggccaaataaaagagaaaaggacactcaaacatgaaaggaaactcaaggtttcttgcctgcaggatggcaaatttgatgttggcccatgaagaggaagatggttggagaatacacgtgaatgaacctgactatattcttaagagaaggtgtaaggtgcttgtgaacttgtgagcaggggagccacagagtgtgggtttaatggtgcagttttggcaccagactgcctggacccaggtcccagtcaccacttattcactgtgagaccttcagccaattgtttaacattcctgaacctcagtttcctcacctgtaaaatgagaataatagtagtacccatttcataaagctattgtaaaggttaactggatgacccacagaatgtgtaggttggtgtctctgttctttagtgggtgcacaaaaatgtaaaccatttattaatcccattattactaatattatcaatgttactgggaaaggacctcagaattcaagatgccattaaatagaattcaag

SEQ ID NO: 205009 - DNA, 364 bp, Homo sapiens
gcttgcttctagactacctgctttttaaaaatgtatccttttttcttaggtgatgtgaaagcctcaatatctggggctctaaatatcctctattttctaataattctaaaatctccatcttgggtatttcctctgagcaatagatctgaatgtccaaatgtctctacttctatgcctcacagatatttctaacttttattttatttttttgagacagggtcttgttctgtcacccaggctggaatgcagtggcgtgatcttggctcattgcaacctccgtctcccaggctcaagtgatcctcccacctcagcctcccaagtagttgtgactacaggcataagccaccacacccagctaattttt

SEQ ID NO: 205010 - DNA, 326 bp, Homo sapiens
agatgagatgcaaggaacaggcagtaagagggctttaaaggggttctctactcttcctctcttctccaacaaggacacctaacattcttccaccatatgaaaatcctctattgtctactccaagacgcttcaacatcaaaaggatcccagcagacacaggatatattttaggtgacttgcaaatttaagaaaacttaaatcttaatacaatcttaatacaaagctgcttttggcagaagaactacatatacaatatacacttaggaaagagtgagagaggattcacccagaattgaatcaatactgactggcctgcagcagcgcat

SEQ ID NO: 205011 - DNA, 526 bp, Homo sapiens
tctcgactatactgatatactgtgcaatcagcttggcatctgggaaatgttttgctgtctgcttcatctccagtgccttgaacagtacatgtttctctggagcccctgcaaggtttgttgaaggagggcatacatcaggtattccataatttagcaacattccataatgtggctgctagtaaatggttggttcaggatttgaacccaggtcctctgtgtcatgttctaaatgttgggagaataaatccctcccttgtctcagtgaagatttctaagctgccctgggttgttgtgtataggtgtttagcttatgggatgggactggaaggtggtgtagggacacaaaaggaattaaaccatgtaagttcaccttggttggcattttcatttctcctttggatatcaagcctgaacaatgattctcaaagatatgtattaaattcaataaggatttactactactgctcacctattaagtgcgaggaacagttgcacttagtaggaataaagaggtagctggcacaaa

SEQ ID NO: 205012 - DNA, 442 bp, Homo sapiens
aaaaaagagaaaacacacacgtacacgtacaatctccaaaggacacaccaaaaactggtaataaaggccatccctgagagaaggaaggagtaggagagcccaaatgaggtcatgtgaagggaaaacctctcactgaatatacactgtatacctttttcacataaaaagaagttttaccagatacatgtattatttgccttataaaaaatgtcaaggtcatatagattcactcagcttctcaacaaacattttagggatgttcagttgaactctctgataaagcttctgcaatagataatcagaagtctacagctgtctaattggcaggtatttattgccttcagcctaacttactactagtttgtcttagtgccacctaaatgtaaaatattaaaaatcccctctcaggaaagcattcctgactccctaatttggcttaagt

SEQ ID NO: 205013 - DNA, 187 bp, Homo sapiens
tctgtaactttacccatattctaatgctgcaccttctagcagaagattctgtgcatcctgacatgcatgtgacacaaatacactttgagtcttcttcctgtacctcctgatcatggtcccattaaacctgggcaaacaactgaactaactagtcagaattgggtagcacagactgggtagtcacaga

SEQ ID NO: 205014 - DNA, 370 bp, Homo sapiens
aggccactggcaaaagaagtgaggtgaatcctgattttccatttatttgctgagtgactctagtcttttttttccctctctttgtatacctcacaagattaatgtgaggattagacaaaatgacgtatgtaaggcacttagcacagtgcttggtccatgttagatactgaataaatgttagtttccttcctactttggttcaggttcaaagacaagaacaatcatctcttctttcctgcttttgtgttgtttttcattgagaatgcatgcaaggtcaatgtgagcagtgagatcaaatcttaatatctattatgaagatgcaataaaacgtcaattttttaaaaaagaattttccatgagtatttacagt

SEQ ID NO: 205015 - DNA, 561 bp, Homo sapiens
tgtaatcaagctcatccagcataaacaggtgtctccatgggcacttttggtcaaaaacaatcagaaacaactgtctaatattgtggctgcctgaggtataagataatatttgaggcaaacaagaagctaactaaaaagcttaaaaagaaaagctgggaaatgagatgtatgcaggggactttgaaaaactctgacatattcctgagaacctagaaggccatactcatgtagcactgtgcacatgctcagaaaagaccagaggaggacctaaactctcacctctgactaacattaaggctttgcacaggcaggaagagctcaagcagagttgtaaattcctggctgaatgttgaaggcatgccccaacacacacatagagccccctggcaaagaccagaggacttacatgttttaggcatccaaggaaatctctgctcattcaatagcttctctgcccattcactcaaccactaagctaactgtgcagagacttcagtaaccacagacaacaaaaaatatagacttcacaaaacaaacaacaaataaccctggggggtgggt

SEQ ID NO: 205016 - DNA, 173 bp, Homo sapiens
cgtcgatctaaggatccccctatgggaagaaggtaggtgagttcagaaaggaaactgagttgggttttgaagaccgagtgggatttaccacatttaaagtagaaaatgtggtaaagagctgggatgaaacaggtgtgtttaatactcattgcaggctggagtatgggaccata

SEQ ID NO: 205017 - DNA, 553 bp, Homo sapiens
ctctttatagcgattgtgtccggctacacatactagactgttcttccctggcacgtcttcacctagtgttgcacaggtctggtcaatgagctatagacagaagtccctgagaggggtgccccttcccagatatagcagtgaagctgtactgggtaaaagctctttgagactcattcatcctttcttctctttcttggaatgcaaacctgaggcctagagacgtagcagccactttcctaccatgagatgataaacctaaggccaaaggcctccattctacgcatggcagagtagaaagaagtagtctggggttcccaatggtacacgggagctatggccaggtttctgaaggtcacgtgtatggggaagggaagactaagactgacagcagagtaaccttgtgcagacgaccgagcttagttcttacttgcaataaaacgagttctgccaaggtttcaggccagggaacagttttgcctcagggccaagcgaagaccatgtccataacgaagtgagggatgatttgcctttaggtcctgtcaatgagaatcca

SEQ ID NO: 205018 - DNA, 346 bp, Homo sapiens
tacttagaatatatactgtggatatacaaacataaattatccagaatataagtacatggatattctttaaagtatttttttgtaatcaccaaaacattagacagaactgtccaacatattgtgataatgaaggtaaaatatctttattcttaggaattgcatgctgaagaatttagggagaagagaaatatgacaaaaatgctaactgtgttgaatctagatgatgaacacatgggtgtttattgtactatatctgtttttctctatgttgaacattttcataaaatgtttaaaaaaatagttcattgataagatattggacaaataaattataaaatggtaaata

SEQ ID NO: 205019 - DNA, 523 bp, Homo sapiens
taggaagtagtaccaaacactggtgcagcaacctttctttttggtttctgtcacaccttgtggcacactctggttgttcaggctcctgattctttgaaaaattactttggctcctggccattcagaagtggatcctcactttctgttacttggaccaattttgtcctaagtagttagaattagttagaagttactagagtgaattgctttatgtctaaaaaaaaccaaatgaagtcgaattgtgtagagaatccagatgaaggtctgttttgcattttaagatgggatatctaaggatctctggggaaagggtgaattagtcaatctgtggtactagcacaatgagcattttgaaaaagatttatttccatacttcatactaaacacaaaaataaattctaaatgtattaagtttatatataaaaaaagtaaatgtactaggtgaaaatatgtaaaatattaaatactaaaaatattttcatattcctggaaaaagatatttgtaagcataataccagaagcc

SEQ ID NO: 205020 - DNA, 489 bp, Homo sapiens
cgatcagactagtttggtatcagggtctgtggccttgtagaatgaattaggaagaattccctcctcttttattttctgggatagtttggaaagaattggtattaattcttctttaaaggtttggtagaattcagcagtaaagccgtctggttttggatttttttgttgttgaaagaccttttactactgattctctctcatgacttgtaattggtctatttgtgttttcttttccttctgggttcaatctttataggttgtatgtgtccaggaatttattcatttcctttaaattttcaaatttattggcatattgttgttcatagtactctctaatgatcctttatatttctatggtgtccattgtgacatatcctcttccgtttatgattttttcaaatttgagtctctttttttctttttttctgagtttcactaacgttttgttgattttgtttatcttctcaaagaactaactttctgttgatc

SEQ ID NO: 205021 - DNA, 582 bp, Homo sapiens
agttctcattttgggccacaggtttcaggctttttggtttgaagttggggtttcactgggaacccacccctgtctgcctagaatgtctctgcttcctgcctctatcattgaacttcagatatataaagaagttattctatgatatgtcattgactaagcattaattatgttgacccttttagtgactataaataaagagctctcaacaaacctatacctttaaagggaagaaaaactatacctgaattacacatgataatttcttagaaggcattaagtatttaatcatatctgaggagaatttggaaatgaaaccatttacagttgcaatttaaccagctctcaagagcattacttcctgtagcttatatcagtgctcctcaaactttaacatgcatacagatcacctcaggaacacttgagggtctgttcaaagtgaagattcagtagatggctgttgggacctgggattctacatttctcacaaactcaggtgattgtaattttgtgaaccacactttaagtagcaaagcctatagtatttacagttataaataaaggtaatattttacatttctaaaa

SEQ ID NO: 205022 - DNA, 292 bp, Homo sapiens
gtaagatgtttctgtatgttattacggttgacctgtatgaggaaaatgtggccttacccagaatgaagttgaaaaatggaggactaattcctggctaacaaggtgaaaccccgtctctactaaaaatacaaaaaattagccgggcgcggtggcgggcgcctgtagtcccagctactcgggaggctgaggcaggagaatggcgtgaacccgggaagcggagcttgcagtgagccgagattgcgccactgcagtccgcagtctggcctgggtgacagagcgagactccgtctca

SEQ ID NO: 205023 - DNA, 266 bp, Homo sapiens
cacggccggctcccccgccgcaccgcacgcatctgtcgcagttaaaagcgccgctgccagagcaaaagcgccggtccctcttgactgtccccctcctcacttttcgggctcagaaatgtggcccaggcagcccccttgtggcacgtgggggcgccacagactcttggctggtgtctgaagaattcagactgtctgattccaccgcaccgtgagttggcacaaatcttcggtggcccaactcctacccgatgcagaactctgctcag

SEQ ID NO: 205024 - DNA, 482 bp, Homo sapiens
acttctattagaaagtctgtatctaagctaacttcattagatttaagtagataaaagctggaactgaagaaatgaagaaaggggatatgttaaaactgatgcattgtcaggattttcccagttttctctttttggctaatttagaattcacagagtaacagcttatatctgttcaattaaagggtcagttaaagagctggcacctcaaaaatgtttatcagtctgtgttacgtaattaaatatggaatctattcagacaaacgttaaaaatcagtccaggggaaaggaagaattttaataaattttgaaatacaaatcctaaacagttctttttgaggatgtgatactttatgtcatcacaagagactggagagattagaatgaactggtttaaagtcttaaaatctaagcctggaggctttctttaatctgcatgcaagactgtttaacactgttgcaactgcaattaagtactagactgt

SEQ ID NO: 205025 - DNA, 717 bp, Homo sapiens
tcggcccctttgcctacttgacctcacagcagcccagcaaaccgggtattattaggctgaaacatagcaagtggcatttttgtaagtcaaaaatgtctggctattcgcaatttcacgtggctcagtctggtattatgctccccattttacagatgaggaagacaatggttagagaggttaagtaactcgttcagagtcacgccgctggcaaatggcaaagccaggcctgagtggagcttcttctgactccagcctctggctctgaagcacaggctcatccaacgggcacagggtgcgccacaccatctcctctgtcctccctccgaggaccccgctcttgtagtcaccaagttcttccttatgcctggtctaaagtcactcatttcttcattcactcgacaaaagttcactggtcacctactgtggacaacgtgtgcgccttcagtgaaccccagtgtcatccatgctgtttagatggaggagacaatttgggcaatgtccttaaatatccgcgcgggagctaatgaagcctcctctctagctctctggtatcttggctgatctcaggttctggtagctttctctaacaaacactcatctaactgaattgtaacccagaaccctttatctcccctcctggaagaaagtcaccaaaaggcaaatccaccgtggtaagtgcgttcgcacccagggtgaaagctgccctcactgacccaa

SEQ ID NO: 205026 - DNA, 430 bp, Homo sapiens
agagagaattgggagggagaaaagtcaataaagggtggcgaatgagaggttatgctgtgggcatacagggctgaatctcactggggaccctccaagcaactcaataaaataaacttcagaagtgccaaatcaggccaggtgcagtggctcacacctgtaatcccagcactttgggaggctgagccgggaggatcccctgaagccagaagttagagactaacctgggcaacatagcaagacctcatctctacaagacaaattttgaagttagctaagtgtggtggcatgtgcctgtagtccctagtcccactacttgggaggctgaggtgggaggatcacttgagcccagaaattcaaggtttcagtgagctaagattgtaccactgcactccagcctgggtgatgggtgacagagaccctgtctcaaaac

SEQ ID NO: 205027 - DNA, 554 bp, Homo sapiens
catagaaccacctctgagatactgtgttagtcttctgtggctgctgtaacaaatggccacaagcttggcagcttaagataacacacatttattatgctacagttctggaagtcaaaagtccacaatcggtctcagtgggctcgagtcaaggtatgggcagggctgtgttgctgctgcaggctctgggggagaatctgtttgcttgccttcccaacttctagaggggcccacatgccttggattgaggccccatcctccatctttaaagcactgaatcttcagatctttctgactccagcctctgcttctgtcctcacaatctcttctttctcctgcctccacttatcaaagacccctctgatgacattgggtccactaggataatccaaaatcattccctccatcttgagagctgcaacttaatcatgtctgcaaaatcctttttgctatgtaaagtaatatacaagttcaaggattagggtatgtgcatctttgaaggggagcattattttgcctaccacaccctgaagggaaataaggttcacagcagtatg

SEQ ID NO: 205028 - DNA, 329 bp, Homo sapiens
gggtaatggggcctgttatctgcctccctacagaagaaccacaacgagtttcctttaaaagccagtttcctggccaggcgcaatggctcacgcctgtaatcccaacactttgggaggccgaggcgggcagatcacctgaggttgggagttggagaccagtctctactaaaaacacaaaattagccgggcgtggtggcgcatgcctgtaattccagctacttgggaggctgaggcaggagaatcacttaaacctgggaggtggaggttgcggtgagccgagatcacgccagtgcactccagcctgggcaacaagggcgaaactccgtctc

SEQ ID NO: 205029 - DNA, 362 bp, Homo sapiens
gacctaaagttaatctagaggaccccccatcacagccaatagccagcaaagtgaagcctggaactgaacaaatcccccatggccatgccacctgtccagtcccacgtcttgcggataaacggactgccctgcatcctgccttcagtgctagtggggccaccagactgccactgcctccaggtgttcccccaaagcaccctggaatttgcaggcaacagaataaggacatttgataagacatttaagtccctgggcagtaataggagaggggaagcgaattaggctgagaaagcaggagaaagatgtagaatgggtcagtcgtcggcccacatttagtgcaggatggcctggaagtgaatgct

SEQ ID NO: 205030 - DNA, 317 bp, Homo sapiens
agtgtccaacacttgattgaaaatgtggattttgtcctgtggtgagatgtaaaaataaactcagtggctatcctcatgcagttccttgcaaaagagcagtggaaagcagctgtcagccttgcccaaaataaaccatcaccctgtatcttgggaggcatatcaaaggaaattgggcaaaacattcaaaagaatccaagagtgggagacacaatcttacaataactgggaaatgcatcaacagtctcatgttttctttgtctttggtttaattttgctttttgtgtgtgtttccttatttacaaaagaaagaatgagaa

SEQ ID NO: 205031 - DNA, 626 bp, Homo sapiens
gcctccgatcacaaaaagatcaaattaacatgtgaaaagatattccaaggagctgtgggagagaaaggcttttggctttcaccatcttacctactggatgggtttgaaagcataaaataaagctaaactaaattcagggaaacattgattcacccaagtgaataaacaacttactgcatttgctaatctaattaatcaaactctgcttctccttttccaaaggagattcacaggcagtaaaataaattaaatcaacattttttttttcccacttactaaaaataagctttctttccctgggtaaatcggtcatttaaattcccaaggctgcactcccgtagtcctctggcaggaagcaattgtatgggtataaaatcatttctgtgcagattgcagagcttgggctctgagcatcatgtctgagttctgccacctaaactgatgaataagatcagttttaactgaagttatctttagaaacaaatggcctatggatgatgttgattagcagataaaaaagcctgttacatggatgttttatgaaacttaaaactatattgatggcaggaaacaatgattttggaggaaatcctggaaaattaaggatatttaaagtttgaaaacaa

SEQ ID NO: 205032 - DNA, 6435 bp, Homo sapiens
ctccttgcggctccatcattcaggccttgtcatctctcacctggactgctgtgaccttcattcattcccaggagaagtccagaaatggcttcagacatacctggatctgtgacgttgcccgttgcccccatggcggccaccggacaggtgaggatggcgggggccatgcctgcccgtggaggaaagcggcgttccggaatggacttcgatgatgaagatggtgaaggccccagtaaattttcaagagagaatcatagtgaaatcgaaaggcgcaaacggaacaagatgactcagtacatcacggagctctccgacatggtccccacatgcagcgcactggctcggaagccagacaagctcaccatcctccgcatggccgtctcgcacatgaagtccatgaggggtacagggaacaagtccaccgatggcgcgtacaagccttccttcctcacagagcaggaactgaagcatctcatccttgaagcagctgatggatttctgtttgtggtggctgctgagacagggcgagtgatttatgtgtctgactccgtcacccctgttctgaaccagccccagtcagagtggtttgggagcacactgtatgaacaggtgcatcctgatgacgtggagaagctgagagagcaactgtgcacctcagaaaactcaatgacaggccggatcttggacctgaagactgggacggtcaagaaagaagggcagcagtcatccatgaggatgtgcatgggctcgcggcggtctttcatctgcaggatgaggtgtggaaatgctcctttggaccaccttcctctaaacagaataaccaccatgaggaaaaggttcaggaatggccttggccctgtgaaagaaggagaagcccaatatgctgtggtccactgtacaggatacatcaaggcctggccaccagcaggaatgaccatacctgaagaagacgctgatgtgggacaaggcagtaaatattgcctcgtggcaattgggagactccaggtgaccagctctcctgtatgcatggacatgaatgggatgtcggtgcccacagagttcttatcccggcataactccgatggaatcatcacatttgtggatccaagatgtatcagtgtgattggctaccaaccccaggatcttctgggaaaggacattttggaattctgccaccctgaggatcaaagccatctgcgtgagagcttccagcaggtggttaagctgaaaggccaagtcctgtcggtcatgtatcgatttcgcaccaagaaccgggagtggatgttgatccgcaccagcagcttcacattccagaatccctattctgatgagattgagtacatcatctgcaccaacaccaacgtcaagcaacttcagcaacagcaggcagaattggaagtgcaccagagagatggattgtcatcgtatgacttatcccaggtccccgtccccaacctaccagccggtgttcatgaggccgggaagtccgtggaaaaggcggatgcaatcttctcccaggaaagagatcctcggtttgctgaaatgtttgcaggaattagtgcatcggagaagaagatgatgagctcagcctctgcagcaggaacccagcagatctactcccaaggaagcccatttccctctggacactccgggaaggccttcagctcttcagtggttcatgtgcctggagtgaatgatattcagtcctcttcttccacgggccagaacatgtcccaaatctcccggcagctaaaccagagtcaggtggcatggacagggagtcgtccgccctttccgggacagcaaatcccatctcagtccagcaagactcagtcatctccctttgggattggaacgagccacacctacccggcagacccctcttcctacagccccctctccagcccagctacctcctcgccaagtgggaatgcctactccagtcttgccaacaggactccagggttcgctgaaagtggacaaagtagcgggcagttccaagggcggccctcggaagtctggtcgcagtggcaaagccagcaccatggccagcagagcggtgagcagcactcccaccagcagcccagtcagactgaagtgttccaggacatgctgcccatgccaggagatccaacccaggggactggcaactataacatcgaagactttgccgacctgggcatgtttccaccgttttctgagtagctgcggccagagtgaggctcctgctgtacagtgccacccatactgtgatgtcgatgcccatgtgaatgaggcccaccctcgccctgcttgccctgccgcaggccccccaccagaagccatctcccccgctgtgtgtccccaggcgcatcatcgctccactctcccctgcagccgcggctgctcggccactgaccaggggccctggcagacattaggggatcagttgtatttattgtattttatctgtgtgtgctcaggaggtgagcctagtgggtccttaagtttggttgtgaataatctcttgatagacaatttatacccatgaaagttcagccaatgcccagagtgaccaagcagcaccagcaggcctgcccaggatgctgaaagcagatttcttcttgatttcacttctgatggatgcatggggctctgggggaatgctgggaaaatgggcaagcagagtgcacagcccttgttctgccagctggagccaagaagcacagagacacagaggcacctgcccctcagctccgctggtctgtctgtgcatccactgtgccgtgggacatatgtaatttgtgcagtgtgacatggacttgctgtcctaatggatgtgttgtgccttgtgtctgtcatgtgtggccagcgtgattgtatagaatccagagtatgtagagagccaaaatgtgtggccctgtccccaagctcagcaccaccggccatgaccagaggatgctcggcccagggtctgggagctgggctaacaggctgacacttcggcagggtcaccaggaggcacagctaggggcatgctcacatgggtaggtcagttctttggtccaagcctctggtgcagattcaagctcctcctcttagaggaagcagctccttcctcccacaggagccccaagggagcactcaccctcctcccaattggatctgaatagctgtgttcctgatcccacataagcatgtctcatccttgccccactggtgagaggaggaccttgtgcctgcccagagcctgcaggacagcacgccttgaggtcagaggcctggcccttctttacagatgtagatagcagggtaggacgcccaggccttctcacatgggcaccatgaaacactttcttccaggccacctgagccttcgttcttcagcccgactggaggaacagcagctctgggaggcacagagtgcaggtctcaggggcagaagacatgggttccagttctggttctgccacacacccaccggccttgaatttctctggtggtctcaagacaagaacaagagctgactctagaatcttctgcctggctgacctctgagcccatgatccctggcttgctgtgcttctcttggatttgaggagagtttatgaatccattcccctgttttcagggacctctgccttctcccacaccccttacactagtgaggactccttcggcctcttgtgttttcttccttttgtgaccattacgccccctccctgtttcttatcaccagcccatcagcccactgactcccatatggtagaaaaggtaccgtggctgctgcagggcacatggagggacctaccctctgggaaagcccttgtgtccctcccagagtccttcaggtaggccctcgcagatgctgcttgctcagaaacaacccgtgcatccctgcccatggattctgcaggacctagaagagtggcattggttctaggaacctgagagtggagtgaggccagcatgcaggaaggagtttggagagagtgtttgctgtgatccattgaaagctccacattaaaccccagccctgtctggccagggagatccatgtgctcaatgttgctgggggacctacaaaagtcaaacattgctcagtaaaatgcctttggctggtcgccagctgtgcatgactgcagttcctagactctaacttaaccccaactttgcagtttctagagctttttgtctgtaatggtgattgggtctccactgtagatgcatgcagtgttcactccaacctcagaggctttcttgcttctggggaaatggcaggtggttgaaaccctgcacatcctcccagggccagccccagaatgggcctttctctgcctgccctgcccttggggccacctctgcctccagcaggcttgagcttgccccaggccttgggcataattatttccccccaaaaaaggcacaaaaataggttttggatcaaagaagtgtttctcagtgaaatgaaaacagtctttttatagcctttagcttgtgagtttggaagtttggggggtcttatgtttgttttgcctcttctgtttcttggaggagagttgaggcttttcttaggtgcatacacagacccaggtgaacacgctgactgtgaacctgccctgtatccggagctgtgctgggcactgaggggatgcaacaaaattaggagaggatccttgctcccaacgtctacttctcctacctcaacaggggtccagggtgcagtgaactcagttcttggcccttgggtgaggattcatggatgaatgaaagctagacctgatggggaggcattatgactaaataggcccagcctccttcccttccagctctgtcctaggagcataggcgggaaatctgagtagagtctgactgcagtttttgcttatgatttgtaaaagccgtcatggggtcaataagaaaataggggtgatggagggggagaagcccaggactgggagaatcgcacgtgccccaggggttttcaccaaggattttcaagacaaactggagtaagaattaaagccccagaggatttaattatcctggtttgcaaaagagcctcccatgccagtaccgcccagccttggaggccggaatgctcatggcccctgtggtctgcttgtccttcagcccatgcccagcagatacctctctgactggagacgggctcaaagctggattagaaaggggagaggcacttgtgactttgtttgactctgtgactcacttcctcgctcacaccttgtttgaactactggactttcaactggctttccttaggtcaggcaagcagacagctccccactgaagaggtctgtacagtgacaacccgggccggcagcaaggacacagatgcagccacagtaaggctccatcaggactgggtcagtgatggcaacaggatggccaaggatggctctagaacactctgtccatgcgtcactccccccagttttatttttagctttggcttcagggagtgacagccatcacaaatagccacattctgctctactctccaacataccagattgtacactgttgttatttcatgagacgtgaatgttgcagagagtggggggattctggttgttaaggaacttacactggggagctttactcttccgtgtcaacaatgtgactacatgttctccagattagccacacatgcaaacatcagtgtccttctagctttagccgagaaagaaaccagtcccagggaatgaatggtggtctccccactcccggcagcactttaggcagcccataagctatgcgagaatgtgaacgctcaccttgctccgtcacggttctgacctaccacataaacaggaagaagccagtgaccggaacagctctaggaataacaagtcagaatagaagtgtcctttatattaccagaaaatatgggcttggcctaagtcgctgtctcctaacctgccggggtcattccccaccaaacaccccatactaaggagccatgagccacctggacattcaccttttctttgaccatctggagtctggggcaacttaaggaggcaccacacagtggtgcaggcacatttccaagcgtaggtgtccctggcttttgtggccaaagctagtgttatggtcaacaacaggccagggtctgtggggcactgaccttgaaagtggcaaaatggaggtttcacaggctgtgcgggagcaggacggcttgcttcatctaacaatctcagtttcctttaaaaaaagaaagaaaggaaaagatttcataagcaggtgtcagtggacagtttaagcacttaaccatttctctttcttcttatggatgtgaactgtgctgtggataaatcatttgtatttcttgaatgttctctatgactaacagttattaagtcggttgtgtatatgtgtaactaatgtaactgccttttaaaatttcattacaataaaaatgactttgctctg

SEQ ID NO: 205033 - DNA, 751 bp, Homo sapiens
catctcaaggtgctggactttttgtcctccaaattgaggtttgcctttgacttaatggaaaaactttcttctggtgccacaatagccatttcattccaagatggattgcaatgtgaagcggtctttttccatttcatgtcccaaacctcagcacaattagttttgaaacaaatgtcaatagcttctgagggaggctgtgggtgtgaggctggagtatcagcggccagccacagagaaggactcagaggttctgattgtgcccatcgtgctaagacgtcctgtgattcctgagaggcattaattctggtgcatgttcattgagcatttttgatgcaaagtagtttaaaagacagaaagaagatggagtttgttttaaaggttttaagataaacacagatcagcactgtctcaaaaacgctgtgcatgtttccatgaactcatgatctttctgtcttgacagtctccaatcacgtgtggagatgaccttgccatcccacccacccttcaatcagagtggggacagatgttatccattgaattatatccccccactgagaattcctgtcttaaagtcctaaccccattgtatctcagaatgtggctttgtttggaaatagggtcattgcagatgtaattaattaagatgaggtcttaacttactggaatagggtgggaacttaatctaatctgactggtgtccttacgaaaagaggaaatttggacatagacactctcacacagggaagatacc

SEQ ID NO: 205034 - DNA, 421 bp, Homo sapiens
actttacaccatgcctggttaatttttctagtttttgtagggacggggtttcgccacgttgcccaggctggtctcaaactacttcctgacttttacaccgtagtggtgactatccagggatattagagagtagtatataggcctataaccaggctgaatcaatctcccagggaagatatgcagtacccagctaggaataatctcttgcaacagattgtattttccaaagatggtcacaataacatctctgctatagtttggaaatctgaccttccaaacctcatgttgaaatttgatcccctatcctaagtgaaataaaagaaattttaaaatattaaaaaacattaaaaattaaaaattaattaggcatggtgttcaaagttgaacgtgattaccgttgagaagcttcgttgagaagctt

SEQ ID NO: 205035 - DNA, 124 bp, Homo sapiens
aagttgataaacaaactcagattggaaaaaatacaatgaagacacatgctgccaaacagaatatgatgggagaagaagaagagaattttcactggtggaatttccctttaatgtgtcatttttt

SEQ ID NO: 205036 - DNA, 192 bp, Homo sapiens
gtaataaaagttacttaggtttattgagtttccttctaggagttaattctttttcacaggttaacattttttttataaaagacctgtacaatggccctttgcataggaaatataatgaagactcagatattttgctgcaaatatttattttcacctgctaatgataatttggtaatatttgaaatactttat

SEQ ID NO: 205037 - DNA, 485 bp, Homo sapiens
  misc_feature (394)..(394): n is a, c, g, or t
  misc_feature (402)..(402): n is a, c, g, or t
  misc_feature (407)..(407): n is a, c, g, or t
  misc_feature (414)..(414): n is a, c, g, or t
  misc_feature (425)..(425): n is a, c, g, or t
  misc_feature (432)..(432): n is a, c, g, or t
  misc_feature (436)..(436): n is a, c, g, or t
aagtttcatggagctgagttggtagagcctgcgtgcctgtctggcactagctaagcactccatgattgtttaagattatcttattccggccaggctcggtggctcatgcctgtaatcccagcactttgggaggccaaggcaggtggactacctgaggtcgggagtttgagaccagtctggccaagacggtgaaaccccatctctcctaaaaatacaaaaattagccaggtgtggtggcaggcgcctgcaatcccagatacttgggagtctgaggcaggagaatctgttgaacccaggaggcagaggttgcagtgagccaagattggaccactgcactccagcctgggcgacacaacgagactcagtctcaaagaaaaaaaaacaaaacaggaangaaaaaangaaangtcagtngctcagggccnttccaantcanctttcacactcgggtctttggataccaactcagttaagggtaccgagct

SEQ ID NO: 205038 - DNA, 411 bp, Homo sapiens
gcagggtgccacgagatggaggtagagggagaaaggagcaagagagaattgaaggatgaagtgcaagttatcaggctgggttaccacatccggttttggcctgtgggctgtcggtagatctgccttaacctgggagtggcgagggagtgatgcatctgccaaaacgaggagggtcactacatctcatgtctcatctccttgctcagctcatcctagccatgctggcctcctggctgttcctcaaccagctagtcgtgctccccatctcagggcctttgcctggatgctctttcctggagatcttggctatcctgtcaaaacttgtgttccccaccccgcctttatacactccctattctatgtattccttaccattttcagacaggttgcgcgtacaacgggtaccgagct

SEQ ID NO: 205039 - DNA, 548 bp, Homo sapiens
tctgtcttgttggaataaattattatacattcacattggaatactatgctgccatttaaaaagacagtctatactgacatggaaatattccaatgtgaatgtataataatttattcaacaaaccagtatttccaggcatctgtcttgtttttcattgtactcttgtaggcattgtgctgctgggaacatcatttaaacctaacattttctcacatttttttcatttttctccatggggtacatttgtaggtatgggcttgctgagtctagcagaacgtacattacaatattttatgatgttgccagtttgtcccccaacgtctgattgttatgtagtcagatgtatctttctaggcaggctttctccaccctaaaattataaaagtgttcactcattggagtagccagggttcttggttgtaaaaacagaaactgggccgggcgcggtggctcacgcttgtaatcccagcactttcggaggccaaggcgggcggatcacgaggtcaggagatcgagtccatctggctaacacggtgcaaccccgtctc

SEQ ID NO: 205040 - DNA, 284 bp, Homo sapiens
gtagttactgattgaatgtgggaaaaggagagacttctaaaagtatgttaagaaaagaattcttaataaaagtccttgtcacatattaagaggccatacaataaaagtactgcaatgactatctttccctgacaggaatgcacaacaatagttacgctgttgaacagcatcgttacaaagacttcattctcagaagttacttgaaactactctccaaaagagaacctctaccatttaaaagaagagggggaggaaagccaactaaatgaatccatcagaaactt

SEQ ID NO: 205041 - DNA, 461 bp, Homo sapiens
cgtggtgactctagaggacccccaagcagtaatacagactcatggccttttatagctatatttctctttctcccgactctgtacaaactcctttgttttagagtttgcacaaccctctatcaaagcacctaccacctcacttttaaatcttctgcatgtatttctgtcttccttcctagactgtgagcacatctgggacagggaccatatccttttttgtttatttgtttggtttggagacagagtctcgctctgtcggccaggctggagtgcaatggcgtgatctggctataacctccacctcccgggttcaagagattctcctgcctcagcctcccaagtagctggaattacatgtgcttgccaccaagcccagttaatttttgtatttggagtagagacagggtttcaccatgttggtgaggctgatctcgaactcctgacctcaggtgatctaccca

SEQ ID NO: 205042 - DNA, 340 bp, Homo sapiens
actccctaagcagtccattaagtgacaaatcaggaaattaaaaatggcacacacaaaaagcaatgaaacctagaagcccaggtgaatcttatgtctcttccatcttcttgtttttaagggacagggatcttactgtgttgcccaggtctttacaatgacaccatttgacctttctcttctattcctcaaacacaccaagactgttcttgcctgaggacatccgcacaagcggttccttctgcctgactcttctccctggctcatgtcttcaaatctctgctcaaacgtttcctcaccacaggccttcattgaccaccctagactctatcctccttacctg

SEQ ID NO: 205043 - DNA, 294 bp, Homo sapiens
taatttgataccaatacacactactagagtgactacaatgaaaaataatgacaaaaacaaatgcttgcaaggcaatggagaaatacataaattgttggtaagaatgtaaaatagtacagtccctctggaaaacagtttggcagtttgttaaaaactaagcaagtgatatcacacaaccaagcaattgcactcctaggcatttatcccagagaaatgataacttatgttcacataaaaacctagacacagatatttatatcagcattatttctaatagccccaaactggaaacaa

SEQ ID NO: 205044 - DNA, 388 bp, Homo sapiens
aggaatgtatagaaaaggcttaaggaaagcatccaaaggttagaatggccactcacgggagtgggacaggatacagactagaaggtttgctgggcagggagagggcgcaatggaagaggaaaggcccaaaatgtgacacgctcaaacccatcatagtgtggggtttccagcagtctgtgcatggaagtagacagtgacatcaatggagcaactgtttggagttctggaggacagttaaggaggcaagacaggagaataaaagtcagttcagggtgctgtggattacagaatgttgaaaaaaatgaatcatgagaagtaagctaaacaagtcacgggcctgaaggtcttcaggacctacaacaaatgatcaaaataggaataaatgagt

SEQ ID NO: 205045 - DNA, 687 bp, Homo sapiens
ttatgtagagtacttgcatgtgcaagttacaaccgtataaacaaagtagcagtgggtgtgttattctctggtcttttttctgctactcattatcaaaaatagcattccatcgtgtcttgtcttccactctgaattattttgtaaaattagttctctaaaagagggaattctgttggaacatgtgacccagttttttttttttttattaaagcagtccaactttttaaagcgttcatcgattaatttattgtctagtaacttcggagtggtgtggaacattgtaaattcacaggctcagcagtaacaatagagaaactacttgggaaattggaagccaatatcagataatgtttgaaataaaaatctattcttctcacagaatttaggaaataaagacacacaaaaacaaattctttgggttcaagtgatcctcccaccccaggctccgtagtagccgggactacaggtgggcacgactgcgcctagctaaaatttttattttttgtagagatggtggtctcactttttaatttttcgtatagacggctggtctccaactcctggcctcaagcgatccttctgctttggcctctcaaagtgctgggattacagactgagccaccgtgcttggccgtttgtagtaatcttgatggtatctggcattgtttcacctaatatttcttcttt

SEQ ID NO: 205046 - DNA, 540 bp, Homo sapiens
catttgtgtgagactgcaagagacgagacttcttcaaaggaggtggttgctcctccactctgcctgccagtagctctagggaatcctagagtagtgttgtctgaggtcctgatttttcaaggggaaccagaaattttgatttctgtgatattttaacatttttaaatgttagcactatttggaaactgtctaaagtctgcatctggcctgtggcctgacatttggctgtctctgctgaagttccacacttccactttattaggagacaaagcctatgaacctcattctgagcatcaaatgaagcttgtagttattaattgtctttattatttggagaaaatactattatttagctgtaagtaaaggttttatgtagcttacatggaatactattgatatttgtgcagtattttcaggaactattctaagtactctatctgtattaataaatttaatcctccacgactctataaggtaagtactattaatgtcccagttaacagaaacggaaatggaagcatggctgaaattaaataactt

SEQ ID NO: 205047 - DNA, 397 bp, Homo sapiens
caggagaatgtaatgcctcagttcattttcagttatctttgattatatgtgattgacaatgtgtatttttgagggagcaaagatttctgtacatatttcttaaaaatagtttattcagctgggtgcagtggctcatgcctgtaaccccagcactttgggaggccgaggtgggcggatcacgaggtcaggagtttgagactagcctggccaacacagtgaaaccccatctctactaaaagtaccaaagttagccgggtgtggtggtggatacctgtaatcccagctactcgggaggctgaggcaggagaatctcctgaacctgggaggtggaggttgcagtgagccaagatcacgccactgtactccagcctggacaagagagcaatactctgtctca

SEQ ID NO: 205048 - DNA, 913 bp, Homo sapiens
caaaaaacaaacaaaaaaatcaaaacaaatggtttagtcactttgtaacctggacagaggagtgaacatatatgaaattaactttctttggtcttttaagatttattactaagatttaactagagttaaaactttccttgtcctgttggccgggtgccttggctcaagcctgtaatcccagccctttgggagggtgaggcaggtggatcacctgaggttgggaatttgagaccaacatggcgaaaccccgactctactaaaaataacagagtagctgggcatggtagtacacgcctgtaatcccagctacttgggaggctgaggcaggagaattgcttgagcccaggaggcagtgattgcagtgagctgagatcacgccactgcacgccagcctgacaacagagcgagagactctatctcaaaaagaaaataaaagctcttcttgtcctgctaattctgcattttgatttttggcagcatttaggaaagagctgaggtggacctggtgtgtagcgttggtgggagttccttcgttttctgggctgaatgatttaataataatataatagtggctttcattaatttcttactatgtgccaggaatggactgtgttaagcactttatatacattaatccacttaattctcatgataaccctgtgaaatagattatctcattttgcagaggagaaaagtgggtctcagccagtgaaataacttgctcaagttctctcacccagtaaatggtagagcagtcatttatgtgtagctctgttggacttcagaactccagctcttaactcagtatatacttttccttcacttccttgaatagaactgtttggcttgagtctccttttctctaaaaactcctagttctggaatggtgccaacttaaggggtcagggaagtg

SEQ ID NO: 205049 - DNA, 105 bp, Homo sapiens
aggaattgagtcagaagttgattctgtgaatttggagttcagaagagaggttggagctacagcgaaaaagttgtgatttcatcagcattcagatgaaattaaaac

SEQ ID NO: 205050 - DNA, 432 bp, Homo sapiens
ggaggttgcagtaagctgagattgcaccactgcacctcagcctgggtgacagagcaagactgtttcaaaacaaagaaatcgaaggacaggcagagacaccagtttcttattcaggtcctcatagcaatttgaccagttctggtcttctcaggggtcgtttttaaagggaatggaaatatgtccctgcttcgaccctaagcaactacccttgactttgactttggtgtccaaaagctccatgttgatttgttaagtagggctgattatgtctcgccttcttcagggacagtggtcctcaaggttgttttggctttcggacaacttggataggacaaaaggactgtccgcctccttatcacctccttcgcatttgccgttcttaatagaaccccttctgagatagggaggcagttgtttctcccggcaacagga

SEQ ID NO: 205051 - DNA, 730 bp, Homo sapiens
taagttctgcctctcgaagataaaactttaattttgtggacacttagagaaagtaaggggtgggggagcttgaggtgagtaggaatttgcatagcccttttcttcctggacttaagaatgatggagaaaaaactcagtgaaagagataaggaagcaaatgtgtggaaatgtgtgataaggaaggaaatgtgtcaaggtggttacaatatggaagggaagcataggttttttttttcttttgttgagatggagtttcactcttgctgcccaggctagtgtgcagtggcatgatcttggctcactgcaaccttcgcctcctgggttcaagcaattctcctgtctcagcctcttgagtagctgggattacaggctaatttttgtgtgtttagtagagacagggtttcaccctgttagccaggctggtctcgaactcctgacctcaggtgatctgcccgccttggcctcccagagtgctgagattacaggcatgagccaccgtgcccgaccagaaagcatggtttttgaaggaccatattttattgtaaaaaaatgttttggttcagatagatgtgtgctgatgggagtaattcacatctatcagtgaccaccaccaagatatttataaaccttatcaaatacagtaggaagagcaaccagcacaattttggataaatgtatatgttgcagtgaacaaagaagatagtttaaaataaaagatgaccacagaata

SEQ ID NO: 205052 - DNA, 200 bp, Homo sapiens
ttattaatgagcttaagagatctttaaagaacaaaaacaaaaaactatgagaaagctgcagccaaatgctacccaagtggtcccctccactttatgctagcactggaagcttctaaaattgttgtggccttactggcttgtgtatttctgaatacttgtcaatcatcttagggaaaaaagtcttggtatgtcaactctag

SEQ ID NO: 205053 - DNA, 426 bp, Homo sapiens
aatactcttactgaatgcatagtcctaatggaagcaaaaataggcactgtgctccctgaagagggctgcaatctccacaggagcatggtcatgaagatgtaaaactcatctttcctcagactatggtcaccttatggctaggctacctgataaccttgtacccttattctcagccttttggaaaacaattttgtaaaaaaaataaataaataaggacatttctattcctgaagctgagttatcaaagaagcttaaagtagtaacttacatttaaatatagcattcttaactttctccagagttcttctcaatcacaataaagaaatgtatacatacataaggcataaaacatctacaaaatgttatttcaggatatctacttgcattacatttcacataggttatctcattttatcctcaccccca

SEQ ID NO: 205054 - DNA, 221 bp, Homo sapiens
ctcctatctacacacacacatacacacaccccttcctttaaatttaaatgttaaagtcttcattttcccaccatgggctgtttgacagctcagagctagagaaaagatgaaggagaagatagaatagaggaagggacaaacaagatttggaagagtgtgcactttattgattcttatgtaatacaatgatattaaacaagatgctgagttagataaatggg

SEQ ID NO: 205055 - DNA, 222 bp, Homo sapiens
taatgaaaaaataactttctgcagttagtcctagttcttttatttggtaagtgtttgcaaataaaaagtagtagatgtaatcaggctggaccctgctgtatgctattagagatttggttacccttctcttcttatacacaggccactcaccaagtatttattgagtactggttatgtgtccagcattgttctaattggtaaatgtttaatcgtctttgaaca

SEQ ID NO: 205056 - DNA, 465 bp, Homo sapiens
gtagacacgtgctgctgtgtctgaggggccatagcaaaggagccagagtggctggaggagcagagagtgaagcggggagtaggagggggccagaggtcagggggtggccaggtcccataaggccttgtaggtgatggtgaggactctatgccaagtgatatgggagccatagaagggtgttgagcagaggagggctatgatctggggtatatttttaaaggatccctctggccactctgttgcaaatcagtaaatcataggaggtcagggcagaattagaaagaggcacacaaaatttgtccagctgagaagggatggtggctctgaccaggagagaaggtggtcagagtctggatatattctgaaggtagatccaatcttcatggtggcttgggtatggggtgtgagagaaagaagacagtcaagtttaatgccagggtttttgttctgtgcaactgcaagaaa

SEQ ID NO: 205057 - DNA, 299 bp, Homo sapiens
tgattaattagatgtttatacactagtttggcatctgataatttcctatgggaaaaacatgtttcagcttccaagtaaacttttggaacataatctgtttggggtcacttgtcatttttcatgaagtgtcccttttaatttctggtcaggaaaaaacaatctaaaatcctgtgctctcttttcactttatgaaaaggagctattaaacttcctttagtttagaattctctacagaataggattagatagaaatactcatacattaagggagttcaaagatgtggttatttaaaacagta

SEQ ID NO: 205058 - DNA, 398 bp, Homo sapiens
acatggatgcctaagtctgtgacaataaagtctgtgaagtaaattgactgagagggtaatagtaaatacagaatatcagtggatgcctgaaactagcaggagaaaaatagaaaataattatctcatcgaggaacaaatagatctattgatagtataaatttttaaaaaatgtttgtaaccttttccattaagtatactagtttatgataagttgaaatattttgccatctgccttatgaaactccactcaatctgtgcaattcaaagtattaaaatggaaataaaataaatactgtttcacatataaaacaaattggaccttataactaatcatttcttctcatttcaatacctcccactattctcttcttaactgaaaatgactgcaaggaggcttt

SEQ ID NO: 205059 - DNA, 602 bp, Homo sapiens
ttcctgtctcttacgttgcctagtttctgtgagagtttgtttgggtgagagtctccaggaatcactgtcaggcaggtgacagacagcccatgatatcatcactggacctggtcactgtcttgtgattgcaaagggagatagaaggtgagatataccaagggagatgatttggagactcagatttctgcttcaaaattttgattttcaggaatggagtagggcccaggaattgacattttaaaagccctttagggattgttgatctagataatccacatgcctatctttgaaaaaccttaggatggaaataaatataatatgtagtcagagtaatgaagaatcctgagattaggatacattccaaaagtaaggaataacataaactatggagcacatttcatttctccaattcatatagaagtatgtttttaaaacgcaggattaaggaaactagcaggcttcttgtctctattgaaataaaatagatgtttcagaaaaatagttgagtctgaaatgccgcaaatcaaatgagggtaactatgcttcatttgtcgttgctagcttaaatcatggttctttacagaagggagagtttggcaaaa

SEQ ID NO: 205060 - DNA, 422 bp, Homo sapiens
ctgccagcatttgggtcccatgaaagaaataggcatgtaaaggacaaggtggtgcagactaactgcaagaactgggctgttactaaaacaggtgccaagaaccatggttccagcgtcccaggccataagattcccagtgacagggacctggtttcccaaggagcctcacagctcacatcattggagataaacttttcaaccagcattaagaatgcctgccaaaaatatcaagcccaaagtatgtttttgtgtgacccacgtgaacatttggtgattaaacagaaagatgggactgtagaaatgcgggggaaagacaagaagcagcagcccaggaaggcccacagggcccacagaggcaggctcatagccagcaagcaaaaacaaatcccaatccagacctgtaaattcaattccaaatatca

SEQ ID NO: 205061 - DNA, 262 bp, Homo sapiens
cagtcataatttagatatttactaattcttccaaatggtttcactgcttttgcacttgttaaacattatgggatttacaatgtttaaaacagcttattgcccagcatagtgacacacacttataatcccagcttctcaggagcctgagggggaggatcccttaagcccaggagtttgacaccagtgtaggcagtatagtgagaccttgtctcaaaaaaagcaccaaagaaggagactaacattatcacagatggtagagact

SEQ ID NO: 205062 - DNA, 246 bp, Homo sapiens
agaagttcaagacttctacactgaaaattacaaaactattgatgataaaaatggcaaagatagttaaaaaagataaaatgaataataggctaatttaatatatggatttaaaattaccaattaaatatagtagtttatcaaaataattctacattatgccaaagcaaggttcattcaagaaaaatacaattcagtgttagaaaaagcataagcaccaattggtgctaaaaggtacttgataaaata

SEQ ID NO: 205063 - DNA, 274 bp, Homo sapiens
  misc_feature (19)..(19): n is a, c, g, or t
tcagaggatccgctgatcngcttagcagttgatacgtttgtcaggtgtttgtgttttaatgtttaactcttgttaccatcaccacagtcaagacataagacatctccaccaggatcctttgtactttttcccagttaacttttaggcttaattttctctctgtttttttttttccaaaaaaaccacaaaacttttcttaaagtttagattattgattttagacctcttttcttttctcatctaagtatttaaggatagaaacttccccttaagc

SEQ ID NO: 205064 - DNA, 452 bp, Homo sapiens
atgcctggctaatttttgcatttttagtaaagatgcagtttcaccatgttggccagcgtggtttcaaactcctgaccttaggtaatctatctgcctcagcctttcaaagtgctgggattacaggtatgggccaccatgcctggccacaattttttctgttttatagcgttttgcaaacaccactctgttttttgtttttaacagtataactacttcatgtatgtcataaaatctgtgtctttttgtgattggctcatttcattttgcataatgccatcaagatttatatttatggttggtagaatatttcctgcttttgaatactgagtatattccagaatatatatatatattttttgagacagtcttgccctgtcaccttggcaggagtgcagtgagccaagatcacgcccctgcactccagcctgggtgatagaatgagacttgtctca

SEQ ID NO: 205065 - DNA, 412 bp, Homo sapiens
tattagacatcccaaacctccatatttcaccatcttagagaagatatatatgtaattctcctccataagcataaaatagtctcaaatactgataaatatagtactcccctgacactcctcaagagccagaatgctagaacagaaatcggttatgtagccaatttcctattataagttataatagtaaccaactattctggagaccaatcccaaaattcaagttagtttctaaattgtatctactgctaagtaaaagtaacaagcagcacagaatcagatacacagtagacactcaagaaataaatgtaagagaatggcagaaaaaactgtttattggtactaacctccctatcactgttcccccaaggctgccttccagtggaagtgctaatgagtgggaaatgggccaaac

SEQ ID NO: 205066 - DNA, 366 bp, Homo sapiens
caaagtgctgggattacaggcatgagccaccgcgcccagcctagataacattaatgaaccctggagccagctattgatttgaacttatgtttcttgacagcaagcagtagctgcaaagaaacatagggtccttctcttctttttcttatcacccataatgattgactgatagagtttggttgaaacttttttccaaagaattgtttggcttgttatagttcaaaacactcacaagaaagggtaacagtggccccttctgggatggggagctgcgtggctggagggataagagtgagaaggaagccttctttgcttatatttctgaattgtgtgcttgttttatctactgagaaaagtatttaaagc

SEQ ID NO: 205067 - DNA, 395 bp, Homo sapiens
atttcaggatatagaatttcaacacagcatcaatgctttaaactagcatacttaaagtcaacaaagtatggtccatgacctctggtataagtaaagatttactggaagacatccacgtcgattcatttatcattcctaagtattgtcttatgcaatactcattggcttattatctaaggctgcattcacacttcaacggcagaggtgagtcacttgtggccagctgtgaaaacgcaatttacttactatctggccctttacagaatttagttacttcttttttaaaataaagttcttaaaatttttcattaaaaaatgttagaaaaactcaatttttattttgaatagctgggaatttagtcacagatttacaatgaagatttacaatgaaaatg

SEQ ID NO: 205068 - DNA, 177 bp, Homo sapiens
tagccttccctcttgctgtagctgccacacaggaaccttcgtcttcacctggagtggttcgctcattggttatgtagaatgccctcccctctctctccatccttacagattgtgttaaagtccagctctagctttctctcttaaacaaaacgttacccctgatccccaggccgacag

SEQ ID NO: 205069 - DNA, 426 bp, Homo sapiens
caattgtgcatagactgaaaacattagacttttaaaggtggttaggtctttaaagtcaatgttaacttatctagaatcgacatgtaaaatcccactgagatctgtatgccccatgtgaaatttacttattttactcattcccatttgctccttgagtgatattttgaaggaaaattgtattttattgtgatcttctggaataatataaacagtttccatggttgttttaaaatattttcagaattccttgtccatcagtgcttttttacttatttatcttcaatctactgtttataagtaaacaggcaattccaaaaccaaaaatcaaggttctatagagaggtgcaagttaagaatattcttttatcattaagaaatgacacgtaaatcaatctcatataactaaagtcctgtccttacatcatc

SEQ ID NO: 205070 - DNA, 651 bp, Homo sapiens
atgagtgttaacattgaaaggccaccacaatcattagtcaggacattgatcaatgtcacattgatagcagagatagcctcagacctttactggctcttcctagtgatgatggtgaaggtgttagcacctttcatttgttcagggctctgaagtcttcctgaactctaatttcatttgaacctcttgtggctcctataggatggagagggacagatacagaaaaagattcagggggttgtctaaggtcacaggcttggttaagcggtaccattaggagtagtaggtatgttttttggctctttctacttgtctacctttggacttgtagtgtgtgctcaattacaaatgcctctcaacttatgatgaggctgtgtcccaataaacccaatcgtaagttgaaaatactgaaagtagaagatgcatttaatacacttaacctactaaacattatagattagcctaacctaccttaaacatggtcgaaacactcacattagcctactgttggacaaaatcatctgacacaaagcccatttgataataaagtgttgaatagctcatgtaatttattgaatactgtattaaaagtgaaaaatgaaatggttgtatgggtacttgaagtacagtttttattgaatgcctaatgctttt

SEQ ID NO: 205071 - DNA, 503 bp, Homo sapiens
tcaaaagatatctgaatataaatagataaagaagctccatgataagagttcaaagtgcagcttacaaggagtcaggagacctggaatccagctgttgtaactttatttatctcataggcatctgaaatatgaggaaattggactagatgaatggcctctaaactgtgatttagggaataggtaggcttctgggatggttggaaggaaatacagttgcatgcaggggtctagttcttggactcctttgctgcttcacctgtggaacagctctactttgttgagcattttgcattagaatttaatttatagtaaagatttttcttatggctgggcattgtggctcacgcctgtgatcccagcactttgagaggctggtctttctgggctcaagcaatccacccacctcagcctcccaaagtgctgggattacaggcatgagccactacgcgcagcctagataaagcaaatttttaaattgatttgatactagattttactcatta

SEQ ID NO: 205072 - DNA, 326 bp, Homo sapiens
atcatgggctgctcctataagggaaaggcccagctcatccttcactcaataaaataagaaattctgaaatccagagggtaggatacagtattcaaagtaacaagctttgcattcagcaaacctatgatatttcctaatagtgaatttgagcaagtgacccatttccagatgttttaaatgagacaattaactgacattcataggcggcttgaggataaatgttaatgtaggtatgtatgaatttagggcaagccagaattgacttatctagtagtatcctgatccagatcatgattttggcataagtgattcgactgaaacttcat

SEQ ID NO: 205073 - DNA, 429 bp, Homo sapiens
cacttcccctccctgctgcagagaggttagggtgggaccaggaaatcctgggagatggtggaggaagatgggcagagcaggagagagtggggagggcctgggagtcaggaaacctgaagtggagattaaagcagtggctgggtcaggcacagtggctcacatctgtgatcccagcactttgggaggctgaggcaggtggatcacctgagatcaggagtttgagacaagcctggtcaacatggtggaaacccgtctctactaaaaatacaaaaattagctgggtgtggtggcatgcgcctgtaattccaactacttgggaggctgaggcaggagaatcacttgaacccgggaagcagaggttgcagtgagctgagatcgtgccactgcactccagcctgggcgacagagcaaaattctgtcaaaaaaaaa

SEQ ID NO: 205074 - DNA, 677 bp, Homo sapiens
taggaagaagagaatgtcatccatgtttcttaattttctttttttgtgtgtatttttctttttttctattaaaaaatggatggcacaattttttttctataaaaaacctgtactcttatttatatatcattttagttcagcagccaccattatatttaacatagtacctatttctattctatattatgatttttttgtgtgtgtgtgtgagatgaagtctcactctattgcccaggctggagtgcagtggtgtgatcttggctcactacaatctctgcctcccaggttcaagcgattctcccgcctcagccttccaagtagctgagattacaggcacttgccaccagacccggctaatttttttgtatttttagtagagattgggtttcaccatgttggccaggatggttttgaactcctgacctcaaatgatccgcccccctcaacctcccaaagtgctgggattacaggcgtgagccactgcacccagacaggattattcttacttatttatttataggtctcaaagcatttgtaaaaggtcacaatcaatctaccgttttatgtaaagcctttaaaagatgacagtaagctgaatgatccatttagttatgtttttggtgaggaaggggtggtaggaagaagagaatgtatccatttcttctagattttctagt

SEQ ID NO: 205075 - DNA, 205 bp, Homo sapiens
ggcagctctccgggctgctccctgcctgtgtccctgagcactgactccagaggtttaatcattaacgggcacgtttggccttcggtcgtgggctggaatttgggacctgtgcccgggaacaatgatctccgacacattattttgtgtaaaatcacttttagctgccattagctaataaagctggaataaagtgaggtccattaac

SEQ ID NO: 205076 - DNA, 602 bp, Homo sapiens
tattcctttgtattatgaggcccagtgagtatatacacacaaaagcgagcatacacagttatttaggctgcgcagtggtggcacatgcctgtaatcccagctactcgggaggctgaggcaggagaattgcttgaacctgggaggcggaggttgcagtgagctgagatggcgccactgcactccagcctgggcaacaagagtgaaacttcgtttcaaaaaaaaaaaaaaattgtatcaaggaagggaaaaatgctttttttctcatcgcagtctagtcaaatatacttatattttataaaatttcctcgcaaactgcctttcaataaaatctaaagttaagtagtaaagttccaaccacaagaaaactcattcctgataatatttgaatgtggcctcatctggcaaagctatttaagcagggctctgctgcaggagtgggttcggtaacactagaataagggctcctggggaagatgggctctgttcagctccatgactgcagagggatggaaaggggaaggctgtgtgaggaggtgtgattagggggcttctttgagaaactgaaaatgattaaagaaggtaggagcgtgagaattcttatt

SEQ ID NO: 205077 - DNA, 574 bp, Homo sapiens
aggtttcagtgtcacactcctaagtatgggtaaaaagggaaatttctgaaaatgcaatataaatagtgtgtcgccatggaaaatggtttgtccttatctgaaatgaaagcattaagaagtatatctttaagaaaaaaagtacaatacatttgatgactcaagtaaaatcacaagatgcaaacaactctattagaaattttagattctgaggaggaagaccctttgggctgtcaaaattggtcttcacttcctcctttatgctgagaaaagactcctttttaaatccttgaaagtaataagaactgtgcctttggttgaacatggagagggaggggaaacacttgatggcttacagtcttaaccctctgcatcacagagtaaatcccttccctaagaaccactgcccaataaaatgctttttggcctttgactcaccctccaagtatgagtggtagggagataacaggagaagccttgagcttctcctagaggccaataccaccaagcactaccagcatctaagttacagggacacgctggattagcagcacgttgaagtctggctcctaatctt

SEQ ID NO: 205078 - DNA, 553 bp, Homo sapiens
gatcctttcctggttgtctaactcctggggtcaagtaatcctccgcttagcctcccaagtagctggggctacaggcacacatcaccacacccggctaattttttttttaagagatgatgtctcgctctgttgcccaggctggtctcgagctcctggcctcaagttatcctctcaccttggcctcccaaagtgctgggattacaggcatgaaccactgcatccagtcttagttgttgagttttaggaggtgtctgcatatcctggatattaatcccttaccgatatactatttacaaatattttcacccattctgtggtttgcctttttattccattgattctgtccaaaacttctctttactcatagagcaaaggttgtatatctctaaaccaagcttcttcccttgcttctctctgtggaaacaacagggtattatccttccactcctgtacccagagaactcctattcactcttgaaaacccacctcaacagtcatcaactcagggaagccttatttgtcaggcccctcctcccccaaaactaagtaaata

SEQ ID NO: 205079 - DNA, 462 bp, Homo sapiens
tagaggatccccaccccaaatgaatcctcatcatgcttgactgaaacttgatgcccattggtaagtaattccccattttgcccttcttccaggctgtagccaccaccctttcactctgattttctatcaatttgactatttttgttactttacgtaagtggaatcatctagtatttgttttcctgtgactagtgtttttcatttaccataatgtcctcagggttcatctatgttgtctcattgcagaacttccttctttttggggggctgaaaaatattccatcatatgcataaacacattttccttatccatttgttcgtcagtggacacctagattgcttccacgtttagctgttgtgaagagtgctgcaatgaacatggaactgctaacatttcttcaggatgttaatttcaattcttttgggtaaatacccagaggtgagggtgctgaatcatatggt

SEQ ID NO: 205080 - DNA, 479 bp, Homo sapiens
gtaaagtcagagaaacaagaagaataagaataaaggcaggaccaaggcaagttaatacctgaaggaaaggaattcccaggggaagcactgatgctgcggaaaaatgactccttccaagtgacggagacaacatattgcaaattattacatgcaggacaggacgctgtggtttcaggaacaagagcatgttctcatctcctgggcctgatgaagctgacaaatacaatcaaagcctttctcagtgaattctcaagagggaagtgttcagaaggtgttgctgtcttacaagtgaggctaacttgagaacccccaaccatttccttgcacccagcacagacatgtgaactcctggtatggagggcccttctctaggtccttgtctgttctgcccaacagtcctatgcggtgaatgcacacttaccctcgagggaaccaggagtgaactaacatgctggtgtcaacgagacatcagagcacat

SEQ ID NO: 205081 - DNA, 411 bp, Homo sapiens
gtgtgtgtcagcattgtggacctttatataaataataattttccagtgggaactgtgatctcttcttgtctcttctatttttaaatgctaattacttctgattttgtttacgtaggcggagctaataagaacatttgcttcataaccattgaacctaatgtatctgtttttggacactggtgatttatttttgcacacatgctccaaattggtgctaattactttaaaggatcagagtttctattccaagagggatgacgacagaatgtcaatttggagtctctgagcataatgtcccaattatcaatgcattccagaccagaatggacttggcaccttcttgaagggatttggcttcacttttatcagccagtccctggttgtagcttcattaaaacttgctttctagta

SEQ ID NO: 205082 - DNA, 381 bp, Homo sapiens
cccattcatggggggctaagttctttggatttgtaataagctttgtcttttgcagaagcccatgatgtaatgatgatttgggaatcttgggttggctatctgaaaggaaaattctcagaaagcagaataagaaccagctatcaggctcaatttagatttttgaatttctgaattaacatactagtgcatgtgtgcactcgtgtgagttcatgtgcacctgggggtgtcatcgctgtatctctaatggtaaaggtaaagaatggaaccagagcagagccagtgaaatgccagcaggtcaggattttgccccatggaaggaccaagtagcttgtaccttacccctgtgttcccatgtgcaatattatggcacttcgtgggcag

SEQ ID NO: 205083 - DNA, 486 bp, Homo sapiens
tctgaatgtctgtgtgtatattcacttgcctcaatctctatcttgggcttcagttcccaactaactttagaatagtctttacttgcaagactcaaataaaaacactatggtatcaaagcgggaatgtggtgcaaaaagggcctgctaaatagtaacaatcatggctgggcacggtggctcatgcctgtaatcccagcactttgggaggtcaagtagatcacctgaggtcaggagttcaagaccagcctggccaacacatggtgaaaccctgtatctactaaaaatacaaaaagtagacaggcgcggtggcaggcacctgtaatcccagttacttgggagactgaggcaggagaatcgcttgaactcaggaggcataggttgcagtgagctgagattgcaccattgcactccagccggggtgacaagagtgaaactctgtctcaaaaaaaaaaaaaaaaaaaagtaacaatcactaccactactatt

SEQ ID NO: 205084 - DNA, 455 bp, Homo sapiens
  misc_feature (3)..(3): n is a, c, g, or t
tanggctgttttggagttagagaagagaattgaagaatcttctgaaacttgttagaagaagtctgatattgtgcttctggtaggccaaaaacaggcacttgaagaactgaaattgtcagtccagcagctgagatgcactgaagcaaagttttcagcacagaaggaattactagagcaaaaagtgcaagaaaatggtgggaaagagccacctccagtagtaaattatgaagaagatgcacgatcagttacatctatggtagatatagaagagtgcacttttgcgaaagtgcactccttctatatctacccttaaacacagtagaggagatcagggttaggttacttgagagatttagcaaagacccctaggtagggggcacagcttcaagtaccatttactcactctgcaacctctattccttcttattggctactatgaactaatgacactatga

SEQ ID NO: 205085 - DNA, 399 bp, Homo sapiens
ctatctccctgggagctgagcacattttcaagcaaggttttgtccctttgggcccagttcacccttccttctgacccagggcccaattcatcaggaactttaattctcaaactgtgatccaatacagttctgtccttcttttcctcattacccttcagaacacctgagatggactgagattttttttttttttttttaaaaaagagtttcacaggccaggtgcagtggctcacgcctgtaatcccagcactttgggaggccaaggcgagtggatcacgaggacaggagttcaacaccagcctagccaacagagtgaaaccccatctctactaaaaatacaaaaactagccgggcaagtgcctgtagtcccagctactcggggaggctgcggcaggagaa

SEQ ID NO: 205086 - DNA, 444 bp, Homo sapiens
aatacttttattttcagtaagaaagtatttttaaatgggtactaacctatttaagactggttaatgttaattggtaaaagaaaggatccatttagatttatcagttcatggtctataatattatgtagcatgggtcccatggatcccagacaccagcacttcatacaggactacttctggtgatcctgggaccacagtgggacatgctggtttaggcatagtggtacacttctgtagaaaggcttcaaaggacatgtcgagcaaaactgatactgtgagcctgatagtttgagcatgggaccaacaacgtcggtcccatcccaagtctgacacacctggaagtattgaatgttgtattttgattgtggatgacttgtttatttggttatatcttttgaacgcctcaggtgattctgtctgtctttggaggatgggccctacgtt

SEQ ID NO: 205087 - DNA, 717 bp, Homo sapiens
atgtagatgtaaggcccaaaactagtcggagcagaagtgccgacagaaaagacggttatgtgtggagtggaaagaagttatcttggtcaaaaaagagtgagagttattcagatgctgagacagtgaatggtatagagaaaaccgaagtgtctttaaggaaccaagaaaggaagcacagctgttcatccattgagttggacttagatcattcctgtgggcatcgatttttaggccgatctcttaaacagaaactgcaagatgccgtggggcagtgttttccaataaagaattgtagtagtcggcactcttcagggcttccgtctaaaaggaaaattcatatcagtgaactcatgttagataagtgtcctttcccacctcgatcagatttagcctttaggtggcattttattaaacgacacactgctcctataaattccaaatcagatgaatgggtaagcacagacttgtctcagactgaattgagggatggtcagctaaaacgaagaaatatggaagaaaatataaactgtttctcacataccaatgttcagccctgtgtcataaccaccgacaatgctttgtgtagagaaggtcctatgactggctctgtgatgaacctggtttcaaataacagtatagaagatagtgatatggattccgatgatgaaattctaacactttgcacaagttccagaaaaagaaacaaacccaaatggg

SEQ ID NO: 205088 - DNA, 637 bp, Homo sapiens
agatgacatctgggtggggacacagccaaaccatatcaggaaggaaagggagaaaacttttaagatgcatttgaagactgagacacgcagttacagatgtgtgtaaatggatgttcacagttgcattgttgataatagcaaactttgcatttatcagttggattgacaaaatatttgatgacttatccattcagtggaatacagagtgaaatgagaggaggtacatttataattattgacgttggtagttactgagaatatgtttaggaaagtgggcagagacaggattttgtatgagtgtgtatatatgtgtatgtgatatgcgtatatatgtacacatatgatcttgttactttaagggggctcgtgtagtaatttttaacatttttgtaatgttttttaaagttctaaaacttttattttgaattaattctaaacattaagaaaagatgcaagaataatacaaaagaatcccacatattcttggggtctctaatgtgattgcagttagacctgttcatttccacatctactgcctgaactgagagaatgacacagctttggtttctcagacatgtctttctatctctctgtgacctcttcagcatggtgacttcacagaaactggacattacat

SEQ ID NO: 205089 - DNA, 1406 bp, Homo sapiens
gtgacccggaggcgctggggctgtcctgggtcgtcacatgcgagaaatcgtctcaccccagccagtgtgacggagtgagagcaaaagaaagttttgatagcagcgtacgatttatattcagctgtatgctgggcaggtccaacttggcatttcttggctgtatctctgaaggaaagtcatcttaatctctatgagcctccatttcctcagctgtaaaatgggaagatcttcctcacactgctgtggcccagaaccatatcctgctccacaagcctcgtccttggcaagaagttgcacctgcccagagagaaaaccttttgaaactggcacaaaggcactggagagactggcagggccccctacttgacgatctggctcatccatctgcacactgaccacgctaagagctgtctgcagtgatggaaaccttctctagctgtgctgtcctctatagtggcaccagctgcctgtggctactgagcacttcaactgtggctgcagagactatgttaaattgtatttaatcataattaatttaattgtaaacaactacatgtggctagtggtttctgtactgggcactgcaggtgcacatttcctgctggccatggacagtaagctccataagagactaattgtgcctggtttgcttataggcttatcctcagcacctgcaccagcctagaatatgattggcactctattaattaaaagttcccaggtaaatgaattagtggattctctgtttcctccactatgccacaacctccttaagggcagagatggtgtcttcaaaaaaaaaaaattctggtcaaaaacacataagatctaccaccttcaccattgttgtgtccagttcagtagtattaactacacttacattgtgatacaacaaaagattgtgtctttttacattcttaggacccagcacagtgtctggcacataatcttagtaaacactggcagagcacatgcctttgccaaggccagaacagaggttcagtgccatccattaccaccctttcacacatccactggggctttaaaaacaacctggaatgaaagctgttgagtctagagaaatgggctacaaagaaggtttacaagataatctattaagaatagggaatacaggccgggcacggtggctcacacctgtaatcccagcactttgggaggctgaggtgggtggatcatttgaggtcaggagttcgagaccagcctggccaatgtggtgaaatcctgtctctaccaaaaattatccaggcatggtggtgcgtgcctgtagtcccagctacttgggaggctgaggcatgagcatcgcttgaacccgggaggcagaggttgcagtgagccgagatcgcgccactacaccccagcctgggtgacagagcaagactccgtct

SEQ ID NO: 205090 - DNA, 904 bp, Homo sapiens
cgtcgacggtacccaacaggcttcagtcttggctcccacacagcttgatgctcctttcggggtataactgatgccaaccacccagggccactgccaggagtccactgtgtactcagactgtgcttggcccattcgcagcagtgccacagggccacaggcgcagagctctggctgggagtcactgccaatttacagtttgccctcaggtgtgtggaggcaaagccctatgaaagattagctttgcgctccggaggagagggcgcatggcaggtgatctgcccaccatggcttatttgtggcttcatcactgtgatgacactatgtttggcatttactcattattgttatccagaccccacgttatcaagaaaagtacaggaaatctgccgttgggaaagcggcagcacccatgtggagtgccactttctgatctgggacttaaacaacattgctgttttcctccttgctccaagtcatccattttgacaattttatatcagcatggacccttcaccaagactgaaataactctgttattgaggtgggaatctttctattaatgcatttatttagtatttcattccacagacatttagtgagtgcctgctgtgtgtcatccattgtgacagtgttgggaacacggagatgaataaaacaaggcccctgtcctgggagagccgagaggccacctgtcagctgacatcttagggaggacaccatctacatccaaccctgactactgaacacttccagtttcttggaagaaagattttaaaatcttcagaaatgagaactcctccaaataggattttcatttgtttcatatattttaaaattttatattttaatatgtaacagtcatatggtttaaatataaaaatgacatcagtggctcagtaagaag

SEQ ID NO: 205091 - DNA, 561 bp, Homo sapiens
gtgacccggaggcgctggggctgtcctgggtcgtcacatgcgagaaatcgtctcaccccagccagtgtgacggagtgagagcaaaagaaagttttgatagcagcgtacgatttatattcagctgtatgctgggcaggtccaacttggcatttcttggctgtatctctgaaggaaagtcatcttaatctctatgagcctccatttcctcagctgtaaaatgggaagatcttcctcacactgctgtgacatttagtgagtgcctgctgtgtgtcatccattgtgacagtgttgggaacacggagatgaataaaacaaggcccctgtcctgggagagccgagaggccacctgtcagctgacatcttagggaggacaccatctacatccaaccctgactactgaacacttccagtttcttggaagaaagattttaaaatcttcagaaatgagaactcctccaaataggattttcatttgtttcatatattttaaaattttatattttaatatgtaacagtcatatggtttaaatataaaaatgacatcagtggctcagtaagaag

SEQ ID NO: 205092 - DNA, 300 bp, Homo sapiens
gtgacccggaggcgctggggctgtcctgggtcgtcacatgcgagaaatcgtctcaccccagccagtgtgacggagtgagagcaaaagaaagttttgatagcagcgtacgatttatattcagctgtatgctgggcaggtccaacttggcatttcttggctgtatctctgaaggaaagtcatcttaatctctatgagcctccatttcctcagctgtaaaatgggaagatcttcctcacactgctgtgtgagttcagtgtgacaatgtgaatataaaagcttatacgtgagaaagcatggcag

SEQ ID NO: 205093 - DNA, 1379 bp, Homo sapiens
gtgacccggaggcgctggggctgtcctgggtcgtcacatgcgagaaatcgtctcaccccagccagtgtgacggagtgagagcaaaagaaagttttgatagcagcgtacgatttatattcagctgtatgctgggcaggtccaacttggcatttcttggctgtatctctgaaggaaagtcatcttaatctctatgagcctccatttcctcagctgtaaaatgggaagatcttcctcacactgctgtggcccagaaccatatcctgctccacaagcctcgtccttggcaagaagttgcacctgcccagagagaaaaccttttgaaactggcacaaaggcactggagagactggcagggccccctacttgacgatctggctcatccatctgcagtgatggaaaccttctctagctgtgctgtcctctatagtggcaccagctgcctgtggctactgagcacttcaactgtggctgcagagactatgttaaattgtatttaatcataattaatttaattgtaaacaactacatgtggctagtggtttctgtactgggcactgcaggtgcacatttcctgctggccatggacagtaagctccataagagactaattgtgcctggtttgcttataggcttatcctcagcacctgcaccagcctagaatatgattggcactctattaattaaaagttcccaggtaaatgaattagtggattctctgtttcctccactatgccacaacctccttaagggcagagatggtgtcttcaaaaaaaaaaaattctggtcaaaaacacataagatctaccaccttcaccattgttgtgtccagttcagtagtattaactacacttacattgtgatacaacaaaagattgtgtctttttacattcttaggacccagcacagtgtctggcacataatcttagtaaacactggcagagcacatgcctttgccaaggccagaacagaggttcagtgccatccattaccaccctttcacacatccactggggctttaaaaacaacctggaatgaaagctgttgagtctagagaaatgggctacaaagaaggtttacaagataatctattaagaatagggaatacaggccgggcacggtggctcacacctgtaatcccagcactttgggaggctgaggtgggtggatcatttgaggtcaggagttcgagaccagcctggccaatgtggtgaaatcctgtctctaccaaaaattatccaggcatggtggtgcgtgcctgtagtcccagctacttgggaggctgaggcatgagcatcgcttgaacccgggaggcagaggttgcagtgagccgagatcgcgccactacaccccagcctgggtgacagagcaagactccgtct

SEQ ID NO: 205094 - DNA, 300 bp, Homo sapiens
gtgacccggaggcgctggggctgtcctgggtcgtcacatgcgagaaatcgtctcaccccagccagtgtgacggagtgagagcaaaagaaagttttgatagcagcgtacgatttatattcagctgtatgctgggcaggtccaacttggcatttcttggctgtatctctgaaggaaagtcatcttaatctctatgagcctccatttcctcagctgtaaaatgggaagatcttcctcacactgctgtggaaatggcagcctaaccccaggcagcaatgtgctattgaaacttctaaaactagg

SEQ ID NO: 205095 - DNA, 702 bp, Homo sapiens
cataccaaaaaccaaagtaataaatgtggcaatggcctggacagacagattacaaagatgatagccatgattcacatgcataacgtttcctggttcctcaagttatagtttatgttcaatacataaacttctggcatatgaaacaaacattctatctttagttatttgtttaaatggaactttgcatttctattcaaaaaccaattttaactgttttgaatagataacataaaaatagagacaggatcattgccacataggtgggagtggttataactgtgatacaacaaaactgcctcagatataaaacatttgaatcttttgatctctaccatctatgatcgggcttctagtataattcacatggaaagaatttaaaggatggaatatactattaaagcaaattcccttaagtttttcatattatttaatttcatcaaatgcattaatcacctctaaaccattccctccaggaagtgttgaaatactcagcatttagtgcctttattttatcctaattttctgcaacaatattcaaccaagcatgccattcatcctttactaagtgcctgtctttgtgcaaagattccacaaagacacacagataacaaaacaaaatccaccttcaacagaattaagtctagcttgaaagagaactgtataaagaactaactgctaccagtattactgaacattattctg

SEQ ID NO: 205096 - DNA, 521 bp, Homo sapiens
gtaggattccatttacattatacagaaaaattccagctaataactgcagaagtaatgataaaaatagaaaatcattgttctacaacttttcttcttcttctttttttttttctgagacagagtctccctctgtcacccagactggagttgcagtgagccaagactgcaccagtgcactccagcctgggcgagagagcaaaactctgcctcaaaaataaaaataaaaataaaataaagatgtgctgttaattacattaggcatagtaatgacattgtgttatgtaaaaatactctttttttgagatgtataactaaaggacttcacggataatagtgaaatgatttactttgtaatacctaagcaaaacaaaaaggttgtgggggaagatagagacatataccaacaaacagatgaatggatgaaacaagtctggcaatgtattaatgactattggaacaggtagtacgtatcactgtactctctatttttgtgcacatttggaaaagtaaaaacagtaaaa

SEQ ID NO: 205097 - DNA, 846 bp, Homo sapiens
gactctcaaaagtgctgggattacaggtgtgagccaccacgcctggcctaaattagtaattttcaagagttgtatttcaatttgatttcagggtcgttaggtaccacggaccctactggattgaacaaaggaggacgaatgcgggaataaagacaaaggcaaaagaatatgtttggaacaaggggtcagggggcttcttgcttgtagtgaacgtgggccccgagcttctagcacccttcatgtttactgagtaaaggggatagagagaagcgggtggttgtaggtcagctacttgatttagagcaggcctgcatgactgcatttttcaaacaataggctccagatgtcccagtagataacctcaagcagcacagcaccagggagtgattgtcctcagtataccttctggcagcagaagcagatgtgagtttgcccacattctgcattcatgataaacagttcactgtttatcatatagccttcagtggaaagctgagttggtcacaacctttgggccttgggctcccaacatctctccctttctgtttatgcattaattgaatgaatgtaaggccaggttgggcagctctcattttctgattggcggtccatctgattttacagactatgaacaaaaaacagagactaaacaacatcattccaataactatatatgagatgttaatatagtgctttagattggtccaaatattgaggctctctaggccttgcaggaattcactccagacttctaaggaaggctgaaactcttgagtttgcttatttaagtcaagaattttgttttgcagttcaccaatatcaaaggtcccgtggatgctcactttg

SEQ ID NO: 205098 - DNA, 523 bp, Homo sapiens
caagaactctcagagggctttctctttctccttggtcttcctaaactttgccctaattaatcgatatcactgcctctctcagaggtgactgtggctgtgatgacggacacggaggagacgaacaggagcagaacagtttcactgccacgtccatttccgtgacagcacctgtgattgatgttgcgtggacgtgccacacttgcacttggcaggctttcgaggctgctggccttgctgccatgaggactgtgtccaaaaccactcttggaaggaaccataaacggctcccaaacatgagaaagtatgctcagtctcacgcaagccagagaaacagaagtgaaaaccacttggatgcagcccttcccacctaccagcggcaaagttcaaaggttcgctgatacctgaggctgggagacctgggacagaggtaccatgtctatggcactagggggacgccatcttggcaaagattattgcagggaatgtggcagtatctatcaaaataaacaataagcatccgcga

SEQ ID NO: 205099 - DNA, 910 bp, Homo sapiens
gacaataaaaatttccaccaccacaccaacaaacaaacacaccactttgagagtgaactagactctcttcttgaaccaccgctccaggggctcctgcaaccaaaagaacacttgactgtggcatctttccagcctcctgttagcagctaggtaaggtgcccccatggcaaggagctgcgggcagcctcaagaaactgggtggcctcttaggacctgagggcagcctccaacaagcaagcagcaaacctctggggccttctgttctacaactgcaaggaaataaattctgccaacagcctgaatgagcacggaagtgaactctttctcagtcgagcctctgaatgagaacacagttcaactcatgccttgactgcagcttgtgagagtctgagaagaggaccagatggagtctcgctctgtcacccaggctggagtgcagtggtgcaatctcggctcactgcaatccccgcctcccaggttcaagcgattctcctgcctcagcctcccaagtagctgggattacagacagctggttccagaaggaccctctgaggctggtcttccgggtaggatgtgctgtgggagggttctgtttccgaggaggagaggcgcgacacagcgtgcaaggacctgcagcaccttccacgcagcaccccctgctcctcctcctcagcccctgccgggctctgactcctaagtcaggcaggagcttcttcaggcccctggctgaggaagagccacagccaccctaaaatggcttcgggggcatgcagccctccatctccagcagctctggccatccctcgtatttgtttgtgtctgggctgttctttaagaactagagagagagaagacagagaaatataggcagtgagtgaggctgttcagaactcatgcccacatggacact

SEQ ID NO: 205100 - DNA, 629 bp, Homo sapiens
gacaataaaaatttccaccaccacaccaacaaacaaacacaccactttgagagtgaactagactctcttcttgaaccaccgctccaggggctcctgcaaccaaaagaacacttgactgtggcatctttccagcctcctgttagcagctaggtaaggtgcccccatggcaaggagctgcgggcagcctcaagaaactgggtggcctcttaggacctgagggcagcctccaacaagcaagcagcaaacctctggggccttctgttctacaactgcaaggaaataaattctgccaacagcctgaatgagcacggaagtgaactctttctcagtcgagcctctgaatgagaacacagttcaactcatgccttgactgcagcttgtgagagtctgagaagaggaccagcaatagaaaaccaaaccaacagactttgaagaatgaaagacttgggtgtgatttctgctctacttaccagttgtgtgaccttgcatgagtcacatcaccacactgagctccagttttctcatctacaaatgggtgcagacttgggagaattagagataataaatagaaagcacctaacatggggcctggcacagagtaggtgctcaataaatagtagttaagagtt

SEQ ID NO: 205101 - DNA, 326 bp, Homo sapiens
ggcctcttaggacctgagggcagcctccaacaagcaagcagcaaacctctggggccttctgttctacaactgcaaggaaataaattctgccaacagcctgaatgagcacggaagtgaactctttctcagtcgagcctctgaatgagaacacagttcaactcatgccttgactgcagcttgtgagagtctgagaagaggaccaggtaagcggtgcccagactcctgccaagggaaactgtgatatgtgtgtggttttcagccactgattttgtggtcacttgttacgcagcaatagaaaaccaaaccaacagactttgaagaatgaa

SEQ ID NO: 205102 - DNA, 365 bp, Homo sapiens
cagctctccaagcacatgcagagagcacgccagctaacgctctccttcccaccccttagtctgcaggagaaacatattcacagaaagtttagttcttaattctgtaaagtttgaggttctgctctcaatagttctaggagagggagtgaggaccatccctgccagaaagtctgaataggctgttctcaaaagagtgtggcttctggagaccatgaccttctctgcagatgctgagaggcatcaatttgcatcattttagcatgtgagcctagagaagaaccttcccagaggatgcacagcccaggcgtcagtgacgcaagactacaaatgcagagtgtgctgctctctcgctttccttctatata

SEQ ID NO: 205103 - DNA, 275 bp, Homo sapiens
tttaaatcacatactaaatgtgtcatttagaacatatgcttcaagaggtcagggtttatgcttcctttactgctatactgctgacctggaacaacatccagcacacagtagtaatcaatgtgtttttgaatgaatgagtggacaccttacccaggataataattcatgcttattgataaaggcagacaaaccagggttataagttagaacccagaggaagcctaggggtgggaggattcagggtatcacaactgtatctgagaatgaggaggttg

SEQ ID NO: 205104 - DNA, 294 bp, Homo sapiens
gcaatccccgaattcgacccacgcgtcctgagactaaaaacctacttcacaaatagaagatgggattaattggaatccacaagtttattatggacaaagctgataaactggtaccttagcaatccatgtagaaccatcatttaatcagtgtaacatctctgtgtaaaaagccttggttatgctaagattcaagaacaatcctgctgtttaaatcattattaagagaactgttttgttttgcatttcctgttttgttttaaaaggatttgtggtaactaaagaggatccagtcaa

SEQ ID NO: 205105 - DNA, 498 bp, Homo sapiens
atgcagatttccataaaaacccttacggggaagaccatcaccctcaaggttgaacccttggatatgatagaaaatgtaaaggccaagatccaggataaggaaggaattcctcctgatcagcaaagactgatctttgctggcaagcaactggaagatggatgtactgtctgactacaacattcaaaaggagcttactcttcatcttgtgttgagacttcgtggtggtgctaagaaaaggaaggagtcttaccccactcccaagaagaataagcgcaagagaaagaaggggaagctggctgtcctgaagtattagaaggtggatgagaatgacaaaatgagctgccttcgtcgagagtgcccttctgatgaatgtggtgctggagtgtttatggcaagtcactttgacagacattattgtggcaaatgttgtctgactactgcttcaacaaaccagaagacaagtaactgcgtatgagttaataaaagacatgaacttaa

SEQ ID NO: 205106 - DNA, 574 bp, Homo sapiens
attcagactgcagcttcctggttttagacatccccactggcaattgggacatctattttggagatgtaattgaaaagactgaagaatgtactgaggaccttctggctgatagaagctgacaaagaagccaagattggtgaagatttctgcaatacctgagtttctaatcacaacaacaaaaatgacctggatagaaaaccttggagatagtaattgatgggcatcacgtagctggttgctggagaaacactgaagcagaacttgtaatatcttcaaaacaagtgaaggccaggaatcagaaatgcttctgaaggtcagctgcctctccagccatctatgaagagctatggttctgaatcctggctaatatcagaatcatcctgggagcttttgaaaatcctgatgctcaagtcacactccatactcagacaagaagctgagtctcagagagagaaaatgactcatccaagcaaggtttgagacctaagaaaggttgtgtaagcagaagctggaagacccttgaaaagagcattcattcaagaaatgaagcatgagataggatggaaggagggaa

SEQ ID NO: 205107 - DNA, 230 bp, Homo sapiens
agattgttacctatcagtagttctcatctcacattgatgagaaggaaaagtcatttccaaggtaacccagactaacatatttgaactctttctcttttcaatatttttcctaaagaatattgtgatgttgatgtttctcttgagtattaaaaataagaataatgtgtttttatggaaccatattgctttatactgatacatcacttaataaacataaattacctcctaga

SEQ ID NO: 205108 - DNA, 526 bp, Homo sapiens
attggcgacatttcaacttttaaccacttcacctatcttctatttatcaaaatctatgagtaagcattatgtgttacaataaataagactcagcaaagctctgagtgaagtcccaaagagtgaggtgcaattctgaagtgcatatgatttgtgacagttatatgtgaacttcagagaataattttacaaacgttctggtggactaaagctgtaactaccaagaggtacaggctgtgccttaatcatctttgaatttcctctaattctgtgatggggtcttacaacaggaattaaaatatttgtagaaatggtcgccaatccgttggcgtaccattacaacatccttaataatgactggatcaagcaaattaagaaaaccaagccacggccggacgcagtggctcacacttgtaatcccagcactttgggaggctgaggcaggggaatcgcttgaaagcgggaagtggagcttgcagtgacccaagattgcaccactgcactccagcctaggcgacagagtgagact

SEQ ID NO: 205109 - DNA, 480 bp, Homo sapiens
cttaaatacactcttgatgaacatagttgcaattgtttagttcttttatgtggttctggccatattagtccaaagattttagccacattaatgcaataagattgaatttaagaaatagtgtatagcatgccatcataacaaagtgataaagaagtgagctaagccaggtgcggcagctcacgcctgtattcctggcactttgggaggctgagtcaggcagatcccttgagcccaggagctcgagaccagtctgggcaacatggtgaaaacctgtctctacaaaaaacaaacaaacaaacaaacaaaaacaccaaaattatctgggcatggtggcggcatgtgcttgtagtcccagctactcaggaggctgaggcgggaggattgcttgagcctgggaggtcaggctgcagtgagccatgattgtgccactgtactctagcctgggcgacagagcgagaccccatctcaaaaaaaaaaaaa

SEQ ID NO: 205110 - DNA, 296 bp, Homo sapiens
ttcaatcaataaaataaaaaataaaattgagggcttcaacaacagactagataaagcagtaaaaagaatatgtggacttgaatataggtcttttgaaattatccagtcagaggggaaaaaaagaataaaaaagaatgaagagagcctatgggacattaagtgaagaagtatttatactatggtatttctagaaggagaagagacagagaacgagacacaagcttatttaatgaaataattgctggaaatgtctcaagtcttgggaaagatatagacatccaaatccatgaagcttt

SEQ ID NO: 205111 - DNA, 259 bp, Homo sapiens
tctcaagtagctatgattacaggcgtgcgccaccagcccagctaatttttgtatttttagtagagatggggtttcgccctgttgagcaggctggtctggaacccctgagctcatgcaatctgcctgcctcggcctcccaaagtgctgggattacagccactgtgcctggccaagtaaattttaaactcattttttgaataaggaacctgaggcagagagaaatgaatacaccttatatcaacttcctctttgggaaagg

SEQ ID NO: 205112 - DNA, 595 bp, Homo sapiens
aagaaaaaaaaaagaaatatacttcagttcatctaaaatataggtagagtaaaaatcagaagcaactagtcttagatgtttcttagatttcagtagagaccttctcttctttgtctctaccatttctccaggatctagcagtattaggggcttaatataaatgtttgttgagtgaatacatatttgtaattacagagttaataaacgagaggggcagaatataattaaaggctaggacatattggccatttactctactaataaaagagtactatctactcagtgtcatttactgttactgtagtaattaatgcctttggaagaatcttttgaaatagttctcaaattggtaccactacttggtttggaattatttttttttcttttcataatcaatggttatataaatgtatattgtcctagtcagtattttatatatgctaaggactcactagctggcttggcactaatacctcaataaaaggaatacttcttttggaatcatgaaacaaaagtgaataaacctccaagttatttttccaaccaaccttctttgaaaaatcttggatgagtcactcaaatcaagacatgttat

SEQ ID NO: 205113 - DNA, 387 bp, Homo sapiens
cattcattcatcaagtcagtctaaaaccctctggttcatccttggctcctctccatatcgtataacatgcatctggttcatcagaacatgccattgctttgccttcaaaatagacttagaaatgcattgcccacatcttcagctcatcgccttgtcccagtcaccctcctatctcttgccaggactattgtccttgcctcctaattgctctccccgcccctgccatcactttccccaccctgaggccccgccaggatgtccgcactatgagagctgggcctttgtccacttgactcatgcctgtgtcctggtgcctacaagactgttgtcagttgagtaggtattcaataaatgtattctttattgaatgaatgagtatcaaaaaaa

SEQ ID NO: 205114 - DNA, 155 bp, Homo sapiens
tagaactgccaaactcgaatggagcccaggtctcttttgctcccaagtttgtgttctctgcagtacaacatgctgcttctgccaataagtgattgttgggaagggaaattggcgtacctcggctgaaaaaggctttaatgtcgcccaagtccagg

SEQ ID NO: 205115 - DNA, 711 bp, Homo sapiens
gaataacaaaaaaatacactacactatcagaaaattccaagggttctagtggctctgtaacaggaaccagggacaaagaccaaataaatttactatactacaaataccctgtttaacattgtctagctttccaaaattatgaatgatgctgcaacacatctatgtatatacatttgtgtatatttctaataatttccttgaaataaatggctacaagagaatcagcgttaatgctgtcatgtccaatatggtacttactagccacatgtgacgattttaaaattatttatttattcattttgagacaaggtctcactctgttgcacaggctggagtgcaatggcccaatctcggctcactgcaacctcgacctcctgggttcaagcaattctcctgcctcatcctcctgagtagttgcgattacaggagcccgccaccaggcctggctaattttttaatttttggtagagatggggtttcactatgttggccaggctggtctcgggtcgaactcctgacctcaggtgatccacccacctcggcctcccaaagtgctgggattacaggtgtaagccaccatgcccagccgaaaattcattttctggaattaatgtcttttttttttttcattgggaatttcttagaatatcgggcttccagttcctctctctctttttaataaagacgcggggtctcgctctgtaacgcagg

SEQ ID NO: 205116 - DNA, 559 bp, Homo sapiens
gtttatttctgtatcctgaaggtattaggttggtgaaaaagtaattgcggttttgccattacttttaatgcaaaaactgcaattacttttgcaccaacccagtattttacttgtttttaaatgctactgtttaatttttttctttctttctttcttaattttttttccccccagacagggtctcactctgttgcccaggctggagtgcagtggtgcagtcttggctcactgcaacctctgcctcccaggctcaagcgatgctccctcttcagcctcccaagtagctgggaccacaggtgtgtgccaccatgcctggctaatttttttttttggtagaaacagggtttcaccgtgttgcccaggctgttcttgaactcctggcctcccaaagtgctgggattacaggtgtgagctgccatgcctgaccttaattttcttttattgggtaatatatgtaattttgtggtaatttattttaagacttttctatattatttatttatttacttattgagacagggcctcactctgttgcccaggcaggcatgcagtggtatcg

SEQ ID NO: 205117 - DNA, 308 bp, Homo sapiens
gttacagatagctcgatcaacaatagcttgtgcttacgtaattttgatagtgtatctttgagatagatttctgtacttggagttgctagggcaaaaggtaaatgtatatgtagctttgtaggtattgctgtatatttgaaattactctccgtataggggttgtgccattttatgacctcaccaacaatgtaatagtttccctgtagccttgattaaaaaggtataatgtcaaattattgggtatttgtcagtctgatgggtgagaaatggtatctcaatgtattttaatttgcctgtctttaatatga

SEQ ID NO: 205118 - DNA, 471 bp, Homo sapiens
tagaggttttctctatttctccttttcactgtgacccaggaaataattttcagaagtaaaaaaatctcatctgagactctgcaacaggcaccagagagtgaggaagaactttgagtaacagaaactgctccaatttctcatccgcatctcacatctctgtgtcaactatccttctatcccatttattctggtattagatatgttgtcagtgtctcttgttaggtagagaaatcagcagtcagatcttaagaccatttggtaggtgcatcaggaattgacacgcaggccagttttccagtcctacatgtattcttttctctgtatcctgcctctcttgctcttggcttcctgccttctctcctactcatttttagaacagtctagatgcaggcagctagaagagttatttcctccaagctgtctaggaaaagggacaattaaagagagattctgcacttattatgatataaa

SEQ ID NO: 205119 - DNA, 589 bp, Homo sapiens
cttgggttcacccacaagttggaggcggcaggactctaggggtttcagttgcccttcccagagtggcccaccaagccttacagtgaatacttgtgaactgtttttgtttctctgcctcttggggccatcagaagtccctttgtcctctttttatttcttctgatgtgttgaagacactgtacaggtcttaatctcaccagtagtttattacaacccacacatatttggtttatagggatgtgttttcccgctgctttattggagatgttgtctgggaggtcttgcttttgctatcttagttgctctgtttccatggggtgatttggagaggtggaaaaattatgccaccttgccaccactttcctaattactttaagcaaccaaaattttagcaacgaaacttttaaattactttaagcaaccaaacttttagtctatttctgttgtactttattagtaagcatctacctgcctgtctatgttaacacgttttctgatgcactatacagttgacctttgaagaacacaggtttgaacggcacaggtccatttacatgcagattttcttctgcctctccccggctgctgc

SEQ ID NO: 205120 - DNA, 420 bp, Homo sapiens
tattctctcctctttgtttctacacattttcttactcagctataatcccatttcaaatcattttagagccagtttacaacctatgctcaggagaaggctgacatagcattctacagaattaagttagcagtaaggtgataatacctggcatagtatggtggctgagaaaggaaaggatataagtcatttcaaagaattaggcctggttactgacaatagggcatgaacaaaagggatgaattcaggatggctttcagcctgcttggaagatgtgggtgacactggcagcgaggcagatcagtgttaggtctcagcttctcattcgagtggccctattaatctagggagtacactctagggaaggtggtatgtggtagaatagaggctttggaattggacaacataggctttagaattgga

SEQ ID NO: 205121 - DNA, 396 bp, Homo sapiens
tcaaaaaagaaaaaaaaacaccagaaaatccatttttcctgtctattcagcagtgtctagcaccagcattcacagatcaggaaaaagggagaaagagagagaaactaacagatcaagaaagacataacctggtattcttctgtttccaaaaaatgtaattccatcaaaagcaaatgaaaaaccttcaatcttctcattagatttttactatttgttccattctactcaatctatctttaaatacttctttaaagtattctgacatctgtattgttttaaaatgaaaaataggtttttatcacacttggccacttgccacagccctgcttcacggcagctatcagaattctggcagtgcaaaatacaggatacgtggggacgaatattactctagac

SEQ ID NO: 205122 - DNA, 422 bp, Homo sapiens
aacaaatggaaacacatcccatgctcatggatgggtagaatcaacattgtaaaaacgaccatactgccaaaagcaatctacaaattcaatgcaactcccatcaaaataccaccatcatttttcataaaactaaaaaaccaattctaaaattcacatggaaccaaaaaaagagcccacatagccaaagcaagactaagcaacaagagcaaatctggaggcatcactgattacctgatttcagactatactgtagggccatagtcaccaaaacagcatggtaatggtataaaaataggcacatagaccaatggaaaggaatagagagcccagaaataaactcaaatacttatagcttactgatctttgacaaagcaaacaaaaacctaaagtggggaatggacactctttcaacaactggtgct

SEQ ID NO: 205123 - DNA, 583 bp, Homo sapiens
tgttccgtatctctccattcccttccttaggctgggcgatcgctattaccattaccgctatactatgcttacacattcatatcttcatttatgtgggtcttcttgtttaaaaacacaaaggcatatctatacacattttcctgtgctttgctttctttcacttaatttatctcagagctggttccacattagtacataaactgcagctttgctctttttaacggtggcaggccattcctctgaaagatggcctgatttatttcaccagttcctggttttgcggctcaggatgggaaaaaggaagtctgagtgaatcgcgttgaggttactaggaattgccatgctgcccacctcccgaagtgttaggaggtaacatctcatcgtctcatcgcactccagtggagtgtcgcgaagttgcaactcggccccaaggcggcccgcacttccacccgcacacaaaggcaggtcgcagccccgcacgcggggacagggccagcaaggggcggggaccctcggggccgccgcctccgcagccccgcgtgtgggaccctggggcgggccgccatcttgtggtgcggccgcc

SEQ ID NO: 205124 - DNA, 563 bp, Homo sapiens
ctgactaaatttagcattgttatattgggtagcagagagctgaagcattcaaacgttttcttacagattctcaaaagagacgcatgatttgaagtctgtacatttgtgaacgagtgatcactattcataatcacctagcaactttgtataatttataaaagaaagaaaagagaattttaagaaaaaactaaagtgtatttttttgctaaattacatttaaaaagacattttatggattagtaaagcacattctttgtaatttaaaatctagaagtttgttctgccttgactaaaccgtcagtttcatttaataagggttttttttttttttctttcccctctaaccttagttactttatttggttggtagatatgtcttcctgtaaaggactccaatgcatatgtaagtaatacttacgttcaggttgttcctccctaccccggtcttataagaagaattgcaaaagtattagaactagaagggacaccatatacaactcagtctttctccagcctctttattttgtaaatgcaagaagagaggctgagagcgattatgattc

SEQ ID NO: 205125 - DNA, 469 bp, Homo sapiens
cccatggagccgaggcaggataatcagttgaacctgggaggtggaggctgcagtgagctgagatcatgccactgcactccggcctgggtgacagagtgagactctcaaaaaaaaaaaaaaagaagaagaaaaaattgttcaagcatacacaaaagtagaatagtatagtgtatgcatctatagcaattgtccatattaatcatctatccctctacttttttttctggaaagttttaaaggaaattccagacatactccatttcacccacttcagtatgcacctctaattgataaggatttttttcttttttaacataaccataatgccattataatacctaaaagatgtaacaatacttccttaatatggggtatttaaatgaagtagagagataccaatcggatttgacaaaatgttgatgatttgttaaatttacttccaatattattattattactggtagaagga

SEQ ID NO: 205126 - DNA, 269 bp, Homo sapiens
acttcaaaacccatctatgattttttaaataaatctcaaactaggaatagaaacaaagttatttaatttgatagagaatctaccaaaaagttacagagaatattactcttaatatttcacattaacaaaactctctttagatcaaaaacaagatgaccctttatcacttccatttaccaatgtactggaaggctgactcagggcggaaagcagaccaactggcaagtatgtccactccttactcatagacaatctgtctaccaagaaaa

SEQ ID NO: 205127 - DNA, 598 bp, Homo sapiens
ttcacaccctatagtcaatgagcaaaatatattgcagaaatgcactttcaaaaaattaaaacaggctgggcaacatagtgaaaacctgtctctcattaaaaaaaatttttttagctgggcctagtgatgtgcacttgcagtcccagctactcaggaatctgtggtgggaggaccacctgagcctggggaggtccagcctgcaatgagctgtgattatgccactgcactccaccctgggcagcagagtgagaccctggctcaaaaataaataaataaaaatctttaaaaagtgagcttaaaatatagccatcacctaggctggatgcagtggctcacgcctgtaatcccagcgctttgggaggccgaggcaggctgattatgaggtcaggagttcaagaccatcctggccaacatggtgaaaccctgtctctactaaaaatacagaaattagccaggtgtggtggtgcatgtctgtagtcccagctacttggggggctgaggcaggagaattgcctgaacctgggaggcagaggctgcagtgagctgagatcactccactgtactcttgtctgggcaacagagtgagaccctgtctggg

SEQ ID NO: 205128 - DNA, 469 bp, Homo sapiens
tcccctttctcttggcaagggtgctagggcatgggggagtagagggagatccagcaataaacaagaaccccccgactgccccagacaccagccaggaggagaaaaggatctggggtcctgcacccatcttggagtttgaggaatgcctcgggaatcttagcaggtgctataattctgaataaaagaagactttagttccctttctctgtgtcaggcccttgggtaggtcctctcacgtacagcatctcgttgaatcctgaaaacaataatgatgctatgataatgccctttttatagaacctcagtcagtgaggttaacttaccctgagtcacagccagtaaatgacaaatgacagaggtggcttcaggtcgggtctgtccacctccaaagcctatgttcttggcctatgccaggcaggggtttacaacctttaaggcaccactctcccttttaacagacataaaaata

SEQ ID NO: 205129 - DNA, 483 bp, Homo sapiens
gctacctagaggaccccaagcagttatacacactcacacatatacactgatagatacggaaatataggtgtgtattcatggataaatatacatacatatgtttcctagctctgtctactgagatggcctgtagcactgtagcactaaaagcactgacatcccagtagcagtgagcacatcaggttccccaatcttggtctctaaatgctattatttaataaaaggagccaggacttcttggaaacataggctccaggactgggtaggcaaactacaagatgagcctggagcatcttctggtgctagaaagtaagaaagtgctgaacaacaacaacaacaatgggaatatgcagagtacaggaaccaacctgaaaaagctcttattggccaaagctggaacaatttaggtcaaaaaaataagtaaggatatattgggttataactgaaggaataaaataactatccatgagtctgttttgataa

SEQ ID NO: 205130 - DNA, 696 bp, Homo sapiens
tgccattgctgccctggacttaccttccaaagaaatgttatcactttaatatcagacactggctctagttctagacctccaaagctaagatattcattcagtggtataatttatttttcactcacttttctgtgattttataatatggcaattaaaatgttcatttagaaaggatattaaaaatattatataaaaatcacattttagtaaggtaattcataactaactcaatttttaaaattgaaatgcattttttacataataaccagctagaaatatcagaatacaaatatatcattcacaatcgagaaaatatatacaaatatccaaaagtcttttatatgctgttttgaaggtattgtagtgggtgccatgtgattttgatgttccaccttatctccatgtttttagtctgatatagctgcatcaaggctatatatagcgatatttcccctgcaagtatggaataaccacacttttactctgaaaaatgcttcttcttagataattctgtcatctcaaccagaaaccagaataggcaaattcatgcaactgtagattttgtgatgcttcattttcactggttcaccaccccaagacatgtaatttattactctattcactaactcatttgttcttcaaaatatttttggctatctattttttatgtgatcttttaggtcctggcagtcaaca

SEQ ID NO: 205131 - DNA, 552 bp, Homo sapiens
tttcttggttttaacctcctcctggcagttctgtgccttctcatttaccccaccagagttgttcttgctagacttttactctggtatcagagtctatttagccaagagactcactgggtattagctaattggcccatggaggagcttccatagtttccctgtccccactcaacatcaactgcagaaattgattcataggggccgtggtcccctatttgttagcaatacatggatgtttatctgttgaagaagacattgtggtacattggaaagggattggaataggagcaaataagccccagctccagtcagcagttttactgtgctatgtggataatcattttgctttgccaaactcacagacatgttatgtgactagaatatgatatcttgtgtaagagtactttcaaaattatacttacgtggaaatgagaactgatattaatacgtaatatatctgtgaaacattttatgagatttttcatgtcatttctctttgaaacagatgagtatcattagaatttttttgcaatttctgaaaggcagacctct

SEQ ID NO: 205132 - DNA, 570 bp, Homo sapiens
gttaataagctttatttcagagtagctaaataaggacaataattttttgaataaaagaaaggaagtaatactagtctatattttaaaatttctcagcaattttaatattaactttaaaaccagataacaagtttaataacaaagggataaagcagtcacacagaaaataatggttataaacaagaaaaacataacaaaataataacttattttatgttatcctcttctgctgctcagtaataaatgtcataggtagaatactggagcaaatatgtaatacagattataacaaaaatatctgtgggttttagggaacaaaaatcccatagaaactgttacatggaggagggttatgagaataagaacaggccatgtgatgagataacctcaagataggaaggcacgagcactgatgatagtggagtacaaggacgtcaaacagaaatgctgcttcttggattggggtaccactcaatgcagtaaattacacctgttattttctttcttttctttgtttcttttcttttcttttttttttctttttgagatggtgtttcactcttgttgccc

SEQ ID NO: 205133 - DNA, 265 bp, Homo sapiens
agttgtaaatatagaaatgtactggaggaaagatttctaagccaggaatttagactggaaaagacatcagaatgtaaatggagattgaagccttgaggaaagagtgggatcacccaaggggaatttcaagtcagaagaaaagagggcctcagagtagtccctgggaaaagactacatttgagaagccagcagagaataagaagtctgaggaggcagctatggagaacgtaggcctgtggatccctccaagtaataagcttgtttt

SEQ ID NO: 205134 - DNA, 346 bp, Homo sapiens
ggagagaaaaaagccaaagggtgggaactggaaggaggggaagaatatgatgacattgttactttctgccaggagacatcccttcttctcagtgcctctggccaaggaggttccaatcatatgcccttccaagctagtaagctcctctaccctatcagccacagggtgcatggcagggtaatgtatgatgctgctctgccctgcagactagaccttctggtctcacaatcccatagcccatgcaagaaggagagggaaagctgctttggtaccaagttgcagagtggcgaaaattgaaacagacttaagtggaaaaaaacgtttttgccagctcctctattggcct

SEQ ID NO: 205135 - DNA, 198 bp, Homo sapiens
ccacattgccaagtcaatcctaagccaaaagagcaaagctggaggcatcacgctacctgacttcaaactatactacaaggctacagtaaccaaaacagcatggtactggtaccaaaacagagatatagatcaatggaacagtataaaaaagttaataacaattgttggtggggatgtggagaaattggagcacgcatc

SEQ ID NO: 205136 - DNA, 350 bp, Homo sapiens
tttatcaaactctattctaacaaagtagtttatctttcacttcatttctagggttaaatgttacaggaaatgtttactttatcaaacacttaaatagagcttactataagcctcaccctcttctaattgctttacaaatactaatttctttagcaatctatctatgacaaacctatgaggtagctattacaggtacaaaacctgttttccaaaacccttagatcatgtatgtttcagaatgtaggcatttttgtacttttgaaaagtaaaacagcatattctagaacttggcccagtgggctagggtagcctgccaccaagatagctggactataaaatggaagaatatt

SEQ ID NO: 205137 - DNA, 470 bp, Homo sapiens
gcaataagtcagttaataatttgttccaccttctgctgaagtgtttctcacttcgtcaccacatattcactgccaatctggtttcctcagagtcctcctaaaattcatctctaggcaagttgcaattcattctttttcaaaccaaaaattattagacccaaagctaaacagcaccttgtctcaacacataaaacaaactttaaaacaaaaaaaaagtcttcctggcattttccctcattatctaatatccaagtgacctgcatatttctgattgctctctttctcccctcccatttttccctcttaagccttgccactgaaagatgatacatcagtttttcagaaaattagcagcaacagcaacatgtccctttattgtaagttgctttagttttgtttgagttttaagataaagcctaattccggggaatattttctttcctgtgttgttttacattaattaagaaaaa

SEQ ID NO: 205138 - DNA, 340 bp, Homo sapiens
tttaacatcagaagattacaggataaaattatttgtcatgtagtgagccaggggtagaaatcctgttttaaaactgattttctgtggcttcagcaaatcatagaattgtcagagcaattacccaaagctccagtggaaaggaagagtcagtcttgtttgcatacttgcctggcctagatcttttcatgatctttctgccaccatgttgctgaagaaatcttcactccctttgcctgtgtgtgtttgggatggaattactgaaatccttcctgaattctgcttacgtgaaatgttactccatgtggttttaattccatgaagatatttcctccagtgtatg

SEQ ID NO: 205139 - DNA, 220 bp, Homo sapiens
cttaagcaatacttaataggaacatttatagcactaaacacccatattagaaaagacaagtgatctaaaatcaatgacctaggcttctaaactaagacaatagaaaaagcagcaaattaaatccgaagaagtagaagaaagaaaataaagttcaaaccagaaattaaaaacagaaaaacaacaacaaaaatcaatgaatccaaaagttgcttctaaaaga

SEQ ID NO: 205140 - DNA, 381 bp, Homo sapiens
acagggcacagctgtacagtaccaattgccctgtgtcctgtacaaattttcaacgatccaaacatctaggtgcaaaacctgtttgaaattctctgtgttggccaggcacggtggctcacacctgtaaacccagcactttgggaggccaaggcgggcagatcacctgaggttgagttcgagaccactctggccaacatagtgaaaccctgtctctactaaaaatacaaaaaaattagccaggcatggtagcgcgtgcatgtaatcccagctactcaggaggctgaggcaggagaatcgcttgaacccgaggcagaggttgcagtgagttgagatcgagccactgcactccagcctgggcaacaagagcgaagctctgtctca

SEQ ID NO: 205141 - DNA, 644 bp, Homo sapiens
ggaatgactgtaagaccttctgatctcccctggtattagaacagtggctcctggataccatgtgggtcaataatcctcacccaaccccagtctctgcttgctgaagttacccattcctcatcccagaactggagaaaaatatttcaacgggatctagaaaaactcctgtggtgcccttgtgccctgcagttgtttgtgcagtgtggcttgaggagttcccaggtggactgtttagctgtgtctttacttgaagggtactgaggatccaaaagtgtgtccatggacattgccttcttgttttcagccatttgttcctggacttaactatgggatatttttgccagaaggaagaaacaccttcctttcctctggcttatcacttaggaataacatggtaacttttgcataacagtaaaatatgttatatttgaaggcattcagctttgcaatccaattactctttatgcaaatgtgtaatttaaacatcttggccgggtacggtggctcacgcctgtaatcccagcactttgggaaactgacgcaggcagatcacctgaggtcaggagtttgagaccagcctgggcaacatggcgaaaccccgtctctactaaaaatacaaaaattagctgggcatggtggcccac

SEQ ID NO: 205142 - DNA, 333 bp, Homo sapiens
ttaacatagctaaaccaacttgattattctagagaagattattttattatccagacctattttttctccctcttctttctgtactttataaatgaaattatttgttatatataaatgtaaagcattatttatatatgtaaagcattattatttatatatgtaaagcattatttatataaagtgttagccacatgtgtaatttaaaattttctgctgtccttattacaaaaagtaagaagaaagaggaaagattacttttagaaatgttttatttaaacaaatatgtctaaaatattttaacatataatcaatatgaaagttactaatattatt

SEQ ID NO: 205143 - DNA, 312 bp, Homo sapiens
tttgaattataaatatacttatctaccattgtcatgttttttgttcttagttcatgtggtatatcaaaaatgttaaacatttacagataatatgttaattagttgtaacccattttctttaatccaatcaaatatttgtatagcatatatgcctctgttttaattaaactaattgtttatttaacatatactgttagttatatgacatatactcctttttaaatgttagaacaaaaacatctaaaagaagcctatgtttaactcagtttgtagaatccagtgtttgatataattttttaacaataaaataaa

SEQ ID NO: 205144 - DNA, 561 bp, Homo sapiens
cctagaattttctatactcacattcactcaatgatgattcatagaataaagatgttttcagacttgtacccttccttaggaagcagttgaagattggctaggaaaagtaacggctgagggggcggccaggataaaccaagaaagaagataacaagatcctgtaaacacccttctgccttcactagtccaaaaggatctctaattataactggaacaggtctctcttcgtttcccagctttaaagtcaggttggttgcaaattaactgtaagccaccaggtgcggtggctcacacgtgtaatcccagtaattttaggaggccaaggcaggtggatagcatgaggtcaggagttcaagaccagcctggccaacctggcaaaatcctgtctctactataatacaaaaaaaaattagctgggcatggtggcaggtgcctgtagtcccagatacttaggagactgaggcaggagaattgcttgaacccaggaggcggaggttgcagtgagccaggatcgccccactacactccagcctgggtaacagagcaagactccatctcaga

SEQ ID NO: 205145 - DNA, 117 bp, Homo sapiens
cgttcacctctgcactgtagggtggggctctaggccctgcttccctctccaacctctggagaggatgcagtgcatgactggatctgaaaacaaaatcctcaggcaaacagggaggcc

SEQ ID NO: 205146 - DNA, 335 bp, Homo sapiens
aaataaaatttgaacttgcaatattggtcaagtaaaaaataatccaaggtaaaaagtattaaattgagccacattagtgaaggggacaatcgattcgtagacatttttgaaattaaaatctgtgatatgaaaactgttggagatacaagaaaacagacacagaaatctactgaaagggttagactttaatgcacctctctcaagccggattggcaaaaattcaagtctggaatgaaggtaggaatatttgtacattactggacaagtattatgggacaattttggcagtgtcataaaattcaaactgtgcctatcgccacaaccctttgatacca

SEQ ID NO: 205147 - DNA, 353 bp, Homo sapiens
tgatatacacaagtttacaagccttttatttataaacttgtatataaataataaaagacttatttataagccttttaatagcaaagaagacgtaatctctttgaaataacatccctaatgacttctgaggctgagcccaagagctcagagcaatacttcgtcatctcttcctggatctgtgaattaattacagtgcagaaaatgcaggagagattgttttgttttatttctaatagagtcaatgtatgtttgcaatgtaagactctcttgttatttaaggaaataacatgaatgtcaggcaattgtgtataatgcattacacggtaatgtttaggcccttctcaccattcttc

SEQ ID NO: 205148 - DNA, 415 bp, Homo sapiens
cagcgctttgcgctcccctctccaaaccggaccttgggtttgctgtcctccgaccagctgaaacttgggtgagccccagggggtcacacaagcgagcccaggcgcataggccaacagcgccacgagctcagccaaagcttcgaagcccactcttaaccagcggggaccagaagtcagattctcattttagaggtagaagacaataaaatgagaagttttatccgatacaattgcataccaatatttgcatatctgaagggaattgggtaacaaaagtttagggaaggagaaggggggagctccatgatattatattaatttttgtattctctctcccccctccaaaaaattcccataactttggtcttttatctttgactttaataaaataatgattccttgagaaaatggggta

SEQ ID NO: 205149 - DNA, 407 bp, Homo sapiens
gggtttagtattccattaaggttgggaaatgctttactacaggacttcagagcctttagtggactgatgtgtgttgtaacactcaaatagcaatttttctataaagtcatcccttttatatatggcttcactttccacagtttcagttacctgtggccaactgcagtccaaaaatattaaatggaaaattctggaaataataagttttaaattgtacaccataaacagtcttcttttcatttaacttagagtacttgtatgagtttggtagatttctagaagtagaattactatattggcagcctaagaaaaagacactagagaaaattatctccaaatatgatgagtttattagggaataagaaagaagtatggtaatttggaatgcactggcaaaccaccagtac

SEQ ID NO: 205150 - DNA, 622 bp, Homo sapiens
agtatcccccaaaataaggaaaagttgagtatgttgtagatactagtctgttttattatttactaccataaaatgtacacaaatgcattagaaagttaatacagccatttgcagttgagaaatgtaaacaaacataaagattcaggcagcattaaatcataactgcacgacattcactgtagtaatattgtactattataatatgtagccactgcctattgctactgcagtgagccccttaaaatgccatgtgacgctaatcatcttcacatgaacagtttatctctccagtaaattgcatgtcagtaaaaagaacttgtagtacacaggtattgtggtttagtgcaatactgtaagtcttcaatagcaccatgggacccatgcaaagtggcgctagtgatgctgagaaaagtcatggcattgtaagaaaaagttcagttgctcgatatgtgctatagatgaggtctacagctggaattacctttcagacagatgtacacttaccgtatcgataagtgcagtactgtacatgtattttctcttacaactttcttagcattttcttttctgtagctttattgcaagaatacagtatataatacatataagacagaaaatgtgt

SEQ ID NO: 205151 - DNA, 315 bp, Homo sapiens
caaataacaaactgagtcaggatccacctttctatgtatggaataaagagcatctatttgaaaattggctttctaatttataagctgtgagatattgaataactcccggattcattttgtcttaattccctaatctataagatgaaaataatactcattcatttgccccagatatattaattaagcaatcataatgtttcagacactgtgctagggttcaaacactgtagtaaagatatgggcttcaggacattaatagtttagggaatgagatgatgagtaaataaacaattagattacagggttaagagcaac

SEQ ID NO: 205152 - DNA, 745 bp, Homo sapiens
cccacttactcttctcctttaccataaactaagtcttggtctaatggaataataatgtgttttgatgccagtggaaccaaaactctgcaagtccacagatagtaatgtttactgttgctttacaggtaagaatggtacccccctactaagaaagtgtgtatggcaggtaaacactgagcacacatggatataaacacagggataatagacactgcagactactagggaaaggatggaaggagagagacatgggagaaaaactacctattgggtgctatgctcactacgtgggtctaatacactatgtaacaattctacacatgtacccccgtatctaaaataaaagctgtttttttaaaagaaaaattgctgtaaataatggaaagaaaatgacagggctaatattttgggaatcttagaaaagaattatattcaaattacataagaagaaagacagagtcgggtgcggtggctcacgcctgtaatcctagcactttaggaggccgaggcagacggatcacgaggtcaggagctcgagaccatcctggctaacaaggtgaaaccccgtctctactaaaaatacaaaaaaaaaattatccgggtatggtggcgggcgcctgtagttccagctactcgaaaggctgaggctggagaatggcatgaacctgggaggcggagcttgcagtgagccgggaccatgccactgcactccagccttggcgacagagtgagactccgtctcaaa

SEQ ID NO: 205153 - DNA, 397 bp, Homo sapiens
ccaggtctatgaaattctcagtcattaaactttccagaggctctttaaattatttgtgtaatcagagaacaaaagaaggaatcccctgctctgggatccaggaacaggcataaaagacataagagagaaagtggcctctattctccctctaaacaagagactctgaatttgggctgtttcagaatcaactggaaacaccctgcctagagtgcgtctctagcacttttattttattttattttattttattttattttattttgagaccaagtctcgctctgtcaccaggctggagtgcggtggcgcaatcttgactcactgcaacctccgcctcccgggttcaagcaattctcctgcctcagcctcccgagtagctgggattacaggcgtgcaccac

SEQ ID NO: 205154 - DNA, 584 bp, Homo sapiens
ttgcacactatttacctacaaggtcaaagcagattccaggttgaattcaagctcacttacagacttcagtccaaaatccttagggtcagtaatgaaagtcaaaggtagagccagaatttttaccagggtgtacctttcagcagccttagatatggttgattataagttgctgatagatatggccaattacattgtcatcactgtgttgataattttgatttctatgtgtctaaccagcatagacctgcccctagacgaatgtttagataagatgccctgaaactaaccaatccctacccttgttgggatctactcatacaagagaatgatcactgagggatgtttaggaaaagagttcagcttagaaatttagtgttgcctctcaccatgccctttccattagatgtcatgggtttcaagcaaaatttgagataaagagttttccaaatcagtattttgttcaaacggttcccaattcatgacatgataatagttccacataaaaccaaaggatctgatataattaacaggcttcatttcagaaaatcttgtttgacaagatttctctgataattacaggttaa

SEQ ID NO: 205155 - DNA, 378 bp, Homo sapiens
tctgtaccacagaacttaagctctaatgagggcttcagaaaataaataatttcagaacatgacaagtttaattaaaaaaaaaaaatgcacagaaggacagagtgtaaccagggtgaatgttttcaagtgtttggtcaatgggcactgtaagaatcaatgccgggggtagctgaacagcgatgaagccaagaacttgagacacaaaaggcattttccctgtttccaggacagctggatgtgtttgggccaaataattttgttctgattcatttgaagattcactggtctataaatacaagcctacaatgtgacaataggatgttcctaactgcatcagtaccaggaagcatgaattagtacagtgatccaataacttct

SEQ ID NO: 205156 - DNA, 399 bp, Homo sapiens
agactccgtctcaaaaaacaaacaaacaaaaaagtacatacctctgctgagacgtcaccttcgctcactctctcccctcctgaaatctgagtgccctatatcctgcctcattatggcaaatgaatgttaaatgtggctttttttgggtgaggatgcttccagaattgatttgccctgaaaatgcatcgccactgcacacgtttggacaaaatactattagaaatcctccctgattacagtaactcaaggttttattaactatttcatacctactgttgcatgggacaaaaatgcttttgaaaagtttaatttctacaatgaaatgagtttttttgggggggttttattgtttttgttttttaaagtccttaaatcatttcagctttgactcagggccta

SEQ ID NO: 205157 - DNA, 495 bp, Homo sapiens
agatcaacagaaagttagttctttgagaagataacaaaatcaacaaaacgttagtgaaactcagaaaaaaagaaaaaaagagactcaaatttgaaaaaatcataaacggaagaggatatgtcacaatggacaccatagaaatataaaggatcattagagagtactatgaacaacaatatgccaataaatttgaaaatttaaaggaaatgaataaattcctggacacatacaacctataaagattgaacccagaaggaaaagaaaacacaaatagaccaattacaagtcatgagagagaatcagtagtaaaaggtctttcaacaacaaaaaaatccaaaaccagacggctttactgctgaattctaccaaacctttaaagaagaattaataccaattctttccaaactatcccagaaaataaaagaggagggaattcttcctaattcattctacaaggccagcagaaccctgataccaaaactagttgatcgatac

SEQ ID NO: 205158 - DNA, 340 bp, Homo sapiens
gggtactgaagcaggactcagcatgtcagcaacaggctcagaagagagatgagttttcagtgggacagagtcagggcatctgagccagggaaagtgatgaattgtacaataaagcccttttgaatctgctctcctctggcttatttcccctagggcatgtgagtacactgtggatctgtttatttttcttatttattttctgcattgagtaatacaatttttgagactcctatgaagagggtatctaatgtagatgactctgtaagtacaatattatgatctggagtgtgaagattgtccttctgatggcttgagtctgaaatcagtgattcaacagttc

SEQ ID NO: 205159 - DNA, 900 bp, Homo sapiens
gtttaatggcaaattaaaaccacaaattaaagttggcccatatttatggagactttaaacgctccataggaaatgttaactttcgttttttagggaatgggaaactaatgaagattctttttctgagctagagaatgacacaattactgagtgcttgagtaaaattaatatgaaactgctattttaagaaagtgctggaaggagaaagactgaaggcatcaggtagagcagcattggggggctattgaaatggtctaatttttgaacaattaaagcctagagtttgtggcagtgaaaatagaaagtatgtgtgaaagagttctttggaaattattcagttggatttgacgaggaaccaagtgctggcagcagaggagaggatgaagtccaagatgactctgtggtgttaagtttagtttattgggaaaataaggtactattttagaaatatgaaagttattgggtaaagaatgattaatttgaggtagcatttgagtggcagtgtccaacaaggagttggtaaggccagtcttatgagatggttcaaacctaaatagtgggaaaatagaccagggtaccagttgaatttaaggatagaattgagactgggcatggtagctcatgcctgtaataccagcactttgggaattcgaggcaggaggatcacttgaggccatcagttcaagaccagcttgggcaccatgaaaatactccgtctctataaaaaaattttaaagcaatagtctggtgtggtggcacacgcctgtcattctagctacatgggaggcttaggcaggaggttcacttgagcccagattttgaggctacagtgagccaagactgtcccattctactacagcctgggcaatagactgagaccccatctctttaaaaagtaaa

SEQ ID NO: 205160 - DNA, 292 bp, Homo sapiens
gcaggtcgcggcgcggcgcggggacccgggacgcagcccggccggcctcccggtctctcctcccacccgcagccggcgcccccgccccccgccctcccgcggctctccctcgctctctcgaatgttttccttcctggaagagagaaactgaaaggcagaactgagaaagctctttgctcattgatcttgagagtttcagtgcagaaactgacgtgaattcccagcactgagctctgcctcttaaaggagccaccaggaaataaaagctcgggttacagcccggcatcgggga

SEQ ID NO: 205161 - DNA, 1691 bp, Homo sapiens
tcccagctactcagggagctgagggatgagaatcacttgaacctgggaggcagaggttacagtgagccgagatcgcaacactgcattccagcctgggtgacagctcaaaaaaaaccaaaaaaaaaaggggtgggagatggctcagagactaaacgagatgcttttacagtattctggggaaaaaaagatgatgagggcctgaaccaggacagtgggaacgggaaactggatatgaagaatgtggtagacatatttgttgactagtttttcaaaaattaaagatgatgagaggagcagcagtttagggttaggatttggggttgtattggcttttggaaatagtttcaggtgcctgtgatagtagcagcagccaggtgatagtaggcagctgggaatctggagctcagattgttgacaggaatttgaattttcaaccctcaggataggtaaaggcatggaagagtttgacttttcaaagattcttgtaataagaatggctaacagttattgaatgctctgtacagtgtctagcatacagttgtcttgaatatatatttaaatgtatgttcatttaattcttgtatccttgtgaggtaggtataagtagctcagttttactgatgaaaacattaaaacacagaaaagagtaaataactttgcaaaggcacatgagatacgaaagtaaagctggtgttctaattctgcagcgtggttctagagccaacacgagtgagagaaaaggactatggaaaaagttccccagaaataacaaaatttgaagaataaagagggagcaagtgaaagagattgagagagaatagtttgagtttcagaaagagaacaaggaaggggctattcaggttgagtattcctaatttgaaaatctgaaatgccccaaagtctgaaactgagtgcacacatgacactgaagaaaatgttcattggagcatttcctattttggattttcagattagggttgctcaaccagtatgtatctacaaatattcaaaaaatctgaaatccaaaacatttcttaccccaagaatttcagataggggatacacagcctgtatggaacttcaagcagtatggtagagtacacttaactcagaggctgcagagaggtaacagatgactgcagatgccagtgatgtctgttgaataaaaagttgctttgctattagagacttgaaagttttgatctccgtacttcattcaaaagactctgcatgtttctttatctttgtgtttgcagagtcggtatctttcaacctctgttccaagccttaaagagctattataaagctcttttgtttgcctagtatgggctgttttggtgaaatagactatgtaaaaatgtctgaaatacagagttgaatatgaagaatggcagcattttgattttgatgtggctaaagattgatccagggaggactgctatttttccatgcttaaacatttgtgggacaagggctagttggcaatgctagaatcgtttagtatatcttgaatagtttaaaccaagaatcactcaagtatgagccattctgcttacctaccagaagtaaagattactcctctaacagtttttagcattggaattctttttttccctgcaaacaaaacttttcttggaacctcatgaatgatttttacatgttcaaggtatggagagacactgggatcctct

SEQ ID NO: 205162 - DNA, 1637 bp, Homo sapiens
gctgagctgactctagaggatacactctccctactgtatcctactattgggtatctacccaaaggaaaagaaatcattcaaccaaaaagacacctgcactcgtgtgtttactgcagcactattcacaacagcaaagtcatggaatcaacctaagtgcccatcaatggtggactggatatgaagaatgtggtagacatatttgttgactagtttttcaaaaattaaagatgatgagaggagcagcagtttagggttaggatttggggttgtattggcttttggaaatagtttcaggtgcctgtgatagtagcagcagccaggtgatagtaggcagctgggaatctggagctcagattgttgacaggaatttgaattttcaaccctcaggataggtaaaggcatggaagagtttgacttttcaaagattcttgtaataagaatggctaacagttattgaatgctctgtacagtgtctagcatacagttgtcttgaatatatatttaaatgtatgttcatttaattcttgtatccttgtgaggtaggtataagtagctcagttttactgatgaaaacattaaaacacagaaaagagtaaataactttgcaaaggcacatgagatacgaaagtaaagctggtgttctaattctgcagcgtggttctagagccaacacgagtgagagaaaaggactatggaaaaagttccccagaaataacaaaatttgaagaataaagagggagcaagtgaaagagattgagagagaatagtttgagtttcagaaagagaacaaggaaggggctattcaggttgagtattcctaatttgaaaatctgaaatgccccaaagtctgaaactgagtgcacacatgacactgaagaaaatgttcattggagcatttcctattttggattttcagattagggttgctcaaccagtatgtatctacaaatattcaaaaaatctgaaatccaaaacatttcttaccccaagaatttcagataggggatacacagcctgtatggaacttcaagcagtatggtagagtacacttaactcagaggctgcagagaggtaacagatgactgcagatgccagtgatgtctgttgaataaaaagttgctttgctattagagacttgaaagttttgatctccgtacttcattcaaaagactctgcatgtttctttatctttgtgtttgcagagtcggtatctttcaacctctgttccaagccttaaagagctattataaagctcttttgtttgcctagtatgggctgttttggtgaaatagactatgtaaaaatgtctgaaatacagagttgaatatgaagaatggcagcattttgattttgatgtggctaaagattgatccagggaggactgctatttttccatgcttaaacatttgtgggacaagggctagttggcaatgctagaatcgtttagtatatcttgaatagtttaaaccaagaatcactcaagtatgagccattctgcttacctaccagaagtaaagattactcctctaacagtttttagcattggaattctttttttccctgcaaacaaaacttttcttggaacctcatgaatgatttttacatgttcaaggtatggagagacactgggatcctct

SEQ ID NO: 205163 - DNA, 334 bp, Homo sapiens
atcaacaaccacacaacgctatgacagggatacccagagggcatctgactcagtccggggcttaagaacagctttccaagttaagtctaggggggcaggacatcctaggagaagcgacgtttgcaatgacagggaaccacgagaacccagggaggttgtgggaaactgccaagtagatgggagtagagggtgcctgtgggagtgacagatcatggatacagggtcttgtgtgtctaaggggtccagcctctatcctgaggcagtagggatatatgggaatttgggcacgggaatggcatgatcagatttttttccccgtgagttaacatcagat

SEQ ID NO: 205164 - DNA, 182 bp, Homo sapiens
aacaacgaagacgtgatcatgagtccacgatctaggtgcaactctcaaatcctgctttgcagaatcaaacaatgcaggtgatttcccacaactgtgatacgtttgcttctcacctgcttgactactggtaaagttcaactgaaatacagcaaaagatgcatccaatttataaatattttgtg

SEQ ID NO: 205165 - DNA, 529 bp, Homo sapiens
gagccaaagaacaagataattaaaaaatgagttatccagtgcttcatttgtggtttcagtgtgggtagtaagacataggttttggttccaaattaagttttcaatcttaggagggtcaaggcagacataaaaagattattccaaatatcactgcaaaacattatgaaacagatgctatagaaagaaaaggagtgaatgagccagggagaggcaaagagagaaagagagaagatggacagggagcaagtgaaagggagagaattagctgattcgcagagggagagacacaatagcagacaaaggggcagccatgggcagcgatgtgatttggtgggcaggactgactggaggtgggagggtcttgtgctacccccttgatatttggctggtgttttcatggtcatagaggagagggggttgcagcaaaggaggaagccacagtggtttgatgcccagctagtaatatgctgcacgtgtgacctttccgcctacctaagcctttccgcttttataactggctcattccctg

SEQ ID NO: 205166 - DNA, 550 bp, Homo sapiens
tagtataggaggatagatagaagtggttgggacaaaaacaaagattgtcttaccaatgccttaaaaaagagcagttcagaggtgagattggttgtcaggaattctctattttgtttcagaattattatgtttaaaataatacttaaaacgtagtgatattaaaagttattttacattttaaaattcattttgaataagttgtgtatacatttcatagaaaatcctgagaatatactaaagtggacagaaaaaaaatacatttcccatgaattttcacacccaaaaattgttattgttaatatttgttttattttttctggcttttgttttttttgcaaaggtttcaagatgtttagccaaatataaatacataaatgtcaagttcaggtcttttaattccaaaagttggggacaaataaataactgtaaagggtggatgttcttttttcctctacaaaaacatggtcttcttaaataatgttcttacattttcttttacctgttcattacatgattctcagacttttagatttcaaggaaagtaatatcc

SEQ ID NO: 205167 - DNA, 361 bp, Homo sapiens
acctctgaactgttaactgaggcagaaataaacttctattctgtttgcgtcactgtacagcagtgagccaaaaccctaagtgaccactcacttggctgccccacagagaagggactaaggaggcaagaggaacatggggaggttggtccggaggcttttgccgtggaccaggggagagctaaagatggcctgaactaaggtggtggcagtagggagaaaaagagagaagcaatacattccaggtattttagagacagattcaactggacatactggtcaaggataaacaagaacagagcatggtttgtacaggggggagaatggtggtgctatctctgtgacagacaggtggtagggcagg

SEQ ID NO: 205168 - DNA, 183 bp, Homo sapiens
atctgcaaatcaccaggagaccagtcacccagtagaaaaagagaaatagataggaagagtttccagaaaggatatgtaaatgattcttgaacgtatgaagaactgaacctcataagaaaaaaaaaaaatggagtttcagctagattaggaaaaataaaaaaccgtggtaatctactgtgtgtg

SEQ ID NO: 205169 - DNA, 471 bp, Homo sapiens
ctcgctctgtcgcccaagctggagtgcagtggtgctatctcggctcactgcaacctcggcctcccaggttcaagtgattctcctgcctcagcctcctgagtagctgggattacaggtgcgtgccaccacgcctggctaatttttgcatttttagtagaggcaggatttcaccatgttggtcaggctggtctcgaacaccggacctcgtgatccacccacttaggccttccaaagtgctgggattacaggtgttagccgccgcacctggccaaaattttattaatgataatgtatacacattgaaataaagcatgaataacttatataaaagtaacttattaaatgtaaatatagtaagtgaaaatttatcaaaattttctgttttataaagaaattgtggatagttgatatatgccacattatgctattagtgtttaaattaaaatttgatgttttgttgaggaaataagt

SEQ ID NO: 205170 - DNA, 625 bp, Homo sapiens
atgtattgtggacttaatatgtaacaggctctctggtaggatgggaaacagatcctgccctgagccagtttacaaccctgtggggagggcaccaagggaacaggctatttcagtctagtgtgataagggccatgacgggagaaacctcaatacagtgtgctcagaacctgcagaggcagcgcaaggggtcccgaggccacacatgagaggatgctacatgaccagaggaaccaaacttggtaacgctggaggtggattcagaagaaagagaaaatcccagcactttgggaggccaaggcaggaggattgcttatggccaggagttcaagaccagactgggcaacatagtgagaccctatctctaagaaaagaaaagaaacgaaacaaaacgaaaagaggactggccagctgcggtgtttcatgcctgtaattccaacactttgggaggccgaggcggcagatcacctgaggtaaggagttcgagaccagcctggccaacgtggtgaaaccatgtcgctattaaaaatacaaaaattatctgggtatggaggtacatgtctgtaatcccagctactcaggaggctgaggcagaagaatcgcttgaacccaggaggcagaggttgca

SEQ ID NO: 205171 - DNA, 507 bp, Homo sapiens
agtgaataatagcatttgcccttctttctcaaaaaagcagcatttgctttcttctggcaaggaataattaagctaatttctccatgaaccttggaaaaagtggcaacgaataatggatttgtccctcaaagaacatttcaagcaaacatcttatcagctacaaattcatttgaggcagttccaggtcagccacaggcaatttttctcattaaaatactgtttaaactgttgtatccagatgacacaggagacatatcagacaaacaacacctgcaagaagaattggtgaagtattgacttttcatcaatcaaaaagtttactaagcagatgaaaataatttgccttcacagtgacattttcctgacgtcttgctagtacttaaaggcattgttttttctttaacacccaaactttaattaccagaaaaggttagcatcaaaacaaaggacatgttggtaatttagaggccatatcagaaaaataaattcattttggtttgaatgaat

SEQ ID NO: 205172 - DNA, 264 bp, Homo sapiens
ggctcggaagatttagcagcttgctcagggtcacaccttaataagtggcagaaccagaattcaggacagactatgtgacttttctctccagcttttaatattagtcattctgcttctctggatacataaaggtgcccaggtaaaagtcattcttctcaaatgcaaagaattaaccaggcatcaggccaatacttgtcatgcagacttaagccaatactttgttatgcagtacttgtcactggtgccttatcttcctatttctca

SEQ ID NO: 205173 - DNA, 470 bp, Homo sapiens
tcatattatatcactggactgttgaaataattgtcatgtcatgagggttcgaatcagtataaaaaagtttatttgggcttcatttttcaccatatactttccctgtatgtaatgcttattataaaaacatatttaaattacattaattttgggggggataaggtgggtatgaaaaaaatgcttatcttgcagctttttcttatagtaagcagaataatggcccacaaagatattcatgccctaattcccagtttgtgaagatgtggcaaaaggaatgtagttgttcatttgtataatagctaatgtatgaactactctcacccaacacgctacttacaacacagtatcaccaacaccatttttaagtacttcactctaattctctttaaaataaaccacattaaattatactcacaaaacttaagtggtatgtttcaagctgagtttcaatattaaatgggtatgagact

SEQ ID NO: 205174 - DNA, 318 bp, Homo sapiens
taggcatctgtcttgttcatgagccacattacaacctcgtgtgttataggcaaaaaggcaatctaagaacggcctgacattcggacgcctaaggggacttccctagtgagggcacaagacagacaaatcccagaatattttctatatgcagaggaaacttctctggcatcttagaaagacaaagacagcaagactgaagatagaaacaggaggatagcaaccttttaaacaacttgtttttgtgaaatttgtttctgtttgctttgagaatgggggaaaagagaactctaattacaaactccacgtttctttcaacta

SEQ ID NO: 205175 - DNA, 512 bp, Homo sapiens
ggttttatatttgtctttgcaagatattttaaggtgtcagtgtttggcacagaaggttataaaggtattaacccagccaaaacaaaaaatggtcctggtttgtatgctttctttgacaaatgagactagtttggccgggcatggtggctagtgcctgcaatcccagcactttgggaggccaaggtgggcagatcacccgaggtcaggagttcgagaccagcttgggcaacagagcaagactgtctcaaaaaaaaaaaatatacgggccatggcactgggcccttcctggtttatccttattcttctggccctctattgggggactagggtacacttagtcacttcttaataatgagtagggctagtattgggcacttaaccacggataccatgtgggcggatccatccctccttttcacagccgtgcataacgggataacggttggtagtggggaaacaaaccaggagacacttccatttaaacggtggtctctttaattctccccttcccc

SEQ ID NO: 205176 - DNA, 416 bp, Homo sapiens
tctcacaagggattaatggtcttaaaatttgtttcatttgtatagcatttctcttacttttccagtgtgagcttgagtccacctttagagaacaataaggtttcacatgatcacagtaaaaatttagaagtaattgaccaggcacagtggctcacgcctgtaatcctagcactttgggaggccgaggcgggcaaattgcctgagctcaggagttcgagaccagcctggccaacatggtgaaaccccgtctctactaaaaatacaaaaaattagataggtatggtacacacctgtagtcccagctacttaggaggctggggcacgagaatcatttgagctccagaggcagaggttgcagtgagccaagatcgcaccactgaactccagcctgggcaataaagcaagactctgtctca

SEQ ID NO: 205177 - DNA, 614 bp, Homo sapiens
agcaggaaaatctgcagaacagatccagccctctgttacctggccaggtacaaatgaatattcataatagccatctcagtcatcaacacagcattgtgatatgttctgtgtcattggtaggcttcagaatggcaccacactgactggaccatttacatctgaagtactcaaaatcttaatggaatttttctttcttttctttttttttttttttttttgagacggagtctcactctgtcactcaggcaggagtgcagcatcatgatcttcactcatgtcaacctctgtctcccagttttaaaatgattgtcctgcgtcagcttcccaagtagctgggcttacaggtgaccatcaccatgcccagctaatttttctatttttagtagagatggttttttaccatattggccaagctggtctcaaacttcttgacctgatgtgatccgcctgcctcagcctctggaattgttatttattaaagttatcagctgggtaaggtggctcatgcctgttatcccagcagtttgggaagctgagtggggagtatggcttgagcccaggagtttgagcccagcctgtgcaacttagtgagaccacatttatacaaaaataaa

SEQ ID NO: 205178 - DNA, 400 bp, Homo sapiens
gttcagttcctgtcaaagaccagttctacctccagatcccaatccagatttcagacctaccctggaaacaagtgcacgatactataccaaatctagtccttgtcagaccaagtctcacctgcagaataaaacttgctcaaatacagttggagagctaatttcatttaacacttacatgtattgatttgcctgtttgtgtttatttatatgtataagtaaatttgtaagtaaaggtgtaaattatgtgtataatttacttatataacattcacttatatgtgttttcttaaacatttatatgtatgtcaaaaactattgctacaaatttgtggtttttctttttaaacttcaaaacatattttcaggggctaaatcgtgtgagtttaaaatttaagagaaa

SEQ ID NO: 205179 - DNA, 705 bp, Homo sapiens
aagctcctgcttttttttgtttgttttcagcctcatttctgttcaatttattttaggctatttaatctttaaaacatattggtacagatagtgtcagacctgagtgtacttaactgtctcctttactcacttcctgtataattctgtgcaaactatctgacatctctcagcctcagtttttccatctgtaaagtgagcataatcttggaatctgattaaggagaggaccaaccacacacctgccttacaacatcactggtataatggatatatgctcccatttaactcattttttaaatgaagaatcatataactgtcaaatgtaaatggattctgctttggccaaggaagttgatctcacttactgaaaagttataaatactccttgttgagcttgtgtaatgactgaggtattctttttcagtgagcataatgtcattgctcaaggcctaacaaggcaacgccaccagcctatagactagttggctttggttggtgagtagtgacatttctgaaaccagatcacgcatggggtgttgctgggtctgggcaatgtgattttatccatgtatgtgctttacctctctccttagtgtgttggaaaaattatgagtgtcagaaaataaacacaactacaatttgtcaatttacaatttacaaaataatttttaaagtatcagaaaaattcctaattgagataattcg

SEQ ID NO: 205180 - DNA, 242 bp, Homo sapiens
actgaatctctttctctcaagacactcctcctcccacaagctaagcaattccatggtgtcctgccgcagacacacagcaatcaaactccaagaagaaagcgatgaggatgggcgggcgtggaagtcaagggttcagcaaaaacatccaacagcaagtgtggagggtgagtgggagccgggtggcccgggcgggggtgccggaagctggggatggtcaaccatgctcagggaccacaggtgat

SEQ ID NO: 205181 - DNA, 447 bp, Homo sapiens
gtcaggtttgtcgaagatcagatggttgtagatgtgtggtgttgtttctgagacctctgttttcttcctttgatctatgtatctgttttggtaccagtaccatgcggttttagttactgtagccttgtagtatagtttgaagtcagcgtgatgcctccagctatgttgtttttgctttggattgtcttggctatacgggctcttttctggttccatatgaaatttaaagtagttttttctaattctgtgaagaaagttgatggtagcttgatgggaatagcattgaatccataaattactttggacagtatggaaaatggcttttttctaaaacaaaaaaaataacagattctgggaaggatacagagaaaggggaacccttgtgcactgttggtgggaatgtacattagtaaagccacaatggaaaacagtagtatagaggttcac

SEQ ID NO: 205182 - DNA, 489 bp, Homo sapiens
tcagtttcagagcaggttttcccatggtctgtgccagtatcctcagtcttgatgctctcaagtcaacgggattagaatgtgtttgcgcagttctgggtttcccttcatcggcatccagtcattttcagtgagcagaattgcggtcagctggcacatcaccagcaagggccaaattagacataattgcacatcagtttcacgttaaggtctgtggcttaatgtgctctgcaaaagcatgccaggcctggagctttgttctccctgggaacagcgtgccccagaagaaaggttacagtataaatcatcatccaaacctagacacctaggaaagggggattctgttagtttttccaaggcaaccatataaattgtgccagccctgggcaagccaggacttatggtcaccctgcccataaggatgggtctgtgcaatgacattcactttcctagacagcctttacagcaacctttggagcagaagggaaacca

SEQ ID NO: 205183 - DNA, 277 bp, Homo sapiens
agggctgggtgaggggctgggaggctcagggggcctctgctcaaccaaggagcagtccccagtgcccaagccctgggctggctgctggggaggtgaagagaaacaggatcccagctgccgctgcccctgcccctgggcccatctgagtaggggggacagacatggagagagaggagaactatgttttgtgagccagcccctctccctttgtcagacacacactgttgtcttgggcagccggttctctctgctcagctccattaaaacgcagaatgga

SEQ ID NO: 205184 - DNA, 497 bp, Homo sapiens
cagaggcaatgcttattttaaagaaaaagaaaggtgaaatgtgataaagagaaagagagaagagttgctattctaccaaggctgggtcagggaagacttcattaaaaagtggcatttaaacaaagatctgaaggctgtgaggggccatgaggctttctggggatccaggcagagggagtggtatgtgcaaccctggggcaggggtgcagcttcagagtttggggaccagcagggctagcatggctgcagctcagagactatgggacggctggtaagagttgagctcagagaggtaatggacaggtgttccaaggcaggtcttccagacttgcaggtcattataaaaactttgtcttttgctcccagtaaaattatagtcactgtgggattttgaacggatgagtaagatgactgatctgtattttaataacattaatctggttgctgtattcagagacaactgaagcagggcaaagattaaaagtaaaggaaaagga

SEQ ID NO: 205185 - DNA, 503 bp, Homo sapiens
tacatagaactatttagaaaaagtataacacttatgtattggacttatatattgattatatatacatggcaatagctcagaaggtggggtggggtgggggaatttattggagttatattgctgcaagtttaccatattttacctgaaacaacttagattattacccctaagtggactgcaatgagatttatagtgtaatcccactaaaatataatgtgagaggattgcctgaggccaggagtttgagactagcctaggcaacatagtgagaacctgtcgctacaaataataataataataatcaaagctctcacctcaataacctaggaaaaaaatagcaaaataaatccaaagcaagcagaaggaaggaaataataaagataagaacagaaatccatgaaattagaaaccgaaaaacaatagagcaagccaatgaaacaaagggctggttctttgaaaagatcaataaaattacaaacctctagcaagactgacaaagaaaa

SEQ ID NO: 205186 - DNA, 1149 bp, Homo sapiens
tgtcacccaggctggagtgcagtagtgcaatcagggctcactgcagctttgacttcccaggctcaagcaatccttgtgcctcagcctcctgagtagctgggactacagttgtgccaccacgtccagctaattttttctattttttgtaaagacccaaagcgttgggattacaggcatgagccacctcaacgggcctttattttttttattttaatttttattattattatttttgaaacggagtctcgctctgtcacccaggctggagtgcagtggcgcaatcttggctcactacatgctccactgcctcccaggttcatgccattctcctgcctcagcctcccaagtagctgggactacaggcgcccgccaccacatctggctaactttttgtatttttagtagagatggggtttcaccgtgttagccaggatggtctcgatctcctgaccttgtgatccccgcctcagcctcccaaagtgctgggattataggcgtgagccaccgcgcctggccccgggcctttatttttatttttaaccttttgacaagacacgctttctattagagctgctttttgtctccctggttcgatttcctgatgtagaatcattgtgttgctgatttttcagttgaaaatgtttaaactgcttcctttgagaacaagtttgagttttagtaagctgtaaagctgttttatttgattcactgtgaataagacaagtacaaaaaaaaaagtgaaaacacagcacatttcaagtgtaatcccctttggaatttttccaaagtcttagtatatgtctttgtgacagaaaaacatagatgggacaggtaaatgaaatgttcctagttgcatagctgttaaccatgcttcaaaaataaatcattttttaccacacctggattctttattgtcaaattgtctattagtttctcctactggctttcccctagattggtctgttctgttaaaaattgtgggtttagactgggcacgatggctcatgtctgtaatcccagcactttggtgggcttcatgagttcaggagttcgagaccagcctggtcaacctggtgagaccctgtctctactaaaaatacaaaaattagctgggtccgtggtggggcacacctgtaatcccagttgctc

SEQ ID NO: 205187 - DNA, 1297 bp, Homo sapiens
cctgaacaagaaaattgaccatgagctccacaggctgcaagctcttctcaagcatctgctcagttataacagagattcggatcagttaaccaagtggttggaatcttcccagcatactctgaattactggaaagaacagtccctcaatgtgtctcaggacttggatacaatcagaagcaacatcaacaatttttttgagttttcaaaagaagttgatgaaaaatcctccttgaagactgccgttatcagtatcgggaaccagcttcttcacctgaaagaaactgatacagctacactgagagcttctttagcacagtttgaacaaaaatggacaatgctcataactcaacttccagatattcaagaaaaacttcaccagcttcaaatggagaaattgccgtctcgtaaagcaatcacagaaatgattagctggatgaacaatgtggagcatcaaacttcagatgaagactccgtgcattcaccaagttctgcatctcaagttaaacatcttcttcagaagcacaaggagtttagaatggaaatggactataaacagtggatagttgacttcgttaaccagtcattacttcagctaagcacctgtgatgtagaaagcaagcgctatgaaagaacggagtttgcagagcacctgggggagatgaaccgccagtggcaccgtgtacatggaatgctgaatagaaagatacaacatttagaacaacttctagaaagtatcactgagagtgaaaataaaatacagattttgaacaactggatggaagcacaagaagagagactgaaaactttacaaaaacctgaaagtgtgatctcagtgcagaagctgctcctggactgtcaggatatagaaaatcaacttgcaattaaatccaaagcactagatgagttgaaacaaagttatctgactttggagagtggggcagtgccattgttagaagatacagcatcccgaattgatgagttatttcaaaagagaagcagtgttctcactcaggtcaatcagctcaaaacctccatgcagtcagttttacaggagtggaagatttatgatcaactctatgatgaagtgaatatgatgacaatccgattctggtactgcatggaacacagcaagcctgtggtgttatcattggagaccttgagatgccaggtggagaaccttcagtctctgcaagatgaagctgagagcagtgaagggagttgggagaaactccaggaggttatcggcaaactcaaaggtctctgcccctctgttgctgaaataatcgaagagaaatgc

SEQ ID NO: 205188 - DNA, 1006 bp, Homo sapiens
cctgaacaagaaaattgaccatgagctccacaggctgcaagctcttctcaagcatctgctcagttataacagagattcggatcagttaaccaagtggttggaatcttcccagcatactctgaattactggaaagaacagtccctcaatgtgtctcaggacttggatacaatcagaagcaacatcaacaatttttttgagttttcaaaagaagttgatgaaaaatcctccttgaagactgccgttatcagtatcgggaaccagcttcttcacctgaaagaaactgatacagctacactgagagcttctttagcacagtttgaacaaaaatggacaatgctcataactcaacttccagatattcaagaaaaacttcaccagcttcaaatggagaaattgccgtctcgtaaagcaatcacagaaatgattagctggatgaacaatgtggagcatcaaacttcagatgaagactccgtgcattcaccaagttctgcatctcaagttaaacatcttcttcagaagcacaaggagtttagaatggaaatggactataaacagtggatagttgacttcgttaaccagtcattacttcagctaagcacctgtgatgtagaaagcaagcgctatgaaagaacggagtttgcagagcacctgggggagatgaaccgccagtggcaccgtgtacatggaatgctgaatagaaagatacaacatttagaacaacttctagaaagtatcactgagagtgaaaataaaatacagattttgaacaactggatggaagcacaagaagagagactgaaaactttacaaaaacctgaaagtgtgatctcagtgcagaagctgctcctggactgtcaggatatagaaaaaggactagtataggaatggagcttatcactgatccttccatcttgttcttggatgagcctacaactggcttagactcaagcacagcaatgctgtccttttgctcctgaaaagatgtctaagcgggacgacatcatc

SEQ ID NO: 205189 - DNA, 598 bp, Homo sapiens
aaaaaagattgcgggaatcacgtgcattaagttgttaactcccttagaatgtttaagccaccggtttactctgagttttttcctttgtgcacatgtggcttaatttccgtaagtaaacatgaattatgatatctgcctagggtgttacatggtgaccagcgtactgttttttgctgatcaggtaggtgagttgttgaattccttgccttccttcaggtgaagtggatgtagcccaggagaacatgcttttaatgcaggcatcttaatctttccatcttggggaaatatacattttaaagaagcagtgttttctgaaggcataccttatcataaatcctacttacagaaaacagtataatgaaaaacttatgaaatgtgttttctgttgtcttaatcaaaaggaataatttagttattcataaatacataccctactgtcttctgatgaatacttgagattaagattaaatggaataaattaaaacctagtttcaatattgaatcaaagctaagtggcctccctctccctctcaaaggttaataagtttttcaaaccagagtgcgtgaataatttaaaagatagcatatggaataattt

SEQ ID NO: 205190 - DNA, 615 bp, Homo sapiens
taatcacttaaaataggtagaaaagggatgtggccattttctaacccatactttttatgttaatgtagctcttttttaattacaaacctaatttaaaatttttaaattttgtgactacataatagttgtatgtatttatgggatatataagatgttatgacacatacatacaatgtgtagttatgaaatctgtaactgaagtatccaacagtttaaacatttattatttctttgtggtgtaactttccaattccactctcttgttttataatatacaacaaagtactttaaactatagtcacccaattgtgctatcaaacactagaccttatttcttctctttttatactcaataatcatccccacttctcttgcagtttcttgtgcatttgcactataacatttatttctttttatactatctcttaaaaaatggttgtagttattatcatagtcatatcttcaagaacaaaattccacattcaatgaaagtaaattcaaaaataagaacaatcccctattcccctggttgctcagaaatcaacgtatagatgcagaaagcctgaaaaagaaatgtactataacactctcaaattaaaacaataattcttcagc

SEQ ID NO: 205191 - DNA, 207 bp, Homo sapiens
gttggtgaatagaagtgttcctttacaaagtactgttttgatcatctcataagaaagtcacatggtacctgggtggcctgagggaaaagcaaggcaggtctccagggttgagtttagcatgcctgatctttgctgagattcaggatttccaattgcactggagaggattgtgtaggtagtagcaagagggtggctacatttagctga

SEQ ID NO: 205192 - DNA, 151 bp, Homo sapiens
agctcaaaaacagaagacctgctgaatagaaatgaatatctggcatgccccctccatctccaattattcatcttattcctactcatccctcacaactcagctcaagtgttgcctcctcttctgacttccacctcctgctggatttaagtga

SEQ ID NO: 205193 - DNA, 621 bp, Homo sapiens
caccgtgaggaacaggcagcttcctctgatgggcacaggcaccacttggcttgttcagggctccagaagcagctggtctctctcttctaaacctgcacaggacccggcctaggacgcagctcagagggcatctggtgcattcacggggacacaggaacgactcggtcttttccaccccagatggtgagcctggcctctgtcctcattgcttgggtgccctctgggtctagaggagacactctcaagggggcctctgccacgctgaaaatgtgccagtgtcaaacccatcaggggacagggacagctgggccactcctgccaaaagcttatcaaacggcctgccctggacatagtgagtcctgtctggagtgaatactcatggctgttcccgaatactcgactacaaaggcattcggagagcattgcctagaaaagtttaaaaaccagaagtaatccacatactcaacaataggggccacgcacagccttgagaaaggacgtcaaggaatagtttaatgacttgaaaagaatgtgcggaaacaggctgctcgaaaagggtatgcagcatgccacgtttaaaaggcgcatacacgaacagctataaaggtgcatcacaatgtt

SEQ ID NO: 205194 - DNA, 651 bp, Homo sapiens
ctagaggttcccttcggatattggaagcaagaattacgctgaggcccaagagccagagtgggcagcaggtgacttcacgctcccaacccaaagttcaacccatgtgcaggcagcgtctgattgtggccagtgcgagagggctaaatccaacagctggtctaaatttgccaaagtaaactacctatgctaatccactgccagtctccattggcagcaaggactggcctggtggtcaaatagacaagctctagaaataccagcagaatgttgcaggaagtatatggatattgttcgttcttgcaagaaggcccgtacaaattcagggtaattttatcatcaccaaatctttcaatcctgtgatgacaatagcgaaactacaagcagctccaggccttctgcctcaggagctaactctggtctttcagatgcagaataaggttgcaaagtaaagtacaaacttctccttatgggaacaccaaacaggacccagtaacctggacaactgtttacctcctaccctggagcacaaaggatatgacacagcccctggctgaaaccagaggcagtgtggctccgggattatgtgagcaggctctggagttagggtctcagcaccacgcagttcagaccagcagcctaaccactctgtgc

SEQ ID NO: 205195 - DNA, 355 bp, Homo sapiens
tgagaaatatgtcaaaattaaaatacacttaaacaacctcaaatctctccctaaaatgcaaaaatcatatggaatattaactacattctttttgtatttattgtcttattaattttataatatgatgagtataatatgatttattagctatagtctcatgctgcttgttttctatgattccattatctttgctcttaattatgactttattcattatttttctatcatttcaataagtaattagatttacttccctgcaagtctgaaggctcattcattccaagtgaattctttgaagaattatttgtggattaactatcctacaattatagtattaacctaccttcttcctata

SEQ ID NO: 205196 - DNA, 359 bp, Homo sapiens
atagcagtgtgaaaacagactaatacaggctctaacaaagatattctagtctgtgattggttgagaaatttggtgtttctcttgaaggcgatatgggttggaacctcttattccaccatcttgctaacatcctatattgctttcttcttagtcttcccccttccccacccattgtgtaacttggtggaaccatttgggttacatagttatcccactgtattctcaccactgttcaaatctatagctttaagccatatttaatctccacatctcttgaattagtcaccaattactatataggttgattttgtagaatatatctctgctctattcttgctgagtctttttctttatccttt

SEQ ID NO: 205197 - DNA, 509 bp, Homo sapiens
tcgtgtgcccttgagcaggagcccagcagagagaccctttttcctcctgtagcagcagaagagaaggcagcagggtgcaggactgaaggagggctgggctgggctgggatgggagcctggctggttttcccctggtggccctatgactggttaagggcagggcagaggcacggcaggttggaggcacagaaggcccaagatagttatctgggctggatgtggggcggtattctcgcctctctggggacatcccttaagtggacaggaagactgggtggttcaggtgtatgtccactcaccaagaacacaggatgaaggtggggcctagacagtggctgttttgaccagggcagaacagttgagggcatgtgagagggcccatgctgacgccagacctcagtggggagaggggagagtccagggaccagaggtccccctaggcttaaagtggacccttggcccaatggtcccttaagccttaagaactcactggttaaaagcaagaaaaa

SEQ ID NO: 205198 - DNA, 762 bp, Homo sapiens
tcgtgtgcccttgagcaggagcccagcagagagaccctttttcctcctgtagcagcagaagagaaggcagcagggtgcaggactgaaggagggctgggctgggctgggatgggagcctggctggttttcccctggtggccctatgactggttaagggcagggcagaggcacggcaggttggaggcacagaaggcccaagatagttatctgggctggatgtggggcggtattctcgcctctctggggacatcccttaagtggacaggaagactgggtggttcaggtgtatgtccactcaccaagaacacaggatgaaggtggggcctagacagtggctgttttgaccagggcagaacagttgagggcatgtgagagggcccatgctgacgccagacctcagtggggagaggggagagtccagggaccagaggtccccctaggcttaaaggacaaaccacaaggagaagaggaagaagtctctatgtcattaaagtttcattatcagggctgctataatgcttctcattgcttattataaaacccaattctgcaagaccagcctagccaacatggtgaaactctgtctactaaaaatacaaaaattagctgggcgtggtggcatgtgcctgtaatctcagctactcaggaggctgaggcaggagaattgcttaaacctgggaggcagaggttgcagtgagccaagatcgtgccactgtactccagcctgggagacagagggagactccatctcaaaaacgaaac

SEQ ID NO: 205199 - DNA, 342 bp, Homo sapiens
tgtttttgtctttagcacccagaacagtgactgacccatggcaagagctagtaaatgcatattggatggatgtgaggggcagatagtgttaagaaggtctgtggtttcctctggctttttattttcctgccttggccttccctgcttgaagtcagttgaggctgttccctgtgacagcagaaaggagacaaaaatgagtcttcgttggcttttcagctttgaagatgagtttctcaggagattggaaaaaaatcatggcttagccaaaaaatgctggaggaggacatcatgagcaaaggctctccctgggggcctgtggaccaagagaacattcccaggctg

SEQ ID NO: 205200 - DNA, 471 bp, Homo sapiens
ggaggtggaggttgcagtgagctgaaagagtgccactgcatttcagcctgggcaacagagtgagactccatctcaaaaaaaaaaaaaagaaaaagaaaaagaaaaaaaaattatcataggtatgtataggaaaaaacagggtatatatagggtttgatactatgtgaggatttgggcatccatgggggccttggaacgtatctccccaggataagcacaaactactatataaaacatttctatcaccacaaggatccctcaaaatgcccttctatagccacacctatttccctcccacatcacctcctccttaacccctccaaaccattaatcagttctccatctctataattttgcattcaataatgttatatgtaagtggcattatagggtaggtaggcttttaggattagctttttttcattcagtatagttcttcggagattcatgcaggttgttgtgtgaatcagt

SEQ ID NO: 205201 - DNA, 241 bp, Homo sapiens
ttgatggacagtctgaagtgcacatttgagtgtgaaatatctactagcaggcagttaaataaagctacgtagaagtgagactttaaattaaggatatggatttacaagtcatcagtataaaagtggtaattgaaataactggctgaaattacctaaggagaataagtagagtgagagaagatgaaaattctgattcaagggaaatacactgactctatatattagcatctccttccactcg

SEQ ID NO: 205202 - DNA, 665 bp, Homo sapiens
aacccagtataccttagaaactttcagtttcttttaaggatttaataacttgcttataagtgtttaaaatgacttaatgggttctatcttttaagggaactttggatgaatccttgaatatcagttatctattgccaattaacaaatcaccccaaagctcattggcttaaaacaacaatctttcattagtttgcgttcttccaggtaattcttatagtctggatccagctcagcttatcttggctggacttgcccatgcagctgaggtcactagttgggttgttgaggctggctagtcctagatggtgtcactcatatgtctggtattgagtgactgtcacctggggcattagggggactgtgtctctcatcatccagcaagctaggcctggattcttcacatggctttaggatttcaagagtatgagattggggctgggcatgatgactcacacctgtaatcccagcactttgggaggccaaggttgggggatttcttgagcccaggagttcaagaccagcctgggcaacatagtgagagcccatctgtaaaaaaaaaaattttttgagatggagtttcgcccttgttgcccaggctggagtgcaatggcgcaatctcagcccaccagaacctttgcctcttgggttcaagcgattctcctgcc

SEQ ID NO: 205203 - DNA, 593 bp, Homo sapiens
aaagaaaaaaattaagaagaaatgctcctcaagtaagggagagggcccacctagcatcctgagaggacttggaagaacacacagtccaggctgggcacctgctgggtctctgtccaaaggccagccctctctttgtgtcagccgcagatccctcacctagggcatgactactggctgccagctcccactgtgcccagctctcatacctcgtcttgatgcagtagaagtagtggttaagcctggaatcagatcttggttttccctctctgagcctcagtttcctcatctgtagagtagacttccttcacgggtggttgtgaggatttaatgtatgtatagggataaggcccagaacgtaagtaaactctaagtacatggtaagtggcagtcactgcttacaagtggagccagggttcagggtcagagctagagacctacagggaagagtaggtgagctgtcggggctagtgatggagagagagaagagactggagatccagcttggggatccccttgcttcctggcccaggagccaccatggagagtgagaagctgccagagaagcaggaggaggatggagagaatgtgctacc

SEQ ID NO: 205204 - DNA, 318 bp, Homo sapiens
ccaaggcaggtagatttcttgagcccagaagttcatgaccagcctgagcaacatggcaaaaccctgtctctacaaaaaataccaaaaaaattagctggacatggtggcatgtgcttgtaatcccagctacttgggaggctgatatgggaaaagtgtttgatattggagagttcaaggctgcactgagctgtgaacccaccactgcactacatcctgggaaacaaagtaagatcctatgtgggtaaaaaagaagttagattgttaccttaagctagactttttaaactatgagatattttatggtcccttggaaattac

SEQ ID NO: 205205 - DNA, 421 bp, Homo sapiens
ctagactaaatggaaaccagtataacttaacaaaaaaaggagcaaatgacaaaagatacataaagtgaccacaaaacaatgttttcatatctggccagatcctgatgcttgcctaagtcttggagctgagctctggtttctctttgttgggacaagaggttaaaaagtgttagtgggatgttaaaaccttgaacttgaatttgaacttgacactttgagattttcttttttggagcatagaagaaaatttaaaacagccatctttcactttatagttctgtgttttttgttttttgcttgtattgctgcctctatggacctcctaaaagtttctctcatatatctaatgttctgcacctcatgctttagctaaggtgaagttgaaggattcattactatccaggtctgtaatgactgcaaa

SEQ ID NO: 205206 - DNA, 230 bp, Homo sapiens
aaaccatgcaccaaacttaatcagcctgtaatgcttactctaaatctaggcccatctaggccaggtgggctgagtcttgggatagtgggtgtctccttcctatgttgatacattaaggattccatatggacaattatttttagtcaaatttgtggtcctggagatagaaagaggagaagaagagagaagaaagacagaagagctttattgttcttttttttttttttttt

SEQ ID NO: 205207 - DNA, 174 bp, Homo sapiens
ggctggaagacagcttggaaatccttcatctaactatagggaaactatagttcagtgcagttaagtcacagagtttgtcagctaatgcattgtcagttaatgcattggacagattggaacttggcctctgatttactggttcagcgtgctcctcatttcaccttgtgtccaccc

SEQ ID NO: 205208 - DNA, 751 bp, Homo sapiens
taaaatggtattatctcaattgtacccacccttttggttgcttaggccaaaatcctctgtggtcatccttgaccattcacagttgattcaaactatatatatctggagtctaatcagttattaccatcttctgctatttgaaacaagccaccattactacttggattgttcctgcctaccttgtctatgtcctatcttgtggaagtcttttattttttataggcaggatctcactctgttgcccagaatggaatgcagtgagacaatcagctcactgcagctttgcattcctgggctcaagtgatcctcctgccttagcctcctgagtagctggggctacaggtgtgtgccaccatggctggctaattttaaaatatttcatgtggaaatggggtcttgctatattcccaaggctccaaggctggtctggaactcctggcctcaagtgatcctcccgattacgggtatgagccactataccaggccctgaaaatctgttttagacgattcattcaaagatcccatgtgatcttgcatctgacttgtctcttactcctattccccttgctcttccctgtgcttgaaatattctcctttacatggccacagtgtttatttcacctccttgaagtctctgctgtttgttgtttatttttaagcaacctgaatgaggaattgaagtttgttctaataatgtctcctccgtagaatctggtggtgccctctgacacttgtgatttttttccagttt

SEQ ID NO: 205209 - DNA, 138 bp, Homo sapiens
agcgatcctccagcttcagcctcccaaagtgctgggattacaggtatgagccactgtgctgggcctgtgagtgtcttaacagaggctggatgaggacttagaacctgcccagcatctgggtgctgtcatttctcattt

SEQ ID NO: 205210 - DNA, 589 bp, Homo sapiens
ttctgtttcaacaggagtatgtattatagaaaatttcgaaaatacaaagatacttaaaaataaagctacccacaaataataaccactgttaaattttcacgtgtttgtgatacggacatattcacttgtttgtgtatacggacatattcacgtgtttgtgtgtgcggacatattcacacgttcgtgtacggacatattcacgcgtttatgatacggacataatcatgtctttgtgtatatggacatgttcacgcgtttgtgatacggacatattcacgagtttgtgtgatacggacatattcacgtgtttgtgtgatacggacattcacgcgtttgtgtgatatggacacattcacgtgtttgtgtgtgggacatattcacgcgtttgtgtgatacggacatattcacgcgtttgtgtgatacggacatattcacgcgtttgtgatacggacatattcacgcgtttatgatatggacataatcacgtctttgtgtatatggacatgttcacgtgtttgtgtgtacggacatattcacgcgtttgtgatacggccatattcacgcgtttgtgtgatacggccatattcac

SEQ ID NO: 205211 - DNA, 560 bp, Homo sapiens
aagggagtgttgttaaatacctgatgcttggagaccatacactgaaggctaccctagggaacctaaaataaactgactatccctgggaatactgcccagcctcaaatcatctcagtacttaaaactggattaaggtgatacagaattactaatacccctatcttgtcttttacttctttgaaaatattgagcaggattattttcttcaggtttattgtgctataatgtcaaataaactgcacatatttaaagcgtacaattaaatgaggtttgacgtgtatatacactggtgaaaccatcatcacagtcaacataattaacacagccataaccccccaaagattctttaggcacctttgtaatccttgccttctacctgttcctaccctagtactccacattcctaaaccaccactgatcggccttctgtcactatagattggtttgtataattagtttagaattgcatgtaaataaatggtatgtactttgggagggggtcacttctattgtataagtagacctgaagttgttgatccattaatccactgaaagacatt

SEQ ID NO: 205212 - DNA, 201 bp, Homo sapiens
ataaaacctctgcattgaggaggggaaaagactggaaagaaatatacccaaagaataacagtgattgttttggggtgattaaaatatgattaaattttttcttatttttatttatctaaattttctatagcgattgtgtattacttttataataaacagtaacttataatactttaataaaaataaaattaaagatttttc

SEQ ID NO: 205213 - DNA, 440 bp, Homo sapiens
tcacagtttctacactagaaaacgttagactgaagcagacagtcagcttccacactatcttgtactctcacaggaaaaatgtttctgtctcaacccacaaaaatattgtaaggccaatagggatgaaaaattttgagggaagctagagacaaagaagggagatgtgactagcaaccccaacctggaaaattttgctctttatccgaaccaaaagggatgccaaataagagtggctttcagcagcaccatgctggaggaggcatgcatcatgggtactttgagcaacaacttctagccagccttcccacacaaccagggtatttcctttggaaacccctttatcttggatgaccagtgctccaaacgtgaccaagaattgaggcaatcctgggcttaaggtgctatctagtgccgaaaaggaggcaatgatctaggattaa

SEQ ID NO: 205214 - DNA, 322 bp, Homo sapiens
tttggagctgcggcagggccattctcgccctcttgctttccagtttgagttctagatccaaggctgtccaggagagccaactggtttactacaatggagtcttggagtcttctgccctgcctagctagggctggaagaggatcagcctcagccttgtgagtgggtggtacaggatgatttgacaacttaaggataacatgcaagccatagttgcaccctattactgggaagtgtctagtgtgctggcaaaaccaggagcaccaatcagtacccaagttataaaaaataaaatagccctctttgaggcccacgaaaaaaaaaa

SEQ ID NO: 205215 - DNA, 521 bp, Homo sapiens
catgtccaaattgtcccattgtgagtgagtgtgagtgtttatgtgtgtgaggggaccctgccaaggttggttcctgccttgccctctgatttgctaggatgagctctggccacctgcaaccctgaaccccagtaagtaggttggaagatgaatgcatgaataaatacaaattattgtaaaatgtaaatttgtaaagtgttagtgtattttcttatacactaattccttgcattgtgtattttcttagtcttttttcttcttgcgaatgcctataaaccattatacacagagtaccttggtttgttacatttgaaaacctaatacatattattatgaataatttccccatgtcactaaaacataattttttatggctatgtagtatttcactatatgttcatattttaaatttattaagccaaccttctgctattgtatgttatgttgactttgttgatattattgataacactgtgatatgaacatctttacatataaatgttatatggttgtaacatata

SEQ ID NO: 205216 - DNA, 417 bp, Homo sapiens
  misc_feature (14)..(14): n is a, c, g, or t
cccataatgacggntcgacccaggcgtgcggagagagcctcacaaatcctgcctctttctacttcccagcacagcgggcagagagagcaaactctgccacagggtcctggcaccaacgcagccccctctatcctgccaggtgcttcttctctttatttgtgtcctctgacatcctctcattcttctcccttcctttcccatatgtcatctccccatgacaaacaagggtagtttcttctgggtagaaactaggcgttttcatataatggaggctatgtctgtgttgatgcagagaaaaacacaaaagccctgtaaaatatttaaacctgagccaatgtgagtgaccatggcccaggcttatggtcttaggaagtcctgagaacgtgtgcccgaggcaactgggtcacaggttggttt

SEQ ID NO: 205217 - DNA, 526 bp, Homo sapiens
tccctaccccctacctccccagccctttaaaaaggcagacccagagtgttaccaacgatatgttaggaataaatctctatgaaaatacaacatcttctataaatttaacctgcaaattagcttcccaaaccaaaaaggaataaagtgaaaaacctaagtaggttttagggcaataaacactgaaaacaataccagagcacacacattacactttcatttgctgacagtccctgtcaccagatgcattctcatgattaaaagggaagaatgaagtcacgaaacccattttaaaaatcagtcctcctgaacctatgcaacaagatgactgcgtgcccttacaaatagtcactctgactgctgtgcctcaactgttttctgaaattattctagagaaaatgcttccatattatgcagactatgatttgagtactctcagtgatagctcatgttcctttgaggatgaatctgactgttgaaagcacctggaagtaagctttataataaatataaatggcaagcttaatag

SEQ ID NO: 205218 - DNA, 321 bp, Homo sapiens
cgtcgcgtggcatcctgggagtggcagatggccccgcgctctgactggctggaattaagaggagttgaggagacgggccaggaggagctggagatgttctgggtgtcctccttaagactttctctccgtttcttgctaaagttcttgattagtttgctccatgacgttttatgtggcgtttgtttttgtcttcttcccagacccccactttcctgcttttgaccagttcagagatctcttagttcagacagcttatctaaaattagaataaaacgatttccaggcttccgtggagttctgagactttgctcttctaggaaa

SEQ ID NO: 205219 - DNA, 285 bp, Homo sapiens
gggcagtggcctggcagcttttcaaatccttcccatttttattgaagctgaaagacccttgactaggacagactcggtcccaagcagagagctagatcttctataccagttgttctcaaacagtgtggcccaggaatcctgggggatccctgagtgtcctttcagggactctgcagtgtctgaactattttcataggagtcctaaaacgtgatctgccttgttcactctcacgctctcacaggcatccagtggagtcttccagaggcgacatgacacgtgacgat

SEQ ID NO: 205220 - DNA, 524 bp, Homo sapiens
gaggcatggagggtgtcctgcattccctcgcacacggtcagatgtgtcctaggccatcagttcacaaagttcccttgtcctgaccctcgtcaccaaagaagcacctccctgtgtgcctctcagcagaggcagctccccaggccacagcccatgttccctggcatttgggctctgcggcttggggactgggaaaggaagccagctgccctgagggcccagaatgacccacaaccaaaccttgtccaccttcctttcccaaaaagcatgggcaaactttgtttctcctggtggtgtttgttggggtagagaggttgttgttttgctcttgtgttttaagatcagattcttgggccacacagcatattactaggataatgaactcatgttgtagttaggattaatctgaattttcttgcatcatgtagatgtgtctggcagaaattggtgcttttatttccttctcaaacagttgatctgaaagttatgtgtaggctgggccatcctgctctggagtagagaggagc

SEQ ID NO: 205221 - DNA, 201 bp, Homo sapiens
gatggggcctgggtagtcctgaggagcttggtgcaagctgaggacagacaaagtaagtggaggaaggttggcagtggaaaaagagcagagaagaaagagagagaaacagaaatcccacaaggaaaacctgtgggatttagctttcttgaggcctgatttttctttttctttttttttccagatggagtttcgctcttgttg

SEQ ID NO: 205222 - DNA, 199 bp, Homo sapiens
gccccaggggatggcaaacccacaagctagaaggagcctggctccttgaattgccaaatagaacatgtcccactaaacacccactaaactgttacatgagcgagaaataaaacatatactgtgttaagccacggagggcttggcatcttttgttacagtggtaagcctattataaaccaacaatgagcctctccgaatg

SEQ ID NO: 205223 - DNA, 143 bp, Homo sapiens
tatagcacggtgactatagacaatgatactgtactatagtcatccctgggtatctgcctgggatttgtttcaggacccccacagacatcaaaatccacacatattcaagtctcgaggtgggccctgtgaaacccacctctagg

SEQ ID NO: 205224 - DNA, 526 bp, Homo sapiens
ctcctatggtctcaattttcatttctcagtattaaataatctgagcatcttttcatctttttaacctatgtttcttctgaagtgaaatgcctgtgagtggcagaaattaccaatatccacatgttgctccaaatgtctcatgcttagtcaggtgtggccaagtgattgggttctggccagaaggatatgagtgcaagaggtttaagtttctcccaagtctgggcattaaaaacactgtagactggcatggtagctcatgtctataatcccagcactttggaaggctgaggcgggcagatagatcacttgagcccaggaattcgagatcagcctgggcagcatgacaaaaccctgtctctactaaaaaatacaaaaaattagctgtgcatggtggtgtgtgcctgtagtcccagctacttgggaggctgaggtgggaggatcacctgagcccaggaagttgaggctgcagtgagctgtgattgcaccactgcactccagcctaggtgatgggagtgagaccctgtct

SEQ ID NO: 205225 - DNA, 439 bp, Homo sapiens
caaagaaacgcaaaagtgactgtgatgcagagatagaatcaaggagagatttgaggtttacttactatattaaatgtggagaatttgaagatgaatctaaaaaatatttgtctgttttctccgagggaatatttttatggttcatttataaagtcatctgtattgttttatgtgacaaaactggtttcattggttctttagattacttactgtcatttttggatttgaggtcataggagcccagaggggcaaaactctcagtaggaagcatcagtcgtgtcaatactgctgtgaggctgagtagaaagatgagaagtgagaactttttcttttggtgaccaacaagttattgatggccttgagaaaaatgcgactctggagatgtgtctgcagaagctggactgtagttggtgaaaaaatggacaggaaatgaaaaaat

SEQ ID NO: 205226 - DNA, 437 bp, Homo sapiens
tgagaaggttaagccccttccaatctctggagtctcaagatttaatcaataccatttagcctatttaaatcttgagctccgagttggaaggagaaaatgagaagttaaccccttgagccatgtggtctctttacaatcaagagactgtacatatgtgaaaaaatacaaattaaggacctgtgttcatagacaatctaaactgtgtttctgaagtttgtgcacatttttcttcactgtaatgttattttacagctgtttgttaaaatagtgaataatttaatgatcctaaaagtaacaggtttcgtgtgagtgtgcttgtatacgtgagatttgccttattttcaggttgttttatttaacgatggttccttggacagcattctggtgttcagcaaccaatatggaatatttgtcattaaatccatatcagtctttta

SEQ ID NO: 205227 - DNA, 538 bp, Homo sapiens
ctccggcccttggtggaaatggggggaggggagacagctggcctgctgcaagggagcagctgttcggtttcactgctttgttactgaactttcctgaggggaggataccttgtttatttccttttgcatgagagcccaaatctaaggaaagtggggcacacacctcaggtgaagggctatgggaagagcatttctcttactttgcagagttttggattaatactagatgcttaagcggtatactcctttcctccacccccctcttcttcatctgtaaaaacaaaaccaaaaaacaaaactgcaggctgcggctgtgggaggtgactttttttcatttctcagaaatccctcatgaggcaaagcagagaaacagaaagagggaaacaactttgtgtcaaaatgaggttgtgtgtgtgtgttttgaaatgaggtggcttgttgtcagctttaaggaacaacagctctgcagaggagcctggtgatggcggggaggagtgctgggctacctgcttccttgccccttgccccacttcaaagc

SEQ ID NO: 205228 - DNA, 482 bp, Homo sapiens
atgcagaggtaatatttaagccaagacctgaaggctaaggcggtaccagccatgtgaaaaacattttaggcaagaaatttcaggcaagagagaacagcaagcacaaaggatctgaggagacaaatgacttgttcaaggaactgaaaaaagatcagcagctggaaccatagtgcctaaaagggaaaatggccaggaatgaggttgaagaggtaggtagacagggcctggttagccttaaagaccctggtaaacaggtaaacaagcattatatcaaatatatagtttcaaattgtgataggtacttaattgacataaagggaaagaataagggagagtaacatgagggaaacctactttagattaggagacaaatgtcttgttcagtcaagagtttggtttttattcttaggaaacattgaatggtgattgcagctgtagaaaatggatagccagatctgtattaccagcccagttctcactta

SEQ ID NO: 205229 - DNA, 222 bp, Homo sapiens
  misc_feature (5)..(5): n is a, c, g, or t
  misc_feature (17)..(17): n is a, c, g, or t
  misc_feature (23)..(23): n is a, c, g, or t
agagncctacacactancacatnctttctaagcatgtttgcctgacatccagctcacccgtccgagtactggaatagcacagaaagccccgtcgctagccctgccacgtcgttaggagctggtccaggatgaaggtagcagggcatgagctcagtgccaggagagcagccgcactcgtggtgtatcacctgccataatgcttttatctaacttcccctttcc

SEQ ID NO: 205230 - DNA, 531 bp, Homo sapiens
aatgataagctctccagtttcaaatgaaggacgcctcaaattgagaactgacaccattgcattcctcaggatgggaaagttccttctccatcaattcttgggcactggagtaggactcttgctgcagatggtattgttctggttctcgagaaggaatccaagataaaggctgtctggggataaaagtggtaccctcttggaatatgggcaggaaggcatccctagtgaccatagccttggttgaaggtattaaggaggaatcttgaggtgcttgtctgggtgtcagttgacaatttcaatgaaattagcagcattaggtctataggtggctgcttaactaattatgaactcagctgcttaaatatatttgctccaggtttcacaattccttttatttacagtaattatcactggttagcacctatagtcaggggagaagatcttctcccctgacagcccttttgatattttgatattcaaagggaatgatcatcttcttagagtcttcggatctttaggcagaacatcctt

SEQ ID NO: 205231 - DNA, 278 bp, Homo sapiens
atttcatgtccctggattttattggaatgctcttgccccactcttttacctggttaaggccttctagatttttcaaggcttaaccttctgaacgtttcctaagcggagacctggctgcacagcatgcccttcctgtggtccccctagctatttctgttatcatctgtagtcagggctagaagccatttcccagtaccctccctcccgcagtggggcaggcttcgtttcatttatttatttatttagagacagggtctcgctctgtcacccaggctgga

SEQ ID NO: 205232 - DNA, 286 bp, Homo sapiens
taatttcctggagggaaaacaaaggccccaccttgaacaaatcccaaggccaagggaaatccttgcttcccacatttctacagctgccccacctccaagtgtggctcatacccccacctgtgaacccagtacacccggctggatttcacggtgggaggatggcctttttccctgagtatcaatgttttgggctctgaaagattctcaaagtgtccaccaagaagccctgtcttatagacctactgcaggcctgctctggataaacttgtgaatgagatgaaatcca

SEQ ID NO: 205233 - DNA, 522 bp, Homo sapiens
ggctgtccgaggtccccctcctatcggatcaggaatccagataggaggtctgaatccagataggaggctcctatctaatatccagattgttgatttaatttacatgtaacacattcctttaaaacagagacaactttttaaaaactcaattatccccttaataaggctgtatcttaatctgaactactatgattaaaacatgaaagagcagcataaaactaaacacttttaaatattatccttaaaatggtttaatgcttgtacacagcatgagttagcttcttacttaagactaataaaaacttaagagtatttcaggattattaacttttgtttttccaatagggtattctgtctgttttagaacaactcaagatatatattttctggattttatattcctaaaggataggcaaaaactgtctacctaaacttgctgtactcagattttatcaaacaggagatgaatgagtcggctttaacattaaaaataaaataaggctgggccatgatggctcacgc

SEQ ID NO: 205234 - DNA, 703 bp, Homo sapiens
ctgagatgatggccactgatgctggtccggggctgttttggcaagccacacatgaccttgctctaggtgctgcctctgtgtgtgcccagagcttctggagaagggctggaaattgggctactatagtgttaggccaaggaatgtttttacaaggcgtgtaaccctcttattgtgcctctgagataattcagagatcccagcacagtcatcttgctgattctcagatccatcctgcatggcttacagaggctgcagaggctgtggggcatactggagaaatactctgtgtgtcagtgaaggacctgctcattctttttctctctgactctaagagcagggagctcctgatcacatttagtctgctcttaaagggatccgaggctcagttctgaaaatgaaatcaggtacatgaaagatgttcactcttctacatctgtgccagcatcctgcggcacatgggacaactgagctgaaaggtttcacttcctagcatccgttaagaggacacagaaaagacaaagagtcctcagaagtaaaataattttataaattggagcccatggttcacatgatgtacactttgcacactcacattttaaatgtctttgctgtcctttttcggcatacaggccataatttccatccatgaaaatgaaaaatggcgatgcaagctatactttgtctacaatcaccaactaggtga

SEQ ID NO: 205235 - DNA, 349 bp, Homo sapiens
aggttcactcatttaaaagaactaacagttccattgctcttggcagaatacaactgtgattgcagcttttctattcagtgcactggaaatatcagtgaatttctccaactgagagtgagacattggcagtatttcccgatagtatgtgtctgttgttattatttttctcctctacctgttgacagtttgattttgataaacttttcaagaatacctaaataatataataatctaaatcattgtcacaaaagaatatagaaacagataaatacattaattcagcagcctcagagtctgatgagttgcattaatcacaccaatgagcgcttaatgtggttaatttcaaaag

SEQ ID NO: 205236 - DNA, 635 bp, Homo sapiens
cacacgttaattgttccaactcaggtcttctaactccaggtggccctgtgcttgcccactaccgcttcttgagttcaaccaagtcagggaaaaaagtatgactctaacgtaatgtggctttttttttttcttcactcagtcataccagatctttacttgcgttatagctaagtttgtatcctctcaaataaagtgtaagttatgtttaacaccaaatggttacaaactcaagtttgctcacttgaattactgataggacctgttccacatgccctggggctagttaggaaaatcagattcacactcagaagtttgctatcactgatagtattccactgagtatgtcttcacttctgaaggaagttccaaagagagttttaaacatgttctttaacagtattagattaaaaaatagtaataaatgtaaaatttcccatgagcacaacactcagagttatgtacaataacacatatattggtgtcagaaagagttcaccatactcgtacgtggttaatgcagattttctgggccagataaaattgtgggttttgtaaagcatctgtaatgttgtgttacattttgaaattaagatcagaactttaagaacatttgcttctcacaatatttttcaaac

SEQ ID NO: 205237 - DNA, 621 bp, Homo sapiens
aatgctgacacatgctacaatagggctgaaacttgaggacgttacgctgagataagacagtcacaaaaggacacatactgtctgatttgacttatgtgaggtactcagaaaagtcaaatcatacagacagaaaacagaaagccagttaccaggtctgggggtgctggagaatgaaaagttagcgtttaatggggacagagtttcagtgtgggaagatgtaaaagttctagagaaggatggtggtaatggttgcacaataatgtgaatgtacttaacaccactgaactgtacatttaaaaatggttaggaaggcaattttatgttatgtgtattttgctgcaattaaagataaacagtgtgcaagagaggagaggaagtagcagcttgtcttgttcatgctgtctgaggtgcatgtcggagggatgggtccaacattaatgtcggtcccatcccacataatttctgtttgattttgccattcacccataaaatggtgggatctacctcccctccttgcaaatttgagctggccctctgatcctgtctaagatctgaagccagatattaaggtacttcattaatttccatgtttgtcctctatgcaacctagcaatcaagcag

SEQ ID NO: 205238 - DNA, 972 bp, Homo sapiens
actgcactccagtctgagcaacagagctagactccttctcaaaaaaataaaataaattaaaaaaaaataataaagatgtaatgacagggaaatagacagatgttgatacaccctgaagcaggtagtgaagctggcagttggccactggttcccacagaaaattgctctagtgatgctagcaaatcccaaaattggggctcaatccaggaggattcctggcttcataaaggaaataattcaagagcaagccaagagtgtaaagtgaaggcaaagcaagtttatgagagcaagagaacaggaaaatggctgctccacagacagagcagggctactccacaggcaaagtagcacccgtggattgttggctagctatatttatagctactccttaattatgtgctaaataagaggtcggttattcatgaactttctagaaaaaggttggagagttcccagaaccaggggttccttctcttttaaactacatgaggtagcttctgggcattgccatagcatttgtaaacggccatggtgctggtgggagtgtcttttagcatgctaatacattataatgagcatataatgagcaatgagggcaactagaattgatgttcattgccatctcagtttcactgctttcagctggtttctttagtgcatcctgttttgaccagatcctgtttcatcatgagcagggtcatgaccactgctcagaaacaagtcctgctgacctatgtcactgtttgaaatgcttattcttcagtgccataaagaaatagcacttgaggccaggcatggtggctcacgcctgtaatcccgcactttgggaggccgaggccgggagtttgagaccaacctggccaacatggagaaaccacgtctctactgaaaatacaaaatcagctgggcatggtggctcacgcctgtgataccagcactttgggaggccgaagcgggcgggtaacgaggtta

SEQ ID NO: 205239 - DNA, 341 bp, Homo sapiens
gggatggagtgtctggaattccatggctgaggtgcaacaggtcccacagcctctccagcctctgtgggaagaaggatcatctgatgcctatgtaatagagttgctgaaggagtggaagcagctttgacattatcagtggaacccaccagtgcagactgcttcaccaagggcacctgaggcagcagatctgaggattagggacgtagggagctgaagcctggctggagaggtggtgcgcacaagaacccccacattccccgacaggagcctgaaaaagcaagacgccatgttgggaggacacggaagcagttctagggagaggagcacatggcaagaagcca

SEQ ID NO: 205240 - DNA, 219 bp, Homo sapiens
aaacgttaatactgagtcaacatagagtgatttctgtgtctaggagacagctggagaaataacaggagcttccaaatggagatgggcagattcccagagccctgctttattcacttggagtcgaaactgggaattgagagaatggaccctcgttttgtctctgtcattcatagctctccagaatgtttgaattgttatcctttctttctgagtcttatt

SEQ ID NO: 205241 - DNA, 585 bp, Homo sapiens
gagtcacttgtgttcaagaaacaaaaaaacaacccgaacaaatagagtagggtttgcagtcttgcgatggtgaagggtctcatgctggtatgcccaataacgaaattatcacaaaagattgcaaaaaccacagccttgcacaaaaagcatcacagccttatgcaaaaaatacttcaaggacatctacccagcaacagcctgtccagctgtggacttgcatcgcccttgttatggatctttgtagccacaggtggtaatctcaaaacagttatgtaatcttcatttatcctttaaaaaccattctcggccacgcgtggtggctcacgcctgtaataacagcactttgggaggccgaggagggtggatcacctgaggttgggagtttgagaccagcctgaccaatgtggcgaaacctcatctctactaaaaatacaaaaacttagccaggtggggtggtgcatgcctgtaatcccagctactcggctgaggcaggagaatcgcttgaacctgggaggtggatgttgcagtgagccgagatcgtgctactgtgctccagcctgggcgacagagtgagactccatctca

SEQ ID NO: 205242 - DNA, 607 bp, Homo sapiens
cgggccgcagcatggccgagccgctactcaggaaaaccttctcccgcctgcggggccgggagaaacttccccggaaaaagtcggacgccaaggagcgcggccacccagcccagcgcccagagcccagccctccagagccagagccccaggctcccgaagggtcccaggccggagcagaggggccctccagccccgaggcatcaaggagccctgcacggggagcctacctgcaaagcctggagcccagtagccgccgatgggtgctgggtggggccaagccagctgaggacacctctttagggcctggggtacctggcactggggagcccgccggcgagatctggtacaaccccatccctgaggaagaccccagacctccagcacctgagcccccggggccacagcctggctcagctgagtcagagggcctggccccccaaggtaagaacaagcttcccatccccttccccaaggtgagcaccagctccacatcccttcccttcagggtagcaccagcctcacactccctcctcccagaggagcaccaacctcacactccttcccttcaggggagcaccagcctcacatccccaccccgtcagatgct

SEQ ID NO: 205243 - DNA, 406 bp, Homo sapiens
cgggccgcagcatggccgagccgctactcaggaaaaccttctcccgcctgcggggccgggagaaacttccccggaaaaagtcggacgccaaggagcgcgggcctggggtacctggcactggggagcccgccggcgagatctggtacaaccccatccctgaggaagaccccagacctccagcacctgagcccccggggccacagcctggctcagctgagtcagagggcctggccccccaaggtaagaacaagcttcccatccccttccccaaggtgagcaccagctccacatcccttcccttcagggtagcaccagcctcacactccctcctcccagaggagcaccaacctcacactccttcccttcaggggagcaccagcctcacatccccaccccgtcagatgct

SEQ ID NO: 205244 - DNA, 290 bp, Homo sapiens
tgctagatctgtataacatctgtgcatggatgatggtagttctctcgagcggaagcggctttacgccaagtgccgtacaattcatctaacttccggaaagcactttcagtacaaatgcagttatactgggtgtgccagtttcctgcatttgacagtcagttttcacttattaatgacattagaaaaacgaataacaattccctaagatttcctatataacccgagtagagaagatataagtgagcaattcagatgtaaatattaatataacaaaatttatctccagctta

SEQ ID NO: 205245 - DNA, 253 bp, Homo sapiens
ccactgtacccagctaaattttttttgtattttttgtagagttggggttttgccatgttgcccagactggtctccaactcttgagctcaagtgatccacctgcctcggcctcctaaagtgctgggattacaggaacgagtcactgtgcctggcctttcttggatttcttatgagagcaatgatagcatgcaaataatgacatttttgatatttcttttttaattcttgtgccttttatttttcttcttgcttt

SEQ ID NO: 205246 - DNA, 482 bp, Homo sapiens
cctgagcacagagtgctgtgagctttgagaaataagctagagatggtcatcacagaactggatcttgaatgataaagaggagttttgttctgtggtggagacaaggaatgatcttctaggctatcaaagcagggtgagtgaagttggagagatgtagaaatgagttttgtgtttggatgtcattgagtgattttgatttggctgctagagcacaggtacatgggaaagcatgacaaaggggcctgagaggtagggttggggaggacatgtgaaacatatgttgagatctgattggtaaagttattgataggcgtttggaccttgtcttttgggaagcagggaagtagcaatatccaaaagagagtgttaaggatggattggaagagggaaggttatagaggggatagagagcaaagcaggatgtgactttcccagccttgaaatgcatgagaaagtttgggatcctcacaatgaagggcaaa

SEQ ID NO: 205247 - DNA, 297 bp, Homo sapiens
gcagggtgtgagtttcagtttctgcacattgtggccaacactgggtatgatcattctgtgtaattttattaccactccaataggtaggaatggtatctcattgttttaatttgaattgtctcaattactatgatgttgagtatcttttcatgtgcctgtcatctgtgtagcttctttgctcacagatgtaattttttcctgcatctattgaaatgatcgtatagttttctttttcagtttgttaatgtggttaattaaactggttgatatttgaatattaagccacatatgagaaaa

SEQ ID NO: 205248 - DNA, 415 bp, Homo sapiens
ggctgaggagaaattgctccatgagataaggcaagacatttatccctgaatgctgtctctccaaatgcacagaaacatgtcataaagtgtgggactagggtctctaaaggacatgtaatacctcatttctggagatatggtctaacatgaaagggtcataatcgatggtcaagtcacaaaatttatttctagagtcattttactaaatatggagagatctgcaaaaattgtatgcctggggaaaatcccaatcagaccaactgacccagaccaatcaatgacaactcagagtagtaatgaaaaattcatttagactaactcccataatttgctaagaggcactgtactaagtatataacacaatatctcattgtgtgatccttataatagctctatgaggtacatgtcattcttc

SEQ ID NO: 205249 - DNA, 441 bp, Homo sapiens
gatttgtttctttgacggtttatccttacccctttcctgctactggttggttaatgaggcactgagctaggaaccctgtaagtgttcaagtgttaaaattgtgttgttgtacctttaaatataaggagaagaaattgggagagatcagattaaaatattaaatacttatatggtttagaaaagtgacagcataagggagatcaaccaggtttaagggtaaatacttaggtgaccagaagatctacagtaaacttgaggacatatcccaccaagacccacaactcagctccagctgattgtttccacaataggactgaatgcctgcccagggtgacacagatttccagtttcttgggtaaaaaacaaaaaatgtgttttgggttttttgaggttgcttttttattatgaattttttattaaagagttggcttaaaaacaaaa

SEQ ID NO: 205250 - DNA, 560 bp, Homo sapiens
gaaaagaaagggttctaacccattggctcaccaatttctttttacttaagcagatgctatggtctgaatatgtttgtccctctcaaattcatgtgttgaaacctaaccctcaaagtgatggtactaagaagtggggcctttgagaggtgattacatcatggggatggagttctaatgatgggattagtgctcttgtaaaacaaggtcaaaggaaatgccttgcctatccactatgtgagtgtagaggtactgtctatgaggaagccggctatcatcagacactaaatttgtctgagccttgatcttggacttctggcctccaaaactgtgaggaatacagatgatcctcaacttacaatggggttatttcccaacaaacccatcagtaagttgaaaaatattgtaagtcaaaaatgcatttaatacacctaacctattgagccttatagcttatcctagactactgtaaacatagtcataacacttaggctacaattgggcaaagtcatgtaacacaaagcctatgtcagaataaagttataaagaatttttgaatcaaa

SEQ ID NO: 205251 - DNA, 562 bp, Homo sapiens
gcaccagcaggtaaccagtggtggcctggccacgaaagagtatttgaaattcaacagtgagcaagtgcagaaacagcatcccaaaccgcaggccccaccacacgcaggaaccagaaagctgaagtttcaccaaggagtttacttagtatttctcgctgggaatggggatgggtagcaaaaagcccctttcatgtacataatggttggtcctatgtcctacttttattttctctaagagttttagaagaaaggctgttttaatttttttttctccttaagagcaacttcctttttaaaatgctttcctcttcttgtcctgcttgagtaatgcaggcatcattctgaaatcattctgaaacagctaggcagtcgccttttgccaaaattacttctctaagaaaatagagtgttcttttttttaggacttagaacccacaaggggtgagtggaagttttgtagcccatcaaaggtgaatatgtgttctgcagtatcaactaaaacagtgtacaaaatcattaaactgggccgggcgcagtggctcatgcctgtaatcccagcact

SEQ ID NO: 205252 - DNA, 326 bp, Homo sapiens
gggtccctcccgcagaccctgacccaacgacagataaataatgtacactgacacagcatattatgcttttcagtctgctgagggtccaggcagcttacagactcccaggagagtgccataaacagttgcaactggggctgtactcgctggccttccgggcatttattcagcacacgttaaatgacaaaagtttcaagtaaacatcacgggaaggtaatcaccgttgccgaccctccccgctcctcccaccaagtagagagcaatcatgcatccgtggatggtcaaaggttagtcttaggaccacatgagtctgtattaactgcttg

SEQ ID NO: 205253 - DNA, 358 bp, Homo sapiens
actgtcttgatggatattccatgggtgcatgaaacgtgtataccactacggttgtgtggagtgttctttgtatggcaattgcatcatgttgattaattgagttattcagctcttctgtttccatgctgattttctgtctagcagttctatcacttgatgagaggggcatggaagtccccagctgtaattgtggatttgtctatttctccttccaacactgtcagtttttcttgatttcttctgggcctcttgtttgatactcacatgtatattagggtctttgtgtctccctagtggattgatctttttatcataatgtaatacctctctttctaataattttccttgctctggagta

SEQ ID NO: 205254 - DNA, 378 bp, Homo sapiens
tagatgtggagagattgggatgagctgtgaatatcattaagaacatgtttgacgtcaatttcttaaattgcaaaagcatcaaagccttctgaacaggagataggtattttattgacattttggaggaatggggtggcagacactaaaggctgggaaaccaattatgagtttactgaattgtccaaatgagagataagagatggaactagaatggcatcaatgggcctggggaagacagcgtgaatttcagagaaaagagtactctttgactcaacaatctgcctcccacaaataaaaaggcctgtgctaaagtctgttaagctaagctattagatcgtgagaacttcagcaactaaaattaatcttatactaggtcac

SEQ ID NO: 205255 - DNA, 358 bp, Homo sapiens
attactggggatatcagtatggccgctgtcctagaagaaactgcaatctaattgtacagacaaagtatacaattgcctgactatatagacaaagaaacatcaagtataaatccaaataatatattcagggaagaaagcatgagagaaatgagatcagtgcaagcttgaaaaaagctttttgaaggaggtggggccagggagggccttgagtgatggcaattaagatgccttgcgtctctgcttacatcagtcattgtgggaaacccaaactcccagcccaggccaaccccatcctctttccagcactgtctacccttatgctgacccattctcaccctcttcctaatctaccaagccc

SEQ ID NO: 205256 - DNA, 482 bp, Homo sapiens
caagtggttattttctctgctgctttaggatccgttttttctaatgccttgtctacatagaaccgctatagattgattattccaacatagaacaaagatcatttatgatagtcttgtattagtggatttttttttctctttcaaggcaagagtgttgctctttcacccaggctggtgtgcagtggtgcaatcatgactcagtgcagccttggcctactgggctcaagcaatcctcccacctcaggctcccaagtaaatgggactccaggcatatgtcaccatgcccagctaatttttttagttttttgtacagacagggtctcactatgttgcccagtctggtcttgaactcctggtctcaagcaatcctctcacctcggcctcccaaagtactgggattacaggcacccgccaccacacccagctaatttttattttttatttatttatttatttttatttttagtagacaaagggaaaca

SEQ ID NO: 205257 - DNA, 590 bp, Homo sapiens
gccagaattcaacccatgccaataacctccaactcccaaactgttctgattttatctctttgctttacaaagacagaacactgaagattctgctctcagggtgttgattgacgtctggaaggcagagactcgtggattagcaagcatgtgtaagaaagtgctctggatgccacagggtggtaatttgtgcatggaaaatggctggggtgaagaggagactagggtaagttccacctgaggatggagaatgtgaaagaaagttttcctagggggctggtctttgagtggaatctcgaaagttggaggaaggggaaggaaagggtgtgctgggctgagggagtagagggacaaaggcctgaaggttggtaaggtgatggtgagcttggggttttacatgcagttcaataagattggaacagattttccaggggtggggtgagggtacagaagtgtgagcagtgtcagcagtttggaagggtcttggaaagggatatccagaaaataacttcagatctttgtacaaatgagaaaacagaggttcagaaggttgatggatgagccaacagcctcaaggagactgctgagtatgt

SEQ ID NO: 205258 - DNA, 504 bp, Homo sapiens
gctctcaatacctacctcagacatactgaatcagaatgtgtattttaacacaatccccaaatgattcatttgcatattaaagttggagaagtgctcttgcatctctaacaagcttcaggtgatgctaatgcagctagaccacgccattttgagtagcaaagaggtagaacagtagttatatattgctgtagttagaatcacctgggaagttttaaaaaattctggtgtccagactgcaccccataataagtgtctctggggatgaggcacaaacatctgtatttttaaaaattctccaagtgattccagtgtgccctcaagtttgtaaactgagaatctacacaggtaagtttcaggaagtctttctttaatttgtaaaacagataaatacgaagtgaattaatgaggttaaataggaaagtagaagatgttaggaaacccagagtccatttcttatccctgaaagcctttggatctctttaaagtatctggggtgccttggat

SEQ ID NO: 205259 - DNA, 496 bp, Homo sapiens
ttaatttggctgttgaatcatctgctgatttattttgatacttgtggagtgtaattttatcccttgcttgaagctcattgttttagtaattactcatggtttagaaaattatttcttacattttgatactgttgaagccacacgttcatctcattttcttatccaaaggcatgccctttattagaaaaaatggaaaatgcctctaagtatccctaaaattttccattcagaattttagatttactgaggttttgtgtatatgtttttgatcttaacagtattattcatttccaagtacgttgtcagagttgggaagtaactagttgatttgacaagtcaatttattgtttgagcattggccttctctcttatttcagatctgtgttctaggagagcaatttgttttttgacttgccatatcagatgcatgtacagctgtcaatataatcttcaatgaaaagtaagggacccatgggaaatggtgtagcactcagaa

SEQ ID NO: 205260 - DNA, 436 bp, Homo sapiens
cagagttttgagactccatctcaaaaacaaaaacaaaaacaaaaacaaaacataagctgccatgtcgttgataacctaatctcaaaagtgacatacaatcacttctgatatattttattggccactctgatgaccaggacccctgcttcattgtgagacgtgactatacgagggtatgaccaccaggcagtcaggatcaccggtggccatctcagaggctggctaccacaggtcccatcccaaagaaggaacaaacgcatgggtatctaccgtgtccactgtgctccaggccttgatgttaggtagatgtgattatctccattttgcaggtgaggaaataggcccagaaatgttgacttacttgctcaaggtcacacaagtaaatggcagaactgtaatttgaaaggaagtagtctgcttccctgattacttaaaa

SEQ ID NO: 205261 - DNA, 1083 bp, Homo sapiens
aggtagtattccactgcaaaaatgtaaaataatttgtttatgcatttaatatgtagatgggtatttatttctgggtttgggttattatgaatgagactgttataaatacttgtgtataagtctttaggtggatgtatgtttttattttttctcttgagtatatgcctaggaatggggtgcatgtttgactataaaaaactgccaagttgtttactaaagcagtcatatcatttttacattcccatcagcaaagtatgagagctcaaattgcttcgcatgttaacacttggtattgtcagtatttttaattttagtcattgctgaaaagaaaaagcagaaaccaatgctttaagaatgttaatcacagaggcatctcagtacataagcacttgtatatatcattcaagaagtcaatcaatctgtgattccagtgagaaacactcaaatcctatcccaagacaccataatgaactggagagattatttttctccttatagaattaaacctaaataacccaagaaagatcatcttatttatcccactccagcacctttttcggatacctccagaggatatttaaaccgctctgaaaatagtaagtcttatgatcacagacctctaactctgatcataaaatgtactagatattgggaaaaaaatcacacaaagaaaagttagtaagagacattggatatatatgaaacacccatgtctagatgcatattttggcaagcttttaaagtagtgatacttctcccttttttaaaatttgatgcttcatgctgtttcaagaatggttaaaaattatttgcagacattgtcctaatttggacaaagtttgccagttcaaaatgaatagctggttttcatcaaccaaaccacaatagttgaagggcctggcctcccagaaggtgtaggcagttcacactaatagcaggaagaatattttcattccagggctcagctttcacttcacagactcctatgagagctgagctacaaagaggtcctagactgaataggagaataggagaaattcaaaatcctgcttagttttttaatgaacctgccattccctctgc

SEQ ID NO: 205262 - DNA, 287 bp, Homo sapiens
ggcaaagttcctccctgaccctgcacactgccccgccacctgctttactcaggacgctgcacgcctgcaattaatggccgcagactgtcggcgctgcccaggttctcggactacgtgggttttgagtgcattctcctctcctctggctcttggcagcctcgccagctctccctgagggctcagcggcagcgaacagtgagctcttttgctccagtacaaatctctatgttactcaagctgctagctttattcctgctgcgtgtttttacttggcctgtcccttccaa

SEQ ID NO: 205263 - DNA, 419 bp, Homo sapiens
cagaagccaagataagtgagagtgtcatgatggactgaggggtcagcagtgtttgatgctgccaagagggtccaggaagggaaggcctgagcaggtcctattggatttagcagcaggggtccctgcaatttcagggagcagtcagagagggggccatgtgtgcctggcacagtacacactgagtgaggtctcagtaaatccttgttgaaagaattcagtgactaggctatgacatgtactctggggctcaagcaatcctccccctcggcctgccgagtaactggaactataggcatgcaccaccacgccaagctaatttatttttattttttgtagagacaaggtcatgctgtgttgctcgggatgaccttgaactcctggcttcaggcagtcctcccaccttggcctcccaaagctct

SEQ ID NO: 205264 - DNA, 759 bp, Homo sapiens
tagctcgatcacacacacacacacacacacacacacacacacacacacacacgcacacatatggtatcttcatcatgggatgttgcaaagatgcaatgagctaacatatttaaaatgcttatggccgggcctgggggctcatgcctgtagtctcagcactttggaaggcaggtggatcgcttgggcacaggagtttgagaccaagctgggcaactggctaatttttgtatcttttgtagagacaacatttcgccttgttgcccaggattgtctccaacttctgagctcaagcaaggtgcctgcctcagcctctcaaagtcttggtattacaggcgtgatcccaactgcaactgtccagcagatgcattcttatcacttaagttgcttgacctagaattgctctctgccagtattggtggtacaatgagttggaacagaagccattttagtgaatgactgcagtgaaaaaaatgcaagaaatgtgtgtttaagacagagacagcaggagaagaagaatgacacagaataggggtgactttccaggccaaaaggggttgacttgatggaaagtacaagtcattgctaacctctttttatctgttttattgtcctgataaagagacaatatttcttttcaggaacatttaacctattctttattctgttgtttcttttccatatactaccgcagacctgcagtttttttctctttgtactgtatccaaatgtacctagttgatcgagctacgctaccgtgcc

SEQ ID NO: 205265 - DNA, 290 bp, Homo sapiens
ttcctctccccgccccggcctgcgcggtgggcaacagccccggcccggcgcctccgccgaggccctcccgctcctgggcactgcgcgcccagccagcagctggagtcccacgaggcgcgtgtgtcccccactcccggaacaagcaccacactggcgcaccgagggtgccttgtggggtccccaagtcatcccaagacatacgagtaatcatcatcatcctatttcgtggtgctcttggaggttttctccatctcatttgaagtcccaataaaagcagcttgagaaacttt

SEQ ID NO: 205266 - DNA, 366 bp, Homo sapiens
agggactgtggttgggtgtggaggggaggagcggggggctgtggggtgagacccctcccggctgactgggtgctgtgggcactgccggccgcatgccagggttcctgcctcgtggggactccggcctgggcgagtgcaggtctcagagcgcaggtgcggcagtgaccccaggcctcagtcctctcccctcctgggggtgggaagggaggggagagaggcccggaaggccggggactcccgccaggggactgagggaggcctcggaggggtgggtggcctgtctgggaagctgctctggatccggcgtctggcctggcccggtccccgtctgcacagcacacaccacggaggagaaggaggaatcgc

SEQ ID NO: 205267 - DNA, 525 bp, Homo sapiens
agtttccctgttctcatgacagtgagtgaattctcacgagatttgatggcttaaaattgtgacatttcccccctccctcttgctcactctctcctgccaccttgtggaggtgcttaaatctcctttgccttctgcaatgaatttaagtttcctgaggcctccccagccatgtggaactggggattagacctctttcctttataagttacccagtctcgaatatttctttttttctttttcttttttctagacaaaatttcactcttgttgcccaggctggagtgcaatggcgcaatcttggcccaccgcaacctccgcctcctgggttcaagcgattctcctgcttcagcttcctgagtagctgggattacaggcatgagccaccacacccggctaattttgtagttttagtagagatggggtttctccatgttggtcaggctggtttcgaactcccgacctcaggtgatccacccaccttcacctcccaaagtgctgggattacaggtgtgagccaccgcgccc

SEQ ID NO: 205268 - DNA, 755 bp, Homo sapiens
ccacctgacccagcagccactattcaaaacttcattttcttgttcagcttctctgtcttttgccgactgctatggtctgaatgtttgtgtccctccaaaattcatatgttgaaatctaatccccaacctgatagtgttaagaggtgtggggcctttcaggcctctgattaaatcagagggaggagcccttgtgaatggggttcatgcccttataaaagaagctgcagggattttgtttgctccttctgccatttgagtacacagctagaaatggcatctatgaagcagacagtaggcccttaccagatgccaaatttgttggcgccttgatcttggatgttccagcctccagagctatgagcagtaaatttctgttgttcacaaattgcgcagtctaaagtgtttcgttttactaggctgaacagactgaggcactggcccagggtttagcattcagaagtgttgccccaggcatcagcctctggctgccagcctctacagcccagctcactttgtggggatgggtggggtaggaatgtccttagggacttgtgagataagcagtgtcttcagagcatgttttagccaggatctttttaaagacattctttaatcctatacggccaattgtctccttttaaccactattttctaatgctatctttaccgtgcagaatgcaagtcacagataatgtaacccaacaacaaacacaattctcccccaaaaaatcaatgcaatttcctaactgtaatgt

SEQ ID NO: 205269 - DNA, 459 bp, Homo sapiens
caatcaccacctgcagtcacatagcgttgcagggaaagctgagtgaaatgtcgtatagaaggtgcctaacatagagtgacattcagtagataatcaataaggggtaataactaaatctgattacatacttaccagagttatccttcactatccctcaggactcaatctaacaaataatcctgtcagcatgttctaaatccaatcattcagatataaccctagagatttttgctatttctgcattcaagtctgcactacactcaatactttttcctcattccaagtaataactgtaaaatcatagttttcacatgcaagttttatatatttctaatccaaattaaaatcatcagtaactattaaaatttaaaagttcatgcatgtgacatagcacctaaaagtaactgagatgtcaccggaagtctgttgggtctactttgggaggactcaggtggtgtg

SEQ ID NO: 205270 - DNA, 291 bp, Homo sapiens
ttcatcgctaaatcctcataactaatactagagtctactaattatgactcagaatgagaaaaagagataagagcatgagtaaaattggtgctgccagaaccaccaaaaaaagaattccaaataacaaaagattttgactctatgtgaagaagagagttttaaaacattcctaaactggcaagagattagtagctaaaacccacaaagcacttttgtaaatcgacagcaaaaaacagggaaatcagtagaagatggacaacaaatagtttgcagaaaacttggtggtaataa

SEQ ID NO: 205271 - DNA, 194 bp, Homo sapiens
aaggagaacaggtttccctgtgtgctctgagcgctgctcagaaagaaaacctcactgataggacctccacccagacctcttccatctcctgtggccactggctagagaattcaccagcaaagcaaaactgttatgctgtaaattccagacagagggtactacccagcatgccaccttctctttgatctccccac

SEQ ID NO: 205272 - DNA, 307 bp, Homo sapiens
agaactcccttttgcatttcttgtaacacaagtctaatagtgatgaactccctcagttttgtttgtctggaaaagtctttgtccctcattggtgaaggatagctttgctgcataaagtatttttggttggcattttttttttctttcacaaactcttcccacttactcctggtctgcaagatttttgctgagaaattcatcagtggtcttatttagcttcccttgtatgtgatatgctgcttctctcttgctgctttaaaaattctctgtctttgatttttgaaaatttgattataatgtgtcttgg

SEQ ID NO: 205273 - DNA, 413 bp, Homo sapiens
tataaaaatgataagcaaattaaaaaataatacagtgtatcagaaagttaccctatggcagggtagtggcaattttgagtgacaggtgggttggtggcttggaatgcacaggccaattctgttgaaaaagtgtaaggactttatgtaaggacttgtagttaatggaagagtgaatttctgtgtatttgagtgaagagcgcagtagtcatagggaacagagatttaaaggcccaaagatggaaatatgtctgatgtgtaggaagaatagcaacgagactggtgttgctggagtggaataaatgagagagggaagtaggagatacaggttagagagactataggtggccagatcatgttaagctttgaaagtcatggtaaggaggtggacttttttttctgactgaggtggtgag

SEQ ID NO: 205274 - DNA, 500 bp, Homo sapiens
aggctcccctacctcccatgaccgtctgtgagcttcacctgtgagtggcaggtgcgcgtggagtcagttcccctccatgcccgcctgcattcctacccggagacctccggccgcggtgggaattgccctgctgttttcattactgcaggtttttcttctgtatttctgaacccctcatatctcagggaaggaaatccagggagaagtatctgttgcgtccccatctgttgcattttctgagtctccacgttaatgaaagagcagccatccagtttcctgcagtgccgagagtcctcgggacctgtcgttgttctaaaggacagaggacactgttcagatgtgacgtctgtcgccatttctgtctcctcttagcaaactttaaagcccggaaaaccttctattttcaaagtcggaaaattagattacagcaaagccataaccctgtatctctcctaaccttgctccctaatcaggaataaaagggaaattatctgaagaat

SEQ ID NO: 205275 - DNA, 433 bp, Homo sapiens
tgcaggttccttatgagacctgaaactatcacctgcccctgaattttttgtggaaaaattgtcttccatgaaaccggtcccttatgccaaaaaggttggggagtgctggagtagaaggtcataactgataagtacttcagagattttggacaattactgttcaattttttgccattcagacatacctgatgctttcagaaggttttcttttttttttcttagtatgagtatgttgactgtggcactgctattactaggaaaaaagtgttcctaatttaccagtgttaatcatttcatgttttcattgctagctcttatcttttttttctgtcatcttccttaatgtggtttatttaaaaaatttctttgactggtcctgtttcaaattgaatgattatgctgttgaaaagatcagaaatggtcctggctctca

SEQ ID NO: 205276 - DNA, 439 bp, Homo sapiens
acatttagaattcagacccacaaaaaaatcttcttaggaaagagtctctcattaccgacatgttttaaatttttgcctctgataatagtcatacattattcctacagtcaatgtattcccttactgcttaaaaagatgtggtggtgaaggtaacttaaatttcactagcattgaaaagtatagatgttgtaatgttagtaaacagaggtaacttaaatttcactagcattgaaaagtatagttgttgtaatgttagtaaacagaggaagattatgaaagaaaacataataagtatttttgttttgcttttttgtttaaataatgttattaagggctgttattaaagtgtttattttacagagggctaataaacttactttttcagaaaatctattttgtttttccggtgacccatttgaattggacttttaaatagaaa

SEQ ID NO: 205277 - DNA, 132 bp, Homo sapiens
ggacactttagaagtgcagtctctcccccttgctgacttaccatgatgtcggacacccctcacaagacactggcccaatgtgggttgtcttgtccgatatgtgtttgtagatttttgtgctggtgaagggag

SEQ ID NO: 205278 - DNA, 972 bp, Homo sapiens
cgacctagaggaccctccacacctagtcaaagcaaacaacaacaaaacacactaggttttatcaacagcatcgaactgattaaaatattccatttttccctggccaacattaagacattcagacttcatgatttaacagttaagacctttcattaactggctcagacttggttgtgtgtcataatccaactgcaccacacattctaggttcctaatcacaccgcaccatttgcaaaccttaagatataaaacgatgttcaggactttgcttttgaacatacctttctctcatttagaaagctattttctcaactgcttgactatttcttcacttataatgttctatccctgggccattcaaactaaattcatcttcttgtcactactttatttcctggataagtttattactcattttttcttcagtactgatttgttaaacacctacattgatttagacacaagagtaaacaaaaacaaaccaaaagcagcctttatgtagcttagattgtatatgaggattgaagatgagatagaaaaaataaactatatatatcaggcggtaaaaggatccaccatgagaaaacaaaagagagacaaggaagggaaggagtatcaggcagtggggctgggtttgcaattacatgtgaggtaattagggaagaaatcactgagagggcagtaagtgagcaaagactttggaggaggtgtgggtatctaggtgaataatgtttccaggcagaagaaagagcaaatgcaaaggcccagaatcgggagtatgccttcttccagtgttttgtttatttttttattttttatttttgagacgtagtctcactctgtcaccaaggctagagggcagtggcacaacctcagctcactcactgcaacctccacctcccaggttccagtgattgtcctgcctcagcctcccaagtagctgcgattacaggcgcccaccacgacgcccag

SEQ ID NO: 205279 - DNA, 773 bp, Homo sapiens
tagttggtatatgtttagtgtatgtttaactttttaaaaaactgccagatgttttccaaagcggctgtaccatttaacattcctatgagacagtgtatgaaagttccagttcctcctattaagtcttgaccatcaggtaatgttagccccaagtttgttctcttttaaagttgtggtattcttgtcctttgcttttctatataaattttagaattggtttgtcagtttctcccccttccctccaaaaaagtctcagatcttgactgagattttattgaatagagattattggaggaagacagtattgagtcatgtaacccataataaggtatatctccatgtattcgatattttctctatcatatttaggggggttcgggatacaggtttattcacatcttttgtcagatttatctctgagtgtttcattaaaatttcaagttccaattgctcgttgctttaatatatacatatatacacacacacatatacacacatatatatgcacacacagttgaattttatattgatcttgtatctagcaagacagttaatcctgtaccgaatgattattcagtatgactttccagatgactgtagccttttggattttctatataggcaatcatgtgcagataaagacagtttcacctctttatttaatttttttttcctgcctgattgccctggccagaacctccagtatggtgctgaatagaagtggtgagagcagacatccttatcttggttctgatcttaggggaaagcattca

SEQ ID NO: 205280 - DNA, 471 bp, Homo sapiens
taacactttcatcccattttagatcctaggataaggcaatagtccagagccctggaaagcctccacctccagcagttcaccaggccactgaagccccaggatggagtttctctccaagacacccttctggtaatatacatgttacgtgcatttcacttatcttctccaagttacattccagtaactaagcttcagaagcttcttatgaattgtttattctgtgttttaaagctccatcagctgttaggatgatttgcaatatttttctttttggttaagcaggattggtgagcattactgggccttttggtggaatccttgctatttaaaattcctgctgctgggattaatggagataatgtctttgaaagccttttgtaaactgtaaagtcctagtcaaatgtagtgtgctgttatcacattaaccatcatagcaataaccataaaccagctgtaatgggggctttaaaa

SEQ ID NO: 205281 - DNA, 514 bp, Homo sapiens
tgagccaccgcacccagccagaacttcaaagttttaaaaatatatacatagccatttctgctatatagccaggacttttacccaaaatatttatttctacagagggcactttgtttcatagcaaggcatttatgaactagaactttggcttaggaaaccgttctggttttcacagttacccagttgtcaacagttatactaacctctctttatggaacatgggggacaaaggaagaattgcttgatgctttcattttatcttccttctttttaggaattatatctctctagtggattgttgggtatgactttgttaatttttaataatgaatgtgtgtgtgcaactaggggaaaagttagagattacagaactgaattatgagagtttatagaaagtagcttttgtttaattagaaaaggtgaatattttattcatgggaaggatagagcttaggaatggttaaattcctccattctcaattttgagattttgaaccgcgtgcggcgtagaata

SEQ ID NO: 205282 - DNA, 114 bp, Homo sapiens
acattcacttcaccaagaagacgtaacaattctaattcatattcactttaacagcataacttcaagacatacaaagcaggccgggtgcagaggctcacacccataatcccagca

SEQ ID NO: 205283 - DNA, 370 bp, Homo sapiens
actttttaatttaacgtttttaacacgttaaatactataatgcttcattgaatgcacaatagtatttaacgtgttaaaaacgttaaattaaaaagttaagtctacacataatttcaaagttttaaaatgtactggattgtatcacataaaagtacaattagtaaaataatacactattaaattttaactaaaattaaaaatatttttctctcataatgtagagtattaaactgaacacctacttcatgcattgctcaatattataagttaatcacaaagagcatccctacttagattttcatcatacatcttacattttaatgtctttactctttcatagaagagagaatatataacgcccacctaataa

SEQ ID NO: 205284 - DNA, 583 bp, Homo sapiens
tgtgcacacacaaatgttataagcaatttttaagaattaggtttgagagaaaaagaaacccatggccccttttcataatatacggcgaccttctacatttctacaatagttctgttaaaaaatgctgttacccttgggaaaatcattctctcccttacgttcctgcaggatcttatgttcctaatgtttatctcaaagtattagagatagtttttatctgcctttctcttaacagtgagttcccttagagtaggaaccattcataaacatgaattcatgtttataaccccacactgaagaggaagcaacagtgaggaaaagccaaaacgacttgcaatttcacatttagatgtgctatgggtctgtttactatcagggaaatcactaacacctccctcagagtaatgccttcccatttctcaagccaggtaactgacaagagcttcattttccttttacaacacagatagttttaagtggtgggtcaggaggaaactgtatttttatttgaaaggtactcattgctactaaatagaataggctgccaatacagttggagcactattgaaaaaaaattaaaata

SEQ ID NO: 205285 - DNA, 399 bp, Homo sapiens
atcctaggatgagaaaggggttgctaaataggttttcttggacagtgggcaagctttcaaatatttaccagtcacatgtaccgtggcatgctgggtataagtctttctaaggcggagaccatacaatctatttcttttgagtctctctcatagtacaattatagtacttcttacacagtgggatgatgaaatatttgtggattgacaggaacatactttgataactgagtcctttccgtagcagtttgacgggtctaagacatggttgtgccgaaatgtgcatgagagtgtcgggtgtgtgtgcctggcgatagggggccttgagtttccaaaggctcttggctgctgctgcctcacagattctccatgctgtgtggctgtctgctgaggggcacatgt

SEQ ID NO: 205286 - DNA, 478 bp, Homo sapiens
cctcagcctcccaagtagctgggaccacagttgtgtgccagcatgcccagcgaatttctttttctttttttttgtagagatggggtttcaccatgttggccaggctggtctcaaactcctcacgtcaagtgatccacccgcctcggcctccccacagtgctgggattactggtgtgagccagtatgcccaacctccccacctgctgtacttctgacatggtctgttatttaaaaggaagattataagtgaagaagcagacttaggagactcatcctaatgtgtgtgcttatgggaaagccagccttttaaaacaggaatcccatcaataagcagacccccaggacagcgcgtgagtgttgatgttggtgaaagcagatgtcttctattttgcagggacagcctgacaggcatgtttacgttaagtgtctggatcctccctgcaggcacatataaatttcacccttttctactcagagg

SEQ ID NO: 205287 - DNA, 264 bp, Homo sapiens
tctactccagttttagccttcggaataaagattgttgtataactccactccttatcctcccctcctaaccaaagtattctccaatatttcttaaattcttggggtattttctaaactttggtagtgtattgaaaaacactgcaatttctatttatgtctgaagttgtgggaaaatgttttatttctgtaattttaattttgaaatgtgtatttgagctatttgtagtaaatcattacttaataaagtttgttgaggtttatata

SEQ ID NO: 205288 - DNA, 695 bp, Homo sapiens
gaacaatctgacagctgagaacaaaatactcaattctgaactggagaatgggaaacagaaccaagaaagactagaaatagaaatggaatcataccgttgtagactggctgctgctgtacgtgactgtgatcaaagtcagacagcaagagacctaaaacttgatttccagagaacaagacaagagtgggttcgtttacatgacaaaatgaaggttgatatgtctggcctacaagctaagaatgagattctttctgaaaaactttctaatgctgaaagtaaaattaacagcctacaaattcagctccataacacaagagatgctcttggaagagagagtttgattttggaacgtgtgcaaagagacctcagccaaacacagtgtcagaagaaagaaactgaacaaatgtaccaaattgaacaaagcaaactgaagaaatacattgccaagcaggaatctgtagaggagagattatctcaactacaaagtgaaaatacgttgcttcgacagcaactggatgatgctcacaagaaagctaacagtcaagaaaagacaagcagtactatccaagaccagtttcattctgctgccaaaaatcttcaagctgagagtgaaaagcagattctttcactacaagagaagaacaaggagctgatggatgaatataatcatttaaaagaaagaatggatcaatgtg

SEQ ID NO: 205289 - DNA, 319 bp, Homo sapiens
ctgatgatccgcttaagaggaagacctctcctgacactgcttctctggcctaatagatctgaggtgtgtcccttgcttgtgtctgggggttatatgaggatgagtcactcctagtgtccgaagagtagacagggagagacagaagatgacataatggagtctagagagaactgacaactgggagcttctgggcactctctgacaatggtcctctgctataatttaattgttcattatgacctgtttccctcacaagaccacagtctccatgacgacaagatctttatctcattcactactgaatgccccacacttaagc

SEQ ID NO: 205290 - DNA, 279 bp, Homo sapiens
agttcttccctgccctccaagatcagccatacgcaatggaggtggacaaggatttacactccccatataactacagatgacaatggagagaatcgcttcaccagccctctgaaatcatgcaggctggcaatgggacactagccactttacaggaaggcactactgttagtgtgatcataaaaccctgtccagtcatcacggcagaaggcagtgccacgtgacaaaatggctttcatttccagtccttggatccatcccaaatgggctttttaaaaaaga

SEQ ID NO: 205291 - DNA, 396 bp, Homo sapiens
tggtttcctagggatgggatgtgggcaaagagagacaaaggaaggagggattaccaaggagcacagggaaacttcgggatgagggatatgctcattatcttgactggtgatggttttgcaggtgggccaaaactaatcaaactttacacttcatctatatgaccagctatcatatgtcaattatccctcaataaagctgttttaaaaacatttagggtatatctactggaaagtaaaactgcttttaattacagactatatcatcatgtacatagaaaaatccaaaggattctgcaaaaaagctactagaaccactgacttcatcaagatgcaggtacaaagttaatattcaaaatcaactatatttctatacgagagcaacaaaaaatggaaaaa

SEQ ID NO: 205292 - DNA, 534 bp, Homo sapiens
gctcaagtgattctcctgcctcagcctcctgagtagctgggattacaggcatgcgccaccacacctggataatttttgtattttttatagacatggggtttcatcatgtcggccagactggtcttgaactcctgacctcgtgcaatccacctgcctcagcctcccgaagtgttgggattgcaggagtgagccactgtgcctggccctcaatttttaacatgtatgtttccattcattgctgagctgtttaaccttatataatgttaaagaaaacagacggcagctaggtaacaagagccctgtcaatgggcatccccttctcctatgttccgtttctgggaatcaacttaaagagaccattaaaaaccagatttgcacaaaatcaaacaaacatattggttgaagcatttaaaagaatgaaagtttggaaataatctcattattcaatagttattcagtagttgcttaataaaatgtggcatatccatttgatggaatattatatagcaattaaaatgatatttcttaaaacta

SEQ ID NO: 205293 - DNA, 497 bp, Homo sapiens
  misc_feature (7)..(7): n is a, c, g, or t
  misc_feature (26)..(26): n is a, c, g, or t
  misc_feature (49)..(49): n is a, c, g, or t
  misc_feature (59)..(59): n is a, c, g, or t
  misc_feature (90)..(90): n is a, c, g, or t
  misc_feature (92)..(92): n is a, c, g, or t
  misc_feature (96)..(96): n is a, c, g, or t
  misc_feature (101)..(101): n is a, c, g, or t
  misc_feature (116)..(116): n is a, c, g, or t
  misc_feature (125)..(125): n is a, c, g, or t
gagtaanaaaatctatagctatgaanagcgtaaacagttgagtctctanctgtcaattnagtggttttcagtatatccacatatatgtgnanccgncaccncttttaacttcagancattttatnacccccaaaagaaaccccagatccatttcttactctagctgttttgataggtgtgcagtgctatctcattatggttttaaggttttgctttttaaaaagttaagatacgatttatatgccacaaactcaccctggataagagtagatttcatattttttgttctttaccataatttaaaaaaaatctatagctttaaaagtttttgggtagagtaaaaaaaatctatagctatgaatagcgtaaacagttgagtctctaactgtacaattaagtggttttcagtatatccacatatatgtgtaaccgtcaccacttttaacttcagaacattttataacccccaaaagaaaccccagatccattttactgat

SEQ ID NO: 205294 - DNA, 376 bp, Homo sapiens
atttctacatttaactcagtactgggatctgggccatcctggatgggttaacgctggtggccgatgtgcattacaggattctttgttaagactctttcttttcctctgtccaaacaagcagtgaaatcacaggagatagaaggaaaacactgctgtgatcatcacccaattaggggcttttagcaaactattaataattccccaatgttgagctatgtatgcacaacaccaaaacaatccagtccttgcaataggtacagctagcagtcggctgtcaggtcgacaaaactttaaaaagccacctgcaaagttattaaccttaaattacaagaaaaaatgaggctcaatctactcttatcaaactggagtagaggaa

SEQ ID NO: 205295 - DNA, 969 bp, Homo sapiens
  misc_feature (862)..(862): n is a, c, g, or t
taatggttgttgtagtctgatgacatcatttcaaacctgggtgtttttatggagaacagagggagaatgcctgaagatgaaatgagccagcaggatgtctaccccacctctaggtctagtggtacaaagggcatgtgaaatccaacagccatcatttgagagagctgccaaggaagctgcatccacaggggacagtcaagttgcaacctgttcagggtatgttaagggctgtactaaatgtgtgtccagggtgcttgggagtacaaaagtaaagatttgtaacccaagctagtcattaagcaaggtgttctttttggaggtagctcattgaatgaggtagaaagctcattctaagatccgtatgaaatagaattatatgattaggaaattaacagtccacagcattatagttgcctggatacgatggctcactcctgtaattccaacactttgggaggccaaggtgggaggatcacttgaggtcaggagtttgagactagcctaggcaatatagtgagtccctgtctctccaaaaaaaaaaaaaaaaaaaaaaaacaaaaaaagggggggggggcaaaaaaaaccccaggggggccccattctacacccgtttttttggacaagggggcccataggagagcagaaaaaaggaaggaagggccgcgcgttgaaacacggctgcgcggggacacgtcctcggcggatctggggaaggaccccacgccggggcgtggcctcgtccgacccacccccaggaatttagaccgagggaaaataacttcacggcgttggtcgacacccagccatgctgcggctgagatgtgctcgcaatcatgaaattagcgcgcgatgatcagataancgggaagacacgactgagcgcaggcagagcaggcagcgagcacgacgcatacgaccacaagaaaggcactgcagccagaagacatgctcgcccgtcgctacggacta

SEQ ID NO: 205296 - DNA, 512 bp, Homo sapiens
gtgaatgataacttcattaaagggggaaaggtagaactgactgcatttgaaatagttggttcagatatgaggccacgtttggaaacagtacctaatatcttgtctcttggaacaagtcccaaggatagcaaaatcttcttggaatgagtaagaaagggttattaattttcttttaaaggttgttgatctatagagtttatcctatatgagtacctttttttttttggggttggacaccatggctcgtgagcttttgggaggccaaggcgggtggattgcttgaggcaggagtttgagaccagccttgacaacatagtgagaaccctgtctttacagaaaataaattaaaaattagctgggtgcagtggcacgtgcctacagtcccagcaacctgggaggctgaggcaggaggatcacttgcgcccaataagtttgagattgcagcgagctttggtcacatcactgcactgcagcctgagtgacagagcgagaccttgtctcaaaaataaacc

SEQ ID NO: 205297 - DNA, 973 bp, Homo sapiens
caggatggcctcaatctcctgacctcgtgatctacccgtctcggcctcccaaagtgctgggattacaggcgtgagccactgtgcccggcctttttatttatttatttatttattttttgagacgaagttttgctcttgttgcccaggctggagcacaatggcgtgatctcagctcactgcaacctctgtctcgcgggttcaagcgattttcctgcctcagctttctgagtagctgggattataggcgcctgccaccacacctggctaattttggtgtatttagtagagacggggtttcaccatgttggccaggctggtcttgaactcctgacttcaggtgatccacctgcctcggcctcccaaagaagataatgacttctacagaactgctgaatgggtacatatatgtaaatattctcacctgacttctgcttttccctttatttcactgggaggtattatatttttagtgtatcttacggcctttgaggacttcttagtttgagtatattttagctgtgtgcctaaatgtctttacagtgtacttaaggagttggatttttagaaacttgccatatttagaaatctattggattgaacatagtttgaaaagcaaagtataagttaattcctttactatatacttgtactattcttttcatggactttctgatgcttgctgtttgtgcacataggctttgctttttgtatttatttatattgtatgaatctaagaataaaagagagtgtgaacaattcagaagactacagatatatcttgttaggttgctttccaaaaggttcccagttgtagtcataccagcagtgtaacaagcaggttttttgtttaaccacactccaattagcatggaggatcctttaaaaatatttgctaaactgataaataaaaaatactatctttacttaaatttgcattgggaaagtattagtgaagttgaacattctcatatgt

SEQ ID NO: 205298 - DNA, 652 bp, Homo sapiens
caggatggcctcaatctcctgacctcgtgatctacccgtctcggcctcccaaagtgctgggattacaggcgtgagccactgtgcccggcctttttatttatttatttatttattttttgagacgaagttttgctcttgttgcccaggctggagcacaatggcgtgatctcagctcactgcaacctctgtctcgcgggttcaagcgattttcctgcctcagctttctgagtagctgggattataggcgcctgccaccacacctggctaattttggtgtatttagtagagacggggtttcaccatgttggccaggctggtcttgaactcctgacttcaggtgatccacctgcctcggcctcccaaagaagataatgacttctacagaactgctgaatgggtacatatatgtaaatattctcacctgacttctgcttttccctttatttcactgggaggtattatatttttagtgtatcttacggcctttgaggacttcttagtttgagtatattttagctgtgtgcctaaatgtctttacagtgtacttaaggagttggatttttagaaacttgccatatttagaaatctattggattgaccggtagttgccgcaagctatccgttcatacaccgcggttgccaacaattgacc

SEQ ID NO: 205299 - DNA, 270 bp, Homo sapiens
gtttccctttagctgcataccgtaaaatatgatctatattgtttttatttttttttcgttcgagacattttaaaaatttttcctgtggtttcttctttgctcctgggttgcataggagtatgttgtttcctttccaaatgtttggggatttcccccaaatttctttcttttattgatttataatttaatttctttggcgcttcacatgatctcaattttttttaatttattgagacttgttttatggtttactagacagtctttccaaca

SEQ ID NO: 205300 - DNA, 461 bp, Homo sapiens
tgatagtgtcatacaaaaaggtgagtaaggctgggcgcagtggctcatgcttataatcccagcaatttggcaggtccaggtgggaggctcacttgaggcaaggagttcaagagcagcctgagcaacacagcaagaccccatctttacgaacagagtttgttatttttttaattagccgaacatggtggcaggtgcctgtagtccagctactcagaaggctgaggtgagaggattgcttaagcccaggagttcaaagctgcaatgagctctcatcgtaccactgtactccagcctgagcaacagaacagaaccctaagtctcaaaaaaataaaaatttaaaaataggccaggcatagtggctcacacctggaatcccagtgctttgggaggccgagataggtaaattgcttgagtccaggagttcaagaccagcctggggaatgttgcaaaaccctgcctct

SEQ ID NO: 205301 - DNA, 397 bp, Homo sapiens
tgatcgccaacctttcccccaccagctaaggacatttcccctcctatccctaccataaaaatcactagtgttccttcaaaagtccctaatcatgtctccagaaaaagaaaggggctgggcttggtggcccacacatgtaatccgaggctttgggagacaaaggcaggaggatcacttgagcccggagtttgagaccagcctggccaacatggcgagaccctgtctctccaaaaaattaaaaaattagctgaatatggtggtgcacacctgtgtcctagcctcaggaggctgaaatgggaggatcccctgagcctgggaggtcagagctgcagtgagctgtgatcacaccactgcattccagcctgggtgacagaaagagaccctatctcaccaaaaa

SEQ ID NO: 205302 - DNA, 416 bp, Homo sapiens
ggtaattgaatcatgagggtgggtctttcccatgctgttcttgtgatggtgaaaatgtctcatgagatctgatggttttataaaggggagttcccctgcacatgctctctctcttgcctgccaccatttaagacgtgactttgctcctcctttgccttctgccatgactgtgaggcctccccagccaggtggaactgtgagtccattaatcctctttataaattactcagtctcgggtatgtctttattagtagtgtgagaagagactaatacagttccacagcactgactggaaaaaattatcttggccaagaaatggctgaagaaaaagattagtatttgaaagtgctggatttatgctttgtgttttttctaacaaaatgcccctacttgtgagccactggtgccttagaagg

SEQ ID NO: 205303 - DNA, 447 bp, Homo sapiens
caggagcatgttgtttaatttacatgtgtttgtatatttttgagagtttctcttcagattgatttttagttttattccattgtgtgaagatacttgatatgattttgatttttttttaaatttattgagacttgttttgtggcctgacgtttggtctgtcttggagaatgtcccatgtgctaatgagaaaaatgtatcttttgtggttgttgggtagaatgttctgtaaatgtctgttaggtccatttggttttaagttcagtgtttctttgttgactttgtctgtctcagtgttgaagtcccacattttgtattgctatctgtctcttttcttaggcctagtagtatttgttttattaatctggtactccagttttgggagtatatacttaggattgttatatcttcttgttgaattgatccctatgtcattatatactggccttt

SEQ ID NO: 205304 - DNA, 350 bp, Homo sapiens
gtcatacagtataccatgcagaacatagaacaaacattttgttctaagaaacattaggagaaaaagggtaagaaccctataggaaggcaggaggaatgagtcaaggacacattcttctcctcagttgtgcccaggaccatgacattacctatacttatgtcatcatatgcccatatccctaattcctcttagttagcatctgctttagtttttattatatttttatatgctttcagatttttccagctaatacatagcatatcagggtggaaatcaatgctgaagagtcctacttcctttttttttttttttgagactgagtctcactctgttgcccaggctggagtgca

SEQ ID NO: 205305 - DNA, 736 bp, Homo sapiens
ctactttcacatatataaataggaagcttgcctctgacattgatcagaagctgtaaagagaaaggcttttctctgaaaaacacggaattatctccagaaactgggatcctgatgttggcctctcttctttcgttccttcctttctctctctctcttcctccttttctttctttctctcccctcccccattctactacttcatttccctttcagccttttcttcctccctctctttttaaaattgaaaactttcagttattcatagttaatagtcctttagatataacagtaataagtataatacctccttagagctcatttgagtcatctctagtgtatccagccagtattccctttcatgtccatcctttaagctggaaacttatactttagtttgcagaaagaattcatttcagacttcagaggttaataaattaaattgcttgctagcatggcagctcatgtctgtgatcccagaactttgggaggctgaagtgggaggattgcttgagcccaggagtttgaaaccagactgggcagtatagggagacttcttctctacaaaaaatttaaacaactagccaggaggcccaggtaggttgatcacttgagctcagaagttttagaacagcctgggcaacatggagaaaccctgtctctccaaaaaatacaaaaaattagctgggcatggtgacacctacctgtagtcccagctacttgggaggctgaggtggga

SEQ ID NO: 205306 - DNA, 436 bp, Homo sapiens
ttcaagaaatggagcaactggccactggcgatgggaaggcccatggcagattctgcaaatctctctggagtttctgcttgagttcctgttcgccgctgtgagcccctcactctttcgttgctgagacaccttcaccatggctcaggaggccacatgctattcctcaggtggcggagggcagagaccgagggagtcggtaaaaaggagagggctggaaaattcctcttagcataagaataaacagtgatttgaatattcagttgtgagggttataaataactgtgagttttcattgacgtgtaagcggtgatacattttgtacaataattagttatttgattacttttgttttagcctgaagtagaggacaattgacaaatgtgaatacctctgagactgatggggcgcagtaaactaactttatttattacaaaat

SEQ ID NO: 205307 - DNA, 499 bp, Homo sapiens
ctagaggtcacgctgatcgcttagatctctgttgtatgttatgctggtcagttgtgtctggattccagagggaggaaggtagaatgaggcatgttgacacctccccttcccatcatggcctaagctggtcttttcagtttactttggaatgtccttgctcaacaggaagggtccattcagtcggattgggtggcttagaattttatttttggtttaaatctcaactatcacagcagctgggcatggtggctcatgcctataatcccagcacattgggaggcggaggcaggaggattacttgagcccaggagttccagggtgcagtgaaccatgatcatgccactgcactctaccctgggcgatagagcgaggccctgtctcagaactaaaaaacaacaaaagaatatgtcataggtgctgtattctttttgtatttcatcatgaggaacataataccagctaccagcttgtctcatttgtaatcctaatactgagattg

SEQ ID NO: 205308 - DNA, 543 bp, Homo sapiens
taagaagtcaaaactataatcggcttgagttgaagaatccaaggatctttacagttttgtgacctgtccaaggttacacagctcaccttttcattttgcactgggcccaagttatgtagccagcctgcttagagatctctacttaccccagttttctgatttataaaacaaaaataataataatattgttaaattaaatgaagcctaaagctgcctccctatgtatttttaatttggcctaaaggtttcttcgtacagagtgaactataacctgactagatgtgtgatctactcttgtgccaatcatcaagttttaaccaatcgaagggagccaactgcttaaaccatgttcaaataaggcaaatgtccagctgtaaccacttcagctgtttctgtgcctcacttctgtcttctacacatcactttcctttttctatccataaatgttttttgatcatgcagcagcatgaagttgatctgaacctactttggtttgggagactgcccaattcgtgaatcaattaaactgttaaatttaatttg

SEQ ID NO: 205309 - DNA, 443 bp, Homo sapiens
aaaacagttttggagactggtcacacaacaacgtgaatgtatcagaactgtacactcagaaatggttaagatgctaaattttctgttatgtattttttaacacaattttttaaaaaccatgcaaactatgagaatttcacagaaggagacaacaacaaaaaaacccacatagaacattccaagaagagaagcatgccctgggtggaaccacagccaggcatggacatacacggatgtgtttcccttcatgactgcatgtggccttgcgtatgggtccttggggggcccacagccctacgtgggcgtacacacagatgtgcctccctcatgacagcatgtggccttgtgcataaaaccgacagcttatactttccagggaccttcagtcattttcaagaattgctttgactgtgcaagtcctgcttcatggtagaccttacaat

SEQ ID NO: 205310 - DNA, 612 bp, Homo sapiens
acagagcgagaccctgtctcaaaataagtaaagttctacagtggtttatccagagataatcactgttaccagttggttgtattatattttcagatgttttcttgactgatataatgaataaattaagtatctaattggaacattataacttgacctcttcaacttcgtagtttagtttggtaagataatatggatttatagtatttgaatgatcagtttattgcttaattatgtaaaaacctttctattgtcaacagtcctacagagaacattctcagacataagatattatgcaattgtccaaacattaatttatttaaatattttaatgtttaatcaccagattattaggtatgtttaattttaaggttttaatgccccctgatttccaaccccagacgataactgtttatcttctcaacaatagaatatataagccaattttcccatattcttattactcttagatacattgaccatttcccaaaattctaagcaatcacaagttttaggtcctgtgtaattacacagaaagtataacattcctaaaagtcatatcacagattctaggaaagttgttaaggagccttgttattttaggacacatcaaaa

SEQ ID NO: 205311 - DNA, 348 bp, Homo sapiens
cggtggccaaatgggaattctttcctctgccaaaatcttgcttctgcaactcaggacagtgggtgttcagtccacagggtgggggtgtgctccagcacctgccagcctgtcaagactgacagcatcaagaccctccctgctgcccgtggagctcctgcagtcactgagatgagctgtcctggtttactggctgccaactttgagagatgacttaattaagggcatgaagtttttcatctcaagacagtgagggagctggacaagagaatacccaaggttttttttgttttgttttgtttttgagacagagtcttgctctgtccccaggctggagtgcagtggtgcgat

SEQ ID NO: 205312 - DNA, 279 bp, Homo sapiens
ctgagaagaaataactataaacaaggtgtccattttatgaataatacaatttatggtatgacagaagaccaagggacataacacaaatttggagttaaagaaattaacagacattctcaataattcctcagctattatggcagagatgctgggacaatggatgtccatgtagcagtacttttttttttttttttttttttttgggagacggagtctcactctgtaaccaggctgccctgcaatggcgcaatcttggctcaccgcaacctctgcctcccg

SEQ ID NO: 205313 - DNA, 445 bp, Homo sapiens
tcatttctccctgacacagtgcaatggtcattacacagaatagcccataagtcagtgttagaaaaatattcaaaggagagaagagaataaagcggccattaaactactttggctgaatctctgagtgcttttgacatgaaaataatcatgaagaaaagaagaggtagtgtcaggtgatgacactagtagataatttgaaagaaaggaattgctatgttcattaaaagtaattctagatggctgttggaaatatctaatgtgctgcaattaaagtgaatcaagtcataactgagaacaggctttgggaagtggtttgaccctttcacaggtgggtgcccctaagtgtgatccttttggccactggtcccaccttcaccctgaggcgtagaacttgatcctaaacatggcaacatagagcctttcttgtcagaatatcatgagaact

SEQ ID NO: 205314 - DNA, 650 bp, Homo sapiens
gcacttctaaaagtgtttcatagaacattaatttaatgttacgttgagacattacttgaaaaaaacatgttaggcactcaaataaatatggaaatgttagactaaacaaagttaaaatatgtttgctttactgcaggactttttagagcatttaatccacattgctgccttctaaaaagtggttgtaatacgtatgttaatgctttactggcttatttaaccacagaaccttttaaattttcctcatgagggttttaattgctaaatattaaaagttttcttctgaaggaataggtagacctggaggattcctgtgatgcaggagattactatgatgaaaatggtgtttgggggatggttttaggaggtgtatagaaggtaaccctgaggtaggagggagtgaaagaagagagatttttagtaatggacacaggaaagctggctacatactgggccagagagacatgaacctgagagaacatgaaaggaggtcattgatgaaattaggggatgcttggggtgggaggcaaatctgagtccagtatgtctcccaggtctgggtggctgtgagcacaaatgtgagcataatgaatgaactgggaaagcttagctgaaacaatgtgtcagcacatcaagtacatacagacaag

SEQ ID NO: 205315 - DNA, 884 bp, Homo sapiens
aaaagctttgtttcacagattcttgtaatgttttctcaactcaataaagactagcatttcttcataggaagaaataagaagagttggagccaataaaaggagttcagtccagcagttctcaacctgaggacctctctgaattaccaatgggaactttgtaagagggacacaggacaggttcctcaaaatcctcattgtaaggggcttctgtttcaaaagggagtaaaaataagacactactggcttaaagtgactttaaaaataaacttaatggatgttttattacaattacagatttttaatgtggattgctgccttaagcattgtcaactaatctttcataatttatgaagatacattaaaaaggaaaaggaaattggaaaagacagccaaaaggctaagaggctatggaatggcaaaaagtaatgttccctgagggggtatcagaagactcatatattttccaccatatattttaggttttgaacgattcatttttcaaaaatttttatactcttaaaaatactggagtgcctaccatgtaccagtaattgtagatatcatggatactatgaataagacagcctgggcactcacaaagctactttattttctctaaagcagggaatcttttttatttttatttttatgcccatttcttaaagctgaaaggtgcaagacccaaatagcaaaagatttttatgttagcgctgagctagatagatttttgtgcgaccttggtataatagcaaaagtttgtcttgaatttagtccagaagcgtctctgttcttgggatcagatgatcaggatttgaagcattgattctgtatttagttatttcaagagtggcattgactaaattacttaatatcatgcagtcctt

SEQ ID NO: 205316 - DNA, 1141 bp, Homo sapiens
ctcttgccactgccatgtaagaagtgcctttcaccacccccacaccctgccatgactctgaggcctccccagccacgtggaactgaggcagctgtatggaggccaatatgcagacaagggaagtaactcaggcattttgggggagaggtacagaaagaagagaaaagactgaactgactgctgttctgaacaagaactgtgactatatgtggtactcccagaatggctggtttcctttcagacccatcaagtggccatcctattggcttggactgaagacccccactggagaactgtctctgcagcctatactgatgacactggccactgtccagggctccaccccaaggagtccaagccccagacatttagccttagagagaatccagattttgcatttccagtgcagggattgatggagccttgtgtatcaaagtgccaatttctttctaacaagctagggaggataccgttgacagcagcagaaaggggtagcagtggtttgctttccaaatggtaataagaagggcctggcagtggcaacctgtccacgtatcattaaaaatggactctcctgcttcgtttggaattcaacccaatgaacttgaataaactctggacaatgaccagcacagagccctaagcaggatacagcaagattatttgctttactcatccactgagtacctaccatgtgccaaatactatgctatatgccgagtatacactggcaaataaaacacatatggtccctggagcctatgaatcttaccccatctagccacaaataataaaaataagaagaatctgaaggacaagtgggacagaaatactcaagcagaatgagggtgagattgaagtccctgaacatacagtgccctttacacttgatcttagccaaaaggccgagaagagattacagtgctttttaaaggtagcatttcacccagccaataatcaatccctttggccttcttgaggtgcaaggccacacactcaaattctttaatcaaacaataggctagtgcaaatggagctatttcttaaacccagctgtttacacagcagctacaaatctgttcagaaggaatcccccaccatccacaactgtctatcgagcagatgtgcaagagtatttgtc

SEQ ID NO: 205317 - DNA, 1033 bp, Homo sapiens
ctcttgccactgccatgtaagaagtgcctttcaccacccccacaccctgccatgactctgaggcctccccagccacgtggaactgaggcagctgtatggaggccaatatgcagacaagggaagtaactcaggcattttgggggagaggtacagaaagaagagaaaagactgaactgactgctgttctgaacaagaactgtgactatatgtggtactcccagaatggttggactgaagacccccactggagaactgtctctgcagccttagagagaatccagattttgcatttccagtgcagggattgatggagccttgtgtatcaaagtgccaatttctttctaacaagctagggaggataccgttgacagcagcagaaaggggtagcagtggtttgctttccaaatggtaataagaagggcctggcagtggcaacctgtccacgtatcattaaaaatggactctcctgcttcgtttggaattcaacccaatgaacttgaataaactctggacaatgaccagcacagagccctaagcaggatacagcaagattatttgctttactcatccactgagtacctaccatgtgccaaatactatgctatatgccgagtatacactggcaaataaaacacatatggtccctggagcctatgaatcttaccccatctagccacaaataataaaaataagaagaatctgaaggacaagtgggacagaaatactcaagcagaatgagggtgagattgaagtccctgaacatacagtgccctttacacttgatcttagccaaaaggccgagaagagattacagtgctttttaaaggtagcatttcacccagccaataatcaatccctttggccttcttgaggtgcaaggccacacactcaaattctttaatcaaacaataggctagtgcaaatggagctatttcttaaacccagctgtttacacagcagctacaaatctgttcagaaggaatcccccaccatccacaactgtctatcgagcagatgtgcaagagtatttgtc

SEQ ID NO: 205318 - DNA, 670 bp, Homo sapiens
cccttccacaaagacatactgagcaccactgcgtgctgggcaaggcttggcactggggatacagtcaagaacaaaacagacactgcttcttttctcaagaagctcagagtttgatggggaagacagaacataagcaaacacttgcatgttcaatgagtgttagtgaaaaaaatgcccagtgctgtcaagtatagagcagaggcctgtcctgataaaagaatgggtcagtcagagcagcttccctgagaaactgatatttaacagattcaaagcatgaaaagaattaagcaggaaaatgaattgccagccatacacaagtgtcagagacccaaagatgtgaactcttgcccagaaaggggaagaaggccaaggagactgggacacagactgagggaaaagggtgatatgtgagagtgggagactcagagagggacttcaggcagctcataacatttcggtctaattcaaattgtcatacaacagcagaaaatacataacctaagacacattgcaaattgaataaaatctcaggtcccctgcccctcccctctgcctgggcaaacagactggctcctgaatccttagctgatattaagagcagcaaagtattattcaccacctcattcccaaaggaaaataatccccagcctctctcacccccactagagat

SEQ ID NO: 205319 - DNA, 506 bp, Homo sapiens
aacaggcagcatgaacaggctaagagagtgtcagaataccaacttggaaatgatgaggttgagatggcattggaacaaaccccaccctatacattcctctctcttccttgagttccgagtgcacagtttgtattccacatcttcagacttaatcctagctcacagtgttagtttgtctaattattacacatttcttgggagcttctaaaatagatgtcttcttctattttggtacccctttcttcacagagcctaagccaatgtagggctcaaaataggtgtttaataaatgataactgaacacattagagctgaaaaacaaaaaggacttatttacactggagccaactaacatttcaaagacaaatgtttaaaattggctttcagcaaaatattaagaaattcgccaggtgtggtagcttgcctgtaatcccagcaacccaagagactgaggcaggaggactgcttgagcccatgagtctgtattaactgcttggggtacccga

SEQ ID NO: 205320 - DNA, 543 bp, Homo sapiens
gcacagtggctcatgcctgtgatccctgcacttttgggggccgagtcgggtggatcacttgaggtgaggagttcgagaccagtctggccagcatggtgaaacctcttctctactaaaaatataaaaattagccggtcttgggtggcatatgcctgtagttccagcttactctggaggctcagacaggagaaagatttataaaacaagtcaagctggagttggttcatggggtatatgtagtttgcttacctttgccccagaacaattagtatgcattaagtgcccaactccagtaaacataatgtagcagctttaataagaagccctttttaaaggtttattttattattttttttggagtctgagtcctgcgctgtcacccaggctggagtgcgatagctcactgcaacctctgcctcccaggttcaagcaattcttctacagctacttaagaggctgaggcaggagagtcacttgaacccgggtggcagagattgcagtgagccgagatcacccctggataacagagccagagtgtctccg

SEQ ID NO: 205321 - DNA, 405 bp, Homo sapiens
aaactctgcgcggcctgttacctttgagtttttatctccacatacttatattaaaccgtgtagttcttcttcccatctgacatctacaatctcttcactgggtctgtactccatagctattttaccactttctgaaataaagttagcaaggatgaattcagaatctttttcattccaaaacttcctgcatataatggtagcaacccacaatgagacattcttttagtttctaaaagcaggaaataagcattttcctgaaagtttcctcatctcttcatcatacacttcgatttttgtttttcttttttcttttagacagggtctcactctgtcacccaggctggagtacagtggcactatcatagctcactgtagcctggaattcctgggctcaagtcatcctcc

SEQ ID NO: 205322 - DNA, 434 bp, Homo sapiens
tgatttattaaatgttaaaattctgaacattaaccttttattctcaatgtagaaagtcattatttgtatgtgtaaatgtgtgtgtgtttgcatgcacacagacacacccattaagcaacttgaggcagagactgcagcacgtgcatagcatgttttgatgccgggcgcggtggctcacgcctgtaatcccaacactttgggaggccgaggcgggcggatcacgaggtcaggagctcgagaccacggtgaaaccccgtctctactaaaaaaaggacaaaaaattagccaggcgcagtggcgggcgcctgtagtcccagctactgtactcagaaggctgaggcaggagaatggcgtgaacctgggaggcggagcttgcagtgagccttgatcgtgccactgcagtccagcctgggcgacagagcgagactccgttt

SEQ ID NO: 205323 - DNA, 209 bp, Homo sapiens
gattaatgcagttgcctccaactggtctccctgcttctgatcttactccttacagatgattcccgccatggcagctcttttggaatgcaccttaggttatgccacttctctgctcagcaccctttaggggctttgccccggctcccatttctcgctgccttgttggccctagtgacactggcttacttcaggctcatctcctctcaggg

SEQ ID NO: 205324 - DNA, 362 bp, Homo sapiens
ggacgagcatggttgtatcgactataagagctcgtacgcatgtgtagaatggctgaggacttcccagtctccccagagtccgtgcctttccctgtgtgaattttgtatctagcctaaagtttccctaggctttcttgtctcagcaactttcccatctcgtctcttctcttgtaacaagagaagagacgagatgtacaagagaagagacgagatgagccaggatggtctcgatctcctgaccttgtgatccgcccgcctcaggctcccaaagtgctggggttacaggcatgagccaccgcacccggcctctctgccttcttagacgcccctcaaccctgccttccattatggcctgtccagcc

SEQ ID NO: 205325 - DNA, 416 bp, Homo sapiens
ctcaagagttgttcagacaacttcagttaatatttatttgaagagaaacttctatggagagaaaagttaggaaaccacttcatttttcatgagaacagtgggattttgaagttagccaatgacagaatcaaaaaaagaaatcaaaaatagaaataatattagatggccaggtaacattcttttcagtgcattttggttgttgatattgcaacttgctttgcattttgtatattatatatcatatgcattttgtttatattgatagaatggctgaaagtttaaataaggcaaaaaattgtgtttagggaaaggctgctaggaaattgatcctttgaacccaaagaagataattcactttgttctcctggattaatacaattaaatcatatttgatagtgctctctcaagaatgtgaa

SEQ ID NO: 205326 - DNA, 158 bp, Homo sapiens
ctcatacacatttttaaattactgacaaatacagaccttttttcatgggcatttgacttgctttattcattctttttccatgcgtatgacgtgagaatagctgaatctaaaaacactaattcactgagtacagttggctgtgcaggttcgtgcagatt

SEQ ID NO: 205327 - DNA, 303 bp, Homo sapiens
aaagaagccagacacagaagtgtacatattataagattccatttatataaaaactaaaaacaggcaaaatgaatctgtgctgttagacaattactctagtagttatcacgtggcagaggtgagaggagagtgacaggaagggagtgtgaaggcaactcggttgctggtgagtttctctttattgatggtggggattgtcacatgggtgtggtctgcgagcacttgtgctgtatgcttgtgatatgtgtccttttctatatgtatataatattaaaataaaacattaaaaatgttcattcctat

SEQ ID NO: 205328 - DNA, 636 bp, Homo sapiens
ttcctttatgtctgtggcttgatcattgtctactggcaactgaaatagtagcattgacttaaaagctttggcgaggaatctaagtgtccaggccactagtcagttgagtggaatctcctgtttaatactattcatcgcccatgcgtctggtcttctcctcctccctttttaaacaataatcttcatacaggctcctgcaagtatcagtatctctattgatgtgctgtacctcagagcgcctggttattaagcgaattagatggaggttcagtgacccgaatggtaggccagcaggtcaagaggcctgagcactctctggcttaggccctggcctgggactccttggccatttgttggaacagcgtctgtccttgtgcccccaattaatttagcaagcgctgctttgtaaagtgccagtgtgctgcagacgccggcaatgcgttaatgtcctacggacattacggagccattcgttctttccctgacagttccaaatccagatccttccgccaaacacagcaaaagggaagtgagttttttgcttggtaacactgtaggtctaactttggatctggaaatttcttaggttttttggtgtgcaaatatgggagatagcgtagaaagaggagaggtgag

SEQ ID NO: 205329 - DNA, 522 bp, Homo sapiens
tactcatgtgaattgtaatctctgtaaaatcactgttaatttagttatgttaatatatgtaaaaatcacatcttatttacataatatgttaatttcaaaatgctgcttttcctactttctctttatgccaggtttattgacactaaggccactttttgaatctaacacattttccggaacacgttgtcttcactactaagctgtgataaagcgtgtttaaaaataagagtccctggccgggcgcggtggctcacgcctgtaatcccagcattttgggaggccgaggcaggcggatcacgaggtcaagagattgaggccatcctggctaagacggtgaaaccccgtctgtactaaaaatacaaaaaattagctgggtgtggtggcgggtgtctgtagtcccagctactcgggaggctgaggctggagaatggcatgaacccaggaggcggagcttgcagtgagccgagatcgtgccactgcagtccaatctgggcgacggagcgagactgcatctcaaaaaaa

SEQ ID NO: 205330 - DNA, 213 bp, Homo sapiens
atggaggctgcagtgagctgagatcacgccacagcactccagcctgagtgacagagcgagaccccatctcaaaaaacaaacaaacaaataaaacaacatgcaaaactcccttcctctccaggaaagaggcctaaaggagaaacaggcacacacacatcttgatatatttaaagtacgagagacattatagacacaaaacaggtttctatgaaa

SEQ ID NO: 205331 - DNA, 444 bp, Homo sapiens
acttgtagctcgatcaaacaaatctatagtgacagaaagcagattagtggttgccagaaagaaagaatggaggggtattaacttcaaaggggcataagaaaactatctagagtgatagaaatgttctaaatcttgattggcatggtggttacacaggtacacatttccaaaacttgctgaattatacaactaaaatgcatgtattgtaggtaaaatatacttcagcaaagtaaaagaatcagaaagttctaattagaaaatcaaatatattgcatattgttaaaacattttggtactgatcaacttcctgctttaaaaatatgtataagctaggacctgtggcacatgcctatactgagacgggagggtcacttgactccaggagttcaaggctatgatcatgccacagcactctagtctgggtgacatatagaatctcctctc

SEQ ID NO: 205332 - DNA, 209 bp, Homo sapiens
tgtcttctcagcgaggttcttatgtaggtatgaaggaaggaagcctgttgtgatccccgggggagctgtgagtgtagagctggctctgaaagccttggcatctctcctgcaggaagaatcccaggagcaggtgaatcccacctgcattgagcattttttcagtttaaagcaaatccttactgctagagtatatttagaaagaggcaggg

SEQ ID NO: 205333 - DNA, 319 bp, Homo sapiens
gaagtcgtttttacattatatttatttaatgacatattactgaaaagttgtattttttaaagttatgcacacccagaataaaaatgcttaatagaataattctgtcacagaaactatggtttaacctcctttaacagaagcagctggaaaccctgaccctaaactgtgagccccctaccaaatcttaggcataaatttgacaacgaaagttatcaaatcttctaacaaaagcaatcctcccgcctcagccccccaagtagctgcaactacaggtatgtgccaccatgcctggctaacttttgtatttttttgtagagac

SEQ ID NO: 205334 - DNA, 545 bp, Homo sapiens
gttctaagcatttttataaaatttttaatgataaagtagaatgttcacagacttactgcttttgttgagtcttactgaaaagttagatagcagacaaaaagcaatttgttttctttttcaaacttgtgttaaagatcaactttctgagggctctgttctgttccattgatctatatctctgttttggtaccggtaccatgctgttttggttactctagccttgtagttgagtttgaagtcaggtagcgtgatgcctccggctttgttcttttggcttaggattgacttggcaatgcgggctcttttttggttccatatgaactttaaagtaatgttttccaattctgtgaagaaagtcattggtagcttgatggggatggcattgaatctataaattaccttgggcagtatggccattttcatgatattgattcttcctgcccatgagcattgaacgttcttccatttgtttgtatcgtcttttatttcattgcacagtggtttgtagttctccttgaagaggtccttcacatcccttgtaagtt

SEQ ID NO: 205335 - DNA, 620 bp, Homo sapiens
gaaattactaatctgaggcttgagaaggggcagtgtagccttccattatctcaccagcaagctctgtacaggattattttcaaattttctgctgccattacaatgtgctattagagtggccaaggtggtgagggaggggatgttattgaaacttggttaccagggtagataagataaacttcatcactttcttggcatccacatttgtagccaagggtggaaattttgatgaaagaagtacatttggtcaaagatattaaggtgtaaagctggatattttctaactgcattctacagagtctgtctcttccccattgatgctcatctgaaatagtctgcttgattgtttcaataaacacactttctttcaatgtattgtaaacttgtaaataccagataaccaacttaaaatccccctcccatcccagtctcaagaaataacactggttatgtgcagacataactttcttgagtaagtcaccattttctgtcactttctatttgcggctggtaaaatgacagctcaggcttaacttttacataagctatttttagatttttctcagacatcctttaactatttcttttatacaggatcctaccctaaggatcattttatt

SEQ ID NO: 205336 - DNA, 434 bp, Homo sapiens
acatttctgggcccccaccagagcagctgacgctggaagcctgttgtgggtgaacagtggagtcttactctagaaagataggaggagactcagcagatgtgtgtgatatggtttggctctgtgtccccacccaaatttcatctcaaattataatcctcatatgtggagggagaagcctgtaatccccatgtgtccagggagggaggtgattggatcatgggggtagtttcccccatgctgttctcatgatagtgagttctcatgagatctgatggttttataattgtttgacatttcctcctgtacacactgtccctctcatctgctgccagtaaaatgtgtctgcttccccttccgccatgattgtaagtttcctgaggcctccccagccatgtggaaccattagtcaattaaacctcctttgtttataaatt

SEQ ID NO: 205337 - DNA, 435 bp, Homo sapiens
gggcatagtagtacacacctgtaatcccagcaacttgggaggctgaggcgggagaatcacttgaacccaggaagtggaggttgcagtgagctgagatcgtgccactgcactccagcctgggcaacagagtgacactctatctcaaataaataaataaataaataaataaataaataaataaataaataaaagagttagggcctttaggaggtgattaactcatgagaacagagccctcacagatgggattagcacccttacaacagaggtgtgagggagctgttggtccctgttgccatgtgaggatgcatcaagaggcaccatcttggaagcagacaacagcccttaccagacaccgaatccaccagtgccttgatcttggacttcccagcctccagaaccatgagaaaataaatcactgtttttataaatgac

SEQ ID NO: 205338 - DNA, 532 bp, Homo sapiens
aactggaggtattggagcagcactgtttctctcgcctctgacattgttcaatccagatgtttgttgggacagaaagactaacccagagccctgaacaaactgggtcccaatgatcaatacaagttctactcagtgaatgtggattacagcaaattgaagaaagaaggttcagatttctaaatgaaatgttttactataaagctcctttagaatgaaggtcttccagaagccatccgcacaattttccacttaacaggaaatatttctcctctaaatgcatgaaatcatgttgaggtaatctactggagattacactgattaataaataactgaaagttgaaaaaaaacccaaaaaacccagcatcttgctatgttgcctaggctgttcttagacttctggccccaagtgatcctcttgtcttggcctcccaaagtgctgggattacaggcatgagctacccgcgcgcggcaacccctttcttataaagcttttttttccaacagcctttgcacatccagacaaagggaaaca

SEQ ID NO: 205339 - DNA, 384 bp, Homo sapiens
cgctaccaactctgtaagaactctgcacatttagggacatatttcaggcaaactggaaagtatgcttgggtggtggtgcgaggaggggcatgaaacaggaagaagagtagaactggggaatgaagataaagaaagtaaaatgagtgaaacagcagaggtgtcttgtcttcctggtactagtaagagtggtggggcatgaactgaggaatagaacagactcaaccatgtacatcagatgatcaaacataccatcaccactcgccatcacaccccgcccctaaaaaaagagaaagggggagaaagaattgggatcaagttagaaagaaacagaagtaggatcaagtaaaaaggaaagggaacttggaatcgtaagataaaaatccc

SEQ ID NO: 205340 - DNA, 543 bp, Homo sapiens
ctcattatgaaggagttaatacagaagaagtttttgaaacattattagcatttaataagaggtgagtaaactattttcaaggctgttggcatggatttcgtattcattttgctacccccagcacttcagagaatgtcctgtacatagtaggtgtccactaaatgctttagaaccacttggtgagcattattgactccccagggaagtcccacgtgggtcttcttgttgccgagaaagtcccacataggtctttctcgttgccaaagaggacatctcaaagaaaataacaaaaatatactgagccaaagaaaaatgcaaacacaacatatcaaaatttgtgagatgcggccaaagcagtgctgagaggaaattttatagcactaagaggcctacattagaaaacaagaaagatctcaatcaatgatcaaagccatgccctcagaaaaagaaaagtgaaataagcccaaagcaagaagaagaaaggaagtaataaagataaaagcagaagtcaatgatattgaaaacagaaaaagaaataaaaat

SEQ ID NO: 205341 - DNA, 491 bp, Homo sapiens
ctctacacaaaattaaaaaattagctgggtgtaatggtgtgcccctttggtcccagctacgtgggagcccgaggcaggaagattatttgagaccaggaggtcgaggctgcagtgagccaagatcatgacactgcactccagcctgtgttgacagagtgagattctttctcaaaaaataacaacaataataaataaataaataaataaataaataaataaataaataaaagatgttccataacggtgaaatctcagcaaaacctgaaggaagtaagccatgagaatatttggaaaaaaggcttgccagatagagagaacagtcagtgcaaaggctgcaagatgagagcatgcttggtgagttcaaggaactccaaggaagccaatagatctgaagtggagagagcaggaggaagagccatgggaaatgaggtcttagaggtaacaatggtctgcttatgtaggggttttgtgaggcactgaatggatggatg

SEQ ID NO: 205342 - DNA, 701 bp, Homo sapiens
aagctaggaatgattaagcttattgagaaaggcatgtagaaagccaagataggctgaaaactatgcctctcactcaagttgtgaatgcaaaggaaaagttcttgaaggaaattaaaggtgcttctccagtgaacacacaaatgataaagcaaaacagctctattgctgaatggagaaagtttttgtggtctggatagaacaccaaaccagttacaataatgccttaatccaaagcctaatccagaggccctaactcttcaatgctatgaatgctgagaagtgaggaagctgctgaaaacagttggagaactgcagcggaagttggttcataagatttgaggaaagaagccatctctgtaacataaaagtgcaaggtgaagcacaagtgctgatagaagaaagaagctgcagcgagttatccagaagatctagctaagataactgattaacatggctacactgagcaacagattttcaatgtagatgaaacagccttctattggaagatgccatgtaggactttgatagctagagaggagaagtcaatgcctggcttcaaagcttcaaagctttgactcccttgttagctggtgattttaagttgaaaccaatgctcattgaccattctgaaaatcctagggttgttaagaattatgctaaatctactttgcctgtgctctataaattgtaccacaaatcct

SEQ ID NO: 205343 - DNA, 303 bp, Homo sapiens
gccaccacacctagcctctaagcttccttcttgctccattagtacccagcccaaagccttttacatcgaagctaaatagggatctgttgattatttgatatttttaagcagttgtcactaatatgcaaaattcagttgataaagatgcccacttaactcttaattgaaatgtccaagagtgagttaaggatgaagaaagttgccaggataaatacaaggctttgaatattgatacccttcagaaggctttggcattcaaaacttcataatggaagttgtatcagagtctcattcctgtggtct

SEQ ID NO: 205344 - DNA, 955 bp, Homo sapiens
cacttgatagttcgtctgtgcttatgttttcctccaccttcttactacctgtttttaattccttgatattttcttctgatttataatagctttctgagtagcacatggtacttcaccccccatgctctccacctgctccctcagaaagcacatttccttggtatgcagaatgctcggatcctgcttatacattttcacgaagtcccgaagctcgttcactttgcgaaggtccagggtcggaaggcagtgggcgaagctgaggggctgcaggccagtttcaggcccaggcactggcttggcgtaacctcgaagaaggggtgtgtctagtttaatttcataacttgtgttggctctttgtttgataagaaggtatatcactaaaactattctttttagtgcctagggttggtttctaattatatatgcataaaagagcaagaagaggtttgtctatagtaactatacaataattcggaaagagatgaagattaatgaggttaaggtaatatttatatgtatgagaaagattttctgccactgtaaaaagggtggggaagtaccctctgacagccactaggtggcaccccaatcctggacatcatcattacttttgtcagaagagagaaggtagtgtgggaagagcagctgtagtttgtgcctaaggctggagtttgtggcttgggcaattgtgggcaactgcctccatatatggcatcttattttaaattttaaatttacataaattataagtttctgcaaaagggaacaacttctatacccactccctacagacccacagtgaacaacacgtagcatgactaagaaataaagctttgttgtttttagccattgagattccagaatgtttgttctagcagcatcatctagaacaacatgactgatacacctggtacttgtaggagtatgaggcaagggaagacagacagagggagaa

SEQ ID NO: 205345 - DNA, 707 bp, Homo sapiens
ttgatttgaatcagaagactcacatgatccagccaccaaacatttcctcctatcccacatcaagactaaaccaaacatttcctcctatcccacatcaagactaataaataagattttatagtttaattacaatcacacatgaattttaagaagtgacttgtgacaaatttactctgctaatgttacaagaagtgtgccctttgattaggatttaaaacctcatatgtttgaagcatgaatgaatggtatatcgtaactgtatattgttcttgtataacttcatgaataacttgaataacattcaaatggaaataaatcctcttatcatccaatcaaagcttagatctatagtcaaattcttccatgaaataacatgaaacatccaaccctaatgaaaataaatttttgaaaacctctcaaatatacttacatatacttactttcatctttaatgtaattagattcaggcttgtagaatattctagagtattagaatgaactgtgaaaggctccaagcatgacaaggaggccatctctagagttgtgacactaaacactttggtagacccaatggtgaataaaagctaaaacactcaagtaactagtctgagttactgtagttgatatgtttggctgtgtccttacccaaatctcatcttgaattgtagctttcataattcccatgtgttgtgggagggacccggtgg

SEQ ID NO: 205346 - DNA, 608 bp, Homo sapiens
gagtcacgggttgttcaggtgaggcccaggttccctgggcagccacctgaggccgcctggggttgctcacccaaccctacctgttcccaccactcggtctatttccccctcctcagacaggacactaataacaaggagcttgccctgcaggctcccaaccctcccgctcttccctaccccacagggttctggttccatcatttcctctgttcacaaactatcactggacagttgtgttgtctcttgtacaatgttccattcttcaacatctatcattgctgctgctcccagcaccaaatgttcaccctctgcctcctgctctgcacacattcccctccctcaagatagcctccatgagacagggggtctgcagcttggcaggctggctgggttactgactatcccagtcccagggaagatagggccctgtctctaggatgctgcagcagagtgaggaggggcactcaaattgaccctaaagggtggaggggccaccttctccccctgtttggttggggaatgggtagttattatttgtctcagcttggggctctgcctctagcttcctacttgcagttacttaagttaaaaaagaaaatcctgttcta

SEQ ID NO: 205347 - DNA, 544 bp, Homo sapiens
cagcaaaacataagactcacttgaggttaaagggcatgaatgtaagggaagtctacttagcatggttttatgtttttcttccatcatgttcagttgcgtaggtacacacatggagtataaatagtactgcattttaacaggatggttaggccaaagaaattgaggatgtatgaataaagcggtatggtgatgtaccatggaatttatgctgtgcaaagagggaaggaagacaggtaataggtaagaaccactgaaacaactgatttcatcaatgaattgtagctctcttcaaggtagaaaaattattgcaatctggaacctctgataatgagcatgtcaacactggaatgtctgaaattgcagtatttgcatgagttgcagttatgaaaacaagatccaaattttactgatttcatagtattttgtctttttctctcgattagaatgcagaatatgttagggcaggtatttttgtccctcctccccatctgctgcattctcagtgcttgattgattcagagaagctgcacaatggatctttgct

SEQ ID NO: 205348 - DNA, 501 bp, Homo sapiens
gagattccagctggtaacatgttcaaacattacagggatcatgcagtctgttgttcttaaaactaaactaaaagaccatggcaataaaatcatacattccaaataagactcatatctcaagggatatctttaggctaaaaaaaccaaacccaacccggactcaaagactgactagctataaaatactatctcaaagttggttgagactctcctctttggagcttgcccctccccttcttagaattccttcttactctcttgctctaagctaactctctttttccaaaactcctcagctaggctggcatgctgacaatttaagtaaaaaacacgtaaaaactagcagatattttaaaaaatattattttgaccttcgtgctgtttcttaaaagcaaaaaataaaattctcatataaaagaccccctttccatactaaaaggaatgaggagattcttatcttaaagggcaaaaaattgagaccaagacaatactttacagaca

SEQ ID NO: 205349 - DNA, 382 bp, Homo sapiens
tggttattggctcagaagcctggaaacaggagcttctgcggaccttcacgcacgtgttattcccaaaatgccactagatggcagcagagaagaacttttccctgatttaagcgctctgcgagcagccactcagcattacactaagaattcagacccctggtactcaggggtcttcgagataaatcctgtttgggccctttgcaggccctatctcacctactgcccccgttcaccagatgaagaaggaacaatgattattctcactttataggcatttaaactgaagactgattctaaccaattctgagtccagaaccaaggcctgaaatgggccagagagcatgcacacggtgtcctggttaaataaagtcatcccaacatt

SEQ ID NO: 205350 - DNA, 1634 bp, Homo sapiens
aagtaatgacaaaggtgctgcacacagggccatgcccaaccagcaggctctcagaggactcttgaggtggaaatgaaaacaggtactttgttaaccagtggaagcacaaagatgaacaaaccatactcctcccctcaagacaactctttcgtgagggagataacccaggaaataggagtctattcatgagaccgctgctctaactagaagaataggaagtaccagaaggtcacaaaagaggagctgattagctcaacctgagaaagtctcccaaagcttcacagcggaaggaatgctgaagtggggatgaagaggtgttgatcagaaaaaaaagacagtctcactgtgtcacccaggttggagtacaatggcatgctcactgctcactgcagcctcaacttccctaactcaagtgattctcccacctcagcctgttagctgggattacagggttctgtcaaagcagatgactcccaaaggtttcataaatcttccggaaaataagctccttcagctatataatcatggcacccacggcttaaaagttgacagtgagaacagcattgaacagcctgctgcattcagcaaaagatgggagaaaaatgagttcaatcagtagactcccatgaccccttcaagtgacgcaatcatctcttccaagaagtgcagctacttatttgggataagcgacgacagacgagaaaccacaaagaatctgcagacgcgagactccctgacctgcagatatacagccatctccaataagtctacatttaaactaaaacttctcctgttgagcaagcataatgtggaattatgttagcaagaccttatgcattcccacaaattttctcccaataaaaaaaactgttatcaaaggattgtcacccccccagacatacagcactgcagggaaaaaggagcccagacagccgttgggagttgacctctggccgcacgcctggggtcagtggagatctatgttgactttatctgtgtgccctttaaggaggcctcttgcttaaaataactaaggagccactaaattacacttacttgtaatgctgcattaatggattcttctacaaaggctgaaatacctgggcttttgcccttcatgaccctaattttaactacaatgaagcttctgaatctctacccatttcgggttaactccattttggagaaagaatgagttctatcaatagcctttatgagcattaattaaaaatctgtacagagagaatagtcatatatttaaaactagtcattaagaaataaaagaatatccttggtataagctgaaaaattattaaagattctgtttcataaagtgatagaatcataatttctaaccataattttcttaaccaaaatatcgttgtacttagttttgttgtgtttctgaaataatttattttctgattttgcctgaaatctactaccttttccaacaacaaccacaacaacaaaaatctaattttattttggttcagaaaaggagcagcatttttacacatatctattttgttcctacagttcatgatctgaagcagaagacagtccttctacatatttctttccttctctgatggatggctgatatacagcgtgttgtttcaaaaatttaaaaa

SEQ ID NO: 205351 - DNA, 890 bp, Homo sapiens
aagtaatgacaaaggtgctgcacacagggccatgcccaaccagcaggctctcagaggactcttgaggtggaaatgaaaacagggtcccactctgtggcctaagctggagtgcagtggcagtatcagggcccgctacatccttgacctcctgggctcaaacaatctctcatctcagcctcccaagtagctggcactatagggatggaggcctcactttgttgccagctggtctcgagctcctggcttcaggtgatcctcccatctcagcctcccaaaatgctgagagggcagctgtgagccactgtgaccagccagcatgtctttttttgatctgcccagtaccaaccctcatttgggaatcgctctttctgttcctttaacctgatgattcctgtgggagcagctgtgctctgacatggcctggccctgcctagggctgattagagaaaaacagtaccaatgatcctcttctctgggatatttgaacctgattccaggggtgattatcaatatctgcaacaatcagggagatccgggtacccaccaattaggacagacattggctgaaaaacaattgatatgggtgcagcagtgcacgcaggctgaagagcacccttgtttgagaagaaggaacatagggattccctctttgggggcagaagttggaaactgtgcattggggagccctgttttcttcctgtagacaaatctcattgtggtgaataggaatgaggccaacggcaagatctggagatggaagaagctcctgaagatgttgaaacccctggtcccagctgttctgtgggccagctggattcctgcccttctatagctgtattgctcaatcctttcctgggatctgggagaaaataaatttcatttttggccca

SEQ ID NO: 205352 - DNA, 393 bp, Homo sapiens
aatgatttatttataagctttcctctcccataagccttaggaattcagacaaggattgatctcttttttttttttaacccttataggagtaaaggctaatggtttatcttattcttatgtgtattttagtatctagcagcttctaatataccactcaacagatgtttgctaaattaaacaagtcctttctattcagcattattataaacactgtaaacctacacacaaaaattaaaggcaagatctttaaccaaaaatatttcacaaactgaaaaaatttgtagattataacaaaagtagtttgtagttcagtgttttgtttaagtgggtatagacaccatagatcagtgctcttcaaactgttggtcatgacctattaacagactgtgaaat

SEQ ID NO: 205353 - DNA, 610 bp, Homo sapiens
aggcctaggttttaacgctactgtgaatccccagcatggccacagagctggaaccagggaatcagataagcaagacaaggaggtaagattgaaccctcgcccaaaattagcctaaatgatcaggtcactactgtgtaacctagtatttgaaatacagagatttagacagaatgacaggaaaaagtcaaacataaactaaaagtccgaaagagcttaggttctcacagtcactttttgaggctacaaaaggaaagatattgcataaaccttaaaaaaaatggaccagttaagaagtgtaactggtttagcaagcttcccttctaaaatcctggtgccgatttcatgttagaacacaggtttaatgagaacgtatccctctccccaagttgtaatacacagaagagggcaaaggggagaatgttaccttgcccaagctctggtcttatctcaacccacagacttggagaaaatgtctatagtccatttcagtatttacttagctttttaatttttaattttttttttgacacagactctcgctgtgtcccccaggctggagtgcaatggtatcatcttagctcactgcaacttccgcttcccaggttcaagc

SEQ ID NO: 205354 - DNA, 130 bp, Homo sapiens
ttagagtctatcactattaaaactgtagaagttatatcaaagtaggtcagagaagagttgagtgtagcaaagttaaaaagaggagcagccaataataccctaagttaattgagggtaatgtgataaggat

SEQ ID NO: 205355 - DNA, 583 bp, Homo sapiens
gataaatagtgtctatttcattcaaagtataatggaaagacactggagggttaaagcaaggaagtaaaatcatccaatttacttttttcttttttaattcatgaagctatactgtggagaatggattatagacgggttaaagaaaaacaatgaggccgggcacagtggctcacacctataatcccagcactttgggaggaggagaagaatttgtttggctagcaatgcaggtcgatttccagcttccaagtatctaagggatctggaaaagctatgtaatattactgtaactcacagaaagcaaggtacatcctccctaaagtcagcataattggccttataatctctacagattctttacctgcatcatgattcttctatagcaaaagagaatggataaatatacttatcaggccactgagtagtcaactgagagccttgcactatataatcctactaaatgtagtagttatttattatggcctaaattaatccctgtcctccccaatcgaattcctgcagcccgggggatccactagttctagagcggacgccaccgcggttgagctccagcttttgttcc

SEQ ID NO: 205356 - DNA, 370 bp, Homo sapiens
gataaatagtgtctatttcattcaaagtataatggaaagacactggagggttaaagcaaggaagtaaaatcatccaatttacttttttcttttttaattcatgaagctatactgtggagaatggattatagacgggttaaagaaaaacaatgaggccgggcacagtggctcacacctataatcccagcactttgggaggccaaggcaggcagatcacgaggtcaggagaccaagaccatcctggccaacatggtgaaaccccgtctgtactaaaaatacaaaaattagctgggcatggtggcgggtgcctgtgatcccagctactcagaaggctgaggcaggagaatcatctgaaccagggagtcggaga

SEQ ID NO: 205357 - DNA, 462 bp, Homo sapiens
gcattttttaatcaagtagttttcttctagttaagttttaacagttctttatatgaatatgtctttttaaaatattttctcctactctgtggcttttcttttaattctcttgatagtatcctttgcaatggcatagtaggagataatatgggtgacttttctgttaaaaggtttatggaggccgggcgcagtggctcatgcctgtaatcccagcactttgggagaccgaggtaggcggatcacctgaggtcaggagttcaagaccagcctgaccaacatggagaaaccccatctctactaaaaatacaaaattagccaggtgtggtggtgcatgcctgtgatcccagctactcaggagactgaggcaggagaatcgcttgaactcgggaggcagtggttgccgtgagccgagattgcaccattgcactccagcctgggcaactagagaaaaactccatcaca

SEQ ID NO: 205358 - DNA, 300 bp, Homo sapiens
ctatgtgaagtgtctaagatgggagcatgcctagagtgttcaataaatcaccaggagagcagtgtagctgtaacggagtaaaagagttggagaagagtaagtataatatgaggtcagaaagatatggagccaatggggagagagcatgtaggacttcattgacttttatagtgagatagggagctatgggagggttttgagctgacgtgagacataaattgtcttgatatgcagccagctttctgtatttgtgggtttcgcatctgtggattcatccaatgtcagatggaaaatacttgg

SEQ ID NO: 205359 - DNA, 613 bp, Homo sapiens
caggttcacatggttggccaggctgtcacaaaaaaagcgatgcatgcacttcagcctcccaaagtgctgggattacaggcgtgagccaatgcgcccggccccaaatattattttatacatatctatcctgctactctatggaatgcactacctcctccattctctgaatgtgttaaagatatttagatgttttcttctccctgtacagacagtttgctccaagttgattctttggttttgacctctagccttcatcttaggggccgggtcatcttcagatgtttgatgatcctgatgcctccaggatcactgctgcctccttcctgttgtctttgcccttaagggttaaaacacacacacacatacacacacacacaacttttactgcccttacagtatggcttcagaaagaaaccataaatgaacacatacttcttagccctcaaatttttcactcacattttaggccacagtggtcggcttctcacctaactgaaactgatcagctaatgtcaactgaccttgatagtgctggttaaacacctgcccacccttgtttatttggtctatttactgcactggatgctgaagatccccttttcctgaactccct

SEQ ID NO: 205360 - DNA, 294 bp, Homo sapiens
aggtgggctccaaaggattcggccaccaaggtggagaaggaaatatacattttctagagcccaatctgccaggagagatctaagagattacaaaggaaaaaacttgaaattctgaggacagagaaaagaaaaaggaagagttaatgactagtgagacaccatcatgtagactggtgccacatggaatctggggcaacagaacatgatctatccagatggacatacagggaaagctggtgctgggaagcaccttaagctacatgattgcaataaattttgctcaccagtgattgt

SEQ ID NO: 205361 - DNA, 386 bp, Homo sapiens
tatagcagttaatataacccatggtttcagacatccactgggggtcttggaatgtatccgctgcagataaggggatactacttgtatttaaaaaaaacaaaagaaaaagaaagaggtaactgctctatgcatagagcccaaactcctgctggaggtggtcggaaggtctgattcttaaaagatgagtaggaatttagcaagggacaaataggaaggcattttcttgttcacagtgataggacagaggtgataaaacacaggcagagatgagagaatcttgtaagagggagacatgtcaaggatactacagaatgacaggttatcacagaataccaccaaaggaagcctggtctttggaaggggcagtgtttacattgtagtattag

SEQ ID NO: 205362 - DNA, 400 bp, Homo sapiens
tactatagacgacccccatgccaataactcttccctatgggctaacttgggcttgcccttaacgtggttgctaaactctagaatatatgttccatttaaagaagatggaagtgcatagcattgttatgaaccagactcagaagtcagattgcatcacttccactcttactctgctgtaggcagacacaaagatcctgcctaaattcaagtagagggcatatgggctccacttcttcatgggggaattgcaaagttctagaggagtacgtgggatgggagattgtaatggattgaatagtgcccccctacattatatgctcctaatccttggagcctgtgagtgttaccttatttggaaaaagggtctcatctaaattaaggattatgagatgaggagata

SEQ ID NO: 205363 - DNA, 206 bp, Homo sapiens
gaggaaagctgagaccctaacgtttgcccactgctggtttctgacgacttagccattttgatacagaaggtcaatatggattttggagggtggggtactagcacaactggcaacttagtagggaattagtaatctggccagggccactgacaatttaaaaagaagaaaactacatgtgcagcactccagaaatggcgaaacacctt

SEQ ID NO: 205364 - DNA, 463 bp, Homo sapiens
attgttctaaacccattacattatttaatcttcacgacaattctttaaggtagtcttattactatgctcattttatagatgagcaaacaagttttcaggggtcaagaaatttgagcaagttcacattaacttgtaaatcacgaaattgagcatcagatacaagcatctggctgcacttcctgagtttgtacgtcctactctcataaaatagatacattgaagactgagaaagaatactgttggccgattcctcaggcaataattttttcgatattgtattgttgtctcagaaacctccagcctctctcattgatggacggtaggaggggcacatggagtggaccaggagtgggcaggagtggggtgggggcgtgcttttagaagcgtttcgggggaacgacaaggcgcgggtcgtagaggtctaccctctctgcagtcccagcatggctcctggagctctctg

SEQ ID NO: 205365 - DNA, 483 bp, Homo sapiens
acatgaaatgcttgatgccctggtttcttccagttttcattagggaatagacaatggtttaagacacctattgcttcagttataataaggatgaacatgtaatttgttgtccaaactggtaccctttagagagtgaaagggggcacttgaatatacttacttaaaatttttatttatcagtcaataaattgacatcatattgatggacttataaaataatacaattaaaaactattttcttgggaggccaagacaggcagatcacttgaggtcaggagtttgagactagcctggccaagattgtgaaactctgtctctactaaaaatacaaaaaattagctgagtgtggtggtgcgtgcctgtagtcccagctacttgggaggatgaggctggagaattgcttgaacctgagaggtggaggttgcagtaagccaagattgtgccactgcattccagcctgggtaacagagtgagactctgtca

SEQ ID NO: 205366 - DNA, 384 bp, Homo sapiens
ggagccaacgcaacagcagctctacccagcagaggtcacagcagtgtcctcagcagatactccggtagcttgaaaattatgattttatcctgaaatgatcattcttataaatgtctcccccaaagcaattaaactttggggaagtcaaacacatgttgctaacaaacaaaccccaaccagaaaccaagccagagttggctctccatgtgaaatctagagacaactcaggaggaagtcagattctcaagctcgaggaaggagtcaaatgctttccttggtaattgataaagactctgccttggcaagaacttttgtagattatatctgagtttttgatgaataaagaatatgctgtgaaaattaaagagatggcatttatccagt

SEQ ID NO: 205367 - DNA, 372 bp, Homo sapiens
tggtcggtacccctcacggattactcaacaaaatactagcaaataaaatccagcagcacattaaaaagttaacacaccacaaatcaagtaagctttattcctgagatgtaaggctggttcaatcagcaactcaataaatgtgattcaccacataaacagaatcaaaagcaaattccatataaccatctaaatagatgcagtggaagcatttgataaaatccaacaccccttcatgatgaaaactttcaacagattaggcatcaaagaaacataactaaaaataaggccaggcatgagggctcacgtgagcctgtaatcccagcactttggaaggctgaggcaggtggatcacttgaggtaatccgtgaggga

SEQ ID NO: 205368 - DNA, 400 bp, Homo sapiens
ctggcgtcccagagcaagctggaggctcccacctcttcgggcagttcccccaagctaagcttcctgctttcctgacacctctggggaaaaggagttgagagagactccagaagcacttccaagtgacctgcctggaagtgaccaggggaaacggtccaagacgagtacaccgagtttctccacgaggcacagagctgagtaggcaacctggcacgggggcatgtggaaggagctgtgggaaacagccttgggccttctggggaggtctgtgcaggctcctctggcctgtaggccccgagttctggtctggaaggtcccctttcctggagcacaggggagcctgaagtccaggcctctgagatgatagtcataattaaagctgctgttgactgaaaactct

SEQ ID NO: 205369 - DNA, 645 bp, Homo sapiens
acactctggtttttccaggacttaggaaagctgcccagtgcagatggagatctgagagaccccagaatgctctgccctgcgattattcatcctggatataactacaaactcactgagctcaatcaaggattgcaaaacatcctgttcccagaggaatgaggactcattccagatggttctggacactttatccttttctaaggatgttgcattcttggaacattctgtggtttctaccaacaactgcaagaaaagggaaaaagccagaagtggccaaggccatctggggacctattctcctacacagagtgaacagtggtcagagacttgatttatcatcaagagcctataaaaaggctcaaggcccatctgagtttgctctggcttctgtgagaatatactatttacgaaatgatttaaacaatagatatttatttctcacagttcttgagtttggaagacatgtgaattttgaggggtgcacagttcagtccatagcaaggtttatgccagattgcctcttctaacactgagagattgaataatataataactgaaaagtataaccctggatttagcaactatgaggctagcagtaaatttggaattaagttttcagtggtgtgttgtaggcagaagtcagat

SEQ ID NO: 205370 - DNA, 310 bp, Homo sapiens
agggtgtttccattcttattatggtactgcaagaaacagccatagatatattttgagagttgttctaacgtctctgtagaataaatctaaaagtgaaagtgttgagtcaatggacatatgggttgagattttcctagatataacaaaattgcccacaccctgcggctacattaaattgcccctgactcacacttggatgggagcaaactcaggtctgaagatgtgtgagatggaatggacagtgtagtgaatggctgaaaatgaggagtctcagtgcatggtcaagggtcagtgaggcacaagggaaaaa

SEQ ID NO: 205371 - DNA, 670 bp, Homo sapiens
ctttctcattcttctgctgcttagcttctcatctactgcttcccagtccctaagtatttccatgtaccctctctaagatcaggcagctcgattgtttcatcaccttgtatgaaatcctgacacctgctcacacttagcctcagctcttgcttcaaaggcttaaaaaatccaactgccaccaacactcccaaaataacaggacaagataattggaacccttttaaccacagttgacccttgagaaaaggtccacttatacgtggcttttcttctacctctggcacccctgagtcagcaagaccaacctccccttttcttcctcctcctcaccctactcaacacgaaggtgaagatgaagacctttatgacgatccacttccacttaatgaaaagttctcttctttatgattttcttaatttcttttctctagctttctttgttgtaagaacacagtatatataatacataaaatgtgtacgaatcaactgtttataatatccataagactattggtagttaagttcttggggagtaaaaagttacatacaggtttctgactgcatgagggattggcaccccaagaccccaaattgttcaagggtcaactgtatatgattcataaaaattcataaaaattgaaagttttcaacaataaagagcaggtgtaag

SEQ ID NO: 205372 - DNA, 1153 bp, Homo sapiens
tctctttcctcttcacctatgcgggaacttgttctagttcccacagctcctcaccagtcaattcctcaggaatcacctctaggagctcctgttgtcctcatccacaccccggttaaagttgtttgccatctcaatcacagactttgtgatttatgcaaatccttttaagtcatggacaaacctcttgagtgtattcttccagatgccattcatacactccttgatgacatcaacccaagcccaagcaagattcttaatgcagtcacagatattgcaatccttccagaattgtatcagaatcttctcagtgtctccctaagctgcgacgacaggacaaaggcctttctcagatagtacgccttaaaagctgctgtaactccatcagttggatcaaagaggtggtgtttgatactgggatgaaaaacaccacttaaaggaggcatttgcttatcagcgacaataagcaaaagcttgaagggtatgttattctctcaatactacttctccacttcgcaggcatatctattcaggagggcatcttgaaagaggagcagggtcacccacgacttcttatatctcctgcagtgcactggccaagtgtgtgtgtattgatatgcttgaagcccctagggttctcaacatgccaaatcacaaaggggttcaatttgtggcctgcaacattgcccccaagcaagactgtcatccagtccctaaaagacttgaagcctggcattgctttggtctacctcatggatcaaagtcctttcaggcatctgtttccagaatagaaaggtttcatccatattgaaaatttgttctggcaagtgattttcctccagactcagcttatctagagtttcccaaaattcttccgctgcctttacatcagcactcacaaactcaccactttcccattatgtaatgaataacgattcttgaattgtttacaccacccagaactagcagtcaattcaacatcacagccaggtccagccttttctttcaacacctcaaacacactttttgctttgggatcatcatggtgctgagaggtacacagcaccgtgtgcacctgtgtctgctcttcaatccaggtcatcagaagcttgtgtgtgtctgataaaggcccttcttgaatttttgttagtctcat

SEQ ID NO: 205373 - DNA, 575 bp, Homo sapiens
tctctgagggacacaatgagggtggttttgggagtgtaaactgcaacctattgctactgtagtaccacctgtttctgccagggtgaagtatcattgctgggtgatgctgagagcaataggaattatacaggaagtagcaagttcttttctccctctttcttccctctagtctcctctgagtgctcctattgacagaatataacagggtgtttgatattccttttgtataggatcttggtttgaatcatctcaggccaacgtatctccatgggttccatattttgtcttcaggattccacatttttattagccattggaggggaatgcagttagttcccaaatgtagccctctccattctgctgccattatctgctttagttttctcaggagcaagttatgcaacaaaagactgtggttcccaatggcagggaatacatgagaaattttacaggcttttttttattctttcttaagtctctctaggcttggggtgaagcacagataccacctatactcctcttgcaatggctcgaaattataggacagctgtcttcatggaaatcctcttcacaaa

SEQ ID NO: 205374 - DNA, 914 bp, Homo sapiens
ctcggtaccgggactatccacctgcaagtctagggtgggtccccaaggcaggacagagagggagtgggtgtgccacgtggctcagctcactgccccagagcatctgggggacctagaaatgccaggcagggcgatggagctccccaggccccacctcccactcctggattctcattctccatcagacaccactgttttgtctgggcacccgatggccattacgggtctctagtcccttgttgccacgggttttggcttgggggtgaacatgtaggtgtccttggaaagaagagcaacgaaaagggaaagtcaggtctcacaagggtttgcacagctgtgtttaaagagttccttcggggtcattacacgggagacataaaaacagttcgaatctacgtttggcctctatgtgggcggctagctgaaagacagcagtccttgcaggtggctgaggagggtaagaattcaaatgcaggtgaaagagcctgtccagcatccttcatcaaccatctaggccctaatggatccagagagggtcactgaggagtgccaggctgcaggaagtgaggtgggttcaccaggggcctccaggaacatgggcaactgctcatctttgggttgagaccacttctaccatcacttccacaaacggccatccagagattccccacaggccacccacgaccctgtgtggccaccagggtatccacctgcacccaccgtgagaaggcttggccgtgagggagactagaagcacacctcagggagcaccctgagccaggctgccctactctaagctcctcctcttggagcacttccgaaatctcatcccagaaaatggagaggcagagccaaggaatgatcgcgtcccccaccgacactaccaaaacctttctcctccttccaccagagat

SEQ ID NO: 205375 - DNA, 417 bp, Homo sapiens
gaagactcgctgtgtgattccgcccaccccatggccattccctcctcctgagatgttcagagcaggattcctacctagtgccccgccaaacatggcccacaccccaagtcaccctggaccacacccgcccctccgtcatttcctacaggcttttcctgcagattgagagaggaaactgggcagggagcacaccactgatgggtgaaatgatgatctcacaggaaaccagacaagctagagttgtcaccacaccctggactcagagaacttgggtacttcaccgacggccacctcccatcgccctttcattcttcatgggcagggccttgcaagccttggtgatggattttattccatgagatggggcagctgttgcaggaacacgatttgagttgttttttgaaagattgctctggc

SEQ ID NO: 205376 - DNA, 728 bp, Homo sapiens
tgtctgactccaaggattgataatacttttttcatactcaaataaaatgacatcactgaaattccactataggtatagcttcagttacaacggctatagctactgcttacaatagatgtttatacacatttaatctagcattaaaaaaatattttttccttaatttttttgataagacaggatcttgctgtgttgcccaggctggtctcaaactccagacctaagacgatccacgcacctcggcctcccaaagtgttgggagtacaggcatgagccaccactcccagcctagacaagctgatttctcttggccccttcccattctagaattcagtattccttctgcctgttaattcaatggaaaagttggctcaagtgagtattaggttagcaaacactataaatattttatataccagacacttcctgtcccttctcaggtctctgtttgaatacagtactaaaaagttcatctggatcagcagcctaggctcccaccctgccatgagttgggttaccttttagatttcctggatgagtatgaagttaactgtagcctaattatactagacactctgaaaaaggtttttgtgtgatgtctgcaggaaaaactttcttttcttccctgtggtgtttcccatttcagaagcttgtattcaaacatgccagtcatgcttatatttttagttattcttatttctccaccccattgctcaagaggtgagtcc

SEQ ID NO: 205377 - DNA, 931 bp, Homo sapiens
  misc_feature (18)..(18): n is a, c, g, or t
gcagggctggtaccgccngggggtacgggatctaagaacattctctaataagctctttttttttgaagagttctaattttagttacgccgttgatgaactgtattgccttggaaacgtcactgtgccccagttttcttatctctaaaataaggagtttagagaagctgatttcttttttctcctctttttttttttttttttttttttggagatggagtctcactctgtcacccaggctagagggcagtgccacggtctcagctcactgcaacctccacctcccaggttcaggcaattctcctgcctcagcctcccgagtagttgggattacaggcacacgctaccactcctggctaattttttgtatttttagtagagactgggtttcaccttgttggccaggctggtctcaaactccagacctaagacgatccacgcacctcggcctcccaaagtgttgggagtacaggcatgagccaccactcccagcctagacaagctgatttctcttggccccttcccattctagaattcagtattccttctgcctgttaattcaatggaaaagttggctcaagtgagtattaggttagcaaacactataaatattttatataccagacacttcctgtcccttctcaggtctctgtttgaatacagtactaaaaagttcatctggatcagcagcctaggctcccaccctgccatgagttgggttaccttttagatttcctggatgagtatgaagttaactgtagcctaattatactagacactctgaaaaaggtttttgtgtgatgtctgcaggaaaaactttcttttcttccctgtggtgtttcccatttcagaagcttgtattcaaacatgccagtcatgcttatatttttagttattcttatttctccaccccattgctcaagaggtgagtcc

SEQ ID NO: 205378 - DNA, 219 bp, Homo sapiens
ggggaaatgcctctcatgagtatctagaaggaaatgagagactggaggttaggagagaaacgattttgttgggtcagctttcaggtagtaggataccagtactttctacagccatgtcgctgatttaaccgctttggctaactctgaattgaccactgaaatttaagagtttattttgtgtgattagactaggtttgatatcacatagttttcttaaga

SEQ ID NO: 205379 - DNA, 389 bp, Homo sapiens
agccccattcctaacaggccatggactggtaccagtcagtagcctgggtgttggggacccctgctttaatggatgctggactaagacaaagattcctggatcagagacaaaggactttatttttcatagcacagcaagcagcatgtttgcatcagtttccccttgttccctagtcccaccggggcaatgtggaagacccagatgggttctgctgaggtatactaagcttggagaatctttttgataccaagcagcaagcaaacttgctctttgtcttggagagagacatcatcttaccccttaaagctgctcactacaaatccaatcctgagaaatggctcagataaagagcagtcaggccttgccttcttggcatattcagcaaagtg

SEQ ID NO: 205380 - DNA, 479 bp, Homo sapiens
gacatcggcgagtgtgtacttttttaaaggcatttatatacatattgccaagttgccttccagaaaacctgtgccaatttatagtcccatgaatgacctaggagaaagttttgtttttttacaccaacaattggtattattagactctgtgattttccaatttaatagcttaacaatgttgccatgtggctggcgtggtggcttacgcttgtaatcccagcactttgggaggccaaggtgggcagatcacttgagttcaggagattgagaccattctggctaacatggtaaaacaccatctctactaaaaatacaaaaaattagccgggtgtggtggcacgcgcctgtagtcccagctactcgggaggctgaggcaagagaatcgtttgaacccaggaggcggaggttgcagtgagctgagatcgcgccacggcaccccagcctgggtgacagagcgagattccgtctcaaaaaaaaaa

SEQ ID NO: 205381 - DNA, 391 bp, Homo sapiens
  misc_feature (57)..(57): n is a, c, g, or t
caagcagttaatacagactcaacacacgacacaaataccacataccacaaacacatnatacccaccataccacacacacacacacacacacacaactttctgagtattcaatttggttccattgtaaaatcaacttttgccataaaaatgaaagcagagaagcccctcatatatttgaatcatgtagatgaaccagaataagagagagcaaggaggcggggggcaggcacagaaactaggtcataactaggtctcagtaacattatttgtcttggtaacattatttgtacctctgaatcaattagaagtcagaatcaatacctactcttttcttttatttacatttagttaaatgagtctgtattaactgcttggggtctctagagacgac

SEQ ID NO: 205382 - DNA, 111 bp, Homo sapiens
cctcaccttgtggaaaaatattgtcttctgcaaagctggtcccctgtgccaaaaaggttgtgaactgctggattaaagggctttactcaataaattatatctaactgggga

SEQ ID NO: 205383 - DNA, 388 bp, Homo sapiens
gagcctaacctgctgggttattaaagtctaaccttggagaatgaaaattactcagctctagtcagctttagccttccatataggaaaaaaaaagaaaaaaaagaaaaagaaacactctagtgactgagtcccaccaaagtggggaacagccctaagaaacacatgtgaagctcacagcctagaggtacaagctcaataaaagacagacccacttaaagatttatagaacactcccactctcccaggccttaccagtacatcactgaatgcctatttatagcctttctattacccagtacatcttatctagccatcaagaaaaaaattacaagacatattaaaaatattaaagagatagagcaaattaaattaaaaattaaataaaatt

SEQ ID NO: 205384 - DNA, 313 bp, Homo sapiens
atctaatgcctgatctgaagtgaaatagtttcatcccgaaaccaacccccgccccacacctgtggaaaaattgtctttcacaaaactggtccctggtgccaaaaaggttggggaccactgactaaatgacctctataaaacactgcacccaacaacagactacattctctttttttcttttttttttttttggaaagcctcattcgtcggcccaggttgtagtgcaggggggtgatcccggctcatggaaacttctgcctccggggtccaggtgttcctcctactccagccccccgagtggttgggataccag

SEQ ID NO: 205385 - DNA, 563 bp, Homo sapiens
tagcaggctgagtaatcgtacccttcctgtgtagagaccgtggtgcagtgatactgtctacactttattaccaggcagctctccaggcatcttgaacttgaagccaaggaaaagttgaagctccatgcttacacataccactgggtattttgtggccacccactggattctctttcagtactggtgcttgtgcctaccatctggggacctataggcaggcttgactcattcagcccctcccatcttggttcccatctagggactgaatagggagctcagaccactgtgcactccacagatcagcccattgcctgaggcaacagaaattctcccagtaaacaaggatgaagtatatatctcttttggccacagctgactcttacccataatgccatctactggcctgtaggttgaatacacagcccaatataaaacttgccaacaaaagtttatagggctatagaaacaaagccaaaagactttacccaacatcctctacagtcacataccctagggaggggggaaatggaaaacagtaatataaccaataatattatatgaaa

SEQ ID NO: 205386 - DNA, 662 bp, Homo sapiens
agaaggagcactgtttaggaacatatggagacaactataaactccctaaataacaaaagacaagtggctttggcctggaagggatttgggtggtggaagatgaacctgagaatttattcccacatctcactgaatgatcaaattgagcgtctgggttgacacggtctaggagtggtggtggacagcaccggtgtctccttcccagaaggaagttagggcagacccacagctcagaacaatagcagaccctgcctggaagcagtgtaccttgggagaagacagccacgcacagagttcactgttgaaggacatggtagttcggcactcctgcctgtccgcctctctgtgcagctcagccatgccatggccacaggagtgccgggctgttgcctgctgacctgggatgggggtgtctggcagcaagggaggccaagggctcccaaggcagtgaagcttctgcacctgaaggcttggggagagaaggcgggcgggggcgaggagaggcctaggaagccatggggggctccgcttgggcagtgtgcggcagggagcctgcccagcctgggcctggcgcaagcatctttggggctgacctgcaacctctcagggccaagggtcccctcgaatgagccaggtgctttgacccaagcccaccccaatac

SEQ ID NO: 205387 - DNA, 280 bp, Homo sapiens
gtggttgtcctgatagcattattcatctggtcttggccatggagacagtcatccaggatattgattttgcttttgtctgtagtccaagattgtcaagcaaacattttgacccttctggaaacaaaaggtacctttgttccagcatagaaagattctgtggcatctcataagccatcagcaccccttttcctcctcttccttctcacgatcttactgctgtctgaatgcacaattctcttgggatatcaaaaccatatataaagagaaatagaaacaataa

SEQ ID NO: 205388 - DNA, 271 bp, Homo sapiens
attcctctctcaaccttcaatttcacctcctttcttccctcattctaagcagataacctggctcatctcattccctgaaacccttcctatagacccacttgcatctgcaaccatctcttccttccttcttttatccactggaaagttaatctcccccaagggccctggatcccacttcctcctctcttctcttgaccctagctccatcaactgctatctctctttcatgtacctgcaacgtttccctccctttttgctgcttttcctcagc

SEQ ID NO: 205389 - DNA, 260 bp, Homo sapiens
attcctctctcaaccttcaatttcacctcctttcttccctcattctaagcagataacctggctcatctcattccctgaaacccttcctatagacccacttgcatctgcaaccatctcttccttccttcttttatccactggaaagttaatctcccccaagggccctggatcctttgtcaaatgagcctccttcacagtttttgccagatgctgtatcttctgttctcttaacccgagcgaaaccaggtccgagccgatga

SEQ ID NO: 205390 - DNA, 402 bp, Homo sapiens
tttttgtatctgaaagacaaaaataagaattgaaagagaaaacatctccaggtgaatatgtaaatgaagctattataactaagaggaaaaaacgatgatgattattcaaaagacttagcaataggccgggcgtggtggctcacacctgtaatcccagcactttgggaggccaaggcggacggatcactaggtcaggagatcgagaccatcctggctaacacagtgaaaccccgtctctactaaaaatacaaaaaattagccgggtgaggtggtgggcgcctgtggtcccagctactccggaggctgaggcaggagaatggcgtgaaccccgggggcggagcctcagtgagccgagattgtgccactgcactccagcctgggccacagcaagactccgtctca

SEQ ID NO: 205391 - DNA, 268 bp, Homo sapiens
cgcatttatagtgctctggataatgccatttatttttgctgattacccaactttcagtatttgctgtgttatcatctgtatttacttattttgaatcgtgcttaaatcaaatgtaccttcagcacctgcaagtttgccttttctttccaggaggaaaatccccacgttgctctccctggggagtctgagaattataccagtgctgtcagaaatgtaatcatgctgtcatttcagagccacagagtatttataaaataaaaacctttcc

SEQ ID NO: 205392 - DNA, 491 bp, Homo sapiens
actgaaattactcaaagttattgtgtaggtcaaatgaaaatctaaacttgaaaagcaagatgcttgaaagtatttaaatctttgggtaagaaccttcatttgtttgcactagcaatatccatcccagccccagtaccaagtggtgtgatatttggtgctttttacatgtttctttgggactgtttcctcttctgtaaacaggagttaccagccctttcatgggttaagatgagagctaacatatgtaatatccctcatccagtgggtggcacagaggagcttcattaggagctcaacagatggagggtgttacttgttcctaccagaagggaaagggaatgttctttctccagctttatgggatttcttgtagtccagtgaacttttcaaaggagaaggcaattgtgtttataatgtaattatactcctttccactgcactaagtcactttttgagatcatcttacaagttggtaacaataaacagttaaa

SEQ ID NO: 205393 - DNA, 394 bp, Homo sapiens
ctaaaattcaaaaatctaaaatctaaacaaaaacacgaatctgtacttcatgtttcaaacactattgccaaagtatctatctagccaaatagaataagaagaagcagaaaaaactttaaaagaccaatagcaccttgctagctcattgctaataagaactaataggtacttaaactgatgaaagtgattcggacaacaacatattaaccccctactgtgccctgttttaagctgttaatagacattagtcttttaaagaaagactaacacttctatatttgttttctaagcttttgatacattagtgagcagttatagacgcttgccatatctgattcttatagcacagtgcattttccagaatactttttaggaacgctaactgctctaaaag

SEQ ID NO: 205394 - DNA, 381 bp, Homo sapiens
aagtcctccgcttaaaaatacttgtttttacacctaggctaagtaaagctaccaaagaaaaatgtgtgtgtctgtgtgtgtgtgtgtgtgtgtgtgtgtgcacgcgtgcacgcacgcgcagagggggaagcagtttcctacaaaggaacaagaactgacgtgccaaaaatcagtgaagcaatgtcttcaaagttctgatagaaaaattatttcattccatcttgttctacttttgtgtgtgtgtacacactgctttccttacatatatacacacacattgctttcctaacaacactagtaacaaaagaagcctttgtttttaagcagtcaaatttcaaagcctctaaaaaaccctccacattcccgtgggcccccacaatt

SEQ ID NO: 205395 - DNA, 418 bp, Homo sapiens
caagcagttaatacagactcaagaatggagggaaaagtaggatggagactggttaggagattactagagtaatttaggcaagagatgacggtagcttggactgggatgctagtggtggagtggtgagcagtgatcagactcgatatattctgaaggtagagtcaacaggattggctgatggactggatgagggtgtgagaggagagtcaaggatggctctaaagtttctggcctaagtgacgggatagacagaagtgccatgaactgagatggaggacgctatgggagaagcaggttggcttttggtttttgttttttgagggtgggtgaaaacatcaggagttcaactgcgcaatgcttgttagccattcaaatggagatggagagttggctacatgagtctgtattaactgcttgg

SEQ ID NO: 205396 - DNA, 762 bp, Homo sapiens
gtatttttttgtttttgttttttttgacagttttgctctgttgcccaggctggagtgcagtggcatgactttggctcactgcagcccccacctcctgggttcaagtgattgtcaggcctcagcctcctgagtagctgggattacaggcatgtgccaccacacccggctaatttttgtagtcttattagaggcaggatttcaccatgttggccaggctggtcacaaactcctggtttcaaatgatccgcccacctcggcctcccaaagtgctaggattataggtgtgagccatcacacccagcctacaactttttgtatatattaattagaagatttacgtgttgctaatttattagagttaagtatttttttaggaccaggcataatttagtagattatgaactgttttgttttgtgcttggtaaagtgaagctggttggtccacaccactataattcaaggtactaccttataacagtcactcacgtggcaaaaatattatctgagtcagtaaaatagtttctgatttgctagccttgtaaacctagacttacagttaatgattttaaatgtgttgggataaggcggtggaggtgggtataataaacatttttaagtgttttataaggagcttgtatcatcaagaattttgggtcatttcagttatattatatccactcagagaaaatcatggtgtcctcttacaagatgttgaaactgatagtatgaaataaaaggaataaggcctttgcaattatttca

SEQ ID NO: 205397 - DNA, 206 bp, Homo sapiens
ttctttgctatacaacgtaaggataaatttacctggatgtctctgttcacctgatatgcagtacgcagctattcacttataccacagctcttcgtaatagaaggtagctataatcccctcaacaaaataaccactgagagacacagagagcgagagagagagagagagagagacagatcgaacacctatgatgcacctacttctaa

SEQ ID NO: 205398 - DNA, 343 bp, Homo sapiens
gtatttaaatacaaccgattcctgaaccctgacggatcagagaagaaagacttttacaaggatgggaaacggctgaagaattacaacatgccctggggggcggggcacaatcactgcctggggaggagttatgcggtcaacagcatcaaacagtgagtggggggccagggcagggccagggtggctcctgatcccctggttggcaggcgcccttctctcctgggactgagggctcagccaggagaatggtttggcagaggcttcacatggacagcccgtgagccatctcttatttgtggttttacaactgtgtgcttttataaatcagaagagctcgtgtaaa

SEQ ID NO: 205399 - DNA, 191 bp, Homo sapiens
cttggatagggagtcaggatgggaggtggccagggaagggatggggcagggccagcctgcatatgaagggccttcctggttaaggcaatagctttggatttttatgcagggataatggcaaactgttgaattctgggctggggattgatgtgactgctgttgctgtgtggagaaaagtgcgggggagagca

SEQ ID NO: 205400 - DNA, 395 bp, Homo sapiens
gatcacttgagtccaggagttcaggaccttcttgggcaacatggagagattccatctctacaaaacaaaacaaaaaaatcaaggatattttccaacgtaactacagtacagttgtcaaaatcaggaagttaacattgaaataactctattatctaatctatagtttttactcacattttcccagttcttcagtaatcttttaaccaaaaaaacaattttgttttgctttaataggatccattgtgctaccatgtgtcacatgttcacatttacttgtctctttggtctcttctaatctgggacagtccctcagcttttctttgtctttcaaaaccttgacgttttgaaataatagaacccggttattttgtagaatgctctttgattttggttta

SEQ ID NO: 205401 - DNA, 373 bp, Homo sapiens
cagtaaatctgaagattgctagacaaaattcctagaatcctctaggaatctatcccaaagatttactggcaaaatattttttatgaaatatgcgttttactattcattggcacactatttgtagtagcaaaaagctgcaatgactgaaatattcttcattagaggacagttgggtcagctgtggtgcttccatagggtggaaaactatgaagatgaaaaagaaatgggaaatatatcagtaatagagtgattgtcatgatatattaagtgaaagaacaagataccacttgtctaagaaataagagaatacgtattttctttgatatttgctttcttttaaaagaataaaccataagagaataataatagaaaa

SEQ ID NO: 205402 - DNA, 462 bp, Homo sapiens
ccaggctcaactgataacgtctgccttggcctcccaaagtgctgggattctgtaagccacctcacccagccatgtattgcttttttatgacagttaaaagaggaaagggcgggggacagtttacagaccagtgaaagtgctgagataaatatttttatacctaaggaaatagtgattttcccaagatgatagggaggcaggtgatgtagatagggctgaagattagatttctggctcctatctgtgattttctgctgtaccagtctgccttctattttatgggctcagtattccttacctgcctcttcccatgctaaagatggcccaccttcgttttgttatttaagcaacttcatcccctggcttgttttcacagtggttttctgagcctttgactctaagtcatctaattgaacattgtgttgtgatataaaaagtaagttaggcttgtgtttttcacca

SEQ ID NO: 205403 - DNA, 491 bp, Homo sapiens
cccacctaagtgtcccccatccccaggactgtgcggctgctgagaagtgctgcatcaacgtgtgtggactgcacagctgcgtggcagcacgcttccccggcagcccagctgcgccgacgacagcggcctcctgcgagggctttgtgtgcccacagcagggctcggactgcgacatctgggacgggcagcccgtgtgccgctgccgcgaccgctgtgagaaggagcccagcttcacctgcgcctcggacggcctcacctactacaaccgctgctatatggacgccgaggcctgcctgcggggcctgcacctccacatcgtgccctgcaagcacgtgctcagctggccgcccagcagcccggggccgccggagaccactgcccgccccacacctggggccgcgcccgtgcctcctgccctgtacagcagcccctccccacaggcggtgcaggttgggggtacggccagcctccactgcgacgtcagcggccgc

SEQ ID NO: 205404 - DNA, 594 bp, Homo sapiens
taagtaacattcctatgattattttgcaacaaagtggggaggctaaaaagtaaagtgattacttgttaaacaaatatagtgcaacttatgcagacaaacaagtgttacctccttcagaacagacccctcagaatccaatatcttaattctaacaagcctgcgtcagaggctagggccttgactatgagaggagttaaaagtaacttggaaccaaacctgataaataaggggtgagcaacttacatggggaagggaactggcatttcttgagcttccataataggaattgtgtttatgggaatggccctgtaagaaggagactactgtctctgtgttatagctgggcagtttcagagaagtaaatggcctgcacaagttcacataactagtgagtgggtccttctccaggtctccaaaagtgatttatgctttcttccatattatgatgattattttatttactgtttttttctaactgtgttagaaaaatgtgtctttaatatcatagaacaatttttttggtctggtttataaatcgatcctaaatacaaatgaacaagaggaaataaacattttgaagaatgtcatcattat

SEQ ID NO: 205405 - DNA, 154 bp, Homo sapiens
ggcccctgagtcaacacattagccattgactattgataatccacctcttcaaactatcagtgtttgaacactcacacttggaagacctaactattcttccagaagacagcactggaagtgacacatttcatttctgcatattctctggcactga

SEQ ID NO: 205406 - DNA, 181 bp, Homo sapiens
ttatactgggcaactttcatatgggtatggtttgaggattatctgagccctttgggtgaaactcattttctctatggaatctttcagtacctgaattttttccagtaaaataactctttgagtttcaaatgacttttcataaataaactgtagatcaccctccataagacacatgtcttat

SEQ ID NO: 205407 - DNA, 235 bp, Homo sapiens
acacatatgacatacaaaatacgttagtcaacaatatatgctatcagtaaacttccagtcatcagtgggctattagcagctacgttttttgggcagtcaaaagcatggggaaggagagggtggtccctaacccctgtgttgctcaagggtcaattgtaataatacccatttaagaatccatggtatatatggtaagtgcaacaactctagaagagagtgctaggagttggaaaag

SEQ ID NO: 205408 - DNA, 206 bp, Homo sapiens
ctttctttctctctctttctttctttttctttaaaaaaaaaaaaacaaaaacctcttcaacactagggattttagaatcatcttgagtgacttgaatgttggggtgtttccttccttcacataaagcacccagacccccaaattgctattttattttttgaatgttaattccagaaaggacttcaagactgtcctggaccagcttg

SEQ ID NO: 205409 - DNA, 804 bp, Homo sapiens
cacacagagccattacctaccacagagctgacgtgaacaggagtgtgcttgagggtggcgcttgacacaagtatcaatgtgcttttgtcttccagaaaaaaacttcaggctttcatgacctacagctcagaccctgcaacaccctcaccccatttctactcctgcaggatttctggaagcaaatccttatgtgactttgatagcactgaagaaataaaatctgaggtgaggacttagaaaatcattcgagaagcattgcagctcgtaagtttgatcttgatgcccacagaactggcagctcttaagttattacagtatcagagcttcagaaaatgctctgctaaagacaattttgtgctcagaactaagctaaagacacacagcctcagcagtcgcaagattttaaactcggctttggatcatgccctaaggacagcaaccattttgaaagaaactacagatcaaatgattaaaacgattgcagaagaccttgctaaagcacagaggtggaggaatcgactgaaatactagttcaacgctaggctaccaaggattcaaaagaaaaaaatgcaaagaaaacttgatcttcccccaaaatgtattttacttactacacaatttaggaagatgactttctagagaaaacacagaaaccataagaaatgggtaacacaaagtacttaaaggaaaaagaaaaaagaaaggacttctgattcttaaaatcaaaagcaaccaacaagtatttattttaaaataaatctatgttcttcttaactcataataaaagaaatcaaaacaaaacaa

SEQ ID NO: 205410 - DNA, 630 bp, Homo sapiens
cacacagagccattacctaccacagagctgacgtgaacaggagtgtgcttgagggtggcgcttgacacaagtatcaatgtgcttttgtcttccagaaaaaaacttcaggctttcatgacctacagctcagaccctgcaacaccctcaccccatttctactcctgcaggatttctggaagcaaatccttatgtgactttgatagcactgaagaaataaaatctgagattttaaactcggctttggatcatgccctaaggacagcaaccattttgaaagaaactacagatcaaatgattaaaacgattgcagaagaccttgctaaagcacagaggtggaggaatcgactgaaatactagttcaacgctaggctaccaaggattcaaaagaaaaaaatgcaaagaaaacttgatcttcccccaaaatgtattttacttactacacaatttaggaagatgactttctagagaaaacacagaaaccataagaaatgggtaacacaaagtacttaaaggaaaaagaaaaaagaaaggacttctgattcttaaaatcaaaagcaaccaacaagtatttattttaaaataaatctatgttcttcttaactcataataaaagaaatcaaaacaaaacaa

SEQ ID NO: 205411 - DNA, 418 bp, Homo sapiens
acaggagcttaaaaagtgcactcttctatatctaccttgtatcacttgagtgaggcatctatccactgaacttcacttgacaccagtcaagacctctaaaagacatccactgcagtctaaatccgcatctcagcatatgtggcacaaattatcatttgtttttgaaacttttttacttttacttggcttcaaatacgtctcctggttttctatttcattgacatttttgttgctgttccctcctctacagacctgattctgaagtgccactcttaactcctttggaatctagtctcttcctaggtatcccaaggctttcaattaaatgccattatatgatgactccagatttctaaatcaaaccctaatctctcccaagcttcagcctcattcatctgcttaatgaatgacactttta

SEQ ID NO: 205412 - DNA, 766 bp, Homo sapiens
ggtgtatttctgtggtttagcaaaagggccaagtcggaaggaaaagacattcccagcattttctaaagctagataaatacagaaacgaaatatagatgaaagatggaactgctctctatagcatctgccagattcctcgactttttggcacactgattgaatttggcaaaggtacccagtagcaatcttttccattaaaaggagcagcatatactttattttaccatactgtttgtgtatttttgaccctccaaaactctcttttttagaaggcaattatttctacagagttggctgcaattatttgaaacggatcttttatcaacaaaaaaagctgcgggacatagctactgttgaacagatccaaggacctacaggtcgtcaggaaagcgtctttctttgaaaccaaaagatgcttcaacatgtgccagcatcatcttatgccaatctaacgcttttgatatccaaacctatttaaatttggaggaatcctggactgttcaatttaggcaagataagctacccagctctgtcgttttcttctatttgtgatcagaaaaactgtaacgtagtccaacattcctaattttggtaacatgatgatgttaagaaaaggaataactctcccgtccaaaatcaaatttttgtggaatccaatacttcttaaccctgaatttttttctgagctggcagtgattctatagtaaacttctgaagatatataagtaacaatctctaaaaatatgacacgcggcagcaagtatga

SEQ ID NO: 205413 - DNA, 337 bp, Homo sapiens
aatcccatcaatgaactttatatctttaccctttaaaattataatttatgggccgggcgcagtggtttacgcctgtaatcccagcacttcgggaggctgaagcgggtggatcacgaggtcaggagctcaagaccagcatggccaagattgtgaaaccccgtctctactaaaaatacaaaaatcagccgggcatggtagcaggcacctgcagtcccatctacgggggaggccgagacagagaatcgcttaaacccaggtggtggaggttgcagtgagccgagattgtgccactgcactccagcgtgggtgacagagtgagactccatctcagacaaaa

SEQ ID NO: 205414 - DNA, 367 bp, Homo sapiens
acttttgctcatactggccctgctcaaagcttttctgctctctcatctcctatcttctgagttaagacacaagccaggtgcagttgctcatgcttgtaattccagcactttgaaaggccaaggcgggagaattgcttgaggccaggagttcgagagcagcctgggcaacataacaagaccctgtctttacaaaaattttttttgatgagctgggtgtggtggtgcatccccgtagtctcagctactggggtaagtaaggcaggaagatcacttgagcccaggagtctgaggctgcagtgagctatgattgcaccactgcattctagcctgggcgacagagcaagaccctgcctcaaaaatttaaaat

SEQ ID NO: 205415 - DNA, 505 bp, Homo sapiens
gtgctacaggtggttgtctcctatagtcaggagggatagcaggaggtagaaagaaacaagaaggagaaaggcagcattgataggaactttcagcctgggtctggacacatgagctggagacctctggtttctgttcccctgaggcttttaatgaagccaggagtgttcaggaggcgcatgttcacaaggccccttcattataacttgcacattttattgtcacatttgactcttcattgcatttaatgtcttttgctttgaattcctcttggaaataaaataacaaaaatgatatagataagaattctgttctgtgtaactatgtggatattcttatagtctaatgatactttgatcttactttatgtgtttctaatattctttaccagaaattccaagagaaatataacaagaacaaaccacagaccatccttggaagtaagtgatgtagaaaacgacaagaacttttaaaaatttaatacatactatacatttttccattata

SEQ ID NO: 205416 - DNA, 655 bp, Homo sapiens
cagttaacctttttggacaaatatacatctgtatgtttaagagccatcaaaatacctgcactctgattcagttatcctactcctaggaatctatatgaaagaaatgatccttagaaagagaaaacctataacaaggtgttatctgaaagttaacaagtttacaattgtcctgtaagaggacaacgggaataaaatgtagcaacttcatggaacactatatagccatcattcatgcagtcaccagtaggttcggactgtgttacacaggaaatggacccaaaaatgaaatcaacaaataatgtgctaagaacattaatagccagcatgtatatagcacttgctgtatggcaggcactgctctaaggatttttttcccccaccaaaaccatttcattgttttaattttacttttaattgacagataacattgtacatattcatggtttacacagtaatgttttgacacatataatttatagtgattagatcagggcaattagcatttccatcatctcaaacatttatcatctctttgcattgggaacactgattttatatataaagataggcaaagaagtgacatcacacatcagaaatgagggactacagtggagttccaaaggataagcacaagattcagaagatagaggagtgt

SEQ ID NO: 205417 - DNA, 386 bp, Homo sapiens
ttctggccacgcacagagtgaacgtataattaatgggagctagagcgaccattagaataataatggccagaaaacagaactgactcgctaggtatgagccagcagtccgaacaagggcctgctgagcacagtggctcacagctgtaatcccagtgctttaggaggctgaggctggaggaccactagaggctagaaatttgagaccagcctgggcaacatagcgagactccatttatacaaaaaatggaaaatatgaggcatcagccaccgtgaccggctcagactgtactcttatagccatctgaaatacgttttctaggtagagatagattgtgtaagggtacagttgtgaggataacagaaacatggcagattatttaaaatca

SEQ ID NO: 205418 - DNA, 304 bp, Homo sapiens
ttaaaaataaaaggcaagactataacctgtgtaggaatagggagagttatgacactgagtgttatgaaatatacatttccattttctccagtttctataaaataaagctagtccattgtctatgatatgaataacatcatatcctgaaaaatatttaagttatttccttttgacattttatgttgattaaaaagtgccttttaccaggaaatgctcagtattcatttgaaatctttaaaatcaaatggtataaactgttgacttgttgagtatgctgttaaaagaatgtgagcacttcacggac

SEQ ID NO: 205419 - DNA, 189 bp, Homo sapiens
tgcagtcttcagtgtaaatatctgaaaatggttatattgggagagacaaaaagatcttccaaatctctcttatacatctgttagtctacaagagcttgccaaaactgtattctgaacttttacaggatcctgcctcagcctcctgcgtagctgggaatatagctaaacgccaccacagcgggctcgtta

SEQ ID NO: 205420 - DNA, 532 bp, Homo sapiens
atgcagggctggcatcttgtttgtgaaacgggtcccttaggcgggctcccccggggagccccagctcttcacagaccagctgctccccgctgccggctggtgcaatcagagtctgagaagcagagccatagcaggcaagagcccacctggaggtacccagcgtagagctgctgcacgtggacactccacaacccaaggacgctgttagtgaaaaaactgaggagttgggggagggagcagaggcaggggtgggggacattttccagggcctaccccagatgggtcaggcggctgttccctgagagcctcatatcctgacatcacgccacgcccagctgagaggtatacagacccccagaggttcactaacagggttcagagaaagcgctcctctgacaactttaatcttggttcccagtgtcggaccctgttgattttaatgggccaagacccaatcgttttgataaatcctatgattaccttatagcattgtaactgttgtgtcatttatataaacacttaatatacatca

SEQ ID NO: 205421 - DNA, 492 bp, Homo sapiens
tccttaatatacaaagaattaacacttaataaaaatgacagcttaaaccataacaaagtaaaatataatgaagattatttaaggcttgttttaagtctgtctgaatttcttgtttacttctagatttgcatggcttgaacgttagaattggggggaaaatagcagttatcaaggaaggtagcataatatgttaaggacatagactttgtggcatatttcttggttcaaatcctgattcttccatttactgttaatgtcatttatactctgtatgtctcactgtgttcataatagtaatatctaccacacagagtagtgaagatcaagcaagacagtatataaataaaacttcagtatagcactgcagtgagtttagataggtgtacactttgagagaaacctctgtaagaacaccctcacttctggcactagtttcaagtttgaggcattcccaaaaccatccacagggttgataaatcactggaagattga

SEQ ID NO: 205422 - DNA, 614 bp, Homo sapiens
ctgaagtgagtcttagaaccgattcaggacgcagatttctcctctgaagggtcacagccaccctgtgccctaccttggactcgcaagggtttaggatcattcgttgatgtcaagagcaattgaagaatttctaaggaacagttaaagatgacttacttttttttttttttcatttataaaaatgctatggacccttttaagagaatcggcatcatgaaatgagagagaaagtaggatggctctgaaatgtttgagagtgagttcaggagtggtttactcctgacgcatccagcagagatgcctcttaagcaccagccatggcagacagtgtcctttgtgctaggaatacagtggtgaaccagacagccatggccctctctcagggaacttaccttcgagtcaggggcagaaaaactaaataaaagtcaataaactatatctatatacagatacctatatatttgagatgagggtcttgctccaatgcccaggctggagtgcaacggcacaatcacggctccctgaagcctcaaatgccttggctcaagcaatcctcccgcctcagcctcccaagtagctgggattacaggcgtgagccgccacgcctggctaca

SEQ ID NO: 205423 - DNA, 604 bp, Homo sapiens
ctcttataacgagtcatccaaggcactgccagtcaagcatccctgtcctgcaacaaccgagctagaggcctctccctcagtcatccttcctttgcatttctgtggccgcccctctactccatgccttcatcatgccatgtcactattaccaccgtagaatccaatcctcccatgccagtccctccaaacacctccaaacacacaatgaatcacagcataattcatttcatttattcagcaaatactgaacagcttccaaatgccagcactgttctaggacctggggataatcggaaaataagatgaagttctttactcttacatatttccataaaagcaagggggttcccacaaaagtgatgtcaagtggtaataagtaaaaaacgagcaaacaacaacaacaaaaactcaagcaagtttagttaaggggtcaagaatgatgaaaaggtaggtttctgttttactcaaagtgactgaaaaagcctctctgataagggacttggagggaatgaaacagctggctgtgaagatgtgggaaggagagtgttctgggtagggaaagcagctggtgccaaggctctggggcaggtgcatgctgctcgtg

SEQ ID NO: 205424 - DNA, 466 bp, Homo sapiens
acaggaaatgggcttcagagaacccagtacatgaagatgtgcaaaatgccttgtatagccttttttagtttgcctttattgctgtattgtaatagatattaaaatagatatttacgaatgtcttcagggtgagtcacagctcttgtttcccagccctccctttctcaagtcttccattcctccattgcaagttttccagcacagatattttcagaagctggattcctgtattggggaagttgttctgcactttaatcaccgacttgtacctacacaaggggagaggttgtaactcggggagctaatgtaaagagaagctgtaccattcaacatatgtatatgaatgttgtcatttttactttacatgcatttatttgcttacagaaaattgcatagtgcagcaaatctataaaaagtcaagctttattgtcaagaagcttagagtgaccaaagacaaagggagacc

SEQ ID NO: 205425 - DNA, 389 bp, Homo sapiens
agggattagctttagagctaggaattagagattacaaaactcaaatagtctaggtagtcttctcaaattgaattattaataaatactagaataagaaatccaggccaggcgtggtagctcacacctgtaatcccagaactttgagaggccaaggtgggcggatcatctaaggtcaagagtgtgagagcatggggccaacatggtgaaaccccatctctactaaaatacaaaaattagccgggcgtggtggtgcactcctgtaattccagctactagggtggctaaggcaagagaattgcttgaacctgggaggtggaggttgcactgagccaagccaagattgcgccactgcactccagccttggtgacagagcaagactccatctcca

SEQ ID NO: 205426 - DNA, 355 bp, Homo sapiens
tttttgtttcttttgagtcagaagaagttatgaaggggaaggaagacatgcttgagctctttaagaaagcttggaatgtttctatgtgtgcaatagaaatatttcttgccaaatgataaaatgacagctacaagaatgtttctattcagaactattcaatagaaatatgatataaaccatatatgtaaatttaaattctctagtagtctagtagtcatgttagaaaaagtaaaaagaagtcaggcaccatggctcacgcctataatcccagcactttgggaggccaaaatgaaggatcacttgagcccaggagttcaagaccagcctgggcaacatggcgaaaccatgtctctac

SEQ ID NO: 205427 - DNA, 810 bp, Homo sapiens
actcatattccttagctttttccacataaccagagaatttacctacaattcccaggtaccacagatgtgggtgctttcaagcctctgtaaattcactaagttgatgagaaacctggatattagtaattaatggcagatctgaaatctctctagaaccttcctatgtggccaacatatgtcttcctgtctaatttgtcaagatactctgcaaagtcaatcctagtacaaggctccatattcatcttgaagctttttcttgttttaccagaattctggttttaattttttgagtagcaatccatgttactctttacatacccaagtcaagggacaaagctaagccacatgcttgttttgttcattatccaatattatgtaagtctagatgactgactccattagtttaactccaggtgacaatgtagatatagatccaaaatatgtttctggacaatattaatagaaatttttatgaccttggaacacacccttattctttcattcaattattttttcttctgcactagcagctctcaagtgaaaagaaactccctgctttagctgtatatgaagaaaagacctcccaggcccttctggaagagctgtggaaaggcaatccttatgttagattccttcccaagaggcttcttacagcgacatgaggttaagatcccatcttgttggggggttacatgcttccatggtctccagaacaacttgcttaactaattcaaacttccaggttcctttctaaattcccagtccctctctattaattccgccttatatatattcggccataaaacaagg

SEQ ID NO: 205428 - DNA, 484 bp, Homo sapiens
ccaaagtaacttcttgtacttgcacttttatccacatattgattttacaagtttagtacttatttaagggtctctccctcttgtcttatgaatctttgacagatatccaacttttgggcaaataattcgtaatggaataaaaaaagaaatagggattttacatgagaacagtccttaaatcattcctagagactatcttaaaatagaagcactgagatgacattctttccacacaggcattgcatcctgcctctatctgccatcacctgtttgggcactgccaaatagaacactgtaataatttaaaagtagtaaaaagtgtatctttatcaggtaaagtatcaaaagaacagtgacaaaataagtggttaaaagtgcaacccttgggagagaacttgagttggacagttttagtatgctctatatgttaagaattttttaaagctcatatggaaaaataagaacagttagaaaaactgttaaa

SEQ ID NO: 205429 - DNA, 625 bp, Homo sapiens
catttcctcctaactaggaaagttaactcttcagctacatggtggtacacaatgttgtccctgctcagcagcccttgaacactcattaaatcccacattagagctgcaaggagatagtaacatttattaggtgcctcattttttttttttttctctgagagcggatctcgctctgttgcccaggctatagtgcagtggtaccatcagggctcactacagcctcaacctcccaggcccaagtggtcctcctgcctcagcctcctgagtaggtgggaccacaggcacactcagatattttaaaaaatttttgtagagactatgttgcccgggctgccattgtttatccattgattttttattttatttacttatttttcttttgtcttttttgttgcctagtttcccccctgttctttgcttcttaattttggttggtcaaaatctttcttttaacattttgtttcctcttcaaccttgggaattcttctgtttctattctttcttgccttttccttgcttcatttcaggactcctttccaatgaacctgccattttttcctgcaaagattgtagtttaaaagaaagcccactggcctgaaactttatgtagctaagcagctatttc

SEQ ID NO: 205430 - DNA, 804 bp, Homo sapiens
catttttagacaggatcccactgtgtcacccaggctgaagtgcagtggcaccattatagctcactgcagccttgaactcttgggctcaagtgatcctcctacctcagcctcccgagtagctgggactacagaaatgtcaattgcctacctgatggctgtgaaaaacagaaagaagaaacaaagacatatctgtatgtaaaggttgagcttgaaaaaagaaaactactcttgacgctgaagaacgcaatccaacatgaaagaatgcttatttcaagttttacctgaatctacctagagctgaatttcttatctatactttactacagatattctgctttgtgcagatctacaatggatcattaaagtcaaaggacaattacttatctttctactcctcccagtacccaagacctgagagtgagatattaaattcgtccttagatctttcatgcaatgttacagctctttggaactcctcatgaagctcctcctctccatggtggaattttactctgaggagagataggctaaaatgtttcagtcccctatatgataagtccaaaatcaccgtttcacatatatgctgacctgatacattgagtcactgatacgtgtctttccaccttcagtatattttctttgactagctttattgcttccctgtgatgctgaattttgagcatggatgtgtgtgtccataacaaaaccatcctaggtaaactgaatttggttatttgaatttcataattactctttactccaagtgttgtggattcatgatgcaaatttacccattcccattgc

SEQ ID NO: 205431 - DNA, 585 bp, Homo sapiens
ccattcccatcactgtcagtggaaaaactgtcttccacaaaactggtccttgctgccaagaggttggggactgttgctctaaagtgttattctttatagctgtctctgcttttccttaatgctattctccttctttttgactttgaggagtttctctgctatgcaacaaggtattgacagagtttatcaacagcggcagtattgacatttcagtctaattctttgttttgaagagctgtcctgtgtattgtaggatgtttaacatctctgacatccacctagtagacactagtagccacccctccacaagttgtgacaaccaaaaaggtctctagatattgacaaatgtcccttggaggaaaaaatcacccctagttgaaacctactggactaagtgatgcaagtcccctctgagctcttaagtagaataatctaggaagaaatttggtatatatttcaattaaattaagtcacaattattattgctttaagaaatgagtttatttagatgttcaaaatgttgatccacatacatttttatgctaaatagcataaaggtatatactctatctttacttactttaa

SEQ ID NO: 205432 - DNA, 431 bp, Homo sapiens
cttgtttttagtactttgcattcaaccccaatccccaacataacttcattatgtttaaaaatataattttaagaaaagattatttatgttgttttcagatagtccttttgaaccgtcttaccagtaattaagagataactatgaggccttgcacactggctcacacctgtaatcccagcactttgggaggccaacgcaggaagatcacttgaggtcaggagtttaagaccagcctggccaacatggcaaaaccccatctctaccaaaaatacaaaaattgagcaggtgtggtggcgcatgcatgtagtcccagctactggtgaagttgaggtgggagagtcacttgaacccagaaggcagaggttccagtgagctgagatcatgccgcagcacaccagcctgggtgaaagagtgagaccctgtctcaatta

SEQ ID NO: 205433 - DNA, 785 bp, Homo sapiens
tctctccctagtttctctgttttaactgtttggctctttcccattttctgtctggtttcccatttgtcaatttaatgataatatattgtccctctccaggatatttgcagcccagcctccgataaaaacaatagcagccaccatttacttatccttactatgtgtacttttagactgccttttatctctaatcctcagaacaatgctgaaaggaagggtttattattttaatttaacagaagaggaaaccgaggcttagggaagttcaatgacccacccaaggtcacacaatgcagggtttggcacttaagaggctcaaagtaaatgtttgctgaatcaatgttgaaagaattagacctcaacccaggtctagttcactccaaagcctcttgctctttccacacactgcaccacacctgcctttgtggcccgcaaagctgtaaatttggcctgtgaaagtcagcaagtttctgaaaaggccttagcaacacagaccaagctgaagacaggggaggatgtcagctaccgtggatgggccccattccccgtgatctagttctgaacactcaaattcagaaagcaagccggctcacttgtcaagttagtgttttaaaagatgattgcttctcagaacgtttttgactaaaggaaccaaggaggcaggtagccaaacctacaggcagcatcgaatagagatgggaattgctcagagattgggttccaactttttaaatgtggtcgtgttacttgacaacatgaaaactttcatctcagcatttgtaagc

SEQ ID NO: 205434 - DNA, 506 bp, Homo sapiens
gacaatttacgtgtatcccctgagatccctagagataatttttctgtggaatgcaaaagttacactctcaaatccagaacatcccagagccattctcccgagcaaacatctaaacctaagttggaattcatagtttaactgtgactgcctgaaaaggactaaaagctcctggttggttgacaggaagattttgaaaagagggagtaaggcctactcatctcataaactacacaggatcccaggatttaatagagccatggatcctgagtcatcactgaaaacctctagtctaggaaaattgagattgaggaagggttggggtttcagccctcaggatgtagctccttagggaatgccctaaatcaggattggatcctgggtacaaggagaaatggagcaagtcacctttacccctttcacatttgtccattgcagactactcttttgcaaagagtgaaacaaggaattagaaaataatagaacagtttttcctcatattatgtatt

SEQ ID NO: 205435 - DNA, 230 bp, Homo sapiens
ataagggttttcttgattgaataattttaatttatgtaaatttttatttcaagaaatgttttctatttgatagagtgagtaaaattgtggcctttcccctattttggaaagtgaataaattcattaaacccctcttcatgagcactttctgaaattttaaataaaagaagagctaaccgcttgcagtgagctgagatagcgccactgcactccagcctgggcaatagagc

SEQ ID NO: 205436 - DNA, 226 bp, Homo sapiens
ccagactgtcagctctacctcctactagtgatgtgaccgtgggcaagttgcttaacctctctgtgccttagtttcctgccaaatagggataataatggcactcttcacagggacgttgaagggatttaatgattcagttatctgtaaaatcctgagaacagtgcctggcacatagtaaacactgtgtaagttttgtgaaataaatttcgagggccagtgtaacttc

SEQ ID NO: 205437 - DNA, 235 bp, Homo sapiens
caagagttccgtgctagtgatggagatgtggaaaccaggtcaaggtgctgacttgggaacatgggtggtgactggggcacgtctcagttgagatgcttgttcctccggcagggagggattgagaagaatgcgagttgcccgtctaatttggcaagttgtctgtattagtctgttctcatgctgctaataaagacattacccaagactgggtaacttgcaaaggaaagaggtttaa

SEQ ID NO: 205438 - DNA, 298 bp, Homo sapiens
gagaaagctagaaataaacactatggtgttagattggaatttgagatattgtagtaaatttattgttttcaaatataagtattcaatatacatcatgtatttgtacagataggtgtataaatgtattatgtacatgtatatattcccaactctgttcattgagtgtgtctgagagcagtgacaccccagtagcagtaagcacacctagcacaacagccccttggagaaatgattgatccagggtctgggctagggaaagcacaagatgaagctaggacatcttagtgtaccagaaagc

SEQ ID NO: 205439 - DNA, 533 bp, Homo sapiens
tcacccatatgagctgtgtgtgcacactgagacccaagctctggacatatgctcattaagtgaaatggccagcattgaatcactcagccagtctctttccttgttcagtgctgtaactctttgttaggaagacatctgcttgtaattctttagctggctcccttcctttgaactgcagttattttttcacatctcaggtgatttatttcgttgcccgttcttagagggaagtctgttcttgtctagtttcgtatagtttcgtttagtttagttttgttgctgggttttgctttattttttaaaattttaaattagaatagagatgggatctctctatgttgcccaggctgctcttaaactcctgggttcaggcgatccttccgcatgggcctcctgaagtactgggattccgggcgtgagccaccgcacccaggctgctttgttttaatatacctgcctgtgattaacagatggcagcacaagggcctggagtatggatgacccaagaacattacccctcaaaacatatgatc

SEQ ID NO: 205440 - DNA, 577 bp, Homo sapiens
  misc_feature (8)..(8): n is a, c, g, or t
ctctaganatcccgggttccttgtctctactaaaaatagaaaaaaaattagctgggtgtggtggtatgcgcctgaaatcccagctactcaggaggctgagacaggagaatcgcttgaacccgggaggtggaggtgcagtgagctgagatcatgccattgcactcctgtctgggctataagagcaaaattccgtctcaaaaacaaaacaagacagacaaagggaaacaccggtttctctcctgtgtggactctttgatgcatgcagaggctggaggtgtgcctgaaggccttcccacactcttcacatttaaagggcttctctccggtgtggactctctgatgcatgcaaaggtttgaactattactaaagccccttccacactcactacagacatacggtttctcacctgtatgaactctcatatgaatttgaagatgggagctccaattgaaggctttgccacactcgtaacatttatagggcttctccactgtgtggattttcttatgtctattaagttttgttgtagtgctaaaatccttaccacaatcatcacatttatagaccttctctcct

SEQ ID NO: 205441 - DNA, 410 bp, Homo sapiens
aaacatgatacgagtcgagcgcggaccggtgtatcgagtccactgcacccagcccatgatattttttaaatgaagttaattggccaagtttggaggatggtaggaagacaattcattaaattgaaaactggtaaataaagagcagatagaaagaatcaagcatttattctgctcttcccatataaactgtagcagagtaatcagtcaataagggaatctcttcacaaaaatattgcaactaattgttgggaaaaagctgagtgttgcgagggaaactgaggcagggcttgcataatgtcctctcgaatgtgtctgggattcctcccaattggtggggaagtaacagagtggaatgaatcttgactcctagctatggtccaccctgcactgcagggtggcatcgataaaca

SEQ ID NO: 205442 - DNA, 748 bp, Homo sapiens
aaacatgatacgagtcgagcgcggaccggtgtatcgagtccactgcacccagcccatgatattttttaaatgaagttaattggccaagtttggaggatggtaggaagacaattcattaaattgaaaactggtaaataaagagcagatagaaagaatcaagcatttattctgctcttcccatataaactgtagcagagtaatcagtcaataagggaatctcttcacaaaaatattgcaactaattgttgggaaaaagctgagtgttgcgagggaaactgaggcagggcttgcataatgtcctctcgaatgtgtctagacttgctggctccttgcttctagctctcctaggctcctattcccattatctcaagtagcagaacatgttccatataaatgctaaaccatcacagctgtagaccatgcgcctgcccttttgacctccacattctcaccacctatttctttgttggattaccaataaataccgtggggtcccagagctcagggcctttgtgggctccacaatagccatggccccctggtgtcccacctttctctctcaaactgtctttttctcaatcctttgaatccaccggactttgtcacccccacgacctggtgttgggtctgatcaccccaacactaataaaaagaaacgatagaattagaatatcatatttttgcaacaaagcacaaaagaattaatatagtcattaagcatcaagggctaataccacaaagagagaca

SEQ ID NO: 205443 - DNA, 636 bp, Homo sapiens
gcttgatgccagctagaggctgcagtgcactatgagaacacctgtgaatagccactgcattccagcctgagtaacatggccagaccccatctcttaagaaaagaaaagaaaccctgaaccagaggagcagagctgccaccacttagtggtggggatggggcagaacagctcagggcaagacacaggccttggatgccaatgccagccgtcagatattgagcaatgtgtaagtggggttagcctgcaggagaacctgctcgccacctcctcctcttcattctttaggtgatccccattgacctagacaatatctttaatatagagttctcctgatttttctacacaattttacagggcatacagaatatatttcctgtccaataatgacagaaatacttgattttgaagagtaacagttatagcttggaatagaagactggaggcagtttgagggccgacttcagagtcctggttgaaatgaaggttgagaagtataatgcagtcagtgcaggtgactttcagctgggtatctagtcctatcagaggtaaaaactgtggttgccctaaccaaaacaataggactaagagaccttaaatgaaagatgaaagttattatagagagaaatgatcatactg

SEQ ID NO: 205444 - DNA, 203 bp, Homo sapiens
atcctatttttaaaaggctccagatttccaacctccctagatatctcattctgccatacaaccttgtcatgtgatttgggggaaatattatgactgttctttgcccttcctaatgctatcttttctcaaataatatagcaatacatcttaactcacttccaagatatataaatgtgtataggtgcagaataagatatctaggg

SEQ ID NO: 205445 - DNA, 391 bp, Homo sapiens
acatgtaatccaaatttccgaaaagcagtgtcttgatctaacgatgtacaggttaaaacttgtaactgtatttggatttcatgtatagtccacctgtttgagaattctgtggtcacagctacagatgttgactgatttactcagctgctcagtctctgcataaatccaccggaagcagccatttctgaaggtgtgtacctctcctaaaattggctcacccaggggtccatcttcactgtcctcgcaaacactccactgaggccctgacctctgcaaacaggtgctctgttgcagtatttttttttggaggattatttggacataaggagataaagctgttttgctcaacaagggagacataaatcggtgggtctcctacaaaatgtgaaat

SEQ ID NO: 205446 - DNA, 431 bp, Homo sapiens
ataatctaggataatcttatttttaattagtcaccaaaattttatttactctcatgtcagattaactatgctaccattgagtggtctctagttatggtggtggcaatgtttatgttttagtcaaaataataaattcagatggttttagaaaattaaatagaacttactgtaatcccagcaatttgggaggccaaggcgggtagatcacctgaggtcaggagttcaagatcatcctggccaacatggtgaaaccccatctctacaaaaactacaagaaattagccaagcatggtggtggacacctgtaatcccagctactcaggaggctgaggcaggagaatcagttgaactggggaggtggaagtggcagtgagccgagatcgcaccactgcactccagcctgggcaacgagagcaaaactccattcaaaa

SEQ ID NO: 205447 - DNA, 487 bp, Homo sapiens
ctgcaacatcagtctgtgctctctactggattactctcagcagcagctactattttgaaaacattctccctttgacatccatattctcttctagctgcctcatttctctgcaattgtttacagccaaacttctaaagagctgcctacacactaattctacttcctcgcctcccattctctcttcaacatactccaatttctaccatccccaccactccttccttgtgaaatctctttcaaggtcaccaacaaccttcatgccatcaaatccaatacacatttgttctgaccttgatcttcttttgatctctcaaacagtaaacacattttgatgtcccctctttcttgaaatactctcctcttctgtctctatggcagcacaacatcctggttttcctcttccctgaaggcttgttccttcccagtccctttctgtttttcccgacttctttgttggctcctcttctctctatatgatccctaaata

SEQ ID NO: 205448 - DNA, 243 bp, Homo sapiens
ctttacaaattacccagtcttgggtattcttatacccaacgcaagaacagcctaatacaagtgggtctgtgtaaccaccaccacgctgaagacacagactatttccatcaccccaagaagtgcccccatgctcttttatactcaattctctcttccgccccaggcaaccactgattttatttctgttcttacagatttgacttaccaaaatgttatataaatgaaatcacagttatatggagt

SEQ ID NO: 205449 - DNA, 579 bp, Homo sapiens
cccatctctactaaaaataaaaaaattagccaggtgtggtggcacgtgtctgtagtccctgctgcttgggaggctgaggcaggagaatcacttgaacccgggaagcagaggttgcagtgagccgagattgcgccactgcactccagcctgggcaagaccgaggctgaccccgcgctcagccgagtgagaccccgtctcaaaaaaagaaagaaagaaagaaagaaaagaaaagaaagaaagaaggaaggaaggaaggaaagaagaaagaaagatgtattacacaccttttaatttgaattaattaggcatgatcattattgaaaattggtaaagtatagattgataacaaccaaaacgggaaaatattcatttaaaactttcccaaataaatgccccatgtataggcctctattaaaataataacagtaaacattttttgaaccactttatatattttaagatttgtttagagctttttcatttgcacgggaaaatattcgcctttttaaaacaacagtaggaaacaaattgaaaaagaaaggaaaaatccttgctttttacacataaaagttttctttg

SEQ ID NO: 205450 - DNA, 470 bp, Homo sapiens
gtgaagctcctgctatgcctgggaggccttgggaggaggatgaggtctttccagaggtgtagctggaccctggtattaaccatcaggaaaatgtaaccggggggaggacaggaatccacatgcggaaagtcctgtcccaccttctcttccctccttgggctttggagcaccgcagggtggagctgtgtggccctctcagcccttctgatccagggacctaggagccttgactttgaggtctggatgtcacagaaggacacagcaaggataaaagtggtggcccaggaattaggaagctggttctggaccctgctctgccacttatagtgaactagaattaaacattctgtgtctcagtttcctcatctgtgcatgaggttgcactagaccattgcaaataaacatcgaggctccagttgcttccaggacatctgcgcgcacacacctctcaccatgcccctctgctgcca

SEQ ID NO: 205451 - DNA, 161 bp, Homo sapiens
tgtgctatccacagaaacctattccaaagaatgccatgcacaggtacaggagttaggaccaagttaagacagtcatgctgaattagggtgggtcctaatctggcatagctaatgtccacatatggaagggatggacacagggggaagacagtaatgtgaag

SEQ ID NO: 205452 - DNA, 426 bp, Homo sapiens
tcaggagattcttcagggcactattacattgtaatggtgaagagtgaagcaaaagtatgtggaaactagtttagtgaatggaagaagaggtattccctgactttcattttctctaggaagaggttgggattatttacaaataaggtaaagtcgaagacttagggaacaggaggacagtttgtaatagatactgtagaaattagactagtgcaacttgggattttttttttcactagcttaattagaggtcttaaattgaaagcagcaccagtatacatcattgtattggttttgttcagcagtctgattacatgcttatgttgtgctacttcaggttggtacattgagagtaagatattgacatgatggtggtctgactaatggaacatggaatataagctgtggaaggaaagaagtaaaagtgag

SEQ ID NO: 205453 - DNA, 649 bp, Homo sapiens
tactgccttgctttgcttaagttgcttctttctgcacgacagtcaagttgtcttcagatagaatcgtctcatttgtttttttctttttcaggtctaacagtctatgctttttgttgtccaatttctgaaaacacttgtttctgatattttgttcatgttttgagatggtggtgctgggagagttgctgcagtatcaggtactccactgcggccacatgcagaagtctattaacagctattttaaggattcaataaaatatataggccccttcacaccctctttttctttagtgatttattttccactattctccactaaacctgtttcagacttctttagctcaagctactaaactcgcctcttcttttcttgctgccggtaaatgatcttgccttctacttctctgagaaaataggaagttgccttgtggtactccaccaaattaatacatttcttgtccctaacttaatacttgctcaattctatacctgttcttgtcttctttcccttatctctcaacagaagagttgtccttctgcctgtctgaatgctgatctctctctgcctaccctctaggtctcatccattcctatctcagaattcatgttatgattcattctctttctcctacttctttattttcttatt

SEQ ID NO: 205454 - DNA, 413 bp, Homo sapiens
taacacctaagtcataagtcattcaagaccagaagtgggcaggagtgagctaaaaaatacaggctcttttgctataactaagaattggaagcctcccacagaaaggaaacaggaactcccgtgggtggccccaaatgaaaagacagggcatgccaaagccctccagcaaaaaaggggagggtctgctggcgagcctgagccaaactattagcttacggggaaggaaggaaaaagaaccttgtaaagaaagagtcagtcgctcttgatagcacatgggttaatacagggatggagacgggaggtagacagggcgtcctcacagcctgatgcaggggctgccagtgaacagactagtcttgccagcgggatgagaaagatcgtgcaagtggcaacgggactcaggtggtgtgggg

SEQ ID NO: 205455 - DNA, 358 bp, Homo sapiens
taattttatgactcatttgggttggatcactttaatcttgaccaattaaaagagttctccaaatcataaattatcatataaaagtctaaatcccacagcttcaacagctatgtctgcaccagttacgttaaggagcactacagaacctcaaatgaatccaatatgtagaagaactctgcatcttgggcacaaatgtttgataaacctgattcaccacaccatatgatttctgttaccagggacattttgttgctctacttaaagattatctgtcttagtcgagtgtgttccctaaaatgaaaggttttaccctatcatgtaattactgttgtaaaaataaagccagatttgttttatg

SEQ ID NO: 205456 - DNA, 708 bp, Homo sapiens
gttgtacaaagggcagtggaaacttgaagcgaagagtttatctgtggtttgagagggacagcgtagaatgctctcaggggagcctcacatttgacattcattttggagaatgacaggaggcttcaccttgcagtcaagattgtatggaaagggtgtcaatggggcaggcatgttgtagtaggtggtgatgtaattacaaattatgactggtcaagactgctgagcagacagatggtagagttgaggttttcttgtggtagagtgctattcaacagttaagaataaactttttctctgtagttcttctattaaaataaatctgaaaaaattcagtaatttttttggatacaggtgttttttgggttacatggatgaattatccagtggtgagttctgagattgtagtgcacccatcaccttagtagtgtacattgaacataatgtgtagttatttttatccctggccccctcccaacctccctcatctgggtctctggccccctcccaacctccctcgtctgagtctctgaagcccgttatatcactctgtatgcctttgcatactcatagcaagataggggttttggttttccactcctgtgttatttcactttgaataatggcttccaggtccatccatgttgttgcaaaaggcattattttgttcctttcaatggctgtttttctccaaacttctgtctctgagag

SEQ ID NO: 205457 - DNA, 569 bp, Homo sapiens
atttggcggtgcttctgcacttctgctggagagaagggcagaaaaaaacctttacagatgcaaaacaagaaggcttctcattaggcatttggattaagaactattgctcaagaagccctgagcaaggcctacaagttctgatctctctaacctcctctcctatgactgtcccccttgtccatgggcctctgccatgctggcttccttgacgctccgccaacccttcagacacactcccacctcacgaccttcccgggggctgttccctctacctggacgactcttctctcagacctctcgtatcttcaagtctcggctcaaatgccacctttgcgaggaggaaaaagatttcttttctttcccatgatatttatcacctcctactacaccgtataatttacttaattatctataattcaccccgtttctcctttccccctcaaataagctccaggaatgcagagatctctgtcctgttcactgatgtctatcacaagcacttagtgcctgacacacagtaggagctcgagaagtattttctgaatgaatgcagaatggacgtcttgacc

SEQ ID NO: 205458 - DNA, 472 bp, Homo sapiens
cttttattctgcaggttggatacactcttgttgtagaatctacaaagagacattttgaagttcattgaggtctatagtgaaaaaccaaatatccagtgatagaaactataaagaagctatctctgaaaatactttatgatgtgtgatttcatttcacaagttgaacttttcttttgattcaacagcaggttggaaacactcttttgtaaaatctacaaagaaacattttggagtccattgaggcctatagtgaaaaactgaagatttcgccttgaaaaccagaaacaagctatctgtgaaaatgctttgtgatggaagatttatctcacagagttaaacgtttgtattgattcagctggctggcaacactctttttgtaaaatctacaatgggacatttcagagaccattgaagtctacagaaaaagactgaatatcccatgattaaaactagaaacaagctatccatcaaa

SEQ ID NO: 205459 - DNA, 459 bp, Homo sapiens
ttcaggaatgtagtcattatcttctagatcaagggtgtccaatctttggcttccttgggccacactggaagaagaattgtcttgagccacaccacacataaaatacactaacactacgatggttaatgagttaaacaaaaaattgcaaaaaaaatctcataatgtttaaagaaagtttacaaatttgtgttgggccacattcaaagccatcctgggccgcgggttggacaaacttcttctacatgctattagaattttgccagatgggaagaaagagacagatgttagaatggccagtttcctgcgtcttttcatttcaggggaatggctcatgagctacggcctgtctctccctccatttcaacagacgcctgccaaagctgatctaggtgcaaagggaaaatcccagcccctgatatcctctgggaagacctctgtttcagtgcacgagcctgccag

SEQ ID NO: 205460 - DNA, 692 bp, Homo sapiens
gcagtgcctacttgaacttcatagtccagcagccaccctctgcttccctgccctcctgatggggcaatgtggctgcccctctggtagccagttcacctatactgctctgagagtcataatgctggaagctcagcctcagccccttcctcctgcccttccaatccttttgtaagcacctgatgaagtccctttctgagctcaggtcgtgcctgtgccccacaactgaactcagatggatagaatgatctattaataggttgtttccagaacttattaaagtgtatatggtctggtatcaggtaactcagtatttcctaggaataaaatcctacaagtggaactgttagagccctttcactgtgcatatggctaaagtaaagcaacagagaagtgcaggtacttgtctgagttcacatagggaaatgggagcagcttggggtgctccttccattaattcatgctgctttgtcatggtcattaaacacccctggcgtttttcaggtgaagaggaccaactcagtttattcaaataacttgtgagagagactgctaattttctattcaaaagtctttcggccgggcacagtggctcatgcctgtaatcccagcactttgggaggccaaggctggcggatcatctgagaccaccctgaccaacatggagaaaccctgtctctactaaaaatacaaaa

SEQ ID NO: 205461 - DNA, 503 bp, Homo sapiens
cttacttatctagtaaatcttttgttttaaatcagactgataaatgatgggaattgtcagtccagttaacaaactcattttgaaatcagcatgtggtattcaacagtgtttccctccagcggttatgtgtatgatattgaatttaatatgccatgaatttgcttttaaatacacaaatatagggtatattttgtgtatatattgatgtatttattttgttttcatagtaaaatccaatcccaattagttttataatgtaaataaattacaattaataaagtagaaatgcatattttaaaacatgtttacattgttttaatgtgtagcataggtttttacttgacagctctttgcagaaccatatcatttagttaactaataaatctggaaacttaaaaaaaattatgagctactttaaataattttagagagtacttgcaactttaaaatgtttagtgaaataacttgtatttgtattgtacctttgtttgaaattgtaaaaa

SEQ ID NO: 205462 - DNA, 485 bp, Homo sapiens
ttttctggatacagaggatgtgctatattccagagcgttaaaaaaacaaaaaacaaaaacgctctatgactcagtttcctcattcacaaaattgggataattataaaatcagccttctaaagctattatgagaatcaaatgagatgatacccagaaagaacatgagtgtgagggtcagaaagaatgacaggcaaatgtgcagcctgcgtttccttcctgtcccccttcccaatgcccagcgtgccctcctccactgctcagcacagccccaccttccacacccagcaggtccctcctaacacccggtaagggccccatcatactcagagtccttgacgagggccggcagaagagattaactagcatggtgtctgtgaacaatgtatcctgaatcataagcaagcaaacaacttttgaacttcctagtgctacctttaagtagttaaaaatcaccctttgctaaaagagatgtagaaaaaaaaaaa

SEQ ID NO: 205463 - DNA, 461 bp, Homo sapiens
gccacagggacctctgccctggaaagccaggtattgtccaaggtttctccccatgtgatagtctgaaatatggcctcatgggatgagaaagacttgaccgtcccccagcctgacacccgtgtagggtctgtgctgagttggattagtaaaagaggaaagcctcttgcagttgagatagaggaaggccactgtctcctgcctgtccctgggaactgaatgtctcggtataaaacccgattgtacatttgttcagttctgagaaaggagaaaaactgccctatggcgggaggcgagacatgttggcagcaatgctgccttgttattctttactgcactgagatatttgggcagagagaaacataaatctggcctacgtgcacatccaggcatagtacctccccttgaacttaattatgacatagattcttctgctcacatgtttttttgctgaccttctcctt

SEQ ID NO: 205464 - DNA, 398 bp, Homo sapiens
tacatacccaaagaaataaatacctgtacaagactattcatagcagctttattaatactagcctcagattggaaagtgtccaggagtccactaaaaggaaaatggataaataaactgtgatctactcatacactggaatactactaagcaacaacaaagaaggattgatacatacaacattaatgaatctcaaaaacatgctgaatgcaagaagccttatacaggagcatgcattgcatgattccattcatatgaaacttgaaactgtaaaaagaaagataaatggtgaacaaaaccacaacagtagctgtctcagaggggctagggtagaaaatgattgcgaaagagcagaaagaaactttctgcggtgatagcaatgctctgtatcttggtaaatg

SEQ ID NO: 205465 - DNA, 626 bp, Homo sapiens
tggaaagaggctacaatgaggctatctatggattttcagtgggtaattttaaaaactgtgcctccatggaagcttctgataatgcttctgtcctcacctccaccccgcctcccactgtgcttctataactggccttatgacaacaaatgaatctggcataagagagaagagcaccagagtaagtgaaacagaattgagtgaattagccgtctcgttggattctacccaatcacactgtgaaagtccattatgcattatgcttatattccattgtgtaatgaatggtaattcttctaatgataaatactggtcccctttggtaccaaccttagagttagaaatagcttaatctgttgagtaaatgaataaaaaccgcaagttgaaaacagcaaaaataatttctttgcttggaatatcagtgtacatatctttccgtgcaaagttctccacttttctcattacccattaacttgtttgttactctacaatctccatctgagagctaaaatctgctgcttactattcacaaggcagagagaattataaaacgttatacaatagtagcacacagcatagctttgaatctttccataaagtcatcataatggtacgttttctgagtattg

SEQ ID NO: 205466 - DNA, 801 bp, Homo sapiens
gtgacactggcctgccaggtgtcagcccagccagctgcccaggccacctggagcaaagacggagcccccctggagagcagcagccgtgtcctcatctctgccaccctcaagaacttccagcttctgaccatcctggtggtggtggctgaggacctgggtgtgtacacctgcagcgtgagcaatgcgctggggacagtgaccaccacgggcgtcctccggaaggcagagcgcccctcatcttcgccatgcccggatatcggggaggtgtacgcggatggggtgctgctggtctggaagcccgtggaatcctacggccctgtgacctacattgtgcagtgcagcctagaaggcggcagctggaccacactggcctccgacatctttgactgctgctacctgaccagcaagctctcccggggtggcacctacaccttccgcacggcatgtgtcagcaaggcaggaatgggtccctacagcagcccctcggagcaagtcctcctgggagggcccagccacctggcctctgaggaggagagccaggggcggtcagcccaacccctgcccagcacaaagaccttcgcattccagacacagatccagaggggccgcttcagcgtggtgcggcaatgctgggagaaggccagcgggcgggcgctggccgccaagatcatcccctaccaccccaaggacaagacagcagtgctgcgcgaatacgaggccctcaagggcctgcgccacccgcacctggcccagctgcacgcagcctacctcagcccccggcacctggtgctcatcttggag

SEQ ID NO: 205467 - DNA, 261 bp, Homo sapiens
gaggaccccaagcgttatactaatcaagaaactcagatgccttcttgtgtagtgattgtttgaaagtgctagttacttggcagcagtcagacactagcagagaccacttaagacccaacagaaggccaagtctcacaactttcattcgacacagtgcttgtttggggtagggtaaggtggagaattattcatcacaattccagtaaatagctcctggccacagagcgttacattagtcaaaaatgagtctgagcacaagag

SEQ ID NO: 205468 - DNA, 606 bp, Homo sapiens
tattatcttggttttgtatttcataaagacttctagtgatccacattgggtagtagggtgacataagtagcagttggaagtcaagcatttattaagttaccagaataatcctagataatagaaattagttgacttttaacctaagcaatttgatgttttttttaatagcccgtttaagaaaaataaaatgcctccctacaagcctgtctccttctcatgctgctgctttcttcttcaaattcagtcttcttggaaggatagcacatactcactttcatttatgctgtagtcaccacagcccagcatggccccctccacgcttgaattattctcccattcattggtgactacctcagtccagctggcattgcgcagttagttcttcccttactaatagttgatgttgactgtccctccttgaaacattcttcatccctgctttcttgaacattttttcaccagttcttcttctgccccctgtcagacttcgtttcattgtctggctttacctttccacatacttgaaaacattgtgtccacccaaaccgttcttttctttcgtctttacgaagatcgatagatgcatcgcgccatttctcatcagtt

SEQ ID NO: 205469 - DNA, 816 bp, Homo sapiens
gacgaggacgacctggaggtgttcagcaagggaggttgaatgtcactccagtttctcaagttgctgctgagagaagacctgagttcagatcacaacgctgtattcattactaagaagcctgttcattttaacgttacctggagatattaggatgcctcattgatggacatgaactccttcagccctatgatgccaacatcccctttatcaatgataaaccaaatcaagttcgaggatgaaccagatttaaaggatctcttcatcacagttgatgaacctgaacagtcatgcttactacaatagaaactttcattacgtactaggcatcacttactaacgacatctcgtgggcgaatctgcactccagctgaactcttgaagcttcaggagcacgcatatcaaggacttctccctctggctcggacagggcacaaacctggccaacgacagctacgacgcccgacatcctgaattctatttcccaacccaatatggccagaaaacacaagcttgcattagctacacaagggaaactgggctgggcaatcggcctgttatataccgcaacctgcaccgtctccagtctggaaggtaaccacccgtccagtgtaaacgtggcctatgaacgcagtttaccacaagctctctacacctgagaaaacgcccgggcagaagtctatggacaatagggaactccccaattgccccgagcacagctatatcttcatgcgccgaactagcgttagaagccttgggcaacagatggaaaccattgtgtccgacaacagatatgcgtacgagtccacactcctttca

SEQ ID NO: 205470 - DNA, 330 bp, Homo sapiens
agtttggctgtgtccccatccaaatctcatcttaaatagtactaatccccacgtgtcaaggatggtgccagttggagatagttgaattatgggggtagtttcccccatactgttctcatggtagtgaataagtctcatgtgagatgatggttttataaatgggagtttccctgcataagctctcttgactgccaccatgtaagatgtgactttgctcctaatttaatgccttctgtcatgattgtgtggcctccccagccatgtggaactgtgagtccattaaacctctttcctttataaattacccagtctcgagtacatctttattag

SEQ ID NO: 205471 - DNA, 226 bp, Homo sapiens
tgtctatatagaaaatctgaaagaactgacaaaggcaaaataaaacaactcttggaactaataagctattatagcaaggtttcaagatacaaggctaatatataaaagtcaatcactttgctgtagacgatgaacaaatataattttaaatgaaaaacacagtatcatttgcattcacatcaatgaattaaattcttaggtgtaaatccaacaaaatacgtagaat

SEQ ID NO: 205472 - DNA, 824 bp, Homo sapiens
aaactgactgtcactcacctgcttaaaacccttctgtggtgggttgcttgatacatgaactccaatttcgttaatttaatacaaaaggtcctccatggttcagctcctgcatattcctcagccttatatcctgacactccatttttcataatttaaactctagtaattcttaattggtcatatttacccatatatcttaatattccactgccatacttttgctgaagtcattctttctgtatgggctatttttcccctcttccaacccccttccctagtttattctatttagtgttccaattcaggggtcatctgctttgcccatatccagagggttagctggccctctgggctccatagactcctgtgcatagtctagtatctgcacttagtatattgatggtaatcatctaccctactaaatttgaagcaccttgcacagaagggccaagtttcagtcatctgagaatttccacctactcacttaagacctggtacatgagaattgtgaaataaatgactgtcggagagagagagggggagagagagagaaagagagcgtattctcagagcaattctactaagttctaatgatttccctgagagtcagaataaagataattttggggtggaagctgagtcgtagagaggttgaatgagttgcccaagttctcttggctgggtttagagtctaattttgactcctagcccataatttccatcagtaggcagtactgccatccacaacctgatcctttaacattcagaactgcgtgtattaatggccctggctcacttgggaatgcccaggcactattttggag

SEQ ID NO: 205473 - DNA, 280 bp, Homo sapiens
aataattcctaaatctctaacattataggaggaaaaggtactgaaatacaacagactttactttttgttttaactgtcccatgcacagcaacacatggaagttcagttaaaatctgttttgtggttagattctataagctctgaagatgtactggtaatcaagttccagaatttaaagtacatcagatatacctgacacatctaaaggagttttcacttttgtaaaacagaatatactataaccaatgaatactgaaactaatgttagagatacggtacg

SEQ ID NO: 205474 - DNA, 232 bp, Homo sapiens
agacacagaccttggacctatgtgatacacgattattgttattcgaggcaggaaacaaaggtctttgatcactggagaaaggcagggccggccaaggcaatatgggaagcaggctgattacctatgcaagcccttcctccattaaggcctcctagcctgagctgcagctgaccctgggtggtatttccagcctttctcagcctcaaagcaacacatttattcagggtctcca

SEQ ID NO: 205475 - DNA, 447 bp, Homo sapiens
cggtatggcaatctgagctaagacaagagtcaagtaggcagtggtaagtgcaatggagacaagcaaatgtggagcaagaaggggtccaacagggagagctgcaattaaataaaattgcactgagaagatgacatttgggtaaaatttaaaggtgagagaaaaaccatgaatatatgggatgggtaagggattgggggaatgataagatagagcaagcaattttgtgaatgccccaaggccgcaggatgcttggaactgtgcaaagagctggaacagaatgaatggaggaaagagcaataggaaagaaaataaaacacaagagatggggggcggggggcagattttgcaaggccttgtaggtttttgcaagatcgtggcttttactctgagactgaaagacatgagaagattggaccagaggagtgatatcatccaatttgcgtttgc

SEQ ID NO: 205476 - DNA, 512 bp, Homo sapiens
gttctggctagtgtgtgggtggtcaatttcagatgaatttcacacatgcaggcagctgcaccctgccaagttggaggtagtgatccacatgcgggcccttacactctgatgttcctgggactggctcttgcgtttgcagttgaggagggaatggagagatgagcctgcaggagagaggcagcctggtggcggcggtgatcttggtgttaacagccagcacttattaccgcatgtccagcactgtgctaagtccattacgtgcattataccaaggaatcatcatagccgccctatgaggaaaaggtactgtgacatttttagtcccactttacagaaggaactgaggtagcactgaggggcccgcttaccagaggattccattgcttcattttcaccttagtctgatccttggtcctgctcatttgaagagatccctaaagagacatcagtgacattctccgggttcaagtgagtaatggcatcagatattctgtcgagagagatgagggctt

SEQ ID NO: 205477 - DNA, 533 bp, Homo sapiens
cacacttgcagaatctgtgaactcaggaagtccttacctgcataatttgtggccattttaaactaaagaaggaagtctctctcacattgccatgctcactcccacacagcttgcacctccaggaaggtctggaaaggccatttgccccaggtgtaaatgacacgcagtgctgagaagcaggaggagcctggcagagtggatgagctgcagtggaagagagaggtccccttggaaagtgggggtgtggagggagggcttagggccactccagatgctgctcctagctggatgtggtcactggactggtcaggggtaactggactggatggggtcactggctggtcagcgttcagagaggaagcgggagagcagagcagcagggcccaggggatggagcgaggactcctaccagctcgttaactgaggctgggagtcagtctgtgctcagccagtcccgtgcccaaattcttggaaccaaattgaaatatgtacttttaacaaaaccagtgtttcaattttcccttaaaaataaa

SEQ ID NO: 205478 - DNA, 233 bp, Homo sapiens
ctgttgcgaggatgctgagtaggagatggctaaattacaggtaccaatttttaaaaagtgacgtttccattccgaatatcatctggcgctagtttctcgtgtggacataggagagtttcattacggtacaggtctctaaagcagagagaaccacaattattctcagtctgtctcatttattaggtcagaatatatggtaatagcctgctgaaactcagcatttctgaaatcag

SEQ ID NO: 205479 - DNA, 482 bp, Homo sapiens
tttccccatctgcagaatggctggctccatgctcccttaacatacctcccagtctcaacctcaaggcatcgtggtttgtttgtgtgaactgcgcttaatggccctgtcagcaaggaggtgatgatcaggacaggattcacttcagagagaagagctggtgctcccatgaaggaccaaatgctatgtgtggagagggccacaagaggaggacccaagagggacctctacaagctgagagttgagagtggtcccctgccaacagaaagtgagaaaacagggccttgctaatatggtcacaagaaaatgaattcttccaacatccagagggagcttggaagttgatctttctctagtcaagcctccatatgaggacacacctggccaacaccttgatttcagacttgtgggatcccaagcagagaacccagatgtgcctagacttctgacttagagaattgtgagctaataaacaggtgctgtca

SEQ ID NO: 205480 - DNA, 158 bp, Homo sapiens
acctgcttctccttcacgagctcccatctcagtacatggctccatcatctaccctggggctccagccagaaaactgggagtcagccttacagtctctgtaacaactactccctatttccagaaggtcctgcagctctaccccaacaacaaagccgcca

SEQ ID NO: 205481 - DNA, 174 bp, Homo sapiens
cagggcctgtgatttgctgaaaggattcacaggactcagcatatggttgtacttatggctatgatttgttatagtgaaggaggacaggcatggtggctcacagctcttatcccagcattttggggagctggggccggaggattgcttgagcctgggagtacgagaccagcctgg

SEQ ID NO: 205482 - DNA, 434 bp, Homo sapiens
ttggcccctattggaggaagcttctcttttggaaaagaagttgtttgagctatggcttaagagggtagggtaaacttaggtgcatagagggaggttatcccaggcatacaagacaacctgggcccaggcctctgaggaaggaaaaccagtcaggctggcagactggacctggtaggatgaaacgtgcctgttggcacagtgccctgcgggtactctgcagatgcagctgccagcgagagagggggcagggatgagaacaggctggcagagtagcgtccctggtgtctgtgctcaaagcagccatagcttgggcctgctctgggtgaaggagacggatttgcaggcagcttggaaaggtgcctctcataagtatccttcagatcatttatcagtaatgctgtgaggactctcccttcttttcgtttttgaatcac

SEQ ID NO: 205483 - DNA, 324 bp, Homo sapiens
ggttatttactgtattattcatcagcaggtactttgtgggatatatttgattcaattttgtattactgaactactggtagcaatggtgaacttcatttgctctcatagtttctgatagattaaacatcaatggttcagttatcttttgtcagatacagaagatgaatatgctgatttgcccaaccacattggcataatagtgttagttctattgtgagcttttgcgttcagggctgatattgacatttttctgaaaaagaagacatgtcctcaatcactattatggaacactgaatggctttggaatttagcttttgctcaaga

SEQ ID NO: 205484 - DNA, 340 bp, Homo sapiens
aatattctgatgggtttgaatgaaaacgttagttttaggacagccacagtggctcatgcctgtaatcccagcactttgagagaccaaagtgggaagatggaccagcccagacaacatagagaggcccagtcactacaagaatattttaaaaattagccaagcatggtggcatgcacctttcatcctagctatttgggagggtgaggtgggaggatggcttaagcccagtagttcaaggctgcatgcagtgagccatgactatgccactgtactccagactgggcaacagggtgagactttgtctcaaaaaaaaaggtggggggtgggggagattagcttt

SEQ ID NO: 205485 - DNA, 527 bp, Homo sapiens
agtcactgaggctcccctttcattagttccagttcactgcgtttggaaacaaaatctctatcataggaaactacagaaatagtggggccaattccccagctgaaactgattgtagagcttcttcagaaaagccacaatatcagcagtgctggttgaaaatgcagagattggggccatctctatttatctccataggacatacaacaattagcaaccaatgtcagtgccctctgcttcaccactatttctttatttcttcttcttggactcctggagtcatttagtttactaaagtgtatgcattatgttgctttctttggtaattaaataaatgatatgactggtctgtctatcctgatcagcatatcttttctgtgcactggtcagagccacattttttacctaaaatacctaaaaagactgtaatttttatgaaaatgcaagatttttcatatgttctacatgaggatatctgaaacttgacccatactgtcgtgttggctcaaataaagaaataaagcccaata

SEQ ID NO: 205486 - DNA, 210 bp, Homo sapiens
ttaacaatttttcatgtgactcttgacctagatgagtggtttcatgcatggccaatatgattgtggctcccagcaattgtgccatagctactctcccatctggcagtctgatccatcctccttttattacttgccccccttctgcatggaagaagtctttttcttccttagaataggtaggtaccaggtcaggtgtttgagggagtaagg

SEQ ID NO: 205487 - DNA, 303 bp, Homo sapiens
accctccttccactctaatgttccccaacctgtctgattatagatcttaagaccttctcatgagagagtaccaccctataccctgggggaaggaatgctgatgtcatgaagcttccattacaacccaagaggacaaggttcagtgagtttctggatagctggaggtttctggagggtggtgcatccagggaggtgcatccatagaagctccgcaccccttcccgcataccttgccctacctatctcttcatgtgtattttttgtaatatcctttataataaacccgtaaatgtaaaaacaaaa

SEQ ID NO: 205488 - DNA, 144 bp, Homo sapiens
gcagaggggccctagcattgcatggaaactgggctgaacaaccacagaaattcctctttgtttcttggagtgtgtgtgtgtgtgtgtgtgtgtgtgtgtgtgtgtgtgtgtgtaggtggtttcaacactctggatataagctca

SEQ ID NO: 205489 - DNA, 272 bp, Homo sapiens
tttgtcctcaaaaacccattttaacctatttttctaagtcttttctattacattagtggtgcttctaactacttggtttgacctgaattttgccaggaatttaaatgagatgtccaaatatggtgttcaggtgacgaatgtttccttcacatcttcactcagatgtccaggtcctacttgagtcatcattaggctaagcagcctatgttaaaaaatcgtaataataattaaaaagtctgagcctatgtcaatataactggtgaataatatga

SEQ ID NO: 205490 - DNA, 515 bp, Homo sapiens
gagggaaggagaaatgccaccaaatgccttttaaagcatcttcagagatttcaaacctgtctgaccttctttacatcagggcactgaaacacatgggagtaccaggcattaacagtatctcaaacccacgcaagctatattcctcacacagaggtttccttcttcagatggtggtggtaccatcccagagtgggttagctggctggttaaagaaatgtggcctactcactggtcttgaatcagcattccttgtgtggtttggaagtctttttatgatcgagtccctgcctcttcctctccagttgtgctggccttctttggtaattgctcattcttctgctgtctgtattactttcctatgtgtcttcgcctttactgggtgggtatagccctaacagaagtccaggttttaggagacctagagaatcccccaaattagagtcctggccttcagtgaatctggctatgggatgtttcacggaattcactccactagtgccctcacccttaatgag

SEQ ID NO: 205491 - DNA, 626 bp, Homo sapiens
atggtggtatcattaatatgagaattaagcaaagatctggatagggtgaaaaagtttattagagcaaggagtatctataaatttgttttgttactgtgattctcaattataaattatcgtggtctttctcagttatgtaagtccttaaaaagcccaatagtacagttggtattaaggaatttagaccttaggagagcttatgttggaggtagatatataaacctgtgaaatatatgttttatattcactaaagtaaaataattgatacctcacactaaattaaaatattatcagtagtattttatgcatattaaattagtaatactttccaattttgtttctcattaaattttttcagaatctctctctaggagaaagtacctggaagatattttcatttacaggatatcagcttttatatgctgataatatgcttacaagccaaatttgccctgatgtttgttcttccatcaaggatgttccagtctctctaaattgatgtgatttttctttctcttctcatgttgcctactgtagtttctttcacagtaacacttctcccctcccaggtctcatcatgctccctggggtagacttagagtaatttcaatgctagaatgtttaag

SEQ ID NO: 205492 - DNA, 382 bp, Homo sapiens
accaagtccgctgtgttctgttatcagcagtcctgggtaggcccagacccacctcacccccagcgggacccaggaaaggctttaaacctcaaacgtcccttttcgtaacactggctgtttcatgtggttaataaatcatccaataaaatgacacacataagcccagttatacactcgacacattaacactattgatcattgttatatgtccgggttaatcaacattacaatgctacagagaaatcattggtactaagagttgtaaggatgattttttaaaatttatgtatctcaattttttatactgttactttttacattttaaaaaatgtatattctgaaatatttttgatattttaaaatgttaatgtatcaagcattt

SEQ ID NO: 205493 - DNA, 121 bp, Homo sapiens
atgactctgggatgggtgggctctcaccatttttgttcgctgtcatatcctcggtgtataaaggaacagcgcatagtacatgcacagtaacacttggttgaaggaagagagggtggagaaa

SEQ ID NO: 205494 - DNA, 427 bp, Homo sapiens
acagatgctttacaaaacccacaattttatctggcccagaaaatctgcattaaccacgtacgagtatggtgaactctttctgacaccaatatatgtgttattgtacataactctgagtgttgtgctcatgggaaattttacatttattactattttttaatctaatactgttaaagaacatgtttaaaactctctttggaacttccttcagaagtgaagacatactcagtggaatactatcagtgatagcaaacttctgagtgtgaatctgattttcctaactagccccagggcatgtggaacaggtcctatcagtaattcaagtgagcaaacttgagtttgtaaccatttggtgttaaacataacttacactttatttgagaggatacaaacttagctataacgcaagtaaagatctggtatgact

SEQ ID NO: 205495 - DNA, 571 bp, Homo sapiens
cagcagatgccaggctcattatggacccagcagtaggtactttttgcttcttggtattccaagactttggaaatcctggttaacatgggaagatggtgaggtcttactgggtttttggccttggaaacagcagaggagagccatccactgcctttctgctcctgtgacacgtgggcagggtttctggcagctcttccttccctacctctccactggtctgaagtattgtttagaaatagagtaggttttatatcaaaagtctagttttttttaaagtctttaatgaagggattagggtctctttactagctaatgtgtttagattcattttgtcatcctcatgtgtttagggcttctcccccaggtggaatggtgtagaagaatctttctatgcctgtctttcagagacttcctgaagatggttcattcatgttagcgccagatggaggtctcttgaaaactcaaagaattttggctatcttcattatacttgagtcgcctaggcatgactggttgatactagctgggcacagaccagagaagcccacacattcaccagtgtcctgcctct

SEQ ID NO: 205496 - DNA, 493 bp, Homo sapiens
ttctcttctcttgcctctctgtatacaacccttagtgatttcatccaatgtcatgtatttatatagcatctacatgcttttgatgcccacacttctatttctggcctggtctattctcttgaacaccaggtccgtatatccaattatttactcagatccatgtggggaaaagaaagagagatcagattgttactgcgtctgtgtagaaagaagtagacataggaggctccattttgttctgtactaagaaaaattcttctgccttgagatgctgttaatctgtaaccctacccccaaccctgtgctccctgaaacatgtgctgtgtcaactcagggttaaatggattaagggctgtgcaaggtgtgctttgttaaacaaatgcttgaaggcagcatgcttgttaagagtcatcaccactccctaatctcaagtacccagggacacaaaccactgcacacaaaacactgcggaaggctgcagggacccctgcct

SEQ ID NO: 205497 - DNA, 253 bp, Homo sapiens
gagcatcttagcattgtgacgctacagcgggctgcagcgatcgccactttgctcctcagcagcaggcacccggtgaccctctggctggcaaatgagcccttcttaagggactgcttcctaggcccacctctgataccagctgtctcaggctgggtcctctagaagcagaccccgagaatatgatttgacaatgagtcctttatttgagaagtgatcccaggaagcaccagttggggagcaggtgagacgggga

SEQ ID NO: 205498 - DNA, 654 bp, Homo sapiens
gtagttcatggaaatataggagttcattgatcattgctgcctgtggtggtacacatgccccttaggagaaagccagattatctcgttttagtctattctaaatttatatttacttgctagggggtggcgagtgggtgttgcttgtccaaggtaatatctgtaaggtctccacagccctaaaactataaaaatggtgcttcagtacctataccaagggagacatccctggatcatgggactatgtttctctgccttgcagatacaaaccggaactgctcaatttaatggtttcagcagaagggtttaaaccacacatgtcaaagattagcttacctggatccacttggccactagatttgaagattttatctgcctttgcaggcaaaaacatataaaaatttgaaagattggggtcctgtttcctactcagtaccttaactctttattagagttagatcacctctgtcttagacagctttaatcatatataaccaactttgagaatttaaactggtccttagtatgagtatatcctatagttaattgggtccaatgcctaactaaactctggcagaaccttccactatgaggtaatactaatgtcctaccatctgcataaggcagaactcattccagcaggaattcccatctttt

SEQ ID NO: 205499 - DNA, 473 bp, Homo sapiens
atgaaattcaagtaggcttttatgtctgtaaagtagatggcattctgggaattgtagttcaaaaacaaaactgtcaaagcttgccttaaaaccaaggaaaatttctttcttcttgcttttataatcaataattttaaaagctgcctgacaaatcacttgagtcctacacttgtgttttgatgttactagaacctcctcaaagcaattattcccttgtatctgaccaaagtcaagccatagttcaatgtatatggatgagagaaaaccttttacttaatggaatttggagcagcattgactgtagtgaataaatgaagagtggagaggggatcttcacgtgataatccttaaaccccactccagaactggccttatgacactcagcactcacgaagaaagagatctgtgtaattcctagagcattagaaacaacctcttcagtcctggggacttctgaaaccttgtatattaaa

SEQ ID NO: 205500 - DNA, 190 bp, Homo sapiens
taatgatagcacacccttatgtgacatggtaagaacttaaactcttgtaagatagacgcttttttgcaagagtgttacagcccattattgagggaagaggtctgatttttgcttgaggaatacatcattaaaaagaacttctggtctgcttactgttttactttttccttgtggcaacagagatattttg

SEQ ID NO: 205501 - DNA, 402 bp, Homo sapiens
aagaggaggcttgagagcccaggaataatgataaaacagtaacggcccagggctaaaggaatcctccagaatccgagttctgtggatctaagttggcctgggactgcctgaggatggggcaggccctgcccagagccctcttggagccagcctccagcacctcctcagcctgaccttccaccttcagtgtttagagctgagagagcaggctacggggcacataggtcagccctgcattgcttacacaagtgggccaagactccaagaggggctgagatttggccaaggtctttgaagaaggaatgcccattcatgaaagaagagctattacaacttctgtctcttcccagagtcttctttccagctcttcctagaaaagcatggcctgctcagtcattctca

SEQ ID NO: 205502 - DNA, 131 bp, Homo sapiens
tttaataactcaagttagaatttccacatattctgtttacagatggctcaagctcagaattttgcttttcattcgtgaattattttctctcttcctctttctccaatttactattgtctaacagtttatac

SEQ ID NO: 205503 - DNA, 426 bp, Homo sapiens
ttgatccagtattttttagactatgtcatgaaaaatggaggagtcgcttcaattttttgtgttttggaaattagtgaatcccttagaagtaaataataccataatttccaatgttatgtcttgcttaagctcatttcccaatctttcaagctcccaatttatctttccctgaagtcttaacaaggattttgcatattgtaccattttctcctgatcctacttcttctccgtagtcataagaatttaagaattgcatttttggtctggttacaaacctggtgtcaagaaaaacagtgttttaggctgggcgcggtggctcatgcttgtaatcccagcactttgggaggccgaggtggtggatcacttgagatcagagtttgagaccagcctggccaacatggtgaagtcccatctctactaaataca

SEQ ID NO: 205504 - DNA, 494 bp, Homo sapiens
tacttttgacaggtacatgactgacatttgaggattatttatgccaaatttccccaagtttcccttgctgaaattttggttgcatcctacgcattttcacatgtagtgtttttttcttaatattgttatactttttacttttctttgattaaattcttatttttgatgatatttcttcaattaacaagcaattggaatatttctatataaacttttgttattagttctagtttaattgttctgtggtaaaaatgtagtttgtaacatttctggtttctattacaatatgatatgtctatataaatggtttattgaacttggaaaatgaggttacattttcagcttttggtgttcggagcttgatgtatgacaatttaatttttaaaaaatcattgttcaaatatgcttttaattttttttacttggctctgtcttagattaatgcatttttattttatctattttttaaataatataaaacatactctccaaca

SEQ ID NO: 205505 - DNA, 269 bp, Homo sapiens
aagagtaaattctacctggaaattcatgagcagtacatttttctgccttcactcaagatttttctgaatacatacaactgctaagctcacacagagatcaaggcttgttaagtaccaggcccacagggctaccactgttccaggtagtccactaaggaccggtgcgtaagcaggcctgcacagctgtttgtgatactagctagagctatggctggggcaaagccaagatcccattttcccctccctagttcccatgggagagaaaggca

SEQ ID NO: 205506 - DNA, 625 bp, Homo sapiens
aaatatgaagaaccaaagtgaatgttcaaaaatatctggacttctataatttaaacttttaaattaaatctgaaatttgcagactaaatttctcatattattcccaggaacaactataactctaggtcttacctaagagaaagtttgtgcttacaacagacttgatttgcccatgcacactaatagaggcatgttatatggctttataactatcttttaggtactcttaggaattaaaattgatataaaaggtctgtgcctgctattggcataaattattattatcattgatttaaaccaatgatttttgggaggtatggaaccaggtaggcagagagaggatattcgattgtagagacacaaatggtacagcttgaaaaaggctgtaccattgtttatataaaacaaaggctgtttccattgtttatataaaataaagtacagaaggtaagaaagaactcaataacattttcttgattggtaagaatgtactaaggaggcacagatttaaaaaaacaacactaagtgaaattgtgtggcttggagtgagtaatttttatatatgtagaatgctcttagaattctgtgcatgactagaatttttgcatattttggctgaggaata

SEQ ID NO: 205507 - DNA, 198 bp, Homo sapiens
ggtactatcggtggatacagaactaaatgtttgtaaacacctatagatgtgtataatacaaaagtgcaacttttactgtttgcacacacacatacactcacacacaatcagttaggatggtgggggaacccaggacagagttcagactgtaacaaaacaatctgattgtactacaaatgtaagatgtcagctcgctga

SEQ ID NO: 205508 - DNA, 408 bp, Homo sapiens
ggctgctgggctgtgtgtgtgtcgggtcaggtgggctgctgggctgtgtgtgggtcgggagggtggctgggctgtgtgtgtggaaagaacaaacctgggtgtacaatggatgcaggacctatgtcggggagcagggttggacaacactgccccccaagactgaaggagcagggatccccaagaaggcttccctgaactaccagcttcccgttcctgccaagtggcagaaggcgtatctggaaacagcagcctgctcagagcccacagtctccttactcaatgcacagtcaccctggagagaaccatgccacaagcccagatccaggacacactgtcatgcaggcttccttccccaccactcaggaaagcaaactgctacacttaaaaaggaacaagggcaagtctggt

SEQ ID NO: 205509 - DNA, 365 bp, Homo sapiens
cagcaagacaggagttaggcatgtcttctagtacagacttaagtctaactagagagggttttggcctcctctattctctatcccaggcccagctttagaattgatttcccctgctgtagagcatacatttggtgcattttatttctagacattaaattcttcttaggcttacttgtgtatactttcaaaatgttaagtagttacaaatttgtttttgtttagccctttaaaaagtggcccaggattaaagtaatgagatgaaactaatacaaactgaaggaaatatgacaatttgaggtatcttgggaacttcgttttaagtcattgcaatatttatagaatatttccacagataagaagaaatg

SEQ ID NO: 205510 - DNA, 377 bp, Homo sapiens
ctcttgacccatgaattcttactactctgaattttgagcagggtttacataaataataaattagagcaagctcaaagttagccctaaaatactgtcactttctcttgattttaatatactttcttgaagaggtgagagaaagcttgcactatccctaataggtaggaaattgtatgtcacctgcatgatagctgtggcctggggtcctgtccttccaaagcatggctgtccaaatcttccagtttaggaatctaaactggaaaatgtagccactgcgcagcactgccttcataccatccagaaaccagatatttcctttttccttaaagtgccccaggaatagagttactagatttaataaatacaaatacaggaaa

SEQ ID NO: 205511 - DNA, 1070 bp, Homo sapiens
tgccactcttctgggagaatgaggtttgcagagacattagataatattatctaataacagtactgttcgtttatataataaacttgggagatataggagggagatataggattggctaacttttatgtttatattatgttaatcaattattttttcttacataatatattgcaactcagaagcaatgttttgcttctggggtaatgtttataaacttttgcatgtgaagatgggcaatttggaagacttttggtttctggaagaacagaaatactcctgtaaaaattgagaaaatcttcacataggcagtgggaaatagaattcagacagcccctaagtcctttcttcttatggtttgtggtttgttattgtgctgcttacgtttgttttgagcatgtttttaagacttgaattttctttttttttgagacagagtcttgctctgttggccagagtggagtgcagtggcatgatctcagctcactgcaacttccacctcctgggttcaagcgattctcctgcctcagcctcctgagaagctgggattataggtgtgtgccactgcacccggctaatttttgtatttttagtagaaatggggtttcaccatgttggacaggttgttctcaaactcctgaactcaggtgatcctccagccttggcctcccaaattgctaggattacaggtgggagccaacggtatccggcctaagacttgaattttaaaaaatttataacaggatacatctgtatttaatcattatgaatattatttactcagttaatctgactgcctttgaccataatggaaaaagaaatttgaggcattttgcacacattattccaatacttgccagatgtgttggggaagatgcattaagttctgcttgtttaagctaatgttctttgacactgcccaagatttctgacaaaagaatgacaagagagggaagttaaactggacttcctaatgctcctcggttttgatgaggaagtccaaatttctaatcactgaaaggggaaaatacatcaggcagtaaggtgtctaaattagataacttagtggcttg

SEQ ID NO: 205512 - DNA, 1047 bp, Homo sapiens
cccaccgactcctacagctcatttctcgctcctgcagcctccaggaatgcaaataatttctcactgggttttggcgggggcgcggagctgcggagaagcgcgcgcccaacagctttcgccgcagctgggtccccgggcgctggcggctgcggcccccagatacaggcggaggctgcaatatgcacatgcggccacagtgtggcgccaggggcccgccgcgggacacgctcggagcgcgacgccccatcccatcatttacggatcaaaccaaataatctagaatcaagttgctgtgtgtgtcatactcctcctgttttttttccctaaacttttagtagagtcatttacatagttcagtttttacctcagctatgttacacagtggcaggaaaatattttgtctccaaactacagcccaagtatgagagcagcgtatcctgaagctaattagtaaccagaaaatcaggaaggtaaagcaaatctctggaggcaagatctggactctatggtatcgccgcttctccccacttgaagcgtctctttgcagtgccgcacttggagatttggacttaatcgttaaacaaacagaacagttacattctgccttcctacagggcaggggcctaggactggcagcatttttgttgtctctagaaatagaggggttatgagagagcctcaaaagagagggcaagaataacacatccatttctcatcatgagttacccccttgtatgcctagaacgcgtatggagacattctcttttagtaaagtcaaagagaaaagccatgaactaagtatcctgaacacagaggcgtgagccctctcagtctcacagtcccttaggagtcatttatctcagaagttggttgaaacaaaaacagttcatacagcatggtaggcagaattctaaaatgatcccaatgactcactcccttgcataatccccttgagtgtgggtggaacctatgacttgcttctagccaacagaatatgacaagggtgatgaaatgtcactcttgggattgctacattatgtaagactc

SEQ ID NO: 205513 - DNA, 913 bp, Homo sapiens
caagaacaaactaaatcagaattcagagttcctgatggctccacatgttgcattgcagctgaggccccctgtcctaaatgggctcaaccggcctagcacactcctcttggtggctttgggtgggtcagccttgcccagtttggggtcatagacctcagttattcatttaaccgatggccattgagggcttacccagtgccacactttgagacaagcatgggtgtcctgaaaagaaagtgttggcaagaaaacatgaacccaccattggactctcaactcaaaccttactgaagtcagtggctatagctttatctgcaaaggaccccaaagtgaggatcccacattgttactgctggctcttcatcccaccctctggagatgctaaggaagctcttgcccaccttttctagtgatggagtaggaactttgcataggacaaaccttcatgataggttactctagtatattccctcataaagtccaataggtaaattagtcttggcagcagaaggaacagcaggagaagtaagtgattcatcatctagaatccagaaaatttgcaccaacagatggcaggtggttataacacaacagatcttgccctgagaatatctggggacccagccaacagccttcaaggcagggcactcctgcggaagagatggcttgtgaacatgactgtggacccagagtcaccccagagctcccatataaaatgcttcacagagaaactaagagcagccttggggcattcattccaattaataaccttaaagactagagccagatccacctgcattacaaaagcaggcattcgaggaactaaactttgcttttgttcatgctcttacctgccgttttaaatgggtttctaatgtcaaataaagccaccctgcctcttgggacaaagatg

SEQ ID NO: 205514 - DNA, 659 bp, Homo sapiens
ctgaacttttctatttgtttgaaatatttgatgacaaaaatcacaaatatattttataacaagatatgtagaagacagcggttaaaaataagctcaataagtagtcaggagtcagattgcaaagtatcttctgtgtagcctgctaggtttttggatttcctgtataagcatatttactattttggtcttcattactcatctttatgtggaggactccaaaatcattcagctcaacccaacccatcctgctcctctgaatgtcagatttctctgtcctacttcccttatcctggcatcgctgtcaatgtagcatgctcaaagctagacatgttataccttaatctacatacctggccaggctccgtggctcatgcctataattccagaactttgggaggccgaggcgggcagatcacttgaggcaaggagtttgagaccagcctgccaacatgacaaaaccctgtctctactgaaaatgggataattagcccagggtggtggtacaccgagctcctcaggaggccgaggcacgagaatcacctgaccccaggaggcggaggttgcagtgagctgagatcgtgccactggcactccagcctggacaacagagcaggactctgtcttagaaaaataaaaagtaaaataataataataataat

SEQ ID NO: 205515 - DNA, 476 bp, Homo sapiens
tgtttcataggaaagattaaaaaaggccttcaaagccaaccatgtttgtttcctgtttttatccttcctatgaaggaccaacagtgttggttggtacttgaggaaatttatttttattgttagtttaaagccattctttaaatcacataaattcaggtctgtgatatctccttttctgtcaaattgagaacagcttcattactttatctctgcaagtaggatgtgaacagtataaatacagacttggtgcgtaagctactcctggagccattggggcctgaaacggcgccttgtgtattccacaaacgcgttcctactgctaagcagtgaaattcacccagtgttggtgggttattgtgctctagagagcatttggtctcttcagtgttattttgcttcctttcatgttctgcgtaagacttattttcaaagtttaattgaaagacacaaagctaaataaaattataccttaccat

SEQ ID NO: 205516 - DNA, 320 bp, Homo sapiens
ataagccttattattctatgtagctccagagggctaagctaagatctgtgaggaaaagtcataaagaagtttcttctaatagctttctaacatgcatatgttcccgctttgacaagcaatgagctctgcatcttaggaggcaatcaatccagacactgtactcctatactcagcaggaggtaggccagacgaccttcaagcttccctctaaaattctgtgattttcttgaacctcaaatctactagttatttttagacgtgaaacattaatgctgaatctaaatcatctaccattaataaaaaacaagtgacctgactat

SEQ ID NO: 205517 - DNA, 133 bp, Homo sapiens
tcagaaaaaggcatggagcagatctcccctagagccttcagaaagagcacagccctgctgactccctggttccagacttccagcctccaggaaggaactgcgagagaataaatgtctgttgttctaagccacc

SEQ ID NO: 205518 - DNA, 706 bp, Homo sapiens
tcaggtttcccggcagcacagagaacccttccacaaaagtagaagggaaagcaaatagttttactaaagaagcagcttcaaaccagagcgtgagccaccacgcgcggccccatcatacgaagttactgaagttattgcgtaaacattctgttttagtcatccttgaggatcgttttaactccttgatctgtaaaactgtcttaagcatcttaacatgttacatcacagggttttagctcagatttccaaagagccatattttttgatgcatatttccagttgaattccagtgtgaatttccagttgtactttgcattctgattctttgatatttgaacttggccatctgtgggtgctactctcgtaagactaaaaggcacctactaaatacgaacaaggataaccagttctaccaaaaacattaccaaccaaacctcccctgttcttttttcagactttccttttgctttcaacctcttaaactgtaaaggagagatttaatgtttccctattattctgctttgactcacatactaaaatgaccacatggcactccattgaatcttttcagttgttcacgaattaaaataatgcccatgttttacagtttttcgagtagtctcagcaatggatctgtagtttcaggacctgtttttaaaagatcaagatacttttatgtgtttcagaagtagctgttttttcattt

SEQ ID NO: 205519 - DNA, 1385 bp, Homo sapiens
tactatgttcatgtactacttcatatacttgaatacattgaatgattttattcagtgaactgatgcttacaaagtacttagcatgacggtatctggcatgcaggaagtgcttaatgttattggttattattaacaccatcagtgtcatacagtgtgtaagaaatcaggctctgggccaggcgcagtggctcgcgcccgtaatcccagcattttgggattacaggcgtgagccaccgcgcccagccttcctgaagctttttagaacatgacagtacttctctggattcagcactagcagagtcagagaactctgaactccccttgtacaaacataaactttgctttatatttatcccaaaaaacaaataccttatgatctgcataggagtacctagaaatataatctgggatcatttgataaaaatagtaaatagattgaagtaaaagtcattgctttatattataggaagtttgttttgttttgttttgtttgttttgtttttgagacggagtttcgctcttgtcccccaggctttagtgcaatggcgcgatctcggctcaccgcagcctccgccacctgggttcaaacgattctcctgcctcaggctcccgagtaactaggattacaggcgtgcgccaccatgcccggctaattttgtattttttttagtagagacggggtttctccatgttggtcaggctggtctcgaactcccaacctcaggtaatccgcccgcctcagcctcccaaagtgctaggattacaggcgtgagccaccacgcgcggccccatcatacgaagttactgaagttattgcgtaaacattctgttttagtcatccttgaggatcgttttaactccttgatctgtaaaactgtcttaagcatcttaacatgttacatcacagggttttagctcagatttccaaagagccatattttttgatgcatatttccagttgaattccagtgtgaatttccagttgtactttgcattctgattctttgatatttgaacttggccatctgtgggtgctactctcgtaagactaaaaggcacctactaaatacgaacaaggataaccagttctaccaaaaacattaccaaccaaacctcccctgttcttttttcagactttccttttgctttcaacctcttaaactgtaaaggagagatttaatgtttccctattattctgctttgactcacatactaaaatgaccacatggcactccattgaatcttttcagttgttcacgaattaaaataatgcccatgttttacagtttttcgagtagtctcagcaatggatctgtagtttcaggacctgtttttaaaagatcaagatacttttatgtgtttcagaagtagctgttttttcattt

SEQ ID NO: 205520 - DNA, 862 bp, Homo sapiens
tactatgttcatgtactacttcatatacttgaatacattgaatgattttattcagtgaactgatgcttacaaagtacttagcatgacggtatctggcatgcaggaagtgcttaatgttattggttattattaacaccatcagtgtcatacagtgtgtaagaaatcaggctctgggccaggcgcagtggctcgcgcccgtaatcccagcattttgggattacaggcgtgagccaccgcgcccagccttcctgaagctttttagaacatgacagtacttctctggattcagcactagcagagtcagagaactctgaactccccttgtacaaacataaactttgctttatatttatcccaaaaaacaaataccttatgatctgcataggagtacctagaaatataatctgggatcatttgataaaaatagtaaatagattgaagtaaaagtcattgctttatattataggaagtttgttttgttttgttttgtttgttttgtttttgagacggagtttcgctcttgtcccccaggctttagtgcaatggcgcgatctcggctcaccgcagcctccgccacctgggttcaaacgattctcctgcctcaggctcccgagtaactaggattacaggcgtgcgccaccatgcccgtctttactaaaaatacaaaaattagctgggcgtggtggcaggcgcctgtagtctcagctgtttgggagactgaggcaggagaattgcttgaacccaggaggcggaggttgcggtaagccgagatcatgccactgcactccagcctggcgacagagcaagactccatctcaaaaataaataaataaataaataaaaggccacacacacttgtgcg

SEQ ID NO: 205521 - DNA, 672 bp, Homo sapiens
aggatgcaaggaagaagatataggagagtaatctgccactatatccaacacttgtaacttccaactgtcattaattcagcttcacaactacttatctagtgactgtagtctacaagatatagccccaaagcaagtaagaagcagaaataatggcagaaaaagcagaatcttggtcagttgtttaagccactcccattctggttctgtccactggagtaacctgtagcaatcattatatttttagtccacttcctaaggcaaaaaaaaaaacttactaaaaacaaacaaacaaaaaaacacctgctcaaagcaagccattagttcccattctctcttactgacctaactgcttggttataatcttgcttgctatcagtttgtgatgtggcaaaacgtggaataagccaagcaaggaagactgtaaaaaggagattaagagccaaacaagcaattgggaattggcacccaaggtaaggtggaaggtgggagaaatactaaatacctcactgacctcttctggacagtcaatgatgatgggactttctaagcagtctaatctaaatcagagtatccagaaggaaagcagcagcaacctgacaggcaagccagaaataaataaatacacgacaacaacaaacagtctggaaggagagctgctgtgggggagtgaaa

SEQ ID NO: 205522 - DNA, 341 bp, Homo sapiens
atatcttaaaaggacatcctgttgtgctgagcaagtagcttcaggatggaggcaacattttaggtggagaagggctccctacctgcccaatcaatcatgtcaatcacagagatggtgaagagaccaaggtcacaagtagtttgcttacataacaaattgaaattataatccaaagcatccatattctacttcttaaaaatattaatgttcctatccattaaatgcattactcaatgctattggtttttgcaagaacagtaggtgaaaatttgtgggttgtttttaaaaaaaataattgtgcggagattatgttgtaggaaaataaaaaataaaataaaagc

SEQ ID NO: 205523 - DNA, 401 bp, Homo sapiens
  misc_feature (101)..(101): n is a, c, g, or t
gaatcgagctcggtaccgtatctctaacattagtataggtagacacagagtcagcaaagcagtgggggaaaatggtttcgaaagacatgccaaggtacgtnatagtaatattagaccattaaggtccaactaaaaaaagaaaattaggccaaaattaccttgcatgtttgactacagaacttggactttatacagggagtcaatgggacagacaagctttctactggaaactggctccagaagaaatgttaagattacctagaagtagtcaactggtgatgaaggaggaggagaataatgctacattagtataggtaagacacagagttccagcaaagcagtgggggaaaatggtttcgaaagacattgccaaggtacgtaatagtaatgttagagataag

SEQ ID NO: 205524 - DNA, 438 bp, Homo sapiens
agctattctaactggagtgaggtagtatctcagttgtagatttgatttgcatttccctgatgactagcaacgtgagcattttttcatatatttgttggccatttgtgtatcttttgagaaaagtctattcaggtattttgcacaattttaaatcaggttatatatttttttgttgctgagatgtttgagttccttatatattttgaataattaaccccttatcaggtgtatagtttgccaatatattctcccatactgtaggctgtcccttttactccgttgattgtttcctttgctgtatagaaactttttagtttgatgtaatcccacttatctgtatttgcttgtgttacttatgcctttgaggttttattttaaaaaatcttttatgcaaatggactaaaaaataaaaataaacccttgccttgatcaatgtga

SEQ ID NO: 205525 - DNA, 167 bp, Homo sapiens
acttagtgcggacacccgatcggcatagcgcactacagcccagaactcctggactccagtgatccctctacctcagcctcccaagcagctgggattataggctcatgccacctggcccagctttggagattttttttttaactggaagttttagggatgaagttgta

SEQ ID NO: 205526 - DNA, 393 bp, Homo sapiens
cattcccattcctgtgacattccagaaataaccatggctgagcagggacccaggacagcatctcagatatagcaacaaagtttgctcagttggtcaggaaactctgatagttagaattctgaattctagaaacacagagcttttgaactagaattctagaagcagagtgtgggacccacatttaaggttggtcccatcctcataagccccactggggagtttgggggactccatagcagccacgggaaaaaggtatggatggttgcagcacttcttaagatccatcatgatattaagcagcgacacctggttcccaccacctcgtgaattcaaggcctcaaaatttcgagtcaggatgtatttgtagtatttcttctgcatggggcctacatt

SEQ ID NO: 205527 - DNA, 842 bp, Homo sapiens
gtcaaggtctcgtccttactgctgtgtgtcctctgctcctagagtcccagcctctgtggccctatgacctgcaggtattgggagatccacaactaagtcgccaggaccccctggaagcctagaaatgggatcattgacatttagggatgtggccatagaattctctctggaggagtggcaatgcctggacactgcacagcagaatttatatagaaatgtgatgttagagaactacagaaacctggtcttcctgggtattgctgcctttaagccagacctgatcatttttctggaggaaggaaaagagtcctggaatatgaagagacatgagatggtggaagaatccccaggtaggtgagagtgaatacagacaacatggatgagaggtcgaaagtcaaggaggaagccagtccttaaagtgattctggaagctgtgttccaaaagaagtagtttctggagagactaatttttatttttattctttaattttctctcacacaggggcatcttcggtcttacacttttaaaatttctaagaattcttctttcccttcagtaatcttccttcaagtttacagtgacagccaaagtaccgttcatggcatacaagagagtgcacaatctttttgtttgtttgtttttgtggacacacagatatctgcatgattttaagatactccatgttaaactatcttataagttctctctttccatcatctctgaaatgtgtgagagtagtagtttctgtatctttggggtttttttgttcatttttctgtacatttcatcctgtttttattactgtagtcttgaaatatagtttgaaattataaagtaaaat

SEQ ID NO: 205528 - DNA, 784 bp, Homo sapiens
gtcaaggtctcgtccttactgctgtgtgtcctctgctcctagagtcccagcctctgtggccctatgacctgcaggtattgggagatccacaactaagtcgccaggaccccctggaagcctagaaatgggacggggtttcaccatgttggtcaggctggtctcgaactcctgatttcaagtgattcacctgcttcggcctcccaaagtgctgggattacaggggatcattgacatttagggatgtggccatagaattctctctggaggagtggcaatgcctggacactgcacagcagaatttatatagaaatgtgatgttagagaactacagaaacctggtcttcctgggtattgctgcctttaagccagacctgatcatttttctggaggaaggaaaagagtcctggaatatgaagagacatgagatggtggaagaatccccaggggcatcttcggtcttacacttttaaaatttctaagaattcttctttcccttcagtaatcttccttcaagtttacagtgacagccaaagtaccgttcatggcatacaagagagtgcacaatctttttgtttgtttgtttttgtggacacacagatatctgcatgattttaagatactccatgttaaactatcttataagttctctctttccatcatctctgaaatgtgtgagagtagtagtttctgtatctttggggtttttttgttcatttttctgtacatttcatcctgtttttattactgtagtcttgaaatatagtttgaaattataaagtaaaat

SEQ ID NO: 205529 - DNA, 511 bp, Homo sapiens
ttgatatgtctcgatcgttacttgaaagcgtgtaaaaaacaagacgcattctttgagcgcctacgggatgcgttagaaactgaggaccgaccaaaattaactatgtgtagactttgaacagtttgcagtttgttgaggatcacagggaaaggagctggagagaaacatacactatacttattatggctgtcaaaggacgtgtacgcagttaatatgggtggcttgaatgggtagggagcctaaagttaaggagtagtgttaatcaagacatattgaaaagatgaactaaagcatgctgtcagaggacaataaggtaattcatactggagagaaaccatacaaatgcaaagaatgtggcaaagcctataagtggtcctcaaccctcagttatcatagaaaattcatactggagagaaaccctacaaatgtgaagaaagtggcaaagccttcagctggttctcagtctttagtaaacataagaaaattcatgctggagagaaattctaaaaat

SEQ ID NO: 205530 - DNA, 238 bp, Homo sapiens
caggatctctatgtctcgatcgttatgaataccttatgttagtaaggattgagaacgtactaaagcttttgccacattcttcacataagagaattcatactggtgagaagccctacaaatgtgaagaatgtgataaagacttcaactggtcctcacaccttactactcataaaagaattcatactggaggaaaaaccctacaaatatgaaaaatgtggcaaaactattaattaattct

SEQ ID NO: 205531 - DNA, 3723 bp, Homo sapiens
gtcaaggtctcgtccttactgctgtgtgtcctctgctcctagagtcccagcctctgtggccctatgacctgcaggtattgggagatccacaactaagtcgccaggaccccctggaagcctagaaatgggacggggtttcaccatgttggtcaggctggtctcgaactcctgatttcaagtgattcacctgcttcggcctcccaaagtgctgggattacaggggatcattgacatttagggatgtggccatagaattctctctggaggagtggcaatgcctggacactgcacagcagaatttatatagaaatgtgatgttagagaactacagaaacctggtcttcctgggtattgctgcctttaagccagacctgatcatttttctggaggaaggaaaagagtcctggaatatgaagagacatgagatggtggaagaatccccagttatatgttctcattttgctcaagatctttggccagagcagggcatagaagattctttccaaaaagtgatattgagaaggtatgaaaaatgtggacatgagaatttacacttaaaaattggttataccaatgtggatgagtgtaaggtgcacaaagaaggttataataaacttaaccagagtttgacaactacacagagcaaagtatttcaacgtggcaaatatgcaaatgtctttcataaatgttcaaattcaaacagacataagataaggcatactggaaagaaacatttgcaatgtaaagaatacgtcagatcattttgcatgctttcacacctatctcaacataaaagaatttatactagagagaattcctacaaatgtgaagaaggtggcaaagcttttaactggtcctcaacccttacttattataagagtgctcatactggagagaaaccctacagatgtaaagaatgtggcaaagcctttagtaagttctcaatccttactaaacataaggtaattcatactggagagaaatcctacaaatgtgaagaatgtggcaaggcttttaaccaatctgcaatccttactaaacataagataattcatactggagagaaacccaacaaatgtgaagaatgtggcaaagcctttagtaaggtctcgactcttactacacataaggcaattcatgctggagagaagccctacaaatgtaaagaatgtggcaaagccttcagtaaggtctcaacccttattacacataaggcaattcatgctggagagaagccctacaaatgtaaagaatgtggcaaagcctttagtaagttctcaatccttactaaacataaggtaattcatactggagagaaaccctacaaatgtgaagaatgcggcaaagcctataagtggccctcaacccttagttatcataagaaaattcatactggagagaaaccctacaaatgtgaagaatgtggcaaaggttttagtatgttctcaatccttactaaacatgaggtcattcatactggagagaaaccctacaaatgtgaagaatgtggcaaagctttcaactggtcctcaaaccttatggaacataagaaaattcacactggagagacaccctacaaatgtgaagaatgtggcaaaggctttagttggtcctcaacccttagttatcataagaaaattcatactgtagagaaaccctacaaatgtgaagaatgtggcaaagcttttaaccaatctgcaattcttattaaacataagagaattcatactggtgagaaaccctacaaatgtgaagaatgtggcaaaacctttagtaaggtctcaacccttactacacataaggcaattcatgctggagagaagccctacaaatgtaaagaatgtggcaaaacctttattaaggtctcaacccttactacacataaggcaattcatgctggagagaagccctacaaatgtaaagaatgtggcaaagcctttagtaagttctcaatccttactaaacataaggtaattcatactggagagaaaccctacaaatgtgaagaatgtggcaaagctttcaactggtcctcaaaccttatggaacataagagaattcatactggagagaaaccctacaaatgtgaagaatgtggcaaaagctttagtacattctcagtccttactaaacataaggtaattcatactggagagaaaccctacaaatgtgaagaatgtggcaaagcctataagtggtcctcaacccttagttatcataagaaaattcatactgtagagaaaccctacaaatgtgaagaatgtggcaaagcttttaaccgatctgcaatccttattaaacataagagaattcatactgatgagaaaccctacaaatgtgaagaatgtggcaaaacctttagtaaggtctcaacccttactacacataaggcaattcatgctggagaaaagccctacaaatgtaaagaatgtggcaaagcctttagtaagttctcaatccttactaaacataaggtaattcatactggagagaaaccctacaaatgtgaagaatgtggcaaagcctataaatggccctcaacccttagttatcataagaaaattcatactggagagaaaccctacaaatgtgaagaatgtggcaaaggttttagtatgttcctcaatccttactaaacatgaggtaattcatactggagagaaaccctacaaatgtgaagaatgtggcaaagccttcagctggttgtcagtctttagtaaacataagaaaactcatgctggagagaaattctacaaatgtgaagcatgtggcaaagcctataatacattctcaatccttactaaacataaggtaattcatactggagagaaaccctacaaatgtgaagaatgtggcaaagctttcaactggtcatcaaaccttatggaacataagaaaattcacactggagagacaccctacaaatgtgaagaatgtgacaaagccttcagctggccctcaagccttactgaacataaggcaactcatgctggagaaaaaccctacaaatgtgaagaatgtggcaaagccttcagctggccctcaagacttactgaacataaggcaactcatgctggagaggaaccctacaaatgtgaagaatgtggcaaagctttcaactggtcctcaaaccttatggaacataagagaattcatactggagagaaaccctacaaatgtgaagaatgtggcaaaagctttagtacgttctcaatccttactaaacataaggtaattcatactggagagaaaccctacaaatgtgaagaatgtggcaaagcctataagtggtcctcaacccttagttatcataagaaaattcatactgtagagaaaccctacaaatgtgaagaatgtggcaaaggctttgttatgttctcaatccttgcaaaacataaggtaattcatactggagagaaactctacaaatgtgaagaatgtggcaaagcctataagtggccctcaacccttagatatcacaagaaaattcatactggagagaaaccctacaaatgtgaagaatgtggcaaagcctttagtacgttctcaatcctcactaaacataaggtaattcatactggagagaaaccctacaaatgtgaagaatgtggcaaagccttcagctggttatcagtcttcagtaaacataagaaaattcatactggagttcccaaccctcctacacataagaaaattcatgctggagagaaactctacaaatga

SEQ ID NO: 205532 - DNA, 1822 bp, Homo sapiens
acgagcttcgtgcagatcgtgcaatgtggcaaagcctttagtaagttctcaatccttactaaacataaggtaattcatactggagagaaaccctacaaatgtgaagaatgtggcaaagctttcaactggtcctcaaaccttatggaacataagagaattcatactggagagaaaccctacaaatgtgaagaatgtggcaaaagctttagtacattctcagtccttactaaacataaggtaattcatactggagagaaaccctacaaatgtgaagaatgtggcaaagcctataagtggtcctcaacccttagttatcataagaaaattcatactgtagagaaaccctacaaatgtgaagaatgtggcaaagcttttaaccgatctgcaatccttattaaacataagagaattcatactgatgagaaaccctacaaatgtgaagaatgtggcaaaacctttagtaaggtctcaacccttactacacataaggcaattcatgctggagaaaagccctacaaatgtaaagaatgtggcaaagcctttagtaagttctcaatccttactaaacataaggtaattcatactggagagaaaccctacaaatgtgaagaatgtggcaaagcctataaatggccctcaacccttagttatcataagaaaattcatactggagagaaaccctacaaatgtgaagaatgtggcaaaggttttagtatgttcctcaatccttactaaacatgaggtaattcatactggagagaaaccctacaaatgtgaagaatgtggcaaagccttcagctggttgtcagtctttagtaaacataagaaaactcatgctggagagaaattctacaaatgtgaagcatgtggcaaagcctataatacattctcaatccttactaaacataaggtaattcatactggagagaaaccctacaaatgtgaagaatgtggcaaagctttcaactggtcatcaaaccttatggaacataagaaaattcacactggagagacaccctacaaatgtgaagaatgtgacaaagccttcagctggccctcaagccttactgaacataaggcaactcatgctggagaaaaaccctacaaatgtgaagaatgtggcaaagccttcagctggccctcaagacttactgaacataaggcaactcatgctggagaggaaccctacaaatgtgaagaatgtggcaaagctttcaactggtcctcaaaccttatggaacataagagaattcatactggagagaaaccctacaaatgtgaagaatgtggcaaaagctttagtacgttctcaatccttactaaacataaggtaattcatactggagagaaaccctacaaatgtgaagaatgtggcaaagcctataagtggtcctcaacccttagttatcataagaaaattcatactgtagagaaaccctacaaatgtgaagaatgtggcaaaggctttgttatgttctcaatccttgcaaaacataaggtaattcatactggagagaaactctacaaatgtgaagaatgtggcaaagcctataagtggccctcaacccttagatatcacaagaaaattcatactggagagaaaccctacaaatgtgaagaatgtggcaaagcctttagtacgttctcaatcctcactaaacataaggtaattcatactggagagaaaccctacaaatgtgaagaatgtggcaaagccttcagctggttatcagtcttcagtaaacataagaaaattcatactggagttcccaaccctcctacacataagaaaattcatgctggagagaaactctacaaatga

SEQ ID NO: 205533 - DNA, 1787 bp, Homo sapiens
gtcaaggtctcgtccttactgctgtgtgtcctctgctcctagagtcccagcctctgtggccctatgacctgcaggtattgggagatccacaactaagtcgccaggaccccctggaagcctagaaatgggacggggtttcaccatgttggtcaggctggtctcgaactcctgatttcaagtgattcacctgcttcggcctcccaaagtgctgggattacaggggatcattgacatttagggatgtggccatagaattctctctggaggagtggcaatgcctggacactgcacagcagaatttatatagaaatgtgatgttagagaactacagaaacctggtcttcctgggtattgctgcctttaagccagacctgatcatttttctggaggaaggaaaagagtcctggaatatgaagagacatgagatggtggaagaatccccagttatatgttctcattttgctcaagatctttggccagagcagggcatagaagattctttccaaaaagtgatattgagaaggtatgaaaaatgtggacatgagaatttacacttaaaaattggttataccaatgtggatgagtgtaaggtgcacaaagaaggttataataaacttaaccagagtttgacaactacacagagcaaagtatttcaacgtggcaaatatgcaaatgtctttcataaatgttcaaattcaaacagacataagataaggcatactggaaagaaacatttgcaatgtaaagaatacgtcagatcattttgcatgctttcacacctatctcaacataaaagaatttatactagagagaattcctacaaatgtgaagaaggtggcaaagcttttaactggtcctcaacccttacttattataagagtgctcatactggagagaaaccctacagatgtaaagaatgtggcaaagcctttagtaagttctcaatccttactaaacataaggtaattcatactggagagaaatcctacaaatgtgaagaatgtggcaaggcttttaaccaatctgcaatccttactaaacataagataattcatactggagagaaacccaacaaatgtgaagaatgtggcaaagcctttagtaaggtctcgactcttactacacataaggcaattcatgctggagagaagccctacaaatgtaaagaatgtggcaaagccttcagtaaggtctcaacccttattacacataaggcaattcatgctggagagaagccctacaaatgtaaagaatgtggcaaagcctttagtaagttctcaatccttactaaacataaggtaattcatactggagagaaaccctacaaatgtgaagaatgcggcaaagcctataagtggccctcaacccttagttatcataagaaaattcatactggagagaaaccctacaaatgtgaagaatgtggcaaaggttttagtatgttctcaatccttactaaacatgaggtcattcatactggagagaaaccctacaaatgtgaagaatgtggcaaagctttcaactggtcctcaaaccttatggaacataagaaaattcacactggagagacaccctacaaatgtgaagaatgtggcaaaggctttagtatgttctcaatccttactaaacataaggtaattcataatggagagaaaccctacaaatgtgaagaatgtgataaggcaactcatgctggagagaaaccctacaaatgtgaagaatgtggcaaagctttcaactggtcctcaaaccttatggaacatagagaattcatactgagagaacct

SEQ ID NO: 205534 - DNA, 698 bp, Homo sapiens
gtcaaggtctcgtccttactgctgtgtgtcctctgctcctagagtcccagcctctgtggccctatgacctgcaggtattgggagatccacaactaagtcgccaggaccccctggaagcctagaaatgggacggggtttcaccatgttggtcaggctggtctcgaactcctgatttcaagtgattcacctgcttcggcctcccaaagtgctgggattacaggggatcattgacatttagggatgtggccatagaattctctctggaggagtggcaatgcctggacactgcacagcagaatttatatagaaatgtgatgttagagaactacagaaacctggtcttcctgggtattgctgcctttaagccagacctgatcatttttctggaggaaggaaaagagtcctggaatatgaagagacatgagatggtggaagaatccccagttatatgttctcattttgctcaagatctttggccagagcagggcatagaagattctttccaaaaagtgatattgagaagatacaagattcatcatcatgcctgtgagctgggtccaataatgaatcaccatcctacttgtggccaaatgcatatatgacagttacaactctaactgcagactgcatcggcatgtaaaatttaggtcaccagtgggctctctccatgtttgaatgtggtgattctaatggtcagc

SEQ ID NO: 205535 - DNA, 797 bp, Homo sapiens
cttctaatttccaatgtaagaccttacaactaaataactgcatttactcactcccctagtgtgatttttaaatcacattttaaacttttatatacgttataagccctactttacagtgttttattttgctttaaacagttatttgatttttaagtgaattatgagaaaggaaacagtttttgtgtttaccaatttatttaccatttctgaagctcttttttcctttctgtaagtctacatatccatttgatagaatttgtctttggtctgaagaacactcttcagcatttcttacaatgtagattgactggcaagcattctctcagcttttgtttagctaaaaatgtctttattccaccctcatttctgaaggatatttattattgatgaatataaaattctaggtcgatagccttcaccccccaagtactttaaagatatcattttactgttttctgacttccagtgagaggctgggaataattcttatttctcccatacatgatgtctccctgcctccctttctttttgtcccttttctggctgctttcaagattttttcttacttttgtttttaatcaattgattaaaactgtattgattctaatgtatctcagtgtggttctctttatatttatcctgtttgggattggctaaacttctttttttttttcttttttcttttcttttcttttttctttttttagacaagagtttcgttgttgtttcccaggctggagtgcagtggcacgatcttggctcactgtaacctccgcctcccaggttcaagcgattcc

SEQ ID NO: 205536 - DNA, 391 bp, Homo sapiens
gcgtaggtaacgctgacgatcccattctatcgctctccctgcctgccttgtggaatggttataaagatagaatgagaggaaggttgtgaaggtgtgatcaaggtgttacaccaatcattaaacattataaagtattgcaaacaaatggacttaggagtcacctgactgaggcagaaattccagttctatttaataggtttgtctgtgttatttgatccactttctcattataatagaggtggatgataacagcatagggctgtgataaacattaaattctgtaacttatgtaaagaatctagtgaagtatatgttgcacataacaggtactcaaaaagttgtgtttgggttagtcaggagtttgagaccagactgggcaacatggtgaaac

SEQ ID NO: 205537 - DNA, 148 bp, Homo sapiens
ttggtagagatggggtttcaccatgttggccaggctggtctcgaactcctgacctcaagtgatccacccgccacttatttttgacacattacattcagatggaaaaaacatagttgtttagggtgtgcccgtttttgtatgtaaatat

SEQ ID NO: 205538 - DNA, 950 bp, Homo sapiens
ctacgtaatactagaacaaatactgaagtaatagaacatcaagttaattgaatgactggaagagatctaaaaaacacattttccaaaaagaaattagattagaattaaggtacattggtcagtaatttgcctccaagatgagaagtagaagtgtcctgcttaggagttctggctactgagttaaatccagtctcttatacttgcatagttatttgaatagatctgtttgggtagtttgtgtcactctgagcaagttagctagtatttctttgctaaatttctcctactgaggaaaacggcttttaattcagtgctttgcaaggattagatgagatactgcatgtgaagctctctgcatcatttttggcacatagaagcagcttgataacctgtggctgctgctgctgttactgttattggctattgtaattttgtctcagccactgaactcagtccagtagagtcctcgtgattcccggtagaaaagatgcatgcttatggtaggcaaaatcctcaaatgaccgatagccttccccaaaaacttctcaatagtgttatatggtttcatgcaaactctgaaatggcaattaatccagggaaaagaaaaattaaaaacagaagaattaatcagcacatggcaagaatttgaagaaaggaagcaatatcttaacctagatagagtgcgctagcaaccaagccacacagtaaacagtcatgaagccaaatgtatcgcaggggataagtgaagatttgaaagtcaaacaaccttcccataattctgtaaccgatcccccaattcctcagcaaaacctggcatggtccaaaccccaaccctttggatctaattgcagaggcttttagaaaagagcagttatgctaagtcatgcagaactttctcataatcaaagcactgcaggggttggggattgggggtaggcaacaaaaacaaa

SEQ ID NO: 205539 - DNA, 613 bp, Homo sapiens
tccaatcctccatatggtgagtgctttctgagcagctcctaactactgatgggaggctcctgagaggaatctaagccctcctcctgggtgtaaaatctgccatggggatcctacttgcctctatggcttcaaacatgaccttgtcgggactcagaaagtgataccccaaagactggtgccttgacatgcttagaggccttagaagctgcctcagaatcgaggtccttctaacctggtcttgtcccacccccatccagcgaaggacacaagaacggacttgctctggaatttcctcatctggccaagaaagtttaacagtcacagtacgcaggggtcgccaacagaaacacaactgtttccctctcctccctgaaatttcattatctcagaaaagaagactgaggaatgcaaccacatctgagaagactccttcacaagataatacctgcctcttgggctcattcaaatttcaagaaaaaaatcatttccaagttaacttctgtccattcatttcctctaatgattgactgccccctcaaaagaaatgcctacatccccccccatctcccggctcccctatgaaaagggtatgtacgattctgtattgcactag

SEQ ID NO: 205540 - DNA, 155 bp, Homo sapiens
caaaagaattcccaatgagctatctaaattacttgttttgctggatgttacttgaccgaagattgcataaatgagctgtcacgattgggaccggatgatatttgttgtaacaagatttagcctgcagagggttatgaaatctggacctattctag

SEQ ID NO: 205541 - DNA, 153 bp, Homo sapiens
ggatacacccttatcactcttaaggcccaggggtcaaatccagcataccacctgttttcctaaatcaagttttagaggaacgttgcctgacccatttgtttacttatcctctgcagcttctgattttttttttttttttttttgagagggagt

SEQ ID NO: 205542 - DNA, 304 bp, Homo sapiens
tcaggaagattaaaaaagaatcagaagaacaatttcttcctagtatggcttggtgtgatgagtgtcatctgtattccatataaaattctttcagatatcaccaatgagtgatatgttcattacaatggggggtgtccctttctttggttcatgtataataactggaaacatgtatatagcatgtggtatgtgccaggtactcttcaagatactttagttatttaatctattgtcagataaggaaacagaggcttggagaggctaaacaacttatcctagctagaaagaggcagaattggggctt

SEQ ID NO: 205543 - DNA, 626 bp, Homo sapiens
cctatagatcagtctgtcttcactttggacactgcactatactccaaaaaggtacctctcatgcctgtcaccacatataaatgtaaatttcagtttcagtggaaatttacatctatacatccagactatcagatgacagatacaagcttggcaaacttaccctttggaatcctaacatgatcagctcagtcctgtctcactgcctatcccataaaagaccctctaaagtttaattccagccctctgctcttccctttaacagcataaatagctgggcgcggtggctcatgcctgtgatcctagcactctgggacgctgaggctggtggctcacttgagctcaggagttggagtgcagcctgaccaacatggtgaaactccatctccactaaaaatacaaaaactagccagatgtggtggtgcacggctgtaatcccagctatttgggaggctaaggcatgagaattgcttgaacccaggaagtggaggctgcagtgagctgagatcacgccactgcactcccgcctaggtgacagagcaagattccatctctgggcaggggaggggaagaaataaataaattgacacatggtagactctaacaggagaaaatgtcattttatttat

SEQ ID NO: 205544 - DNA, 193 bp, Homo sapiens
taagctattaaattatgcccaagtatgggaagttatgctgaagttgatatttcaactgatcttcaactgtgtattgagaaataaatagtactgtgatgaaaggaagtggaaataagagcctataccataacacggcactgtaagttggtgatattttctagatatggagaaaagatcattgtcacaggtgcag

SEQ ID NO: 205545 - DNA, 543 bp, Homo sapiens
tgccagcatcaggcttactataaagtctgaaaagccatgagccaattaaacatcttttctaataaattacccggcctcagatatttcttaatagcaatgcaagaacagcctaacacagaaaattggtaactatgagtgtggcattgctataaagatattggaaaatgtgaaagcgacttggcaactgggtaacaggtaaaggatggaagaactttgaaggctcagaagacagatatgatcaagtctgaaatttcttagaaactggttaaatggttgtgaccaaaatgctgatagttacatcgacagtgaaatccagattgatgaggtggaagggaattgctttatctcagatgagactttggacttcagactttttttttttccccaaaatgaagtctttctgtgtcacccaagctggactgcagtggtgcgatcacagctcaatgcagcctaaacctcccacgatcaatcaatcttcccacctcagcctcccaaacagctggaactataggcatatgccacaaagcccagctaatttttttt

SEQ ID NO: 205546 - DNA, 513 bp, Homo sapiens
caagcagttgatactgactcaaaactattctcaaaacctaagcctttatcatcgccatatgctttcagttacatcctgtttatctgaaatgttacttaaagttttagtttagtctctccatacagataggctcctagagtgcagaggccatggctcaattttcttctgtatttcctttcttcatggtgctcaacgcagagttaaatagtccacacccaataaatatttgttggttgactgagtatcttttgaaataatttattgtactaggaagaccactcattacattcatggcacattaaagctactcattcaggccaggcacagtggctcacgcctgtaatcccagcactttggaaggccgagatgaccagatcacctgaggacaggagttcgagaccagcctggccaacatggcaaaaccctgtctctattaaaaatacaaaaattggctgggcatggtggcgcaggcctgtagtcccagccactcaaaaggctgagccaggagaattg

SEQ ID NO: 205547 - DNA, 514 bp, Homo sapiens
aagaagaagaggcgagaacgaccccgggaccgaccaaagcccgcgcgccgccgcatcccgcgtacagcacctacatcccgccaccgtcaccgccaccaccatgcccaagagaaaggctgaaggggatgctaaaggaggtaaagccaaggtgaaggacgaaccacagagaaggtctgcaaggttgtctgctaaacctgctcctccaaagccagagcccaagcctaaaaagacccctgcaaagaaggcagagaaggtacccaaagggaaaaagggaaaagctgatgctggtaaggaggggaatagccctgcagaaagtggagatgccaaaacagaccaggcccagaaagctgaaggtgctggagaggccaagtgaagtgtgtgcatttttgataactgtgtacttccagtgactgtacagtttgaaagaccattttttaaatcaagttttataaaaatgcagaattttgttttacttttatttttcttttaaagctatgttgttagcacacagaac

SEQ ID NO: 205548 - DNA, 161 bp, Homo sapiens
ggcttaagggaatgttatagctgattcaattttctatccagattgctaaaactttctattagcaataatgctgtcttactttcttatcatttgtgtattcactggagtagcactttcaatttcgttcaagagcttccctttgtattcacaactggcttaac

SEQ ID NO: 205549 - DNA, 612 bp, Homo sapiens
gtgacattagtaaatggaaatgaggtgcggaaacagctggattggttacagtttggtgtttgccttatttctggattggttacagtttggcatttgccttatttgaacacgatttgaatagttggtcacctttgattggccaatacttggtgattagcagaagagtaggttatgctctgtttacacatatagttaggttacagtttactatggagaaaccttttggctgaatttaaaatatgtaaggaggcagctttaggctaaacctaatttaacaactgaatgaccaactgaaatacgtttttaggagaacatccagtaaacctgaagataataagaaagcctgaatggtctcattcagggtagaaagggtgagaaacagattggtaagactcaggtaattttctccttgctgtgaatttcttgtcttagtccattcagctgttttaacaaaataccatcctgggtggcttataaacaacagaaattgatttctcacagttctaaaggctggaaaatccaagatcaaggcactgtcagatttggtgtctggtgagggcctgcttccttgtagatggccatcttctcactgtcactccacataatgaaagg

SEQ ID NO: 205550 - DNA, 596 bp, Homo sapiens
cccgctgggcccaatggcactgggccccaagaagagaccaccctgagccatggccctgcaggcaagcaagggacagctccccacactgacaccaacagatacattccaaacagttgaaacgctgacatgtttgtctttggaaagaaacaggctaactgattattatgaaccattactcaagaacaattccactgcttattcaacaaggggaaatagaatagaaatttcttacgaaaatttacaggtcacaaatattactagaaagggaagcatgttaccagtgagctgtaagttaccgaatatgggtacttcccagagttacctttcctcatctatgccagctggttgtgttttgccagtaggtggtaattttgagatcttgttacattactatcttctcaattatgccaaaaaatgccatcaatcagaagaaaccatggttagtatgataatagctaatgcacttttaggcattcccaaagtcctttataaatctaaaacaggaaagtacagctttccacatacatatataagagctgtccatgcactgcaaaccaatcaacccttggtaagcagtcagacaggtttggaatcag

SEQ ID NO: 205551 - DNA, 697 bp, Homo sapiens
aagaacagtggagaaagttatcaagcaccagatcctggtaatggctcaatacaaaggccttatcaggacacagttgcagagaacaaagatgcattggaaaaaactcaaacatatttaaaagtacattctaatttggtaattccagatgtagaattagaaacatatattccgtattcaacccccacactgacaccaacagatacattccaaacagttgaaacgctgacatgtttgtctttggaaagaaacaggctaactgattattatgaaccattactcaagaacaattccactgcttattcaacaaggggaaatagaatagaaatttcttacgaaaatttacaggtcacaaatattactagaaagggaagcatgttaccagtgagctgtaagttaccgaatatgggtacttcccagagttacctttcctcatctatgccagctggttgtgttttgccagtaggtggtaattttgagatcttgttacattactatcttctcaattatgccaaaaaatgccatcaatcagaagaaaccatggttagtatgataatagctaatgcacttttaggcattcccaaagtcctttataaatctaaaacaggaaagtacagctttccacatacatatataagagctgtccatgcactgcaaaccaatcaacccttggtaagcagtcagacaggtttggaatcag

SEQ ID NO: 205552 - DNA, 745 bp, Homo sapiens
cctgagcaaaatgatcaaattccaaaacccagggtttaagaaagcagacagaaagccacagagaggggaagtggttaaagagaggggacattccaaaaagacagccacttagcacaaacaattcaaattccagtgttgttggtgccagaatccttttcactgttggtgatgggattttgagaaaagtgtttcaaatagaagaatttgaggtgtcttaaaaatgggtttccaaagaaagtggaggaggcgtgaaaagattccattatccagttgagatcgtcaagtatcctgctgatctatgtgcgggtctggatacacacagccttcaggaacttgggcacaaacaaaatctactgtgatggttaacactgagtgtcaactggactgattgaaggatgcaaagtactgttcctgggtgtgcctgtgagggtgttgccaaaggaggtgaacatttgagtcagtgaactgggagaggcagacccaccctcagtctaagtgggcactgtctcatcagctgccagcacaggtaggataaagcaggtaggagaagatggaaaagcagacttgcttagtcttctggcctttatctttctcctgtgctggatgcttcctgccctcgaacatcagactccaagttcttggacttacaccagtggtttgccagagcctctcgggccttcggccacagacagacagctgcactgttggcttccctacttctgaggttttgggactcagactggtt

SEQ ID NO: 205553 - DNA, 478 bp, Homo sapiens
tccatcacctctccgaccttattgccttcccctctctcccttgcacacctggttccagccacacggtctctgtactgttccttgcacatgctagcacagcccaccccagggcccttgaacttgctgctccctctgcctggagccttcattcaggttatcttcaccatcccttcttccccctcctcaggtctttgctcaaatttcaccttggcaggttaaaaccgaaatctctgccctccccagtagcacttaccacctctcacagctagctcctttatttctttgcggatgtcctccagcagaatatcagccccctgaaggtacaggtttttgtcatttttgttcagatctatatcctcaacaattaaaacaatgcttgcggcatagcaggcattcaaaatatttactggcttaacaaagaattatctcctgtctcctggtaacagcccctgttagtgctttgaggccacaagtgctc

SEQ ID NO: 205554 - DNA, 1334 bp, Homo sapiens
  misc_feature (1)..(1): n is a, c, g, or t
  misc_feature (1333)..(1334): n is a, c, g, or t
ntttgccacattgcccgggctggtctgcaactcctgagctcaagcgatccagcccgcctcggcctcccacggtactgggattacaggcgtgagccccaggctggcctctttgcattctttagagtgctgttttccctttgttgctgagttgtgtgacgaccccaaagaggaatcaccccatgacagtcctacttctctcgccctgaggatttccggacagggaggccagcctgcgggtttggcttgtctggggagattggatgtcacaggtgcctcgccgtgctccaggccttggatcgagtcctgggctgacattttctattatccatgttcagaaaatggcagttgggccactcccagattgtagcgctgcaacacaattggcaccagtgccctgtgaggtgggcggggccacctgcttgtccccttgtgtgcaggaagccaacggagccacctgcccgaggttagaacacgggaggcagcagggctgggagtgaccttcagatgtcatgtcattgggaccgagcgctttgggctgttgagaggcggcagtgtctcgggtgtggaccacctgctgctggcagcccagacgcacacggtgcctgtcccttggagagccatgtgcctcctgccctcgtggcgtgatggccgtcgtaaaatctccatgcagccctaagctgccacacacgagcaccagccagccactgtggacgtgggatgggcagatagttacagagcccggggtgactctgctgtcctttctctgcaggccaagcggaggctggactgaaatacatttacaaattagaatgtattttgctgtgggaaaatagaccccttgccattgcccctcggtgttgactacagaggtttttgaaaggtggcattgacaggcatccgatccgtgccagggcacagcactgtaggctggatgccgagtgctgttgccgcagatgtactcgggcctaaagtacctcctggctggggcgtgtgtgagctggaaatgcacgcgctctcccactcccaagctcactccacttgcacgccgtgacctggacgtgctgtttctggacaaggggaatggcactcccttctcagcgaccggctactcctgttgggacccagtagctgccagtccgtactggaattgtccccccatgcccagccaagccactggtcctgggcccatagagactctgtctccctttctggagtcagacagtttgacaggggcactcgcccctctgcttcctgccacctggcccggggcgcctcagtcagcccctccagatctgtttctttaactgagagcgggacaccttccccccccccnn

SEQ ID NO: 205555 - DNA, 378 bp, Homo sapiens
agatgtgaatgatagcttgttggtgaaaaacagcaatgactggaatattgtgtgtaacgtaatcctgcttttctgtatataatgtaggcatagaaaataggattgaaaggacatactctagtcaacagtggatatagcttgggtggagggggtgtataatggggaaggagagtcccttttcctatctattccatatacatctctggatttaaaagatcatacatgcatatgcattaccttcaaaattaaaatgataaagacaaaaggagaagctttgtatttgaatcatgatactactgtttgcaacttatatgaccgtggggaagtcgcctagcctcctggggtttatttcctcatttataaaaatagggaaagtaa

SEQ ID NO: 205556 - DNA, 284 bp, Homo sapiens
agaaaacagagttaactccaaatggtgtaagaaactctaacaacggggctgtttacagtagacagggttaagtgagcaagcaatggatattaatagatgatgaggcacaaaaactggcaacagctggaagccattatcatcacctgagggctgatggggcaaggggaggacaaggtattgtgggagcccagtgaaaaaggaaactgccaagagactactcagtggaattgcagtcatggagccatgcagccactgccaggggtgctggtccagcttgctgggca

SEQ ID NO: 205557 - DNA, 173 bp, Homo sapiens
aaactggattctcttatcatctctggcccatcagagagtagaactctttaacatcttatagaaaggaaaagaactagctagagagagcagagctaagatcccactgccagggattcattctggaaccaagagaagacttgctggagttaaaccaccggcaggtgccctcccgc

SEQ ID NO: 205558 - DNA, 629 bp, Homo sapiens
caatcggtgttaactacatgtgcagccaccgtcttcttagtcttattacaggtgcagaggtaatataggtgaatccctcacaagttgagtgggttgacctcaaaattgactttagcgatggcttgtgaccacctggtaggtggtggaccattacagcgtttggaaaatgagtaaaacaaaggatgcatacggaagccccactagcttgcttggcttctgcagatgcagagagaggtcgtttttctgccttctgggtgttgagtaacttaattttttatcttttgtttaaatgaaatagagctgaaaatagaaggcgatttccttttaacgagatagtattgagatgcttgcagagtatccccgcgtggattctgcttagctctgtgataccagcatcagaaactgtgcaaagagctctaatctggaggtgtgggttgttcagtagcttagaaagaggttattcctggagaataagtgcagcaggtagaaaaggatccattgggattgggagaataaaagttcattcattatttttattgatggaaaacaaagaaatgagctttaccctatactgatcttggttcctggagttccgagtgcttgcatctcagggcagaaacttccttaga

SEQ ID NO: 205559 - DNA, 576 bp, Homo sapiens
gaaacaagccaggtaagagcagagctgccctgactggagctaatggggccagtcccagtcccataaccccccacccctgcctcacccccgacatgcttccaggcggtctgagacaccttcacaggacactgagagcttagtgtgaaaactgtcacagaagggatgcagggacacaaacagaacatatttggatctttgaaacactctatgatctttccaggtagttagggcccagataccgtctgtctttgtctggttgggagaaaggggttctgtgggacctttggtttttattctccaggatggaggtgggcatttattccaagagcaagcaatggaggataacagtggctttgacctaggaatctggttggcaatgctgagagttcctggaggtcacttggtagaagctccccagcatgaccactacctggataagtcacatgaaaggtttgtcaggaagtgtaatagtgcaattcttgatgatgtttgggttttcctctagaggacccagggcagcctgcaggactgtctgaccatgcgctcactcccatacccacagacccactcactcac

SEQ ID NO: 205560 - DNA, 251 bp, Homo sapiens
agttgcatgtaatagacaattagaaaatacaagaaatctttaaaaatattgaaatggcaggttactatctaccagatagatactatttggtcagatgaccaagtagttaggaacttagcctcttgattgccagatttgaattttagctgtactagtttttaaggttttttttttaatcttggacatgtaatttaatttctttatgcctcaatttattcatttgtaagacgagaatagttaatgatatttaa

SEQ ID NO: 205561 - DNA, 574 bp, Homo sapiens
actgagaaattgatgaattgaattgaatgtatacctgggttcccgggcagcaaaggtgctgatggaactggtcttctcaccattttctttgaaagagaaaggaaattgcacatggtccatgctcacatccaggagacaagtattacattgctcctgaaatggaaccattcctctctgatcattgcttttctccatggttatttcttaaacataactttgtttatatgtaaccccaaatcaaagaaaactaaaacacctcatggaaaacaaaattgcctaagtataacacaagaacaatttgcttttcactgcatgcagggttgcttctctgccctggctggttgtgagatacttccagggaacatgtttcagggtatgagaatgaggccagtggctgctgatgttaaaaggacatggcatctgcactaggttggagagggggctggttgcacaaattaaagtcaaacacatcacagtctgatcagcagacatgggcttgagtgtgttgtctaggttttttcttttctttccttttcttttttactacctcccagtaacagtgaggcaattaaaa

SEQ ID NO: 205562 - DNA, 383 bp, Homo sapiens
gttaaggactattctggttccagtttaggatctaacatacaggaagagtttagttctgtgtagatggtgcagacaaggttgttaagggcaccaggcttatggattgcttctcttccaagcacttattttgtttaaattctggaaacattcaatgtaaacattagttatatcagacaaaaggattaggcatccacttaagtctattatgtagctcataaaagtggtaattataaaggctccaaatttacttagattagcacttctaagttattatgatagagtgatgtactaaatatacatcacacttacaaccaggtagaattgaaagaagttttgaagaaatattaaaagtgcttttagttttgtgttgggagatatgagtg

SEQ ID NO: 205563 - DNA, 354 bp, Homo sapiens
atctagttaaccagttaattgtagtcacagataccactggaggctgtatgtatgttaagagagaaactaaagcaatgaatatgtcacatactttagtttgaagaattacaacagcagtgggcatcattcttgttactactgcaacagcaaaataaatgagaaaatggaaattaaacaagggtgacagagaagggagaaagccacaaagtgttccttttaaataggattaacatttcagaaaaacatgttggataagttttgatcataaaggaaattctgagaaagaacatacagaagaccagaataacatcaaagttacctagaaaaacatcaagataataaatcctggagaaa

SEQ ID NO: 205564 - DNA, 229 bp, Homo sapiens
gggttgtgggagttggtaccagcagagtgaaacagcaaatctaaggccgtggttcaggtggatgaaagtgatgtcatgatacttatacttgaatcactgatttaaaatgtcaaatgcagaacatgccgatcttaatttattaacatgccaattcagattattagaatttaaagtactaatactttttcatagcgtcttgttcctatttacatgataattttttttctat

SEQ ID NO: 205565 - DNA, 559 bp, Homo sapiens
ccctggtaaaatttgttcatattaatttaaaatcctgaattaaaaactaagacatgggtaattgtcctattggttattaaaagtgttttaatactttcattaaaaagactatgaagtattcacccatgaatatacaggtcagtgggatatgataaaactgagaaaacggcccacttatttatgcagttatagtatataataaaaacagccttctgtatctgtggggaaaaggtgagttaattattaatgatgtgggtaccattttagcagaatctgggggaaaaaacggatgtatactttaaaatttacatcataattaattccaaatagatgagttaaatataaacaatgaaactccaatagcagtaaaactatgggagaaagatgatgagagcactgaaaaacctctttccacctctcaagttcaggaaaaatatgtgtgattatatttggtgttgataaggatgtgaggaccaagctttcatttattgtttgtggaaatgtaaattggtaaaatttctatgaagggaaattccgatataactttaaaattttcaaa

SEQ ID NO: 205566 - DNA, 501 bp, Homo sapiens
aagtcctaaatgaatgcagagcagtttcaacacatgagttcacatacatgctcccaactgtttctaaatgttaggggaaatcccaacctttgtctttgaaaaacaccagagtgtcttgtttgtgattttaaaacactcaaagacaaattgccagtttgccgtgtgtatttcaaatctactttccgtttatttaatttcttggcttctttaacttgaagcttcccaccagggctccaaacctctttcttactatcgaacagtgtgactacccaggctgctgaaggcaccgcttgtcatctatctagaaattaccttctctgcatgttgcctggaactgtggagggttcaccattataaattatagttcaaattacaaaacagggcccctattgatgatttcaggttctaagtgtgtaattatggtgcttttgctaatgacataatgaagagaggtgattatgtcattaaaatgtgatgttttttatatcccgaagaagctgc

SEQ ID NO: 205567 - DNA, 404 bp, Homo sapiens
ctccaggactcaaaaagtgcactcttctatatctactttgagtcaaagaccagaaatgtgtctagaagttcttagatgaagaggtagtgttaacagtattccagttagtgggagcatctgaccatgtgtaaaggagctcggtgcatttgaggagccaaaagaaggctgttgtcactagaacatagtcagtgatcgggagagggactggaaatgactagattcccttccttttcttaatctgcttttcaatgttcactactgtgttgtagaaaatggatcagagggtcaggggtaggtatggagagagcatttaggaggctgtttgtttatagtagttcaggtgagaaacagtggggacattacaactagggatgtgacagtagatatagaagagtgcacttttg

SEQ ID NO: 205568 - DNA, 685 bp, Homo sapiens
attaaacctatagatcagtttggggggataatcttttctatttgagtattaaaatagatgaacacagtatatttatttattttagtttttatttctttcatcagtattatgattttcagcataccagttgggaatatgttttgataagtttagacctaagtatttgattttgattgattttcatttgtttctcttttgtcctgctaaactcacttattagttgtaggagggttttgttttgttttgtctttgtagattgcctgggattgtctacacagacagttgtgtagaaaacatagagacagtgttatttctttcttttcaacctgtatggcttttccttcttttttttttaattaaattttttaggggtagtgatggggtctcactatgttgctcaggctggtctcaaactcctgaatgccagtgatctgcctgcctcagcctcccagagtgctgggattataggcgtgagcgaccatgcctggccttctttctgttttaaaattttctgccttaattcagtgactagacttttagtacaatgtggagtaagagtgctgagagtggacttcctatgttgttcccaatcttgtcactgttatttatttactaacatgattggatgttgaattttgtctaatgccttttggtgtcagttgatatgatcatctggatatgggtt

SEQ ID NO: 205569 - DNA, 194 bp, Homo sapiens
gacgccagaaacacttggtggcaggccatatcctctctgtactggcaagcactcccctccgtcctaattgccacaccatctcctctgggggttggggctcgtacacatttttcataacattagtaccagtgataatttaatacaaacagagtgccagccaccgcggtcacacgattaacccaagtcaatagaag

SEQ ID NO: 205570 - DNA, 587 bp, Homo sapiens
atatagctcagattatattcacttgatactgcctagtctgtacctcagtgatgcacttaacatataactctcaacaaattattctttgtatctcatacctcaaacctcattttttttcacaaaacttttttgtggttatctcactctccatttcaaattctccatatattgggcagttatatatgtatttaatccctgctttattctagaaaagtctcaacgggaatctttggtatttgaagtaaactctacactacacacacagatgatctgattacatctgggtttgtgttggtagtatctcctctaggctcttaaattatgtgattatgtttacaattctaataatttattttgtcaaatgtgttgatgcttaacaacactgtactccaattcatgttcaccctatgatcaccaacagatattaatagaactttgcatgtttgttgaccatatataagaaattttatacttgggtagttttcttcagcattctatgtttagttaattcctgcctaattaactcatatataacccctctgcaggtgattaaagtaaaatacataatagtagctacagctgaatga

SEQ ID NO: 205571 - DNA, 334 bp, Homo sapiens
atagtgcttgtatgccaggcactcctcatcacagctatgaatcgtggtccaccaaataagtgcaacagagtttatctatttttaaatctttgccatcactactaatgttgcagcgagtgttttcttgtacatacatccttgcggaagtgtttgggtatatacctacggtagagttccttggttatgtggtaccagcatcttcacctaccaactctgtccaaatggttaccccaagtgtttgtatgaccctgtcagtatgtgcgagggttttttactccacatttcctcccaaacttttttttttttttttttgacagagtctggctctgtcgcc

SEQ ID NO: 205572 - DNA, 474 bp, Homo sapiens
tagtaatttaggaacttagagccatattttatcatagaaacaaaaaaataaataggataacaataaaaagacagttgtgggcacaggaattttgtttcagctttctctcacacatttagaggaacagttaggtaaatgatgatgcagtcacatgaggggatataacagttatacggaatatttttcaaaagctttcgataatgtagaataatgcttacagataacgtgagtggaaaagtatgatgcaagggtacatctattcctatctcaactgtggaaataatacacatgcatcaaaaaatactggaaagaaatatcccaaaatgttaatagaatatatttctggatattaagattatgagtgatttaaattttctcttttagacttttctaagatttctggaatgatcttgtattatttttataatgaaaaccatttttgaacaggtgaattttgctcactcctctttggaa

SEQ ID NO: 205573 - DNA, 180 bp, Homo sapiens
taaaatgcagatattcaaataaaggattgcaccttacccaaataaaagttgatgttgcttctaattatttctaactactttgtgtgagaattatacagagttctggagacattacctatattagaacatcatctctcaaaactacatctgtaaatcatactttttaagtcttatcttgtc

SEQ ID NO: 205574 - DNA, 731 bp, Homo sapiens
gtctaggatcctgataattatgcattttctctgaagatatctatttccagtaaaatttgactatctagtgaagattgtaggcctgataatatattttgaagtacttgttatgatctgaatgtgtgtgtcacccccaaaaatgcatatgttgaaatttgaaccccttatgttatggttttaggaggaggggccttggggagtcctgagaatgggattagtgcttccaggagaagagacaggagagcttttttctcactctccctgctgtccaccatgtgaggacacagccagaaggtggctgtgtgccagtcaggaagggagccctcaccagacacccgatctgctggcaccttgatcttggacttcccagcctctagaattgtgagaaatagacaagtgttgtttaaggcccccagcctatggcagcttgttatagcagcctgagctaagacatatttgattttagcaaaatagcacttgatttgaaagcattctgctcattgccatcacctcctccttcacagttgtggattaaaaaaaaaaaaaaatgaacacatgaccacaacaaaacactgatatgtgctgagtttaatttacttcttttttttttgagatggagtctcactctgtcatccaggctggagtgcagtggtgcagtcttagcccactgcaacctctgcctcccaggttcaagcgattcttctgcctcagcctcccaagtagctgggatt

SEQ ID NO: 205575 - DNA, 373 bp, Homo sapiens
ggaggggcctttctgcccaggaggagcccctcccctgccatctcctgctcctgtctcagcagcccctccccatagaagcagttggttctgctcctggtgctgggcaccccctggatctccaaggaggcccctccttcctcccaaatggagggggggctgcctgtgtgctccccaaccccaccgagggcagtctcggcacctctcccctcccctagggctgcaggtggctctgggtgtggggggccagggccaccttcagtgagatggaaaggagggcgccacgttcccagccgcctgtggccagaccaccacctggccactgaggagagaggggccgtgggctcgccctagtcctcagcagcccctgcgcact

SEQ ID NO: 205576 - DNA, 528 bp, Homo sapiens
catcggggtcctttgtctcacgccagttaaacgacatggacacacaggagtggttttaaggagcagaaagtttaatagacaagaaagaagaaaggctccctgcggtacagaaaaagggggtctgaacagagaaaaagccccgtgtgtggcagaacagtactcggttatattgggaggctggaggaggtggtgtctgatttgcacagggcccagggcattggtttgaccaggcaggtcattcatgtagcccgagaaaaacgtggccctcccaccctagccttttaatatgcaaatgtaggtcaccatgttgtcctgcacacatggggtcatctggaggtgtcaccttgaggtggtgactagaagaagagggtgggaatctccatgttgaatggacacagtttctaagcgctggcatttgcatatcaaagcttggcagcctgtagtcccagctactcaggaggctgaggcaggcggatcatctgaggtcaggagttcaagaccagacaaagggaaacaccgggtaccgag

SEQ ID NO: 205577 - DNA, 210 bp, Homo sapiens
ttcactggagaactgctgggatatagggtgtgatgaccagggtttgatgacgtcatcaaaccctagcctgataattgtttggcttaagtcactctgggctggatgaccttgggctccacctctgggccctcgtttctttcctcccagagctgagagtatatgagatgtgggcagaatgtgatttggtaactgcagacagggatctcaagc

SEQ ID NO: 205578 - DNA, 131 bp, Homo sapiens
ccttccctccttccatgttaacagaaagtcagttcacatatctgggtgtcagtctgctcacctgtgaaatggcaatgatgcctgaactgctttgcaaccttataaaaatcaagtaagactatctacatgaa

SEQ ID NO: 205579 - DNA, 349 bp, Homo sapiens
gctcaattccaacactcaaggcaactacagagatttatgaagaatttaaacaggtgctctttttccaccagagtattagaaagcgatgaattaacgtatcaatctttcaatgtcttcctcttctcccttcttcttcgtccttcttttttttgtttctttttttttttcttctccctctctttctcagtctctctctcttgctgttacttcctatgtaaaaatagcacaactccttgtgaggaaaaattggaaaatgcagaaacatacaaaggaattaatcacctgacatcctgctattgctgagagcttatcactgttgtttgagattttcatcctgactcttcccttt

SEQ ID NO: 205580 - DNA, 434 bp, Homo sapiens
agatggcagcagcagcagggcagcacctctgggaagtcccgggaagaggcctggctaggccaagtcagggccacacctgagctggctgcaggactgtttacaaagcaaatgcatactggagggattagcaacctgagttcttggccagctgaggtgggtcacacctgtaatctctgcactttgggagtccgaagtggaagggtctgtgcaaatcaagcctctccgccaaatcacctgccggcttcccacccacccccaatccccacctgaagccaggtgtctctaatctctactcctgagcatgaggaaatccagcacaaccccaccaccaccagcaggtagagcaccagctgtaaccagggcacagctcctgagccagcgggctcacttttcaatctggttgtggagcaggacactgagaagcagcccacaga

SEQ ID NO: 205581 - DNA, 346 bp, Homo sapiens
catatactttaaatcatcagtagattacttataatacctcatgcaatgtaaatgctaagtgaatagttgctatacttcatttttaggtttatattattttttattatttttcctctgaatatttttgattcactattgaatgaatacaaagatgcagaacctgtggctatggaaggcaattgtatacttgattaattctttaaatatgaaagggtatattataatggagaactgtgttctatatttttgggacccaattatttacggcgtccattgcaatgtcctaatgttagaatattcatttctactcttacaaataataaatgacacaactaccggctaagca

SEQ ID NO: 205582 - DNA, 794 bp, Homo sapiens
gcttcaggaattcagagcttcagaatttggcttatggttttgggatgtggggaatttgtcttcatgggctgtttatctgccttaattgtgatagagatgctccaaggagatgtgtgggcaggattgggcccagggccagggtaaatcagagcagccccaggcctgaactccccagttcactcaagacggcagtgtatgtagctttcggaggaaagctctatcatttctcctgaatatgaagctgcacccattcattgcaaaattgtacaactgcctgcaaaatcgtgagtttcaggcagtggttggtgattgctattgcattagacatagtgattccacatttggggagaataaagagaaagaaaacttgaaggatcagagtagtcccagaccttggaaatgtcacaactgtgaaacaagtctctagaaagcaagataaactaatcagtgtgatatttacagctcatctctcgatcatatttatttcttggtgcatgaaaattggttcctagggttcacattaatcatgatgaaatatatttactactgtctgttggctggtttagatcaagagttggcaaccattactagtaatatttctaggttcccaaccagcatttaggctgaagatttcaggggttgggtggaggtcatgaccacatgttgacactctgtgcttggagagggaaggaagaaactgacttctcacaaccacggccactaaatatatccacagcagagatctgggcttgattgaaagcctcttctccagtgtggtccattcatgcaagaat

SEQ ID NO: 205583 - DNA, 684 bp, Homo sapiens
taatatatatgacttattttaaaattaaaaacatgtactactgccaacttataaatatgagtacagtttaagaccttactttttagggaagaaaatatatataaattaaagcttttacattttcttcccattccccaaaggattatactgagcaccaaatgttcgaacttagtgcgtgatatggtttggatctgtgttcctgcctgaatctcatgtagaattgtaatccccagtgttggaggtggggcctggtgggagctaattggatcaggggggcggagttctcatgaatgggttagcaccatcccctaggtgctattctcctgacagtgagtaagttattgtgagatattgttgtttaaaagcatgtagcacctcccgcctctctcttcctcctgctctggccatgggaagtgctggcttcccttcaccttctgccatgatggtgagtttccttgtacctccccagaagccgagcagatggccagcatcatgcttcctcacagcctgtgaaactgtaagccaattaaacctcttttctttataaattacccagtctcaagtatttctttagagcagtgcaagaacagactaatccagtgaccttgatgccacacagtggttgcttggagcccagtgagcttcatcttcaaccggcatccctgacacaccttgtcctggcct

SEQ ID NO: 205584 - DNA, 1033 bp, Homo sapiens
aacactggcaggagtttggaagaagcttatcccaaactttatagatgactttgagacattcaagacttcagtggtggaagtaagtgcagatatggtaaaaatagcaagataactataagtagagcctaaagatgtgagtgaatcactgtaatctcatcatcaaacttaatggatagggagttgattcttatggtggagcaaataaaatgatttcttaagctgaaatctactcctggtgaagatacagtgaccaatgtttttattttgcttttattttttgtttgttttgaattttttgcagaatcaaggtcttgctatgttgcccacggtggtcttgaactcctggcctcaagcaatcctcacaccttggcctctcgaagtcctgggattataggcataagtcactgtgcctagccctgtgaagattgctgaaataatcacaaaggatttagaatattacataaatttagttgataaagcaatggaagggtatcagaggattgactttaatttttaaagcagttctactgtggataaaatttcatcaaacagaaatcgcacagaaattttcaggaaaagaataatcaatcaatgtgtcaaaccttattgttgttttattttaagaaattgccttaccactctaaccttcagcaatcactcactgatcagtcagcagccatcaacatcaaagcaagatgctccagcagcaaagaaattacaactcactgaagactcagacgatcattagcattttttagtaataaaacaactttaaattaagtaagcaagttaactgaaatggagaatcactacccaggatggaagagggaacctgtgtttacctacagtctctgaaaacgatatgtgtctacatgagcaacaaagcttggaagtttggcttgatccagcagtctataatatctatgtgtacgattttctgtctttgagtgttttttgacatttattattaacaataaaagcagatgcggccgtctcgccccgccattctcccgtaggcctgtaagctggcgtc

SEQ ID NO: 205585 - DNA, 443 bp, Homo sapiens
aacactggcaggagtttggaagaagcttatcccaaactttatagatgactttgagacattcaagacttcagtggtggaatcagcagccatcaacatcaaagcaagatgctccagcagcaaagaaattacaactcactgaagactcagacgatcattagcattttttagtaataaaacaactttaaattaagtaagcaagttaactgaaatggagaatcactacccaggatggaagagggaacctgtgtttacctacagtctctgaaaacgatatgtgtctacatgagcaacaaagcttggaagtttggcttgatccagcagtctataatatctatgtgtacgattttctgtctttgagtgttttttgacatttattattaacaataaaagcagatgcggccgtctcgccccgccattctcccgtaggcctgtaagctggcgtc

SEQ ID NO: 205586 - DNA, 295 bp, Homo sapiens
ttttcctctgccattcttattagatagaagaacatcccttaagtaagcaagttaactgaaatggagaatcactacccaggatggaagagggaacctgtgtttacctacagtctctgaaaacgatatgtgtctacatgagcaacaaagcttggaagtttggcttgatccagcagtctataatatctatgtgtacgattttctgtctttgagtgttttttgacatttattattaacaataaaagcagatgcggccgtctcgccccgccattctcccgtaggcctgtaagctggcgtc

SEQ ID NO: 205587 - DNA, 1037 bp, Homo sapiens
  misc_feature (1003)..(1004): n is a, c, g, or t
  misc_feature (1023)..(1023): n is a, c, g, or t
  misc_feature (1025)..(1025): n is a, c, g, or t
aacactggcaggagtttggaagaagcttatcccaaactttatagatgactttgagacattcaagacttcagtggtggaagtaagtgcagatatggtaaaaatagcaagataactataagtagagcctaaagatgtgagtgaatcactgtaatctcatcatcaaacttaatggatagggagttgattcttatggtggagcaaataaaatgatttcttaagctgaaatctactcctggtgaagatacagtgaccaatgtttttattttgcttttattttttgtttgttttgaattttttgcagaatcaaggtcttgctatgttgcccacggtggtcttgaactcctggcctcaagcaatcctcacaccttggcctctcgaagtcctgggattataggcataagtcactgtgcctagccctgtgaagattgctgaaataatcacaaaggatttagaatattacataaatttagttgataaagcaatggaagggtatcagaggattgactttaatttttaaagcagttctactgtggataaaatttcatcaaacagaaatcgcacagaaattttcaggaaaagaataatcaatcaatgtgtcaaaccttattgttgttttattttaagaaattgccttaccactctaaccttcagcaatcactcactgatcagtcagcagccatcaacatcaaagcaagatgctccagcagcaaagaaattacaactcactgaagactcagacgatcattagcattttttagtaataaaacaactttaaattaagtaagcaagttaactgaaatggagaatcactacccaggatggaagagggaacctgtgtttacctacagtctctgaaaacgatatgtgtctacatgagcaacaaagcttggaagtttggcttgatccagcagtctataatatctatgtgtacgattttctgtctttgagtgttttttgacatttattattaacaataaaagctgactaaaaagaaccggccccnnctccctataagaaataagnangggacaagggaa

SEQ ID NO: 205588 - DNA, 1035 bp, Homo sapiens
  misc_feature (984)..(984): n is a, c, g, or t
aacactggcaggagtttggaagaagcttatcccaaactttatagatgactttgagacattcaagacttcagtggtggaagtaagtgcagatatggtaaaaatagcaagataactataagtagagcctaaagatgtgagtgaatcactgtaatctcatcatcaaacttaatggatagggagttgattcttatggtggagcaaataaaatgatttcttaagctgaaatctactcctggtgaagatacagtgaccaatgtttttattttgcttttattttttgtttgttttgaattttttgcagaatcaaggtcttgctatgttgcccacggtggtcttgaactcctggcctcaagcaatcctcacaccttggcctctcgaagtcctgggattataggcataagtcactgtgcctagccctgtgaagattgctgaaataatcacaaaggatttagaatattacataaatttagttgataaagcaatggaagggtatcagaggattgactttaatttttaaagcagttctactgtggataaaatttcatcaaacagaaatcgcacagaaattttcaggaaaagaataatcaatcaatgtgtcaaaccttattgttgttttattttaagaaattgccttaccactctaaccttcagcaatcactcactgatcagtcagcagccatcaacatcaaagcaagatgctccagcagcaaagaaattacaactcactgaagactcagacgatcattagcattttttagtaataaaacaactttaaattaagtaagcaagttaactgaaatggagaatcactacccaggatggaagagggaacctgtgtttacctacagtctctgaaaacgatatgtgtctacatgagcaacaaagcttggaagtttggcttgatccagcagtctataatatctatgtgtacgattttctgtctttgagtgttttttgacatttattattaacaataaaagccangatcggccgtctctacttaaaaacacataaagaaaatcgggtatactgtgc

SEQ ID NO: 205589 - DNA, 1030 bp, Homo sapiens
aacactggcaggagtttggaagaagcttatcccaaactttatagatgactttgagacattcaagacttcagtggtggaagtaagtgcagatatggtaaaaatagcaagataactataagtagagcctaaagatgtgagtgaatcactgtaatctcatcatcaaacttaatggatagggagttgattcttatggtggagcaaataaaatgatttcttaagctgaaatctactcctggtgaagatacagtgaccaatgtttttattttgcttttattttttgtttgttttgaattttttgcagaatcaaggtcttgctatgttgcccacggtggtcttgaactcctggcctcaagcaatcctcacaccttggcctctcgaagtcctgggattataggcataagtcactgtgcctagccctgtgaagattgctgaaataatcacaaaggatttagaatattacataaatttagttgataaagcaatggaagggtatcagaggattgactttaatttttaaagcagttctactgtggataaaatttcatcaaacagaaatcgcacagaaattttcaggaaaagaataatcaatcaatgtgtcaaaccttattgttgttttattttaagaaattgccttaccactctaaccttcagcaatcactcactgatcagtcagcagccatcaacatcaaagcaagatgctccagcagcaaagaaattacaactcactgaagactcagacgatcattagcattttttagtaataaaacaactttaaattaagtaagcaagttaactgaaatggagaatcactacccaggatggaagagggaacctgtgtttacctacagtctctgaaaacgatatgtgtctacatgagcaacaaagcttggaagtttggcttgatccagcagtctataatatctatgtgtacgattttctgtctttgagtgttttttgacatttattattaacaataaaagcggtaccgacaagcttcttttttttttattttccaactcacgacaaaacc

SEQ ID NO: 205590 - DNA, 1096 bp, Homo sapiens
aacactggcaggagtttggaagaagcttatcccaaactttatagatgactttgagacattcaagacttcagtggtggaagtaagtgcagatatggtaaaaatagcaagataactataagtagagcctaaagatgtgagtgaatcactgtaatctcatcatcaaacttaatggatagggagttgattcttatggtggagcaaataaaatgatttcttaagctgaaatctactcctggtgaagatacagtgaccaatgtttttattttgcttttattttttgtttgttttgaattttttgcagaatcaaggtcttgctatgttgcccacggtggtcttgaactcctggcctcaagcaatcctcacaccttggcctctcgaagtcctgggattataggcataagtcactgtgcctagccctgtgaagattgctgaaataatcacaaaggatttagaatattacataaatttagttgataaagcaatggaagggtatcagaggattgactttaatttttaaagcagttctactgtggataaaatttcatcaaacagaaatcgcacagaaattttcaggaaaagaataatcaatcaatgtgtcaaaccttattgttgttttattttaagaaattgccttaccactctaaccttcagcaatcactcactgatcagtcagcagccatcaacatcaaagcaagatgctccagcagcaaagaaattacaactcactgaagactcagacgatcattagcattttttagtaataaaacaactttaaattaaggtacgtacattgtttttatggacatgatgctattgcacactgaatagactatgggatagttaacttttatatgcactaagaaacaaacaaaaatgtgtgagactcatgatattgtaatatgtgctttattgcggtgatctggaactgaacccatgatatctccaaagcatgcctgtactttaaatatacacatgaaaacttaaacttatctgtattcaaatgtttcactatagttttatacctaacaacaaatgcaaaaaatattgtaaaattattattcttataaatttagaaaaataaaaatgactccatata

SEQ ID NO: 205591 - DNA, 995 bp, Homo sapiens
  misc_feature (959)..(959): n is a, c, g, or t
  misc_feature (981)..(981): n is a, c, g, or t
  misc_feature (995)..(995): n is a, c, g, or t
aacactggcaggagtttggaagaagcttatcccaaactttatagatgactttgagacattcaagacttcagtggtggaagtaagtgcagatatggtaaaaatagcaagataactataagtagagcctaaagatgtgagtgaatcactgtaatctcatcatcaaacttaatggatagggagttgattcttatggtggagcaaataaaatgatttcttaagctgaaatctactcctggtgaagatacagtgaccaatgtttttattttgcttttattttttgtttgttttgaattttttgcagaatcaaggtcttgctatgttgcccacggtggtcttgaactcctggcctcaagcaatcctcacaccttggcctctcgaagtcctgggattataggcataagtcactgtgcctagccctgtgaagattgctgaaataatcacaaaggatttagaatattacataaatttagttgataaagcaatggaagggtatcagaggattgactttaatttttaaagcagttctactgtggataaaatttcatcaaacagaaatcgcacagaaattttcaggaaaagaataatcaatcaatgtgtcaaaccttattgttgttttattttaagaaattgccttaccactctaaccttcagcaatcactcactgatcagtcagcagccatcaacatcaaagcaagatgctccagcagcaaagaaattacaactcactgaagactcagacgatcattagcattttttagtaataaaacaactttaaattaagtaagcaagttaactgaaatggagaatcactacccaggatggaagagggaacctgtgtttacctacagtctctgaaaacgatatgtgtctacatgagcaacaaagcttggaagtttggcttgatccagcagtctataatatctatgtgtacgattttctgtctttgagtgttttgttcnatctattaagcctcctgggccnggttcccaaaggan

SEQ ID NO: 205592 - DNA, 419 bp, Homo sapiens
taaatttggcttgataatactaacagagaatggctatttgcataaatatgttttataaaatggtgttaacttttagtctttgttcaggataatgagacctactagttaaccagaacggggccagcaagcaactcttgaatgctagttttaatgcctgatcaaaattctgtaaagctgtgttgatcactgaggcgttgcggatatactgagcctgcattaagtggatatttaatctaattatttctggaatctttaccagaaaacatgctcttacatagtttgctcctgggtttgctgttggtgaactgccgttggttggtgggatctctgtgtcccatgcgctttgccacacagctggggctctgagtacttcagctcacattcctttgctgttccgctggtgccttaactcacttacc

SEQ ID NO: 205593 - DNA, 612 bp, Homo sapiens
catttacctatcagaatccgcattttcctggatgcctttcatgatgttaaccccctccccacaaactgcattgacattttgctctatttatatctgtcttataattattactgtctgaattgactacctttgttcagttcagtagaccattacttagtacctctgtgttctagaaattattccaggtgctggtattactgaaacatgaggggtttaatctaggtcctgctgctcaccacacagaaagccaatctctgagacgaggattattgccaaggaagaaggctttaattaggtgctgcagcggaggagttgggagctcagtctcaaatccatttccctgaccaactaaaactaggggctaatatagcagggaagaaatgtaacaggtataagaaagcagaaactagggaggggaaaggaagcaatcaggatgaatgaagggtctggcctgtcatgtctggatgcagtgatctggtaagtttcaattcttttgatttttttttttttttttgagaagcctaaaggttgtttcctgaggaaagaactcagataaaacaaatataagtctcaagctttaagaccagaagggtcaatttctatgtttatcca

SEQ ID NO: 205594 - DNA, 617 bp, Homo sapiens
ctcccgtaagaatataggggaagcagctgaagagagctccccggaagctagaattttgttcagggtggtaataattatgcatgaaaatgatagttaactgtaatgatgattgacttctcttgcacctttcttccagagaactccaggtacatccaggtttatctctttgctcttccttgtgccctccttctaaggtgtgagtggggtagagataattcctcttttttgtagagtgatctgcccccaaggtcacagaaggaagagccctcttgggcttttcttagtgtgcaggtgagggaggatggtattcagccagagagatggaccctattgccttcttcatcttattgatttcattacttctgacattctgaggccttgaagattcacaaacgggaacgagaaatggtagtctgtgtggactcctgatttttataggtcagatggtacattttgtacattttaatatgttatattgttcctgtgacaggttaagattattctgcccactttacatatgggtaaactgaggccaaggagtattaaatgatttgtcaaaactcttagcaaattggattaataattagatttcttgatgatttgttctcttgactagc

SEQ ID NO: 205595 - DNA, 240 bp, Homo sapiens
gctctgtctcccaggctggagtgcagtggagtgatctcagctcactgcaacctccgcctcccaggttcaagcaattctcctatctctgcctcccacagtgctgagattacaggcatgagccactgcgtccggccaaccatcctgttctatgtcctgagagctgacctctaggcccacaccactgggctccattgccctctgctttggggttggattcagccaaaaggaggtactggtggg

SEQ ID NO: 205596 - DNA, 121 bp, Homo sapiens
ttattcaatagaaaatctttaaagataaatggactacacactggtagagaaatgagttgttctggctaacacattaatctcttaaacaccaaagtcttcaaacctcttttgatggaaaact

SEQ ID NO: 205597 - DNA, 496 bp, Homo sapiens
cttcaattgttgcctaatgtaacaattgcattggaacaaattcatgttttcaaagcaactgctatagcagaagtgtctgcatcttgtattgttgcaaggtaacaagggagatagggagtggcaggaagtgagttagggtggagttccaggctagggcttccattcacatctccaacatctttttaatactttgtcatttaaaaaggacatcagggctgggcacggtggctcacacctgtaatcccagcactttgggaagccgaggcgggcagatcatgaggtcgggagattgagaccatcctggctaataaggtgaaaccccgtctctactaaacatatgaaaaaaattagccaggcctggtggcacatgcctgtagtcccagctactcttgatactgaggcaggagaatcgcttgaatccgggagacaaaggttgcagtaagctgagatcgcaccactgcactccagcctgggcgacagagtgagactctgtctc

SEQ ID NO: 205598 - DNA, 522 bp, Homo sapiens
cgttttatgtgggcacttagaacacattttctataacatccctttgccacaaataaggcatcagaacatttgttacaaagcaagggtatacaaaatacactatatgattttgtatatccaccaccacctgcatactcaaaatcacagagatagattaaaaaggatatagttcaaaatgttaaagccatatatgctgtgtaggagcactttaccaaattacctttgttgcagtcgctgaagttctcatcacaaagagtaaaaaccatcatgcttccacatagaaataagcaaattgcatcagtgaaatataaccaggaagagaaaaggaattcaacctcccccatcaacactaaaactagtcaataattatctaagtggtatcagttatgttttctgcgcatcctggttggcctctaagtaaagagaaggagccggagagaagggcttgggaatgctacggtttctctatagcagttttatcttaggcggtgtgtgtgaagactagggtgtatgcagcgagta

SEQ ID NO: 205599 - DNA, 400 bp, Homo sapiens
agacagagtcttgctctgttgcccaggctgtagtgcactggtgcgatcttggctcactgcaacctccacctcctggattcaagcaattctcatgcctcggcctcccgagtagctgggattccaagcgtgctccaccatgcccggctaatttttgtatttttagtagagatgaggttttgccattttggccaggctggtctcgaactcctgacctcaggtgatccacttgccttggcctcctaaagtcctgggattacaggtgtgagccaccacatcaggccatgggaaagtaatttttaatttgtatcctctggtcagtggacatttaacgagtatttcctgagtgcctaactctgtgcttagtgttgtaggaagatacgaagattaaaacaaaaacgtg

SEQ ID NO: 205600 - DNA, 436 bp, Homo sapiens
ttttaaaaatttgttatgggtacatagtaggtgtatatatagggtacatgagatattttgtacaagcacacagtgcataatgatcatgttgggtagatgaggtatgcatcacctcaagcatttaccctttgtattacaaacaatgtgattatactcttttagttattttaaaatatacagtaaattattgttgactgtgtagtcaccctgttgtgttatcaaaaactagatcttactcatcctgtctaactctatttttgtaccccataatgtactttctgatgtatgatttcttgagttagttatggatgcagctaacttgacatttacctcactgatgagtagccttgagcaatttttctgcagttcagcaagctaacataataataaaaacaagttttgctgtcattaagttttatcattgagctgttaggag

SEQ ID NO: 205601 - DNA, 374 bp, Homo sapiens
aggagccagccccactccactgccattggtgggatcaacagtcacttagcaattagcaactgtaaaagtaatggtagcaggaaagttggatgtgacaattctattttgtgattgctgaatggtggtatgattttgatggtcaaaaggtgttcttatatgttataattcaatactcatttttatagtgaagtaacttatacgattaatttcatagtttgttcccacctttgctctaccttgatattcaaaaccctctttacaaagataaaaattttctttattttaaaattttctatcaggtctatgagcattaaaaaaaaagtaattctttaaaatggtacaacaacaaatttttccttactaataaatagcat

SEQ ID NO: 205602 - DNA, 222 bp, Homo sapiens
actttcttgtcttgtgtattagctagaacttccagaacaactttgaattgcagtgatgatgggcttgcccttattttgtttctgactctaaagtgaagaatgcctttagtgtctcactgtttcatttgctgttagtatataatggatagcctttatttcattaagaaagtttccttggccaggcgcggtggctcatgcctgtaataccagcattttgggagg

SEQ ID NO: 205603 - DNA, 245 bp, Homo sapiens
tccaccagcttgcccgattgcatcctgttagggggccagggacacagcggaggcttcctagaagcgcagcttcttccgcattcctcagaaagctacagaatgggccaaggagctccccagtgcctgcacagggaacattcctcgaggatgacaatgtcctttgtctgcactgtccctgcagcctttagctacaggtgataagtgagcacgttgaagtgcagctgctgcgaccgagaaactgaatt

SEQ ID NO: 205604 - DNA, 361 bp, Homo sapiens
ccagagatgacttaaagttgcaatggtcacagtgaggatatttaaatctagaaaaaattgttcatttaagggatgtattgggaaaaaatgagatcccaaatgtctcagaaacaatgataaataattttgattggtatgtaaaggtttctaaaagaatgatttaaaaaaatagtctctctaagtaaatctttacaatgtgctaataagaaagtattctaaacctattaacctctttgattgcttgctttttccatctgaacctactcaatgctaacctccttaaaaaattagatcctcaaatgagccaggagtatctacaacaactaaatttaactcttgttattgcacacatgaactatta

SEQ ID NO: 205605 - DNA, 651 bp, Homo sapiens
cttggtgtccacaaccccttatcataacccagaccttcctttctattgattccaggtctctagataataactctttcaaccaattgccaatcagaaaatctttgaatctgcctatgtcctggatgaccccccttttccagttgtcccacctttctagactgaaccaatgtacatcttacatgtattgattgatgtcttatgtctccctagaatgggtaaaaccaagcagtaccttgggccaccgaggtaccttgggccagtacctggccaccttgggcacatgttctcaggatctcctgggcctatgtcacagcccattggtcactcatatttgggtcagaataaatctcttgaagtatttcacagagtttaactctttttgtcaacataatatttaacaaacataaagtttgttaaataaataagtcattttggaaagaggtcccaaataagaaactaacagcatggtagaattcacattcatatgaatataaaaatgtacatattatcgttaatgatatcatgctgaattcatgtctgattcataattttgtatgaaaaggactcatgtttgacttattcaccactgtatcccaacatgtagcaaagccttacgcacagcagttaataaatatttcttgaatgtaaaaa

SEQ ID NO: 205606 - DNA, 345 bp, Homo sapiens
tcactgattcccatcctaccctccagtcatttgcctaactgacttttttttttccaggaaacctcagagatgcattggacttggtcagcagacttgagttctatgcccatgccagtcactgactggccatgacctgagttggacaaatcatgcccactctagacttaagttgttccttatatggaaaaggaaaggagtgctttgtcagtggttcccagataccaatttataaagatttcactagtctgtggcaaaataatataacaatggctatgaattactgggtatttcctttgtgtgaagtggttttcatatattaactcatttaatctcataaccacctgg

SEQ ID NO: 205607 - DNA, 333 bp, Homo sapiens
tttcctcatactataccggagtcaccagaactggtatctaaacgtgcagtctgattctgtgctatttgggtcagtgggttttgacttacggccattcatttaacttatttttgagactcgcacccctagactcttaaattgagattaaaaaatacaattccgttgagaagctttaacctcacattggaaccatcatcttgttctctacctagcattcctcaaattcttaggaagaaaatactgaaagtgtgttctgtttcctcccttttaaaataactcttgggaaggcttttagacatttaacacaaaatctcttcatacgttaagaggcga

SEQ ID NO: 205608 - DNA, 470 bp, Homo sapiens
aggatccccatgccaataacctccagaggagctgggtttgaaaagatgaggcagggtccctatggtggagggtatagaggctatgatgactatcgtggctgtaatgatggatatggctttaggtctgatagatttggaaaagaccgcaattactgtttttcaggaatgtctgatcatagatacggagatagtgggtccagtttccagagcaccacagggcactgtgtacacacgaggggtttaccttacagagccactaagaatgttataatttctattcacctcttaacctcatgagagtacatattgaaattggacacgatgacagagtttactggtagggcagatgttgagtttgctgctcacgaagatgcagtggcagctatggcaaaagacaaagctaatatgcagcacaggtacagggagacctttttaaatgctataggaacaagtagggaggttattggcat

SEQ ID NO: 205609 - DNA, 288 bp, Homo sapiens
tgcataatacacattttctcatacttttactttcaaactgttcatatcattacatagacagcatatagttgagttatggttgttattccattctgccaatatttgtctttagtatatttagaccatttcatttaatgtaatcattgatatggtagtgtttatgtttgtcttttttgttgttatagttttcagtttgttttttctctatcttctttctttttgccatggattatttgaactacattttccactagaactctcatacatctcctgtatgataattccaac

SEQ ID NO: 205610 - DNA, 427 bp, Homo sapiens
ttagcctccacatccgtatttaagacataaagtgtcagagtatgcagagaaaacaaaaattaagatctatgtatttccatgatagtactctataattatgtcagcttcatgtacatgtgaccaccaaatatgtactttataatataattatagttcaagcaaaacaaactactcaggcaacagagtgtctagtacacatatacatttaatattaacataagcatacttggataaaataatgaaaacgtatgaactaggaagatgatctattatgactaaatttatctgataggtttatgattcataatttaactttcttttttccttttctttcagcatagaaatagatgaagaatgttttagagacagctgatgaaatttcagatatcagtgatgtgaaactaaaaaaaaaattcatcattaaatt

SEQ ID NO: 205611 - DNA, 255 bp, Homo sapiens
ctcaggcatctctggatgtccaaaaataacccccacccccacccgcaccctccccggcagtcactgggggtatttctggcagatggaaggggactcacagtgggagggagggtcatttctctgaatccagggccaggggtggggagggacagagtcaaggccctgccttggcttggagctttaaaaacactcatttcttctggaacgcagcctctccccagtaaatccttctcaccagagaaaaccatagtcaaa

SEQ ID NO: 205612 - DNA, 311 bp, Homo sapiens
attgtaatccccattatgccatctaattgtcaggttttaattgatagatcccatttttgagaaagaagcaggtcaatgtcagggtaaatagtaatagctaacttctacagcactctaatccattaagaggtcttctctctagattggacttcattctgggtcctgttgaagctaatttgaaaatcatgagccatttgtctgttttggctatgctggcatgatcctcttcttacttccttttcactccttcacccacagagtttctggaaagtaacataagcttgatgggttctcgtacttggcagtaatgg

SEQ ID NO: 205613 - DNA, 159 bp, Homo sapiens
caaacttgcatagtcaatgtcactccccaaaaattctatattgggggtccctaacctccaggccatagacctgtaccagtccatggcctggcaggaagcaggccacacaggtggtcagcagcaggagagggagtgttagggcctgagctccacctcctg

SEQ ID NO: 205614 - DNA, 731 bp, Homo sapiens
tttccctttgtctgtatacttacaaggtggaatatgatcttttagctttgttgaaatctgattttgttggcaagaatctttctgtattaaaactgctatggctttcgtgtctcagtatgttcagtggttatgtcaaaagttaaataagggaggctgaggcaggaggatcacttgagccaggcagttgaaggctacagtgatgagctatgattgcaccactgcactccagcctgagtgacagagtaagaccctggcctattctctttcttttataagactttccttctactttctctgttcctgccttctggaattcctgttaagtaggtgttggaatgctagaagttctctaacaaattttttctcttttctcttttatttttcatttccttggcatgttattctacttttagtgaaatttccttcactttgtatgccagttcttctatagaattttctgtttcggacactatttctaatatctctttcttgttctctaaatatttttttctgtagcatcttggtcttatgatacatattgagcattttgtcctctaagcaaattgcctacattttttgtttgttttaatcttcatctttcatgttagagcacttcctcatcagtttattcatatttaagactgaagcactgcaaagctgattgaaagctcttatgtgaaaaggaagaccttgttggactgatgggcctcatttagggagccggtgtttgg

SEQ ID NO: 205615 - DNA, 414 bp, Homo sapiens
gagatgacctacagctacatagtcagcaaaagacagagtgtcaaaagacagaggggaaaagccatacaaactgtgaagagagatttcaagaagcagagagtaagaggggggaaaggagaggcagaacaagaggaagtgcagtcaaagttaagatgaagacagacaactatcaccatcaacccatgccactggcaaaagcaaggtgcagaactcaaatatatttgaagctatcagcaccaaactggtggacagcacctcagccaatttattcttatcttcctttaccactatgacaaatctttaacatgttttcccttgggggagaagggggcagggcagagaaagaagggctatggagaattagagagatgagtttattattcctggtcccaatactgcctttctcaaaaagca

SEQ ID NO: 205616 - DNA, 204 bp, Homo sapiens
tacatccagaactatgagggcagagacagaactgtgagggaagggaaaataggaaggaaaagacatttacaaataatcagacttacttcccattgcagggataactcagtgactactgagaagagactaggaaggtggcactttattctccttacctctttgcaccaagagataatccggaagtattttcatgccaactaatta

SEQ ID NO: 205617 - DNA, 339 bp, Homo sapiens
gaagcagaagacttagaggacctgccagagcccaacccactgccaagtgagtttggagtgttgggttggttttgtttttaatgacaggagggatctaaatatgttcatgaaaaggagggaaagaaccagaagagagggaaggatggaagaggcagtgggaggaaaaagacctggtccaggggcaagtccggaccaaagccactggcaaaagcagatttctgtcaacatctctccactcccgagtccctcccaagcctcacccccgacaccccaccaaaggcaaagccaactggcctactctccacagagctgcccccaccccaaaccggaggcaggacc

SEQ ID NO: 205618 - DNA, 569 bp, Homo sapiens
gaaagaggcaaatccatagagacagaaaatagattcgtggctgccaagagctagggaaatgggggatggaaagtagtagctagagggtacagggtttctttgaagatgatgcaaatattctaaaactgactgtggtcacagttgcacaactgtaaatgtcctcaaaaccacctaactgcacacttaaaatgggtgaattgtatgtcatgtgaattctgtctcactaaagttgttatgagtaaagattaaacagctataattgtagggaacaatcaagaattgcttttctttttaaatatcctatgaatctaactcttaattcattaaagccgtatgtgtccctattagtgaaagacaatagagcagtttaccactgggacagaaaatacccagaggatgttagaaatgaaggcagaaatagacacgaggacttctgctggcttttaacatctctgagtgggcgtgaaggatgcttcaagttcttcataatgggtacctggttaatggccactctttgtacaggtagaaaaaggcaatgaggaagaaggtgctaagtgacagctaatatt

SEQ ID NO: 205619 - DNA, 303 bp, Homo sapiens
ggagaagcagatccctataggtagccaggacacagtctgaaaatcactaaaccacagcctacacaccatttgagaagttcaaaactagattttgttcttcctttccttctatctctttcttctctttatgcccattactgaactctccaatgtcctctcaaatataaaattcccagttagatcccaaattcacatacaagtaatctaagaaacacattctaatgcaggatcctttttacaacctatctctacaaacatctggacaccttttccataaggcaacttggcaatatgcatcaagag

SEQ ID NO: 205620 - DNA, 496 bp, Homo sapiens
aagacaaggcataggttttttgtttgtttgttttgtgacagagtctcgctctgtcgcccaggctagaatgcagtggtgtgatctcggctcactgcaacttccgctcccgggttcaagcgattctcctgcctcagcctcccaagtagctgggattacaggcatgcgccaccacacccggctaattttttctatttttagtagagaccgggtttcaccatgttggtcaggctggtctcgaactcctgacctcaagtaatccaaccgcgtcggcctcctgaagtgctgggaggacaggcaggagccactgcacctggcgacaaattgtaggttttgagatgaagactcagccagtttgccacacactggataagagacccagagaggcatccaggaagccagggaagttccctcaccacccacccaagctgttagctgcagtgacgggaaagtgtgaggtggggaggcaagagatgcagaaatgacaggaggtgacagt

SEQ ID NO: 205621 - DNA, 458 bp, Homo sapiens
ggtaaaatagttgggttcaaatgttttttcaagtatatttcctttagaacaagttcctcctctcctgccccaaataattaactatacaactgttctcccaaagcaatggaaaagatctcattttgacaaagcaagctgtttatgacaaattttccaactagaaatttgcagaagaaaagttctcaaatgatgaagaagcttaatcaggcaaaaagacatttttatttgcagaaataggccctttagagggaggcaattatttatagctgataggaaaaactggtatacctgaattcgtttggtaaacttcatttaaaataggaaggttattcttgttattctagtgaaagaaaaaaaatatggtactgaattatgttacagatttatattaaagaaacaaagttttatacattaaaccactcttacagggatatatactgatttaactaaagaaaatg

SEQ ID NO: 205622 - DNA, 495 bp, Homo sapiens
atcagaaaggcctggccacctgctctgcccacaccctggagaggacaggggcaccttggggtcttctgtgggcagatgccacatggaagccattggagaggccactgcaggtcatatgggaggttcaggccaccagatgtggtctccacagggccaggatccaggtgctgcagagacaggggcggcttcctgcaggtcctagagctgggagctagagccacctccccagccatctgccagcccctcccaccactctgtctgccaagctgccccaaattttgcctgcagcaaagccctgcatttggtcccaggacagccctggacaagctccacccacagtggcctcagcacctcagcctcacccattgctgtggggcagcggcttcctccagaaatacacaaaggacagaaagccccgtggccctgagctgggcccgcctcctccacgagcgcccacttgtgcggctccacatccttcacccactgagcggccgc

SEQ ID NO: 205623 - DNA, 170 bp, Homo sapiens
acagtggccacctagatgtggtttttagctgtttgttaccttcaagattctgtgccttgtgtggagagaagacaacttcttcaacatgctaacaagttagaaatacaggtcacataaaaatacaggaaacatcttgtgtttttatgataagattgttgatgaggcagtga

SEQ ID NO: 205624 - DNA, 495 bp, Homo sapiens
ctgtgtggtcaaattaggtcaaattaggaaaaataattcctctaccttttaaattttagttcactaagttttgatgactttattttattgtggtgacgttcttatctcatctgcctgaatttgttttcccagatttaggtattggaacatgaacagaacatttttactggaaaacttggattttttatgttaccatgtggggatatatatattaagcacattctatcagttttttggaggcattgggacttctgcacaacttttttattactcagtatgttgtttaaactaattttgaccttgtttatttcccctaattgaagagtgaagttaatatgttgtgggctgtttttttttttctttgccattttcaaattattaatttcagagcaagttggttacggagtatattttagtcataaattctttgtaattattttttaaaagaagtctttattcatgaccaataataaagcagaaataattaaacttgag

SEQ ID NO: 205625 - DNA, 497 bp, Homo sapiens
aataagtagtcattggtattagggtcacatctcctttctccttcacactgatttacctcatttcattgtgtttatctcacaccattttgtaaattatcccatgttagctattgttattctcaaattccacgcatatgaagaaaaacagtaattagaaaataatagcaatatccataattatgggagctactatttactgaggggttactatccagcaggtgtatcacatttttcccataatttattccatctgtccttagccaaaatgaatgtttaactttgctggtcacatacaagttttgtcgcatattcttcttcctctttttctttatttccctctctctcttcttcattttcatctcgcaaccctttaaaaatgtaaaaatcattcttaagtagcaagccatacaaaaacaaatcgtggactagaagtaaacaatgcattatcttaattttgaacatgagattaaaactgaagcctaaggaatcatctaata

SEQ ID NO: 205626 - DNA, 301 bp, Homo sapiens
actgatccgcttaagtgagagacaggcaagagtcaagactatgcagacaattaattaactgtcttaattcaataagatttcttagaggcatcagtggtgttctggagcatgtgatcacttcttgtttttaaagataatgcaccatattcccatttgagaaaaaattcaccatattatataaatggggttaaggttctgcatcaggtttttgtactgctgctggttttaagactcaggctgctgagtgcccagcctttgcaagaatccacttcaggaataatgacatcatgccttaagcgct

SEQ ID NO: 205627 - DNA, 449 bp, Homo sapiens
cggtttttttaaatgtgcataaaaggaagatctgttggaagaatagattaacagaggcaggaatacaaataaagccagggctctgctgaatacctttgagactcggcgtggccaaagctaagctaagaggaagcctattgtgcaaatgaactggaaaacagtatttgccttggagaaatcggaggcttttcatagttactgggggaagtaactgggaatgtttttactgcccaagcaactatttttcaaatagttctattgtaatgttgtatagaagaaagcttttattttggataggcaatgggaattataagtttaaaggccgaggataatctctggaatgacgtattttagttatctctgtgtgatgtaaacaggtctttggaaaaagagtagagttgactgtgatctttcactcttgtcaataaataaagttgataaataaaata

SEQ ID NO: 205628 - DNA, 421 bp, Homo sapiens
ccaatatagagaaagtgaggaagtatgaaaacattcatgtaatcagcagtgtcagaagaatcaatcctgaaaacaaaataaagaaaaagatggttcagcaagaaaactttcatatgtggtttgaaaagccactttaagaaaaatcatgtcccaagtcccaggaattgtttacaaaataaataatgcctccatccttttagccattattctttttaacaaagtttttcattttttatcttgtcaatgtgcaaacaggaaatgatgatactagacaatgttgctcattggtcttccatatcagttcatccttccataagtattttccgtaaaacacaatgcctaaaactgcacacgagactacagatgttatcttatcagggccaagaacagtgcaatttctgactttcttatttttagtttt

SEQ ID NO: 205629 - DNA, 725 bp, Homo sapiens
aagttgcagtgaagatgttggccaaggatgcctttatctgaaggcttgactggaactgatgggtctgcttctggaggctcatgcacatgtcgttcattgttttcaggaggtctcagttcctcctcaataagctacttgaatatcttcacaacatagcaactactttccccagagaaaatgctcaaagagagagcaaggtggagccacagtgtcttttctgaccttgcctccagagtaactcactgtcatttctacaatattctactgtttgcacaaatcagccccaattgatgttgtcactgacacaagagatgcatatcaggaggcaaggatcattgggaccatttgctagctatcacagagagccaaatagaaaagaggttagcttacaaatagattttaattactaaattatggcatgattgcaaatggcaattcagccagggaaagtaatgattttttaggctagtaacatcagtcaaagagcacgcatggtacttctaagaggggaaaggtaacataaatgatatgctaggtattattagaatgccgattttatttattacactacctttgtacctcctgataggacacatgaggtggaataagggggacagttccatgtgctgctaattagattactacaactggaatgaagactgttgagttaaggaaaacatgaggttggcgagctttaacttcttgccaaggccaaggcagccttg

SEQ ID NO: 205630 - DNA, 411 bp, Homo sapiens
agtatttgttattttcctgaaataaatttaatttttagagatttggctggtaagtgtatgtatgtatgaggaaggaggatttttaaagtgtaattttcttaaaaatgtaagtaaacttttaatgctgactccctccacattagagtataatagcttaaatttttgtttaggtgcattacttttatagcactttagagaagtgctgtagaagactttggtcctttagtttttgctgttttatgtttttatagtaatttcaaatataaagctattagaaatttggcttgatttttaaaacaattttatttcgaagaaactgcatgatataagtaaatgttgaagaaaatgttggttggattgattaatgttatgatgtatacgatttggataaatttagactttaccagaaat

SEQ ID NO: 205631 - DNA, 276 bp, Homo sapiens
tggtcgctgtgctccaggacactggtcttcctgctgttacacaaacactaaagtgttttttcaaaaatacatgggcatggccaagaagattgaacttgcattcagagaaatcagatgtgggctcctccattcatcggggttaacagcattcccatacaaaatagcacctcgcataaatacgctcagagaggtgggacatgagcaattctttccaatcagcagtaacaaatttttcaaagactccctatttttttcttgagtagctaaataagcaaa

SEQ ID NO: 205632 - DNA, 517 bp, Homo sapiens
agtgcacagattctctatctgcaccacatggctgctactggggaatggtggaggggtggtgttggtgattcacggttgtcttttctaccctcttcagcaccagcactgtgaccattcatctgatttttggttcttatgaaggtgcttttttgttcttatgaaggtgcttttttgtgtagatagttattaaatttggtattcctgttgggaggacgatggcttctgtttggctgtcttgctctgcctccccaggatatgtttttatggctgaaaagagccaggtagcaaacatggacactcacttataatcaaaggcaatgtgagctaatatggaaaaagaacttagctgtatagataaataacttttactgtgatacatgaaataagaaaatgggacagagtattatcatggtttaaaagtagacagatgggtgggattcttccctattatgagagctacatttcaatcttttccctgtaattagttgatgattaaataacatatcgatctttcaca

SEQ ID NO: 205633 - DNA, 355 bp, Homo sapiens
ttggcatcgggatgtggagcaagaaatgcttttgttttcattcatcctagtgttcataaaatggaaaacaaataaggacatacaaaaacattaataaaataaattaatggaactagatttttcagaaagcacaacaaacacaaaatccaagtattgccatgtcagcaacacattcctactttaagttttatgaagttaattggagtagtggagaacaaaagtggatgtggggcagatctgcgtcctgcatgtgtcttgcagccagactgttccagctgttgcagacctcaaaatagagaggacccaggttttctgattttgccttcttttttttttttttaaatttattattgtt

SEQ ID NO: 205634 - DNA, 471 bp, Homo sapiens
agaaatagctggttatttctaagccttagaaggcataactataaatatttttcacaaaggaaccatatacaagggaaagaattcagccaactcttgtggatgggtgaggtcactaactagcttggctaccctcttttgagaaacactttagtacttttggggtgtggtcaataaaaaaaagaacttaactgagatcagaagattgaacaagggtgatttcttaaagatttttctccttccttctttggtgccaactttttaaacacgcgttacaattaagttgtaattgcttatttcccatgtctgaacaaggcaggtggttccctaatattgcatattaatcctaattcaatttattgccttacaagtaaaatttggccctaaaatgaggatggcaagtaaaaattcaaagttgatcactaatgttatttttaattattgctttaatattattaaaaattaaattccaaa

SEQ ID NO: 205635 - DNA, 341 bp, Homo sapiens
agagccaccagatagaagtgaggtctggctgacatcttgatttccgcctgtaagactctgagcagagaatcgccatgctgtgcctgtacttccgacctacagaaccatgaggtaatcaatttgtgttttaagctaataaatttgtggtaatttgctatgcagcaataaaaaatgaatacttttgtatttggctttttaaaaaaatggcaatcatttttatttggagagagctgtcttactaaacacgcaggacttcaggtggatattatcaggctcacttagtgtttgtaataaaatgaacttttttccccaattaaataaaagcattgtttttgaaatta

SEQ ID NO: 205636 - DNA, 455 bp, Homo sapiens
cctgccaatatcccaggcatcctttaagacacatttcaggtcagcttggagcagcttcccttgctccctcggcctgggccatcagggtcctggtggcactttgcacatcacccccattcattcagcacctgccagcaccaaggacttacagctatgaacaggacctagtgggtctctaccctcaaggaccttacactctagacagggaagacaaagagataaaccagaaaagggccagacagtggtaagagctgtgcagagaaaagagggtgactggggctactgtggactaggtggtcagatcagggaaagactcaagggcagggcatccaagacttcaatgaggagatggagtcagtcatgcccagatctgagcgaagagcattccaggagagggagcagctcctggaaaggccccgaggtgtgaacagagctggtgtgttccaggaacagca

SEQ ID NO: 205637 - DNA, 321 bp, Homo sapiens
agaaaagcataaaaaaaaacattgaactttatcaaaagtaaaaacttttgctctttaaacaacactgttacaaatatttaaaggcaagccacagcctgggagaaaatattgtgaaacatctacaacaaaggtcttgtactttactgttgtactttactaagtcaataaaaagtcaaaacaaagtcaatacaagacaaaggtcttgtaccttactattcagtaataagtagacaaagggccagctaaaaataaacaaagatatgtatagacacttcaccaaagtagacatacacatggcacgcgacatcgccaaaagattct

SEQ ID NO: 205638 - DNA, 281 bp, Homo sapiens
gtgtgctttttttctccaggaagcatacttttctttgccatcttcagtgatgagagtaacagagacagaaagataaaaggagttgactgctcacgaggctgttgctggactttttaggacagtcactggaagattctagtgtgtcttctgaattgctgaccataattcattctcttccctcttttgcctggtttgttatttgatccaagactgtgctataagttttgggttgataaaagagagctaagagtccatgaagcgctcacacctcccgtcgaata

SEQ ID NO: 205639 - DNA, 429 bp, Homo sapiens
attggtcttcacctggatattagaggctttaaaaaaattacagatgttacagatggaaagcaccacagtttatctcatcacacagatgagaacattgagggattctgacgtttttttcatagaacaagaactagaaaccaggcttccagttattattccatgcctttgaaccacatgctaatgaaaaggcagccttacacataattccaagtgttaaagcttcaaatagaacttggatttaagtaataaaacctattatctgacactataagcacgaaaagaactgaaaaagcaaaaagataaaatttaatacaatctctcacttatagattaagaaatgaagttcaaaggggtgaagcaatttgcttgtttgcatgtttcaaagacatctctactgatactctgtttaatttggattattaattatgc

SEQ ID NO: 205640 - DNA, 577 bp, Homo sapiens
gttctctgcttaaggcagagaatcttaatcaccaatcagatattacctgacctgcttttcagctctctgacaaagatgtgtgtgaattacagagtggatatttttgtttttttttcacattttgtcccatttgtttcttctttctctctgactcaattcccctcattataaaaaattttgattgatacttaataattgtacatatttatggggtacagtgtgatgttttgatacatgtatacattgtgtaaagaacaaatcagggtaattagcacatccctcaccttaaacatttatttctttgtgaacatttgaatagctctcttctagctgttctgaaatatatcatgcattattgttaactctagttattctactgtgcattaaaactccagaacttattctttctatcttactgtagctttataccaattgactaaccttccccctgcctccctatcttctggtaaccactattctactctgtacttctgtgagaacaacttttaagattccacacatgagtgagatcatacagtatttgcctttctgtgcctggcttatttcacttaatgta

SEQ ID NO: 205641 - DNA, 256 bp, Homo sapiens
cctaatccatttgtctgtctgtggctgaaaaaggattatgtccttttgtactgagtgtgtctctgatatgcaagaaatgattggatattttaatctatttaggtttaattggggctgaaaactttaagaccgtctactaggctgtgttattaggctaggcttttccattatctaaacactccctacctctaccacctgtcagtaattacctttttttttttttttttttttgagatgggggtcttactatactatg

SEQ ID NO: 205642 - DNA, 571 bp, Homo sapiens
aaggcagttattacatgactcagaaatggcaaaaacacaaagagaacagaaacgccccatagcgggagggatgactaaaagacatgtcttgataagatattggttcaggcataggcccaggcacagtggctcatgcctgtgatcctagaactttaggaggctgaggtaggtggatcacctgaggttaggaggcggacgttgcagtgagcctggatcgtgccactgcactccaagcctggggcaaacagagtaagactccatctcaaacaaataaataagaaataaagaagcagcatgtcgagtgtggtgctatgtagaggtgtcgggggtgattggcatccagcatccggaagcaaggtggggtagggtgcagaggtgactgacagcagaggctactgggagcagatgggaagctggttatggagctaataaagtaaattgattgagcaaataagtaaacatatggattgtaacacaagccaggcttggcactttggagaaggtgcttacaaacttggacgagacagtacccagacacatagctgaaacctgtaggtactggcaggcaaac

SEQ ID NO: 205643 - DNA, 560 bp, Homo sapiens
cacacacacgcataaatttatttaaaaacatacaagcacctctgtaacttgggatctggcattcagtgctgcctcagtggggtgcataaccctcaacatccattctcatgattgatgccatgcaggctccagggaacgcttcttctcatctttagctcagtgccctaaaaacaaaaggttacagcctctcagtgccatgaaggatggtgacactgctgatgtttgagactaacattatgttaaatccaagaaaacctagattttcttttaaaggtcagcttgtcaaatccttcttctcagacagcatgaatgcagtgactcctgcattacaacgtactgtttcccaaggatgtgaatcgtccattttcttgcttctgtcagtgttccagtttgtggttccagatgtactcaagaattagcatggctttgcaacagttacacatgacacttaaggagtggcagtaattcttattactctaaaatttctatttataaaagttgaaaatcctgtatggatttagatattcttataagggatggtacaatttacaaaataagta

SEQ ID NO: 205644 - DNA, 794 bp, Homo sapiens
accttgggcagtatggccattttgacgatattgcttcttcctttccatgagcatggaatgttcttccatttgtttgtatcctcttttatttcgttgagcagtggtttgtagttctccttgaaggggttcttcacatcccttgtaagttggattcctaggtattttattctctttgaagcagttgtgaataggaggtcactcatgatttggctctctgtttgtctgttagtggtgtataagaatgcttgtgatttttgcacattgattttgtatcctcagactttgctgacgttgcttatcagcttaaggagatttgggctgagacaatggggttttctagatatatgatcatgtcatctgcaaacagggacaatttgacttcctcttttcctaattgaatactctttatttccttctcctgcctgattgccctggccagaacttccaacactatgttgaataggagtggtgagagagggcatccctgtcttgtgtgtaaaggaatttaaagacagcctactccttctccccttctctgccccgtttatagatgaagaagtgaatggccaaaagggttaatggcttgcttagctggacagtggccatgcttgtcccagagcataggtgctccatcgcctgagcgccattccctgggctagtctgttgttagtttcaacatgtgtcataaaaaattcattggtggtttatttttagggtaatcttcttttttcctctgtctctttctttgtgtagtttctgtatctaaacttttttaatggcatcttcaaatagga

SEQ ID NO: 205645 - DNA, 704 bp, Homo sapiens
tgcttttcttcaaaggatgggttggagcgttaaaaaatgttggtgggtttgggctcgcaggaggcggcgcgcggagggcgagggcgcttttgctgagctgtgcagttcggtccgctgagcccggcggccctgcccgcccgctcgtccgcccgcggtcgctagtgttgccgccgccgccgccgccgccgccgctgctgctccatggccgcgcccgccccgcgcccccgccgcgtcccgtcgccgcccgcccgcgtccccggtgagcgctggagtggggtcgggcccgtgtgcctgcctcccgcgccctctccgaatcccggactcctagtgaaaggaagggggagggcgcgggcgcggaagggaggtggatcggagcggcagcgcggcccagccgaacgggtaccgaccgtcaccccgcgatcttcctcgcagggggcgccggcgcccaagctgctcgcccggagggcccagagccgcttcccagaccagagccgggggaggcgcagccagtagcgagccctgagcgacctctctccccactcgcccccctgccccagtgaatttctgtcagttgaagggagcggggctcttgcccggggaaaaggaaaacagttcgtggcctgggatctgggaccccttgccgcccccagcgcccctcccgctccccggcgcccttgcggcccagtggctcctgcgcgccggag

SEQ ID NO: 205646 - DNA, 601 bp, Homo sapiens
tccctgtgtggaggagggagtggggacaaaaattcactgcttttggggacagaaatgtttaaaactttacccttatgaacttggacaaaggaaagatgtggacgtctgttttgttatttgagcttaaagaagtgatttagattagcctagcaatgagcatcttgtgacctcacccaggatgtcagttcctgcaggtgtaaaacttgtgccattccaggcctcagctggacacacgatgggggccggggagtggagttgaggccagtggctgctcccaggggatcagtgagcaggtttgtttctttcccgtgttaatcctgggagaccaaaccttgatttcagctatattttccctctacctttaccagataaccttacctttaccttacataacagccactttttatatttgtgaagtaactcccccacaactttttttttctgaaagtaaaacaacttggtgacattggcttttattcttatcgggccccatatagatagtggcttattttacagcagtatttgtttacatccctacaggtaggacagtgtttcttttcacatggctgaaaacttttttttttaaagcaagaatcttacc

SEQ ID NO: 205647 - DNA, 515 bp, Homo sapiens
actctgagtaaagcatacattgctcccactcatttgttcccaaacctgtgctagctgaacttactactggattatacaacgtaaccaaatattgtgtaaataaatggtaaaatctgagggcaaaaagaaaggatgtctgtttctctggaaacaaaattaaatgcttttaaaagactcagtagtacaaagtcactaaaaaacactgtaattgaattaggcatatcatgaagcaattaagaataaaaaactagggaacactacaaaaatctagaagtagtctctgctcatgttcttttgcaaggttctttatcactccactttaaaaaaaaaaaaaaagtaaccagggctgggcgcagtggctcacacctgtaatcccagcactttgaggccgaggcgggtggatcacgaggtcaagaaatcgagaccatcctggccaacatggagaaactgcatctctaccaaaaatacaaaaattaggtgggcgtggtggtgcacacctgtagtcccagctactc

SEQ ID NO: 205648 - DNA, 810 bp, Homo sapiens
aactgggctgaagtgatgcttccaccttggtctcccaaagcactggggttacaggtgtgagccacacacttggctgacactttttttttttgggagtcagagtcttactctgtcacccaggctggagtgcagtggtgcagtctcggctccaacttcagctcccaggctgaatgtgatcctcccacctcagcctcccgagaggctgggactataggcatgtgccaccacacctggctaagtttcatagtcttagtagagacagggtttccccatgttgcccaggctggtctcgaactcctgacctcaagtgatccttccaacttggcctcccaaagtgctgggattataggcatgagctactgcacctggactgcctctgactttttgaacagataagactgattgtctcacagaatgacactatctggatttgtctgaacatttccttatggtgtcttttaatttgctcttctatccgttatattttctataaagtgggaattaggtctaaaggcttgattagactgcgagtaaacatttttggggaagaataatttgtaagtgatactgtgttcttcatattgcaggttatcatgtggaacatgatggcagttgtatcactctgtgatgctgaatttgatgatttgattcaagtggagaccaccaatgtcttcatcataagggaaatatttcactttgcagattaccatgtaatctgagggatttggcagttgaccaatagctttttctccagcacacccattgatgattagggcacttacagttattttattgggccctgcaaaatgg

SEQ ID NO: 205649 - DNA, 428 bp, Homo sapiens
gggcactgaaatgaaagcaaacagtggaagaaggattggtatcatatagaaacattttcagagaaatgataaagtaacaaagtcaaatagaaattatgatgtatttctgtaaagccacactgtgtgtacctgtctttcctgtagaaattatgatgtgtttctgtaaagccacactgtgtgtacctgcctttcctgtctttctttttacctcctccactgcctctgcctctactaccctagagaaagcaagaacagtgcctccccttcctcctcctctacctgttcaatgtgaagagatgaggatgatgaaaagcgttatgatgacccacttccacttaatgaatagtaaacacatttccttgtgattttctaaatgtcattttctcctgcttattttatagaaagaatacagtttataatacatacag

SEQ ID NO: 205650 - DNA, 398 bp, Homo sapiens
  misc_feature (347)..(347): n is a, c, g, or t
aagacagaggtcacccttggtgaggggagtgaccaggtggggacatgagaagggcaacgattctcgaaatgtgggccagggacccctgagggtccctgagaccattcagaggggtctgagagatcaaactatttttatcgtaacattaagatgttattttcccctttctgctctcatgcgtctaagaacattcactggagttctccagaggctccaggacatgtgaggacaccatcagactgacagctgatggaatgtgtacgtgtgtactcttgtgttttaaaaatatctctgtatttttgttgtgtttttgagacagtgtctcactctatcacccaggctgcttncactcagcattacatttttgagataccggcacggctctctggatcattcac

SEQ ID NO: 205651 - DNA, 151 bp, Homo sapiens
gttatttttagaattttgtgcagtttgttattgagggagtgtcagtctggtaagagcatacctggccatatgagaatcacaactccctcttcatttgtttaacttctctcagcaaggtttcagcattttaagcagaggtcattgtgtgtgt

SEQ ID NO: 205652 - DNA, 346 bp, Homo sapiens
tgggtttcgttaactctttgaatgaaatatacatatacttacttgttcaccatattttaaaaacattttaaagtagaggagtggcaaaagcagtacagttaaaataattttagacttacagaggaatggcaaaggcagtacagagattttctgtaagcccttcactcacccgccttccgctaacgtgaactcacataaccacgctacggtccccagagctgagaaacggacgttgtcgtgggactaactaaacgacggactttccttgaatctcaccagtgttttctctactgtcctttttctgttccagaacactctattaaatgtagctgtgtctccacagtcg

SEQ ID NO: 205653 - DNA, 574 bp, Homo sapiens
aaagaaaggaagcaattaaatttctgtaagagtcacagacaaccctctttagaacaaagtaaagtccataagaatgagtttccatatctctaaaactccacatagcttatttaatactgcacagaaggcgggttattgatctgtgtgtagagttgttggcagagagggagagtagtatattccaggagcttctctcagtctgcagcattactctaagcaggaaaagacccatgattccctgtagtgtcttcagctgcctctattaatccattgtcaaaatcatggcaacaggacacaaggcaaatagcagttttgtatcatcttgcttatgaatatgatcatgagtaagtgctagtagtctccccttatgcaactgggttttataagcaatagaccagatgtatatgcccttacattataaatgtacctttaaaagtctgatgtctaaatcatgataaggaatcatttccaatgtataaaacttaaaatttccagaacagagagcaatatttatttctaccagctttctctccattaaataattgtttcaatatcaggatgtgattggagcttg

SEQ ID NO: 205654 - DNA, 573 bp, Homo sapiens
gtgaaaggcatatcttatgtggtagcagacaagagacaatgcaagagccaagcaaaaagggaaactccttataaaatcatcagatctcatgagacttattcactaccatgagaacagtatgggggaaactgcccccatgattcaattatttcccactgggtccctcccacaacacatgagaattatgagagctacaatgcaagatgagatttgggtagagacacagccaaaccatatcatcccatcccagcccctcccaaatctcatgtgctcacatttcaaaaccaatcatgcctttccaacagttcccctaaagtcttaactcatttcagcattaactaaaaagtccacagtccaaactcttatctgagacaaggcaagtcccttctgcctatgagcctgtaaaatcaaaagcaaattagttacttactagatataatgggggtagaggcagtagataagtacagccattccaaatggaagaaattggccaaaatgaaggggctacaaccaccatgcaggcccaaaattcaatcgggtagtcattaaaccttaaagctcctttgcctccat

SEQ ID NO: 205655 - DNA, 463 bp, Homo sapiens
ggactcctagtgcagtgctctgtccaccatatcacaggccaagaaacaagactactggccatagttgctccttgccagggagagttctcccagaaaggggtaaggaggggaaggggtttattggggagctgctgcttttttagagtctttttttttagaaatgtatgtagtaggccgggcgcagtggctcacacctgtaatcccagcactttgggaggccaaggtgagtggatcacctgaggtcaggagtcgagaccagcctggccaacaaggtgaaacctcatctctattaaaaatacaaaaactagctgggcatggtggtgcacgcctgtaatcccagctactccagaggctgaggcaggagaatcacttgaacccaggaggtggaggaggcggaggttgcagtgagccaagatcatgccactgcactccagcctgggtgacatagcaagactccatctca

SEQ ID NO: 205656 - DNA, 1498 bp, Homo sapiens
atttggctggggctaggcttccggggctctgcagtcctcggcgtgtgctggcagcttcggagcccaccgagccgggcggctaggatgatgaaccggacgacccccgaccaggagctggcgccagcgtcggagcccgtgtgggagcggccgtggtcgatggaggagatccgcaggagcagccagagctggtcgctggcggccgacgcgggcctactacagtttctacaggaattctcacagcaaactatctctaggacccatgaaatcaagaaacaagtggacggactaattcgggaaaccaaagccacagattgtcgcctgcataatgtcttcaatgacttccttatgctctctaatacccagttcattgagaatcgtgtatatgatgaagaaggctctgtaggcagtgatcgtggcagtattgtggacactgaggaagagaaagaagaggaggagtcagatgaagattttgcccatcatagtgacaatgaacaaaaccggcacaccacacaaatgagtgatgaggaagaggatgatgatggctgtgaccttttcgctgactctgagaaggaggaggaagatattgaggacattgaagaaaatactagacctaaaagaagcagacctacatcgtttgcagatgagctggctgcccgcatcaagggggatgccgtgggtcgagtggacgaggagccgacaaccttaccctcaggagaagcaaaacctcggaagacactcaaagagaagaaggaaaggagaactccttcagacgatgaagaggataacttattcacaccccccaagctgaccgacgaggacttctcgccatttggctctggaggtggcctgttcagtgggggcaaggggctatttgatgatgaggacgaggagagtgacctcttcacggaagccccccaggatcggcaagctggagcctctgttaaggaggagtcttcatcatccaaacctggaaagaaaatcccagcaggagctgtttctgtatttttaggagacacggatgtgtttggtgctgcctccgttccatcaatgaaggagccacagaagcctgagcagcccactccaaggaaaagcccctatggtccccctcccactggcctcttctttttctcggcaccccacagcaaaccttctaaaacacgcaaagtccaatccactgccgatatctttggtgacgaagaaggagatctgttcaaagaaaaagccgtagcatcgccagaagccactgtgagtcagacagatgaaaataaagcaagagcagaaaaaaaggttaccttatcttacagcaaaaatctcaagccctcatcagaaacaaaagactcaaaaaggcttattttcagatgaggaggactctgaggatttgttttcttctcaaagtgcgagtaacttaaaaggtgcatctctgctgcctggcaagctccccacgtcggtttcctggtttgatgatgaagatgaagaggataatcttttgggggtacag

SEQ ID NO: 205657 - DNA, 1286 bp, Homo sapiens
atttggctggggctaggcttccggggctctgcagtcctcggcgtgtgctggcagcttcggagcccaccgagccgggcggctaggatgatgaaccggacgacccccgaccaggagctggcgccagcgtcggagcccgtgtgggagcggccgtggtcgatggaggagatccgcaggagcagccagagctggtcgctggcggccgacgcgggcctactacagtttctacaggaattctcacagcaaactatctctaggacccatgaaatcaagaaacaagtggacggactaattcgggaaaccaaagccacagattgtcgcctgcataatgtcttcaatgacttccttatgctctctaatacccagttcattgagaatcgtgtatatgatgaagaaggctctgtaggcagtgatcgtggcagtattgtggacactgaggaagagaaagaagaggaggagtcagatgaagattttgcccatcatagtgacaatgaacaaaaccggcacaccacacaaatgagtgatgaggaagaggatgatgatggctgtgaccttttcgctgactctgagaaggaggaggaagatattgaggacattgaagaaaatactagacctaaaagaagcagacctacatcgtttgcagatgagctggctgcccgcatcaagggggatgccgtgggtcgagtggacgaggagccgacaaccttaccctcaggagaagcaaaacctcggaagacactcaaagagaagaaggaaaggagaactccttcagacgatgaagaggataacttattcacaccccccaagctgaccgacgaggacttctcgccatttggctctggaggtggcctgttcagtgggggcaaggggctatttgatgatgaggacgaggaggtgagtccacggcacccagcaacactccctgcagctagctgtgtcaggggtccacagggaagatataggctttgcttgtttagtgggggaaaaacagtttctcagttggaagttgcttctattttcatattttgggacattttgaactaagaatcacagagtgagaaatgccgtatccttctatgctttgttaggtgaggagaagatgtgcacgtgttaatgtgaataatttactaggtgattgtttcttgccttatctgttgtcttccacgtttgtttttaattcctggacaggcctaaattattttagggtctgatttttccatagttatcactttgcaactgattttctggcagagtagtaaatatgtagctttaaatcttgtaggttattt

SEQ ID NO: 205658 - DNA, 323 bp, Homo sapiens
gggtgtcagtggactgtgccaggggtttagtgtgaaattcatcagactgcctcacactttgttaaatagtgtcagataaactccatgccagtttggagacacagcagatgccaacccgggaatttgagttctggccccatctttaatactccctgcaaaacattgctttctgtttgctagatgaagaggataacttattcacaccccccaagctgaccgacgaggacttctcgccatttggctctggaggtggcctgttcagtgggggcaaggggctatttgatgatgaggacgaggaggtgagtccacggcacccagcaaca

SEQ ID NO: 205659 - DNA, 898 bp, Homo sapiens
  misc_feature (781)..(781): n is a, c, g, or t
  misc_feature (857)..(857): n is a, c, g, or t
  misc_feature (860)..(860): n is a, c, g, or t
  misc_feature (883)..(883): n is a, c, g, or t
atttggctggggctaggcttccggggctctgcagtcctcggcgtgtgctggcagcttcggagcccaccgagccgggcggctaggatgatgaaccggacgacccccgaccaggagctggcgccagcgtcggagcccgtgtgggagcggccgtggtcgatggaggagatccgcaggagcagccagagctggtcgctggcggccgacgcgggcctactacagtttctacaggaattctcacagcaaactatctctaggacccatgaaatcaagaaacaagtggacggactaattcgggaaaccaaagccacagattgtcgcctgcataatgtcttcaatgacttccttatgctctctaatacccagttcattgagaatcgtgtatatgatgaagaaggctctgtaggcagtgatcgtggcagtattgtggacactgaggaagagaaagaagaggaggagtcagatgaagattttgcccatcatagtgacaatgaacaaaaccggcacaccacacaaatgagtgatgaggaagaggatgatgatggctgtgaccttttcgctgactctgagaaggaggaggaagatattgaggacattgaagaaaatactagacctaaaagaagcagacctacatcgtttgcagatgagctggctgcccgcatcaagggggatgccgtgggtcgagtggacgaggagccgacaaccttaccctcaggagaagcaaaacctcggaagacactcaaagagaagaaggaaaggagaactccttcagacgatgaaagangataactttattcgcaccccccccaagcttgacccgaccaaggaactttttcgccattttggctttttggaaggtnggncctggttcaatgggggggccaanggggcttcttttgga

SEQ ID NO: 205660 - DNA, 1528 bp, Homo sapiens
atttggctggggctaggcttccggggctctgcagtcctcggcgtgtgctggcagcttcggagcccaccgagccgggcggctaggatgatgaaccggacgacccccgaccaggagctggcgccagcgtcggagcccgtgtgggagcggccgtggtcgatggaggagatccgcaggagcagccagagctggtcgctggcggccgacgcgggcctactacagtttctacaggaattctcacagcaaactatctctaggacccatgaaatcaagaaacaagtggacggactaattcgggaaaccaaagccacagattgtcgcctgcataatgtcttcaatgacttccttatgctctctaatacccagttcattgagaatcgtgtatatgatgaagaaggctctgtaggcagtgatcgtggcagtattgtggacactgaggaagagaaagaagaggaggagtcagatgaagattttgcccatcatagtgacaatgaacaaaaccggcacaccacacaaatgagtgatgaggaagaggatgatgatggctgtgaccttttcgctgactctgagaaggaggaggaagatattgaggacattgaagaaaatactagacctaaaagaagcagacctacatcgtttgcagatgagctggctgcccgcatcaagggggatgccgtgggtcgagtggacgaggagccgacaaccttaccctcaggagaagcaaaacctcggaagacactcaaagagaagaaggaaaggagaactccttcagacgatgaagaggataacttattcacaccccccaagctgaccgacgaggacttctcgccatttggctctggaggtggcctgttcagtgggggcaaggggctatttgatgatgaggacgaggagagtgacctcttcacggaagccccccaggatcggcaagctggagcctctgttaaggaggagtcttcatcatccaaacctggaaagaaaatcccagcaggagctgtttctgtatttttaggagacacggatgtgtttggtgctgcctccgttccatcaatgaaggagccacagaagcctgagcagcccactccaaggaaaagcccctatggtccccctcccactggcctctttgatgatgatgatggtgatgatgatgacgactttttctcggcaccccacagcaaaccttctaaaacaggcaaagtccaatccactgccgatatctttggtgacgaagaaggagatctgttcaaagaaaaagccgtagcatcgccagaagccactgtgagtcagacagatgaaaataaagcaagagcagaaaaaaaggttaccttatcttacagcaaaaatctcaagccctcatcagaaacaaaagactcaaaaaggcttattttcagatgaggaggactctgaggatttgttttcttctcaaagtgcgagtaacttaaaaggtgcatctctgctgcctggcaagctccccacgtcggtttcctggtttgatgatgaagatgaagaggataatcttttgggggtacag

SEQ ID NO: 205661 - DNA, 647 bp, Homo sapiens
atcgtcatccaagtgttcatcctcgtcgttaagatcatatacttcctgcacgatatccatcctaacatcgtgcccaacgggcacattatctttcagacattctgggagatctccagacagatccatgagttcatgacatggacacaggtagagtgtcctttcgagaaggacaagaagattcagagttacctgctcacggcgcccatctacagcgaggaagctctcttcgtcgcctcctttgaaagtgagggtcccgagaaccacatggaaaaagacagctggaagaccctcaggaccacccttctgaacagagcctgaggcggatgcagcccgcgacgccagaggaagcacgtgcactaactgggtttaaattttgactgatgtgggttgagatgaggaggcctcactggttggggtccattttgtatataacttttatgagaaaaaaatggtaattatttcacgcatcaacctttggcacttacaaagttttttttgtttattttaaataacagggcagggccctgctttggggagggggaggggagagtatcatgggagatggtatccatgataacatcttattctaatgaaatgtagatttttattttctacttttgattattaacatcttatgaaaaaaatat

SEQ ID NO: 205662 - DNA, 253 bp, Homo sapiens
gcgggcgactccaggactccctcagctggtgaccctcagctgtgtggtcgtggtggtggtggtgggttttatcagtctgacaatcttttatcttttaattggtacatttagaacatacacatttaatataattacaaatacattagggtttacatctaccatcttatttgtgctattcatctcatctattttatccttctctcctttcttgcctctttttgacttagttttgtttttatttttccctctctcc

SEQ ID NO: 205663 - DNA, 511 bp, Homo sapiens
cccctgttggtcctagttctctctggccaccagaactcatctgcttcctcctcccacgagaaactggggagagatggagacagcacccaaagcctgctcttctttaagctgtttcctctcaactgggctttccatcgtgccattgctgggctaccttggcttggccaagccccatctcctattgtcgcagtgtgaataccagaagaagcaaacagcctgcagatgggacacctattcacccctgatgcaagtgtgactggagctattgaatgactgatgagatccgttgtaacaatcattctggcaaaggtgtggagatggctcagaggattgagctgggagcagggtggcctcagccacatgtgctaccatggctctgagcaggcagactgagcttgttgagggagggactgtctgattcagttacaattaccagatgagaatggccaattatgagagaattcagagtacaatcaagtccaataaatgccatagtgatgctgaggacaaa

SEQ ID NO: 205664 - DNA, 989 bp, Homo sapiens
cccctgttggtcctagttctctctggccaccagaactcatctgcttcctcctcccacgagaaactggggagagatggagacagcacccaaagcctgctcttctttaagctgtttcctctcaactgggctttccatcgtgccattgctgggctaccttggcttggccaagccccatctcctattgtcgcagtgtgaataccagaagaagcaaacagcctgcagatgggacacctattcacccctgatgcaagtgtgactggagctattgaatgactgatgagatccgttgtaacaatcattctggcaaaggtgtggagatggctcagaggattgagctgggagcagggtggcctcagccacatgtgctaccatggctctgagcaggatgccaagagggtctaacatccctgaaagagacagcctcttgccctggaaagatgccagagagggaagcaggagacttgagttctgatccggatctctctgccgttgggtgatcccctgccctcctctggacctcagtttccccatctctacagtgaggataataatcctagtgctatttccccatagaaatgttgtgaagctcaaaggtgagaccaaaatcactcattggacaaactccaggcagggtgggagtgttggctgggtagatgtggtcatctgccaagtggccatgctgaggctttgggggctctactcccaccaccaatggggtccttctcagagacttgcactctcttcttccagctcactcatattgtggggctcagagaatgttaattattagggcccagcccacatggagggcttaagatgaaagcaagctcagagtgtaaagtctaatcaatgccccacacttggcgtcagggcctcggcttggtctgcttggagatggatcattaatctagacactccgacttggaacactgggcacaggaagtcctgaaacattcctgaccacccacagctcagcctgtcagccccat

SEQ ID NO: 205665 - DNA, 239 bp, Homo sapiens
ctacaccctgagagtccttgccatattaacacctgccagggcagcagccttcactgaggttgcgacctggtcgccttctctccacagaaccacctgctgtcccctctgcgcctcttcttcgatgcccctctgttgccctgttcccaataacttccagaatgatttgcttgctttgataaaacagctgagtcagtttgggaatccggagtcagcaccttcttttacctaccacacgaaat

SEQ ID NO: 205666 - DNA, 570 bp, Homo sapiens
tactaggatccatactagtatcattactagtctctaccagtgggtctcaaccctggctccatactaggatcacctacagagttgttaaagcatactggcacctgggtaccatggtagactaattaaatcagcactttgttagtggaggcagagatcaatatttttgaaaaggtcctcagatgattccattgtgcagccaggtccgaaaacctctgtgtattaagatacaaagatagcatttacctaacccagtggttttatctcaaagtgcagttcctggacccaacattgcccgggctgtttaataatgaagaactttcagccccaccccagacttcctgaatcagaatctgagaggacagtaatcttttttaacaacactcctctccatccccatcctccatcagttctgatgtgcgccaatttttttttttttttttgagacggagtttcgctcgtctcccaggctagagtgcaaatggcgtgatctcggctcactgcaacctctgcctcctgggttcaagccattctcctgcctcagcctcccaagtagctgggattacaggaatg

SEQ ID NO: 205667 - DNA, 367 bp, Homo sapiens
ccccaaccccaccctggcgctttgatttccagtttgggaaattcataccaatggaatccgatgtaagcaatccaccatcagctcactgatgctctcttgccttccacacttcgagaagacctgaaatgtggtgtccattcccctctttattcaaaagaggaccttcaaaaatattcacctaactaggaatttaaagaacacaagaaattgttggtatatttcacttcaggtaactgccctaaaattaaaacctccaatttatgcaaaaaaagaaaagatggtgcttcaatttacaaaaggattcatttcagggttatctctagttgtctggtttccccaatggctggccttgccaaatgatttgctg

SEQ ID NO: 205668 - DNA, 249 bp, Homo sapiens
tacaagtaagttgcacaaatgcctggagttcagtaaatactgcgtctgatgaaagtctacctttcttttatgtctctctgtgtctggtatgtcagctgcttcctccttgcattatagttatttgtgaatgtgtattgtttccttcattatttggggtcatgtccagactttgaaggcaacaacatttagataattgacaaagaaaccaacaaatactcttatcatcaagctatttgcctatgactgcct

SEQ ID NO: 205669 - DNA, 578 bp, Homo sapiens
gacagcagggtgcccagtgtggctggagtagaagaggaaagagaatagtaagaaatggcctgtaggactgactcagtgaggtaggaagatattaaagggtttcgagcaaagggatgagataatcctggaaatttggttgccttctctctctttttaatgtttttagccttgattgatcttttttttttttttttttaaataagtgttactagaaagccttgatggaccttaatctttattttgtagtgaatccatgctttagataacagggttattttctattaagaattaaaaatagctcacgcctgtaatcccagcactttgggaggcagacgcgggtgtatcattttgaggtcaggagttcgagaccagcctggcctacatggcgaaaccccatctctacaaaaaataaaaaaattagctgggcatggtggctctcttagtttttgcctgtagtcccagctatttgggaggctgagactgaaggactgcttgagcctgggaagcagaggttgcagtgagtagagattataccactgcatgtcagcctgggtgacggagtgagaccctgtctcaaa

SEQ ID NO: 205670 - DNA, 860 bp, Homo sapiens
cgattctgtttcctcacttttcaagtgcatagtacttcataccttgaagttattttgagatttgtatctatgtattactccagaataaagaaccccaaaatttagtgacctaaaacatcagacttcttaaaccacattatttcttatgattctgtaggtcatcaacttgagctgggttcacctgggcatttttttttctcttggtcttttctggggtcattttgcagtcatctcaaggctgactctactggggccagggtctaagatggtttcaatcacgttgtctcaatgtcaaactgttagtgccggctatggcttgagtcctcatgtcttcagcaggtgacgctggactttttcacaggacagcttgtttccagtcagagaaggcaagctcttttcatacctatgtttgtgtttcatctgttaatgtgtttcatctgttaatgtctcattgatgaaagcaggtcatatgaccagttctaaagtcattatagaaggaaactacacagggatatgggtactgggagataggattcactggggtacactaatactataacaggccaggtgcagtggctcacacctgtaatcccaacactttgggaggccaaggcaggaggaatgcttgaagccaggagttgaggaccagcctgggcaacaaagtgagaccccatttctacaaaaatttaaaaaattagccaggcatggtggtgtgtgtgtgcctgtagtcctagctatttagaaggctgaggtgagaggattgcttgagcccaggagttcagaggcagcagtgacttatgattgcaccgctgcactccagcttgggtgacagaataaaatgcgatctccaaaaaaacacc

SEQ ID NO: 205671 - DNA, 607 bp, Homo sapiens
gctaatttttgtatttttagtagagacagggtttcacagtgttggccaggctggtctcaaactcctgaccttaagtgatcctcccacctctgcctcccaaagtgctgggattacaggcatgagccaccgcgcccggaagacctgactcatttctaaagtggcatgtcttcacaataaaactaatttttaaaaatgcttcatagttaattaatacttgctaggtcagtaacaaaatcttttctgctgttagaatctcagcaacataataataaataaaaagataacataattttttaaagaaaacttaatactttaggtttttgtattagatatttctttaaatttaaaaaatgcttcttgacacataactttagagttctcattctaagattgttttgtagatatagttgccagaaattaaataaaatgaataatatttcagagtggcaccaaagcttgatcatttttaaagaactcaatatttaaatactgtggaatttctgatataaatgtggctttaagatttttgtttttgtttttaacaaaagaagaaaacctaactgatacagggctattgtgtgtggtgaatattatttattattaaaat

SEQ ID NO: 205672 - DNA, 141 bp, Homo sapiens
gtattttagtaatactaatgattacaatgatagaagctatcatttattaaggaccttctatgtgccagatcccaagctaaagcttcacctcatttttttctcatatgacttcatgcaattcaaagaggaaagaataatgag

SEQ ID NO: 205673 - DNA, 593 bp, Homo sapiens
cacaaattctttgatcagaatcagttctcagtgactacaatcatgactcaaaactcttggtatatacctcaggcctgtttatatctgtgacacctgcccatttacattgaactttgttttgtttgagatagggtctcactatatcacccaggctggagtacaatggcgccatctgggctcaccacagcctcagtctcctgggctcaagtgatcctcctacctcagcctcccgagtagctgggaccacagacatgtaccagcacacccagctaattttttattttcgtagaaaccatgtctcctcatgttgcccaggctggtctgaaactcctgggctcgagtgatccatctgccttggcctcccaaagtcctgggattacaggtgtgagccactgtacccagcctcaaaaaaatttttttaaagattaaaggaaggccaggtgcagtggctcatgcctgtaatcccagcactttgggaggctgaggcaggcggatcacctgaggtcgggagttcaagacaagcctgaccaacatggagaaaccccatctctactaaaaatacaaaattagccttgcatggtgatgcatgcctt

SEQ ID NO: 205674 - DNA, 385 bp, Homo sapiens
tcagcaggtggcaaagccagacaggcttatgtccttctccttaggacggtgagttccccaggcctcaggttggtatacagatgccatccatgagccagggattggagtaaaaatccttagaaatctacctggtgttcctttgcactgcagctgagctggcactcaaactacaagctagagcccttcccactcttccatcccctttccacaggcagagcagcctcactctgtggccaccaccagcacgggcccacagggagtgctgtcagactaccactgaggttccattaagggctaagagctcttcagtcagcttgtggtgaatgttgcctggtctgaggctgactcttcaagactcacccagggcaggtccagcaatgtcatc

SEQ ID NO: 205675 - DNA, 449 bp, Homo sapiens
tctggcctcttaaaggcttgtggggaaccaatcagaacagctcacctcaggaatgctgcaagggggaattaaacttttattttcctcacgccactgcattttggtgcccctttaatgcagcagcctaacctttatcccaaagcttatatttacctttactacctgcaatgtactttatcatattctattctatttttttccattaaaaaaaaagaaatcctggtactcaacccactaaactgattttccaactcaataattggacatacaaacctacagtttgaaaaccactatggtatgaagagagaggagtaaacagataaaaatcagtaaagaatacaaatacttaaaaaactgaattaattctgaccacaaataatcaagatataactcaactggccattttataaacttctgactcaccctcctaacatttgacacaactgccc

SEQ ID NO: 205676 - DNA, 383 bp, Homo sapiens
gcgggctgagaaggcctccacatttggttcagtgctctagtgtcaccaatccttagtaacttttgaacaaggactctacattttcaagttccctggccccgcaaattatgtagccacttctgtattccctctgggactctaagacaagttatttcgcttctccgagcctcagctcttcatctgggaaatggggacgagatgttttactctctcagattctagagggcgataaatgagtgcatgcccaaaatgccttttacattctgaagcccggggccaatgccagggatttgtatcagagtgttgtcttccagtgtctgcaccttccaactctcctgggagggagcaagagctgcagaaggatgaccacaggaagactgagt

SEQ ID NO: 205677 - DNA, 473 bp, Homo sapiens
tcataattttcatttcctgggtctgtttaaattgcacagaaataacctgtttcttgaaggttggaaagaacttgccaataaaataaagagggcacagaactttttgggggcagcccttctttgacgtcctctttactttttatacaattgttggtgtgttcgggatttctccagattctttaatccaatttgatcaatataaaatacaaaaagataatttgtattttcctagaagccttctggacagcaaaggcaaatattttatactattttaaaatattttcaagttattttgcagtgatattttgatttattctctcttcagagaatgtgggttttatttagtctcattttttgaaatgttgtaaggtgctcaattttatgtgtatcccaaggatatttgatagttggacattttgtaaattttcacagctatttgacaataaattatattctctgcattgaagaatatt

SEQ ID NO: 205678 - DNA, 380 bp, Homo sapiens
tgtaggtgtttaaggtatgtacatttagtcattttcagagataggaagaatgcattaactttgcaaatgggtcccaaaggatatgtttggatattttgatactgaaatattattacagagtatgtgtgtcctagatctctaggtccttatttcactggttacatctaccttggctaatggagttctttactctgtttttattgtgaaatatttatacctatgagaaagtacagagaataatgtaacagcacctacatacccattccctagtttaggaaataaaacctaacaattacagttgaaggtctctgcgggtcctctcaggtctcataaccaggaaggagttactaacttgaatttggtgtgatcattttctacat

SEQ ID NO: 205679 - DNA, 299 bp, Homo sapiens
cctgcaaggtggccatcccacaggccaggaagtacaatctctggcaaagaccagagacaggcacttcaaaggaggagcaggggtaggaacttgatgctgaataggttggctaaacatacatattcaacaggttacaggaggagctatgaataattatgaaggtcatcctgactcatgcttattgaacaaacatgcatgtaacatacaacccatgttcactttgaggtggagacttaactctttttgttgttgttattgtttgttttttgtttttcgcgacggagtcttactctgtcacc

SEQ ID NO: 205680 - DNA, 170 bp, Homo sapiens
gtgcctctgcaactcagcggggccttgggaccgcagccaatccacctgagtccaactgcgtttcttcagtttacaaagggaggtgggggcggtgctgtttgaaccttcctcacagaattgtaataaatgcaaataaagggtttggtgcgagtacatgccatgataaacac

SEQ ID NO: 205681 - DNA, 590 bp, Homo sapiens
gtagattctgtagcactggcatgccgtagctgctggcacctacgtgtggactgacgaactttgagaataaactccaaacttgggctgttgaggcctgatacattgtcatgtgaaaggaagcgagactgatttctgccataatggataacagagatgcatttaaataagaggattagtatgtctgcctcctagatggtaaagttaatttggaatctttcatggtacatgggccaaggagggtttgcacaggaatctcccttcttttcaccccttagtgatcactttacagtcgctctgtttaaccacagaaagaaattttatgaatgttggaagcagaagatggcaactcctaatagcatctagacatataggtttggatttgaaagtgtgtatgcttaggaaagaagtgaaggtccttctttagacaccactgtttttgtcaggccagccatctgcatggatgtgtacgtgcacacgtgtgtgcatttaaggcaagtactttaaatatctttgcacagttcctactgaacatgtaagacctttggaagcaatattgtccagctccataccaagtttaatttaaaaaaaaa

SEQ ID NO: 205682 - DNA, 615 bp, Homo sapiens
attgacactaggtcgtaaaagagaattcaaacttttggagggttaatttctcataagctttatttttctattttattttatatgtatatattcttgaggcggagtctcactctgttgcccagtctggagtgcagtgcagtggtgtgatcttagctcactgcaatctccaccccaccccaggttcaagggattcttcctcagcctcccaagtgctgggattacagatgtgagccaccatgcccggcccttacgtatttatattatacaagttttcaatcataaacaattagaaagcttagcgagtggaacccctatgtacctatcacttatatttgtggtacctttttgatctctgtgtcattttttttcctaagggatttttttctcatttcagaaaaaagtgacagtgatagaggagtcttatccccaagaataaatgaaactgaacaaaaaacatggagagtattacccttcatacgaagtgcacaaattaaaacaatgaggcttttttttttttttttttttttgcctgtgagatacgggttttaaagttagaatagcctgtatgtacaagagtttaaagaaatgggcatatgtcactggtgtgtatataaa

SEQ ID NO: 205683 - DNA, 462 bp, Homo sapiens
  misc_feature (22)..(22): n is a, c, g, or t
tgtcattgtgcacctgttgggntggcaccaatgcctcattcccctcagcctcccaagtgctgggattacagatgtgagccaccatgcccggcccttacgtatttatattatacaagttttcaatcataaacaattagaaagcttagcgagtggaacccctatgtacctatcacttatatttgtggtacctttttgatctctgtgtcattttttttcctaagggatttttttctcatttcagaaaaaagtgacagtgatagaggagtcttatccccaagaataaatgaaactgaacaaaaaacatggagagtattacccttcatacgaagtgcacaaattaaaacaatgaggcttttttttttttttttttttttgcctgtgagatacgggttttaaagttagaatagcctgtatgtacaagagtttaaagaaatgggcatatgtcactggtgtgtatataaa

SEQ ID NO: 205684 - DNA, 774 bp, Homo sapiens
ttaggaattagttgtaatttagactctgacctccccacttgtctagttgcagtcctagaaagcttacaactcaacagaaacaagactgttgttggctgattgatagatcaagctaccttagtcttcagaccacatgtcgctccagtggacaagaagagcccagggaatgatctcagtgactgtgtctgcctcttcagatcttagccgggcaattttgctcacgtgctgtctggaaggctctcttcttctggttctctccttatctgttcattcctgcctgggtcctggtgccacttaggactttttggcccaagcatgtgtttgctgtgaccgcatgctcattgcagccccacgtagagttaccgaaatttgtctctgcatagtctggcgctggatttgtctccttcggcttccctgggattgcccagaccgaacctgcttacccgcttcggttgcctcccaactttgctcgatggtgttttctctgcaggatcactgtcttttgtcctcttctttacttggatgatgcctacttttccttctggttcctacaccctccctcaaggctaggtatagcctttcctctgagctcccatcgtatgctgtctgttcttctggaatgatttcaccccattccatactcacctgttgtttagttccatgggaccctcactagcctgggagctccagtaaggaagaaactgtgtgtcatacacaagtttggagctctcagcgcctgttcagagctagacatcaaaaacactcggtcctcct

SEQ ID NO: 205685 - DNA, 371 bp, Homo sapiens
ttgaaataattccagcaataataagtagaattatctccactacctgtgtttatagagaaaatgatgttttaataacgtgtgcatagaattggactatgttatcaatacgttaaatgtgtaaatattagtataaaattaatagtgataatgctgaaaaactattgcaggagctgaaagtgtaagaactatgacttaatgtaaatgctttcacacatacggtttttgcctgcaatccttatgttcaggctgactcggaatataagattcatgagtctctgtccctctttatatgttgtttcatgtgtcagaatggaaaaagcaaatatttacgtagagggaactcctccctcctgttggaggtacgcggcggt

SEQ ID NO: 205686 - DNA, 299 bp, Homo sapiens
ggatgtctgtagtaagaaggtcaaagaaaagaatgtaagaaacacttgaattttagacgtaaaagaacaggaacctacaaagatgtccaagaaacaatgttcaagagaagggaggaaaaaacctggagagtgagtagtgttacaaaatcaaagaatggatcccaaacctggttatataccagaatcatcttgccagttaaaaattcagattctcaaattccaccttggcagctttacttttgtaattaagcttgttatgtaaatcatcatccaaatttaacacccatctaaattaaatt

SEQ ID NO: 205687 - DNA, 133 bp, Homo sapiens
cactgatgacaaaaccaaaggctggatgatgagaaggcctggtatgttcaatgacacccatcacaacactgctgtcagggtggttcaaattcggaaagagaaatgctgactgatattaggtttcagatttagg

SEQ ID NO: 205688 - DNA, 448 bp, Homo sapiens
gtggcacattcttggctcactgcaacctctgcctcccaggtccaagggattctcctgcctcagcctcccgagtagctgggataacaggcatgcaccaccacgcctagctaatttttttttttaatgtagtagagatggggtttcaccatgttagccaggatggtctcgatctcctgatcttgtgatccacccacctcggcctcccaaagtgcagggattacaggcgtgagcaccgtgcccgaccaagattgaccttcttaaacaactttgtcatcatgtgcttctcctgctcagacatcctccttggcagcctttcaacacgtttctcaaatcctttcccagcttcctgtgcagcctttcctcctcagcctggctgccttactgtctcagctccgatctctgggccttttcccatatggctgcttccctctacagtgttcctcctagc

SEQ ID NO: 205689 - DNA, 589 bp, Homo sapiens
acgggtctgtttttacccagggagaaaaatgactactaataggattgtgtgagttagatttccctgtgccttaaagctgttttaataaagaaaggatgaagctgttcctaagttgttaggttcgtttgttgtacttttccactagaagccctatatctcttggcaaaggggagctgcttcacattttctcagatccttcagctcaccaggttggaacggagagatgattgacattggagctcttcagtgggcagagactggtggcctgtttgtctgtaaaatgccccagaggagcaggtggactgacgtctctgcagactgcaccttccagcaggctctagagaagagagtaagacacaggtagcaatcccagaggcaataatcatgacaaagggcttccagcagatcccaaggtggtttgggagtccttttgtaacacatcttggtcaccgttcaatattacattgctctaagatcatgatgggttcattgatcccgtcatgactggacatttctgcttctcatttctcaaaatctttcctggaagcttttttcccctgctttcccttctgtttgcctaataccagtt

SEQ ID NO: 205690 - DNA, 778 bp, Homo sapiens
  misc_feature (576)..(576): n is a, c, g, or t
  misc_feature (627)..(627): n is a, c, g, or t
taccagtaagccatctgatttcccagtaagccatcctgggcttttctttgttgaaagctttttgattgctgattttcattttcttcatttgttgtttgtctgttcaggctttgtatttcttcttgattcaggtctttgtaagttgtacatttctgggatatttccatttcttctaggttgtccaccttgtttgcatataattgttcatactagccccttctgatccctttcatttctatgccctctgttgtaaggttgtctttctcatttctgactgtatttatttgtatcttcttccttttcttaaaaggtttgttgattttgtttatcttttcaaaaaaccaactcttactttcaatgattttttttcccattgtttttcaactctcttttttaaaaatgtattttgctcttggagtttttgctctactttaaacagcttactaaagtcattttactattaacaaatacaaggctctttcaaaagctcctatagggaatacaaaatttccccatctccttataccagaaaacaaagttatttacaattcatcttaagtctcttatgatcttcanggtcttcctgaaagagattggtcatacaatccaataaactgtttgactctnttgggaaagtctttttttgccgatcttttgggatgtgtttaaccttttgttttgctctatgggagttttgccccgtcttctgcgtgttttccccctttctggcctccaaagggtggcggccctacgtttggatctttttttcccaagggtc

SEQ ID NO: 205691 - DNA, 234 bp, Homo sapiens
ggctttactcaccagatgaggaataggcattactctttccattctacaattgagaaaattaaaactcaaagtatttgacttccctacagttccataattaataagtagtaaatccaagacttggaccttgaacctatatctgtataagtacaaaaaaataggtgtgcaactaggattacagataggaatcaaatggctctaatttgatatctgtgtctattagtggtggggata

SEQ ID NO: 205692 - DNA, 493 bp, Homo sapiens
caggtcttaggaggctgaataagagcaaaaaggaaacactaggtaagaacaaagatgtgtatgaagaaaacactgtccacccctaaggctgtgggaacaaagggagaggttaggattaacacaagctagtagcccagagaagggtccctgcagagcctggtgctccccagctggagctgctaaccaggagatggaaggccctgcagagctggggctgaagccttagcaccttagctcagaggagagtgtcagggaagctcagacctctgaggagacagcactgcctgactgctactggtaccttgaaggggtcaaaataaagttggtctgtaagtgctaaaatgcactgaagactgaaatcaactattgttgcttgaaataaggccattcctggggacaatatggggccgttcctgggggcaaggaaaggggatagagcacttctctgcttccccagctcctgtctgccagtctcccgctagtggccgctccg

SEQ ID NO: 205693 - DNA, 334 bp, Homo sapiens
gaaagtacttcctggaaagaggtaatgggttcctccttcaggtagaaaaaatataattaagtgaaataattattggtaacactgaggtagcgagagactatcacatgtgtgtttaatgtttcttcttatctggccatatatttgctgtttttaattatctagtatttaacttgcaggctgtgtagttgaatgtgctcctttttacataaataatatgctttaaataaataacatgcttataggaaaaacatacttgactctcttatatagtctctcagctctggggcacctgggagaatgtaaccatcggccagtcccatacatttcatggctg

SEQ ID NO: 205694 - DNA, 504 bp, Homo sapiens
ccaggagcccgagacataggagaatctgctccccaaaaggaaaacaatggtgtcccctccagcccgcctcccatgaaccagaaacatgttataaaaggtacaggggaaggaggaagagagaggggagagacagagagagagagagagagaaagagagagagagagagagacagctcacccggtgccccagtgggggagccggggaagggagtccctccctccccacccgccctggatgcttatacacttctcctgaaggaggcaaaagaagtatgagaaaaggccaggtcccccgaaagggccagggaccaggaaggagggacagagagagacagaaacagcgagagagagaaaatcctgcccaagctcagagaggagcttccgtgggtatctggagggtggagatgcccgtggccgcaccagggctgttttggagcatggagcaccagtcctccccacccccaacctgatccccatctctgaccacctggagtcatcacgtct

SEQ ID NO: 205695 - DNA, 459 bp, Homo sapiens
aaagagaaaaagagaaagagaaagaaagagaaaaagaaagaagaaagaaagaaagagggaggaaggaagaaaggaaggaagggagggaggaaggaaggaaggaatgaagggaagaaggaagggagggatttcctagactaactcccacattgcatctatcattttcttcatgtctgcactagtaattgtgtaaattatagcacattgttttgtttatatacatatacatatgtgggtgtgtggtggtggtgaatgtgtgtatctataggtatgtgtgtggaatgtatataaatcttctttattgtttgaagtgctcatgtgtaaatgtttttgccttcaacttcattaaaattttttgagggcagaatattttaaagtcttcaataacaatcattatattactttaaacgagatcagataaaaaaggacataaataaagtctactgagttataaaagga

SEQ ID NO: 205696 - DNA, 436 bp, Homo sapiens
aggggatgcctatagcgtctgtgctactatagttaattacattttcatcaaaaactaacaactcatggtcaccaactccagtgtctcccagttgtcaaagccaaaatctaaactcaggtctatcactgacttcctacatgaccaccggcacccctggcacaccggcacctcacagctgtttacggaccttcccgcttccctttgagtctctctggagaaatgagggcatcctctgtatgtcttgctggatgtgagggagacacagagcacacgagggcttctgaaatctggccttgggggaataagaagccttttatgcttctggagtatagatttgtgcctttcctgcttctttcctgccagagttcatctggcagagctaagcctcaccccaggctctggggtccgggggatactgtcctcccaggtcagccac

SEQ ID NO: 205697 - DNA, 524 bp, Homo sapiens
gccaaattctagctggctgtttttgcaaaacctgcagaaattgatatggaaatgcaaggaactcagaatagccaaaacaatcctgaaaagaaaaacagagttggaagacacactccccaagttcaatccttactaaaatctactataaggagcactatgtggtactgaaataaagatggacatatagatcaatggaacaaaactgagaatcagaaaatagcccatacatctatgattaattgatttttgacagtggcactgacaattcaacgggggaaatgaatagtcctttcaacaaattttgttgtgacaactggataaccagatgcaaaataataataataataataagttggaccactacatcacaccacatataaaaattaactcaaaatagatcaaagacctaaaggtaagagctaaaactataaaacgctttgaagaaaaccctggtataaatacttgttatcttagattaggcaatggtttcttaggtgtgacacctaagacacaaccaaaggaaa

SEQ ID NO: 205698 - DNA, 305 bp, Homo sapiens
ctccactgaggatcctgggctgctctgtcccgcgtacgggcatccgggttctgatagcccgccgggccctgggccaccagaggccttgaattgcgtcctggtgacagtcagccccttgcatggggcacgcacagacctgggcctaggctggggcaccgagatccccacatccagcagccgcggtgaggctggcctgcctgcttcccggggccacctctgccgtgccgtctcctccctctatcactgctcaccggctgagggaggcatcagtttcccgtagacattccaccacagaggaccgtaag

SEQ ID NO: 205699 - DNA, 390 bp, Homo sapiens
gtatatatgccacatgccctttttcctccaatttattgattaacttaaatgtagatttatttctaggcagtgagtataggtgttactaacttcctgtttagctatcaaaaagccaatgttttaaaaatgctttttgctgcctctattagtgcatcatttttaagggttatttgtttacattgcaagggtaagaattacattaactgcatgtgatacctatgttattacaatgtgattaaatacagttgtatgcaagatatatagctgtgtgtaaatattatatacttcatatcaaactgcaattttaaaatggattatcttgtaaaagtgtgtctagtgtcagaatattgcataccctgcatacgtgtatgcattcttaaatttggtctg

SEQ ID NO: 205700 - DNA, 322 bp, Homo sapiens
gctcccattaggtttaaaataagcactgatgtttctgttctttctaaaagtcggcgctttcagttgcttcccttttgtgaacaatgacatcaaaaaataccatctcccagtagtctattctaattcaaaaggcttcataaaacatcaggtggattaggtgcttatttaagccattctctaagtgggggcatccagggctagacatctggcctttaatcagaagggctgccctccagagacagctactaccagtgtctctgctatttttatagttttatatcagatcaaattagcataataaatgttagaaattggatatcca

SEQ ID NO: 205701 - DNA, 482 bp, Homo sapiens
gaggggctgtcttctcctctggtggtggactgctcagtccaggcatcctgggagctgccttattgccccatgaactgtaatgctgtgttggctttacctacaactgcatgggcctgctgtgtgtcaagggttaaatgggagtggatattcaaccctgggtttgtttggtagcctctgaaattaataaggaagaccaggcatggtggctcacacctgtaatcccagctctttgggaggctgaggcaggtggatcatttgaggttaggagtttaagaccagtttgaccaacatggtgaaaactcgtctctactaaaaatacaaaactagctgggcgtggtggcacacacctgtaatcccagctacttgggaggctgaggcagaagaaatgcttgaacccaggaggcggaggttgcagtgagctgacagcacgccattacactccagcctggtcaacaagagtgaagctccatctcaaaaaaaga

SEQ ID NO: 205702 - DNA, 269 bp, Homo sapiens
aataaggatggggtcaaataaggtgaaagatttggggaaaatgaatatatatcccccaaaaggtaaagtgagtgataaaaaagtttacattagaaaagcagcatagacttaaaagtagatcatctattttatatgtatgtttagtaagaaacagactagtgattttgaaattttggttggggatcccagggtgtaaatttttgccatatgaaagaaagtttcagttttaggaagcaaggaacagtagaaaatctatgagctctagagtg

SEQ ID NO: 205703 - DNA, 765 bp, Homo sapiens
catccccactgtcccatcctgagcaggcagttggattacctctgggtgccactcttagctgtatatcagcttagttcctagtctggcagtaagttcttagtcctagacaaagagcaataagaacccagctcagctgcagcaggctcggagctcagccatttctcacccctgccacactccccaccactctaacactaaaggcaggagttctgtttgtgatatgactctgcctttatagtgggggctcctgtggggcaggccagtgtcttacacagcttcgtcacacatccccactgtcccatcctgagcaggcagttggattacctctgggtgccactcttagctgtatatcagaatcaccagtagtacttagtaatttcagtgcttttagtttttgcttttgttttcagaacttgcagtaaaatcagatagtacaaaaggtgaaagtgaggtttttcttccagacttcacgttctcatttccttatgttttatgagataaattccctgcatatatgaatgcatatatattttccttccaactttgtcattgttttgtcttaatacatatggccaaacatgcatattaaccagtttggttttttcacttaccaatatgatttgaagatcattccgtattcagcacatacgtctgtttctcgttaagtatttatttacacctcacaacaactctgtactcccctgttactcccccattttacagaggagactgtaggtctggagatattaaatgacttgctgtggg

SEQ ID NO: 205704 - DNA, 732 bp, Homo sapiens
ctgatgatggtgaatagaaaataagggccaggtgctagaagaactgggtcaggagtgtctggcaggcattcattcagtcttgggactgaagatatggtgagtaaagttacaaattaatgtcgagtaaagaggaagttgtggtggcgataggggaagatacaggagcacagatggctgggtggccttgatctggtccctaaagctgcttggttggagctgctgcaggttaaaacccctagggcaaggatgtggaatcagaggctgcaccagtaagaaatctctttccaagagattttgtaggggctttgttgtattatttgacaacagtcaattctgctacagatgaacaagaaaaagaagatggatgaaactcataaacgtgtgttaagtatagataatgactatgtagtagcttataagacacaggtgaaatgtatgtgttacatttagataatgagtaagtaaacagacatacaatcattcccccttatctatggtttcgcttttcaaggttttagttacctgtagtcaaccatggtttgaaactattaaatggaaaattccagaaataaacaattcataagttttaaattctgtgccattcttctgatgaaccctcgtgccatcctacccaggatgtgaatcctctctttgtccagcatatccacactgtggacactctacacccaggagtcactaagtagctggctcagtatcagtttgactgtcttg

SEQ ID NO: 205705 - DNA, 147 bp, Homo sapiens
tttatggatattcaagattttgtttttcctttcagacaaaacaatattttatatactgttttcccaagtatctcaaaagtggtatcacaatacgtttttgatataagcctttatgtatcagtgacccctatgttttttttttttagg

SEQ ID NO: 205706 - DNA, 508 bp, Homo sapiens
atggtcatttgttagcatatggctacttaattttcgaaagggagttaagattttagaaattgtcggctatacagtcagggtcctggcagaaaacagatggcacacttaaaccggtgatgaagataatttaataaaaagattctttgtcaaggtgtggacaagatgtagggatcccaaaaagggaagatgcagaatttcagggctgctggacaaggagcaggtattacaccccagagggtagttgtatagagagggcacctgacaaggggagtggccatcagccaacctgtgggaactctggaggagccagatctcactctgcctacgttcccaagcttctgcctactgccttctgttgggtgaacccaactggaagtttgagggcaagagagcttattgatagggttcatgatgtcatcatgttcctgggacaccagttgggatttaaaaaaagtgggaaaggggatctggaggagtacgtggaaaatagcaaccatattagccgaag

SEQ ID NO: 205707 - DNA, 752 bp, Homo sapiens
gtccaggagtttgagaccagcatgggcaacacagtgaaaccctgtctctaccaaaaaaacaaaaaataaatacaaaaattagtcgggcatggtggcatgggcctgtagtcccagctactcaggaagccgaagtggaaagatcacttgagcccaggaggttgagcctgcaagtgagctgaaatagcaccactgcactacagcctgggtgacagaacaagaccgtgtctcaaaaaaaaaaaaaaaaaaagatgctgtggaataggggataaggaaattccaggagccctcctagaggaggttggacttctaaggcatttggattgagatactaagagaggaagctagaggagaactcagggacagagaaaaagttggatgtggccactgagaggatttgtgtttaggagcctggagcttactgcttataagaagggatgaattaggtgaaagggaccttgagacaaagggaaataaaaactcttagagtaatgaaaagtgaaaattattcccatttatgtaaaatatatatatttatgtatgtagattcatagaaaaaagagttaatagtttactctggaaaggggaaaggaaaaagatgggggataaaaaggaaactttcatgttttactctatataattgtgtgttgtttgaatcatttacattaagaattacttgtgagccgtgcctgtaatcccagcactttgggaggccgaggcgggtggatcacctgaggtcaggagttggaaaccag

SEQ ID NO: 205708 - DNA, 195 bp, Homo sapiens
ggccttaaaggtagctattcttatgtgcatttacagatgaatctgaggttcagacaagcacagtgatctccatgagtggcagagccagcctcagaattcagtttatccagttccaaatccaatactttcaaattagcaacaccccatcagatggaacctgggaatgtgattcaccacacagagttccggcattaa

SEQ ID NO: 205709 - DNA, 510 bp, Homo sapiens
ctatgtatcaataaagaaattaagaaggaattcaatttacaatagctacagaaaaacacttaggaaatcatttaaccaagggagtaaaagctcactacaagaaaaaccacaaaacattgatgaaagaaattggagaggacacaaacaaatgaaaaaaaatctcatgctcatagatcagaagaattaatatcattataatgaccatactaccgaaagcaatataaatatatatagaatgaaatctctacatagtttcagtgttatttttcacaaaaatagaaaaaccataaaattcatatgaaaccaaaaaagagtcagaatagtcaatctaatcctaagcaaagtgaacaaagctggaggcatcacactacttgacttcaatatatattacaagggtctgggcatggtggcccatgcctgtaatcctatcactttgagaggccgaagtggcaggattgcttgagcccgggagcttgtgatcaagcaatatggtaggaactcttctttaca

SEQ ID NO: 205710 - DNA, 578 bp, Homo sapiens
ttcggaaactgcggagagttctcctgccacaattctcttgttgtcgtcaaaagcaattacatgtttcagatgatgaaaagcactgtcatgaaaagctggcacagcagccaaggagacagatgtattaaaccacacggcttctcagaactcccacttacgttggagctcagcacagagatgagcatggtgatatccccccgtctaacatcctcccatttggatttaatgcatgaggctcgtttctgatgaggtgccaaattctttcggtggacaaacacaaagttgcagaattcagtgatcatacaagtccatgtcctcaaacgaaaataataatactataaatgcaaagatgctaccataaaaaatacagtaggtggacttttgtgagtcaacataaaaaaatccagcatttctaactggtagcatgaggagtaccagtctgcaggatgttaacgcactgataggctatggacaatatattccacacttacggaagtggggaaactataggtcagacaaagctacaggtacttctttctttcttttttctttttttctttctgagatggagtctccct

SEQ ID NO: 205711 - DNA, 502 bp, Homo sapiens
gtggcttatacagagagtggagtctgagctgggggtgaaaggattgaacggcaattggatgagaaaaataaattagaagataagcattcaggacagtggaatactgtggaagtgaggacagaagctgaaaggcatacagtgtggtcagagtttatgtgaacaagagagtgtgagtagggaaggagtagatgatgagaccaaatggttggctggagatagagtatgtcaatatcaggatggcagcctaagctgtttgggcatcacacagtggcactttcaagtcactggtggcttctgagtgattggtgaatggaatttttattgatatgattggacaataatacataaaatggattaacttaaggactggaagctgggaaacatgttaagaagcccccaaacagtggccctaaaatagggttgagtgatgaggaagcataagccaagatttgttcatcatctagtgtgtgccatgtgccagatactgacctgggtgccttta

SEQ ID NO: 205712 - DNA, 241 bp, Homo sapiens
ttcagtcatgaaaccactcctagtcccaagcttactgatgatgcagcaggttgccagagtaattcggttaatcacttaaccaaagggaagaaactagtttaacaattatctgaggctaatttctttctaaattattccagcacgcaaaagaaataagaagtagcctgaagaaaaatctgtgaaccaaaggtgtactaaatttttgttcttgacacaagatttttagttgactaaaacagag

SEQ ID NO: 205713 - DNA, 174 bp, Homo sapiens
aacgagtggctactgagagtattccagccttcaaaggcaggctctgagtgcaaatttgaaccagcctcggggcagccattaaaactaattaggaaacaaaactacctcatgctcagtgaatatttgtaggttctggaaaattctgaaaggaaaggagtgattctaattagaagc

SEQ ID NO: 205714 - DNA, 452 bp, Homo sapiens
cagacataatcgggttgagctgtggaaatgtgttcttcaacgttggaggtgggatctggtgggcagtgtttggatcatggggatggatccctcaggaatggcttggtgtccaccccacggtaatgggttcacaagagatctggttgatgaagagtctgggacctcgctcctcttccttgcttcctcactcaccatgtgatatgcctgcaccttccaccatgattggaagcttcctgaggcctcatcagaagccaagcagatgctggtgttatgctggtatagcctgcagaaccatgagccaaataaaacttttttttttctcaagatgggggtctcaccatgttgggcaggctggtctcaagcaattctcccacctcagcctcccgaagtactgggattgcagagtgagccaccacacccaaccaaataaaacttttttctttaattacaaa

SEQ ID NO: 205715 - DNA, 786 bp, Homo sapiens
tgtttgcagtaaatcttgctgctgttcattgtttgggtccacactgcctttatgagctgtaacattcactgtgaaggtctgcagcttcgctcctgaagccactgagaccacgaacccaccagaaggaagaaactctgaacacatccgaacatcagaaagaacaaactctggacacaccgcctttaggaactgtaacactgactgagagagtcccagacttcattcttgaattacagggctttgactcttgggtctgaagaaggcaccagcccctgctaaattctgagcattgacaccagtggaagcctcatcctcagacttggaagaaggtggtctagagatttcctgccttctgaagcttgtctgggaggcaggaagaccacggcggaggagaaaggagcacttctacacacctcctcactgacacccctgcctgcctttgtcagaccttcggaggaggcactccatggagaaagggctccagctgacactctgagttgtgcagcgtggggtggggtccggaagatgtactattccaggaaacgattctactccaagatgggggggccagcagaatcgcccaggccaggctgtggcagatgagccgtccctcttacaggcaggtgaatcgggagctgtccctctgcctggaatactcccctaaggccctccacagttgcattgaaaatgtcacttgatgcagctgactcatctgggcctgaactctggatgggctggacgactgccattaggttcctttgactggaagcacactgggagaggtgc

SEQ ID NO: 205716 - DNA, 240 bp, Homo sapiens
tctgtaaaactgtcaattctccccaaatcaaaaatctcaaaaagatttttctattaaactggaaaagctaattcaaaacataatctagaatagagaatagctaagaaaattaaaaaaaaataatatgtatagcgcgatccaatttagagaatccatatgtacacatcctccacgtgacaaaccctaaaagaaaacagaaaacattcccgtcacgctgcacccagatggaatttcttccca

SEQ ID NO: 205717 - DNA, 385 bp, Homo sapiens
tgtgcatgcttatgtagaagtgacatgtatcagcaatgatacaatggagaggagggagaaattaggattattttattataataaggtactcacactactgatgtatattgcaaactctcaagcaaccacttaaaagtaacactataccactaacaacttaaaagtaacactataccactaaatgcacattgcaaactctcagcaaccacttaaaaaagcaacaaaggaatataattcacatatcaaaaaaggaaagaaaatggaatcatataaaatgctcaattagaaccacaaaaggcataaaaagagtagaagacaaaaataggaacaaagaacaagggcaacaaatagaaaagaataacaaatattgtagatattaaaccaa

SEQ ID NO: 205718 - DNA, 835 bp, Homo sapiens
  misc_feature (387)..(388): n is a, c, g, or t
gagaagcagaagctgctggaggagaaggagaagatgctggaggacctgcggcgggaacaggaggccacagagctgcttgcggccaagtacaaggccatggagagcaagctcctcatcgggggcaggaacatcatggatcacaccaacgaacagcagaagatgttggaactgaagaggcaggagattgccgagcagaaacgtcgtgagcgggagatgcagcaggagatgatgctccgggacgaggagactatggagctccggggcacctacacatccctgcagcaggaggtggaggtcaaaaccaagaaactcaagaagctctacgccaagctgcaggcggtgaaggcggagatccaggaccagcatgatgagtatatccgcgtgcgnnaggacctggaggaggcgcagaacgagcagacccgcgaactcaagctcaagtacctaatcatcgagaacttcatcccgccggaggagaagaacaagatcatgaaccggcttttcctggactgtgaggaggagcagtggaagttccagccactggtgccagccggcgtcagtagcagccagatgaagaagcggccaacatctgcagtgggctacaagaggcctatcagccagtatgctcgggttgccatggcaatggggtcccaccccaggtacagggctgaaaacataatgtttctggagttggatgtgtcccctccagctgtctttgagatggaattctctcacgaccaagaacaagaccctcgtgcgctacacatcggagaggctcatgcgattggacagctttctggaaagaccttccacgtctaaagtccgaaagtccagatcc

SEQ ID NO: 205719 - DNA, 328 bp, Homo sapiens
gttctcattttaagtaaggcaagactcttactgttcaaagtctagtcctggcagtcctaataaggatacggatagaatgtacatgtgtcttacgagattgatagaaaacacagtgctaaattttactttaaaataaaactactatattgatctccaccttcaacccaaggtattgtgagaaatgtggaaaatagtggagtaacaccggtattggtaaaattagtagtagtattagtaattatcaatgtcactgtatgtattagagaatatttgtggaccactgcaccaatagtacagtcaaataaattggagtatagagttgtttgag

SEQ ID NO: 205720 - DNA, 709 bp, Homo sapiens
ccagcctgggggacagagtgagactctgtctcaaaaaaacaaaacaaaacaaaaaggaggcatgggggactcaaacatgcaaaggcagcaagggacacacttgaggagtccgagggggattgtgggtgagatggtagaagatgaggctgcaggtataggtagggaccaactgagaatgtgtcaaaaggctcgggcttcatcctgaggcctgggaggccactagtgggttctgagcaaagaaacactatggcggatcactctggcataagccgggagacttggggcttgtgttgttaaatccctatggggaaatccctttggaaatgttgacctgagagacgagaaacccctcagaggaatacatatggcacttttacttgaattccttttcatttcgcctagaatttctgctttgcaccagctgtttacatataatttacaaaagtacattaatgggcttgattgtgtttcttaaaactcactgagaagtaaccccaagtaaaatttttccactggggcatgttcttaatacatatttatagttactgaatccatttgagaatgtagaaagctcttttgaaatgttgcgggagtacatgacatcttcaggtagggttttccccagtcctggcaaggggaagagaaggagaattaatgtctgtcaagtagctgctataggccggacactgatctagattctttgaattca

SEQ ID NO: 205721 - DNA, 396 bp, Homo sapiens
gtaagtggcaagactgggggtgggcccaagttcatatgaagccagaaactgtcctctatccaccacagtaccctgcttttcatttttaattcctttttgtacagcatcactgtgtatttctacatggagtctagattgatagtggatttctcctttgtatggtactgatatattgttacagtgtcattaaaatatcttggtgtcagcaggtcagggatgggactgactcgttagtgtccagtatttcacaggctacagtggattttcacttcattttataatgtgatcccataggccagggataaattgtgacttcagaagagtaaaggttaatattaatcacagttcattttttggacatactgttcttttacggagctgcctctttatgaaatt

SEQ ID NO: 205722 - DNA, 494 bp, Homo sapiens
aataagcaatgttaaaaataattataaacactaatgaatacaaccaaaatcatggcagtaagcacttgttaggtgcttgtggctggcaggtactgggctaagaccttcatatttttctagccccacagacaaacttaactaatctgtattactctctgcctatctaagtcttactaattctcaaaaggagttctcttcaagcctttcctgaccaccctgctcagaataacctccccattcatctcaactggttatctagcactgagtagagactggttggtattgctggtcatttttttcagtgtctgtgtctaatcccaatttcaccatcaatacctacggcaagaaccagaatagaccgtatgcattttctaaatacttagctgattttacaatgcatgttaaaagcgtcttgtaaagtaagtactaggagagtgctgactagaggagaaaatgaggagaaaaaaactagataagaagaaaaaaataaaaaa

SEQ ID NO: 205723 - DNA, 464 bp, Homo sapiens
gtggagggtgcatttgttttgtcagaggagccgggaaggcttccccgtggaagaggcgattggactggaatctcaagggcaagtggtagtgatctaggggaactgatgtacgatctgggagctcatgaagggttttaggcaggaatgggagaagatttgtgttttgaaaaagtcactttcgccgggcgcagtggttcacgcctataattccagcacttgggaggccgaggcgggtggatcacttgaggtcaggagttcgagaccagcctggccaatatgatgaaaccccgtctctactgaaaatacacaaaaattagccaggtttggtggtgggtgcctgtaattccagctactcaggaggctgaggcaggagaatcacttgaacctgggaggcggaggttgcagtgaaccgagatcgtgccactacactccagcctgggaaacaaagcaaaactctgtctcaa

SEQ ID NO: 205724 - DNA, 759 bp, Homo sapiens
gggcttcaccatgttggctaggccggtcttgaactcctgacctcaggtgatccacctgcctcagcctcccaaagtgctaggattacaggcatgaagccaccgcgcccagccaagaattttactctttattatcaataatgtttcagcatggaacagttattttaatttgcttcaaaataaattagccagattgggcacagtagctcacccctgtaatcccagcactttgggaggccaatgcaggagaatcgcttcagaccaggagtttgagaccaccctgggaaacagtgagactgctgtctgtacaaaaaaaaataaaaataaaaagtaaaaaaaataaactgggcatagtggcactcggttgtagtcccagttacttgggaggctgagttgagtggatcacttagctcaggagtttgaggctgcggtgagccatgatcatgtcactagactctagcccaggcaatagagtgagactctgtctcaaaaaaaaaaaaagggaaagaaaaaacccaaaaacaacaaagtagcccactttcctttaaaaaaaattttttttatttccgtggatttttgggaaacaggtgatatttggttaaatgagtaagctctgtagtggtggtttgtgagattttggtgcacccttcacctgagcagtatacactgaaccaaatttgtagtcttttatcgctcaccccctcctaccctttccctctgagtccccagagtcctttgtatcattcttattactttgcatcc

SEQ ID NO: 205725 - DNA, 629 bp, Homo sapiens
tggaatataaggagatttgacctgtgctgctgtgattaacagacatcagaggcatggtaccatgaggacagagacctcaactgtgtgttcatcattaagtctccagaattcagcaaaatatatggcacatagaaggaagaaaaacaacagtaactagatgaagcaaggaccacccttctggacaacaaagggagaggaatgaaagtctgacctaggaaaagacggagtctcgctgtgttgtccaggatggagtgcagtggtgctttctcagctcactgcaacctctgcctcccagttcaagcaattcttctgactcagcctcctgagtagctgggattacaggcacctgctaccacaccatgctaatttttgtatttttagtagagacggggtttctccatgttggcctggctggtctcgaactcctgacctcaggtgatccacctgcctcggcctctcaaaatgctaggattacaggtgtgagccaccacacctggccaacttatcctttttttaacatctagttttctgtgagtgttttctaatgtgcactgtagacggacatagtggtatgtgattactattcatagataaataataatttgtttattattgtgtaataaacattg

SEQ ID NO: 205726 - DNA, 484 bp, Homo sapiens
gtgtagattgcactaaatactgaagggttctcactttaaagactccatggataaggagtggcttcaggaaagctcttgaacatttaggaacatgtaagtttgcactgcatgagacttagattcattatctgactcaggaaattgggatgtaactaattatccctcaaaatatctaacaggaatggagtctcctcagtcaaaaagaaaaagaacaaggttgatattttattccttttttgaattatagtatatttgttgtagagccattaggtgctttagagatatttgacttttgacatataacatacataataaagtgtgtaaaaggtactggtctaaagtgtactgctcaaggagaatcacttgaacccaggaggctgaggttgcagtgagccgagatcgtgccgctgcactccaacctgggtgacagaatgagaccctgtctccaaaaagataaataaataaataaataaataaataaata

SEQ ID NO: 205727 - DNA, 265 bp, Homo sapiens
tagatgaggagaagaactgggtcaacagagagtccaggaatgtatcaatactggaaaagaaaagaaaaagctctcattctgtggtagcagctgagagcagattcacaaaatactcctccaaaagaggcccctgatggaaaatgttggtgattggctcagaatcagtcagaagcactcactggtatgcctcccaatagttctagagcctggtttcgttggatattgcaagaaaatgaatcaataaatacatggtgcactgtggggg

SEQ ID NO: 205728 - DNA, 524 bp, Homo sapiens
aattgcaagcagagtctggagatttttctttcttgcttctgttgtatgatatattttagcaagttctcttgagactattaaaatgtcttggtttttaggacatgtgatcaggtggggataactttgtctatagatgcagtgggttagcagttagattttgcatgtcttctcatttctttctagtttctctgaccccgggtaacctttggaaggacctttggttcttctgaaggcaggagtgaaggaggtttgagcaggtgactgatgatcactgtctctacagtccacagacaatatacgaattactttagcagtccccttagtcccctcctcccactcctccccccttaaaccaacaaatgcaaatagcttcatccccatttgctagaaattcaggcttgctcaggcaacatgggctttgttgacttgctttctccagaaaggcaattttattcctggtaaggagcaaggctatcctatcatttggaacctaaatcaccttaacggtaaaaacagcaacaact

SEQ ID NO: 205729 - DNA, 380 bp, Homo sapiens
tgggttcacacagcaacctcttcagaggtctagcccagttcttctcaagctttggcaagcatcagaatccctgaggactggctaaatagattgccaggccccatcccagagagtctggttcagtaggtcagaggtggggcccggaatctgcacctccagcaaaccctcagtggcgctgatgctgccagtcctcagaccaccctttgagacgcactgctccagggaagtaccgtgatgatgaggggcaggcaggctctgcggtggggctcggggcaggccctggcccctgctgtcatagttgcccagctttcacctatgaagtggagataacgccagcccctccctcactgcatcgcagaaatgaaggaatgaaatgtaaa

SEQ ID NO: 205730 - DNA, 860 bp, Homo sapiens
ctgcctgggggtacctctgcagcatcattgtcagtggtgaccaccaaaattatccagttccagcatggtcaagaagctgaatgttctcctgcagcccccagggtaccacgcacggggctgggcacactgcaggctcccaacatatggagaaggcagggaagccatcctctcccaggaaggacagagtgtccctccgtccagccactctgcctgcctcctccagcaggacatcatagaaatcacagcatcttgggacagacagacaaacgcctgatctctatggctgggttgtggagaggacagtgagaagagactacaaggagtaaaacagtagcagagacaaggagggggctcccctgcaacccctgagctctggcccacacctccttttctcccacgcgttccctccagggcatctcagatccattcaactgtgtgggttgaatggcagccctcaaaatatacgtcctcgcgctaatccccagcccctatgaatgggacctaaaagggtctttgcagatgtgattaaattaaagaacttgagatgagatcatcctggattacccgggtgggccttaaatccaatgacaagtatccttatgaagtgacacaaaagagagagacagaggagaggtgaggggagacggaggccaggatgggagtgacgctgccacagctgagcatcatctgagacaacaggagctggaagaggcaaagagggactctcctctagagtatctggagggagtgtggccctgataccttgatcctggtctccagaactgtgaaaataaatgcccactgtcttaagccctcctggtgtgtggcaacttgttatggccaccccaggagactactgc

SEQ ID NO: 205731 - DNA, 308 bp, Homo sapiens
tggttttttcttccttcttttaagaaatgaggaattttatgctgacagtgttgagtgaagtctctaaagatacaattttgtatacaaattatttttcgtatgtacaaattttgtatacaaaattttgtatgaaagatacacatttgagcctttggatcaccagagactgagaggcacttgaattattatgcaactgctgatattgagagtgttagtcaacctttaagatgaaagaatcttggcaagatactatgtaatgcaattgaaggaggtccaaaatggacgcttgcatgtgtctttcccgagcg

SEQ ID NO: 205732 - DNA, 647 bp, Homo sapiens
atttttaatatctgaacatcttaaaataggcaaatacccagccaatgtagaaattttatattgttaaatatcagcttaatagaggcagtatatagactcatataactgtttatcaatcacaatttgaactgctgtattatgttaaattagtgtacatggtttagatatataaagttagtgtacctagtttggaggtatgtatacacacacctgcacacacaaagagtgagagagagaaatatctaatgccagtacagcctaaaatttttacattgatatctgccactgtatgatttttatgacttgaagctaccttggatatagtatatgcttggtaaataattgctaagtaagtgaatggggtaatgaattgtatccattgcgctaccttaatttattatttatacaaaattgttaagaatcaacatgcaaggtacaagcctaaaaattgtaaagtacagtgttttgtcttgttgtcactcagaaaggaagaaaattaaccaaggagtgaatttgtcgtcttaacctaataatctaaaggaatatatattactttctctgtaaaataagagatttctgacaaataaatattttcatgaagtctgattgggccatattttggttgaaagtaaggaaaatttcatgaa

SEQ ID NO: 205733 - DNA, 518 bp, Homo sapiens
acatccagtgagggaagggtaaagggaagcttttattagcaaaaagggagaggttcacacaagctgcttggaaactgagttcattggttcctgaggctcaaagccaagttgtcagttcattggtggcgatgccattactgggcaagtgttcttttgagtgcatcttatctgaattactgcagtcctaaagaatggcagtgataaaccatgtgaaagcaggagttgcaatgaagggcgtgaaaggatttcttgtggggtttttagaaagtctttggaaacaaggactctttttgtctctattttgtcttggtctgtcaaaaggtgatttcatcctaatgtctgcaactttcacattattaaaagatatgtgcattttaaatttgaataaaaattgtggccaggtatggtggcacctgcctgtaatcccagcactttggaaggttgaggtgggaggatcatttgagcccaggagttagaaattagcctgggcaaaatagcaagaccgtgtctcaaaaaaa

SEQ ID NO: 205734 - DNA, 436 bp, Homo sapiens
tgacagtgaattctggttttagtaataaggacgtctgtgaagaagctcctgttgagtacctaattcatagaaactccaactctgccttgattcacagtttataaagaactggaagtaagctttgcatgccaggccctctgaccaaacctcttttgtccaaggttattcctccagcttccctgcctgcttctcttctttctttgaactgtgcctactgcgtaccagcatactgcctggactacctatctacccattcaggtttctttcccagctctgctggaactttcttgattgcttactcccttcaagtgagtctgtctatgccctaattcctgcatgtccctgttctgccccataaatggctgaacccgctctgggttggactctgtgtgagtagcatttacatcagtgaagtatactctttaagctctgcaat

SEQ ID NO: 205735 - DNA, 801 bp, Homo sapiens
gaactaccaataacaagaaaagaatttttttttgaaataaaatggttcccattataatggattctccaggtatgtggtgtgctagctggatatcttttggcataattgttacacatttggcatggacacacacacacacacacagttctgatactaaagaatagcttaaaaactatcagactagttattctttaacattccgttcagccccaaggttctgggattctgatattgtagccaacctaaactcaaggggctctgcacacatcattattaactttgatcttggcagcattgtgatactgtgtgtatttcatgggccttccccagagccactccagaatgtctacttggagggacttgggagtagtaatccggttggaagagagctagacgtgtccagcagctgcgcttgcatcatagcaaagcagtgtttctgttcagactgtggattgcagatcttaggaacagcttaatttaaaagggcaagtcggaagaattcaagtacactacagaacagagtttttgttttattttctttttttcctgatacatgtgatgtgatcacctgacagggactcattaccagtaagaaaagaaagacatgattattataactgtatgcttcattctcatgagtctcatagaagcagaattgttgttttttcctccagatagtcaactgattattccaatggcatttgtttcttttatttattccccaaataaactgggtactcatggccttaacgttgaaatatagtaataataatatgaaatgatatcagtactactgctgct

SEQ ID NO: 205736 - DNA, 381 bp, Homo sapiens
tgcaggtcagctcacagcccgcagattctaaaacccctatgctcacagcccaccatgggtacgagttcaccgacataacacacaggaaggagttccttagatccccaagaatttgagtgtttcacgtatcctacaagaaggaaacagagatgagaaagaaaaatgaccacgtccatttttaaaataaccaaataggaggtctataagttaaaagtatggctattaaaagatgtgtctgaggaaattacccagagtgtatcgctggaagaggtggcagtttattgggattttccataactgatactctgtagtgtgtaagtctgatgcccggatgttgacgcacacatgtgacgtgcgcctccctccagccttgttaccatg

SEQ ID NO: 205737 - DNA, 572 bp, Homo sapiens
gaagttacaataaatgtagtcttttgtatttaaccacgcgaagggtagctgcttctggcatgacctctttaaaatagaaaagtaatagaaagtattccgtaacaatatgacaaggatgtgacagtttaatgtatgtatagtatatagtacaggttgaacacctttaatgagaatccaaaatctgaaatgctctaaaattggaaactttgaatgccaacatgatgccacaggtggaaaattccacactttacctcatttgacaggttgcagtcaaaactttgtttcatgcacaaaaggtataaaattatcttcaggctatgtaaggtatgtatgaaacatagatgaattttgtgtttagacttgggtcccatctccatggtatctcactatgtatatgcaaatataccaaaatgaaaaagtcaggaccaggcatggtagctcacacctgtgagtactgggattccagtactttgggaggctgaggctggggggattactccagaacaagagtttaaggtcagcctgggcgacatagcaagaccctgtctattaaaaaaattaaaagctccaaa

SEQ ID NO: 205738 - DNA, 579 bp, Homo sapiens
gataaccttaattacatcctgagcaaagagttcggcctctgccttgattctagatggagccttcctttatctctgatgtactggattggcttcctgctggaaatagtgagcttcctgctgaggccaatttacacctatcgacacccttcaaccaccacagagtgacattgtcaaatagcgtgttcaccttctcttacaagaaggctcagcaagatctggcatataagccactttacagctgggaggaagccaagaagaatgtacctgagtctgttagaaccgtggagtgggtttcccttgtggactggcacaaggagaccgtgaagtccaagactcagcgatttaaggatgacagagatgtgcatgtgggtattgttaggtgatgtcatcaagctccatcctcctggcttcatacagaaggtgacaatggcacaagcccaggtcctgttgtctccctttcacacaatgcccaacttattgtcttcctcatgtcatcaaaacctgcccattccctggctcaaccaggagctttctgtcctaatcatataccagaggaaatacaatgtgatttgctttttc

SEQ ID NO: 205739 - DNA, 778 bp, Homo sapiens
gatgttagggttggggctgtgttttaatcacttctctgattttagcacttaacagagtacatgagatatagtacataagcccaatcaatgtcttctattgggtaatgagactgaaattctggtcccaaaaccaacttcataattatcatagatcattcctaattatgccaaaacacgtggcgaaaaagtgaaatcaatcagctgattgctttgtctacataataccaaaacattaatacaaatgctgctatgtcaaagccatccaagtaactgattatttggcattactaaatgctttggggaagattctaaacttagacctatttcctttcagggttgtgtgtatgaaatgggagtgtgtttgaatgttgggttatttgtagtgtcaccaaacaatcatgagtgaatgtttgagtatcttttattttccttttactttgtgagctcttagcatgtttaatttggtttcatgttaatgaaaagtttgttggtgcatatagaagattgtcttttaggaatattttgggcattgaaaaacagaaaacctaattaaaactgtcttggaaaaatgagaacatcatcactattatcatcattattttcgtcactgaagaaaaaggtcagaagtaaaggaggctctagtcctggtgttatctgaagtttattgatcccatcaagaaccccaatttcttcccctctgtctacccttccatccttagggtcaaatatctgccctggatatttattcttctaagagttacaaaatagctgcagtagt

SEQ ID NO: 205740 - DNA, 589 bp, Homo sapiens
ggcaagctcccaggaggctggacactggcaggggccctggacacagggctgtggagccacagtgaggagttgggcttttgtcctggggaacacgggaagccggtggagggttccctgccaggcactgacatgacctgctttagatttggctgtgatgtcctcatacagagaaaggccccgaagatggtctctgtgtctgagtctaccgctctgtttcttccattcttctgcttttcttcatttttggggtactgcatcccatttaaaattctagttacaactgggcactcccctctcccagaagaaaagccacacccagacacccactctattttgccaatcatttcaggggccagggtcactcagggtgagcttttctggtctagcccctcatctccaagttgcagggacgctcactgggctcagagcggggacattttcaccgagttaccctgagaagatctgagatgagtgagaaggtgtgtctgaattcttacatgggggcctggaagggctaacgggaagggttggtctttatcacccctatccttgaaaattacagaagcatctttcaaatacctgggctaaa

SEQ ID NO: 205741 - DNA, 546 bp, Homo sapiens
tatgcagcgttgctccctttactactcttccaacctctgcaacattttagtgggagcctccaatgtaccaagatctatggtaaacatgaagggatataacaagaagaagtgatcactgttctggtataacactagttataccacattctagtgtccatctgctgtaaatatctggaacattctaaagaatttttaaaaattcagttgtttttgttttcagttctcacctctcccccaagtactagtctcatgttgtcaaatgcccactggatcttgatatctgaatattgtactgttatctcaaattgtcaagccatcttatctaactatgacttaacttttaagactcaatggaaatctctcctgctagttcccagaactttggatttgccttttctttttaatggttttataattcactgttattcagactgttccatttgctcatccctaatatccagtcattgtttaacttgattttcttttttcctcatactgccttgtggctgtgtctcttctttttctttctcttcactactattctag

SEQ ID NO: 205742 - DNA, 336 bp, Homo sapiens
ggataagtgttgaagtagggctacacgctaaatatttcttatgtgataaaaaaattataatgacctctagtctttgaaacagagaataactggtgatgagtaaccagggagtaagttctttcagtcacaatcatgtagaaacaaagtgccttagattaagtgatagttaaattgataattttagcagaccaaacttcaaaatacaaaattcagtaaggtaaacgaattattaaaactataggaaaagttaattaaaattcaagggctgaaggttaaaacattaaaatatatcctaaaaattataacatgctcactaccaatattttcttcacctag

SEQ ID NO: 205743 - DNA, 203 bp, Homo sapiens
gaaaaggttctagagatggatggcagtgatggctgcacaactatgtgaaggtgcttaatgccaccgaactgcacacttaaaaatgattaaaacggtaaatttcatgttacgtatatttgccatacacacaaaactctctgtttaaatattttgaacatgtaatctgtttgcctgtcaagacccttaatgatacattgatatat

SEQ ID NO: 205744 - DNA, 841 bp, Homo sapiens
gtggaacaaaaagaaatagtgttgttaccatagctagtttatatagctagttgaaattctatttgaagtgtatatattcattctgttaaacatatatatggatgaacttaggttcaaaatgtaagtctactccttaccgcctatagttttatatcctctacctgataaccctgccactatcattccatttttgttgttctatccattttctaaccctattactttaatctactttcatccacagaaatttggcatttcttatcttcaaaacgctgtggatcttatcgttcatctcggatggtttttgtttgtttgtttgtttttttgtttttttggtgagtcttatctcttctagacacgcttgaatcagttgagatccaaaatagcaacatatagtcttaactgaaagaagttagaaagaaaaattaataataaattaagtagaaaaataaggtatagcattaatggtttagtttaagaaacagtgtccttaggaatagctactgagggaaaaggaagataactaacatttgtaagatacttagaactcacagactgtgtcgggagttttccaaaaattactttaattaatccacacaataattctgtcaagcaggtgttgttatatgagccagaggctcaggcgggggtaagagacttgcccaaggtcatacagagagtaactcgcaaacctagatgccaaccaaagaccctttcattttgttgttccttctcctgtaccatctcatatattttaaaatggctttttattagattgtttttcagtcaagaatttttggagttagctaggaagttaatgtgtaagtggcagtttgaagat

SEQ ID NO: 205745 - DNA, 489 bp, Homo sapiens
gagaaaaagtgctgagaaacctacaactatggcattagagacctgcaaacccaggagaagggggatgacaggatagagatgcaatagtaaggctaacttcatggatgaaggacacagagtagaaggaaaacttgaaaaccaagaacgtggctttaaataagacaaattgccacatgaatgagtgtacacacccaacataaatcaaaaggaatttctccaaaggattctgaggacaaacttagccctgtataaatgcatcctgtctacttaatcacaaaaagcattctgattgcctccaaacataaggcaacaaaattgcactgagccataccagctgtttgtcgaaggggctctgccacagtctcccaactcccaacttttcttgtctgtcccaagaaagcctgccgctaatgagatggatcaaaagttagggctagattctattttcaagaagaaatcaactcagagcctgatctagaaagtaactag

SEQ ID NO: 205746 - DNA, 501 bp, Homo sapiens
cttaaattgcgtaaacatgcacagatactggttggttcagctcccagcatccccacagtataactttctaagaaccactggtgtgttaggagttaaccacattttcaaacaatactcagtcatagcatatggcacggtagcctattgcttaccatagcctctccctaaagggcagcaaaccagatggtttgagtagggcctttggtgtaattatgacagacacaaagaaagacataaccaccattctccctcaataatatcatgcttcttgttttccagtatttgctatagttaattatacttaatttttgaaaatttgtttttgcagtttgattgttcataacaaagttccctttccaggttggggaggaaccattcaaatatgtatcattaagtgtctgcatatcatttcccattcatccttctctagctagtagatgcaggccacatagagtggcatctctcattcccaagtgtgagcaattttcttattctggcaaa

SEQ ID NO: 205747 - DNA, 892 bp, Homo sapiens
tatgctgtcttttattgaaacttgtgtgtgtgtatatatatatatttctctttctatagttattaatatgttcatggaagtattacttatacaaaggagacttgtaagaaacccagattgctatgctgttactgctgctaggttctaggaaaataccctttaacctttaagatttttacttgataaatttgttgcaccattactaatatttcaactgacaggtctttatgtattcctgaaaggtttaatttcttataagattttttttagccaacacagatggatcattagcaattcaaaatgtcaaattctaaatgacaacaggcaataataatgtctaataatatctatgctctgcaggtccctgattctggtcttgaatagcggaggaggaaaagaagatgatgggggaaaagaaaagaagccatttatgcatccctccctaattcagtatccgagcatgagggagtgtcaagctagtggggaagaagagagggtttagttttgaatgaagttgggagtttttattattgcactgaactaaataggcattttactaaagtcaagactgttcttgttatttaaaggaacgggatcatcaatggaactctttgagatttcatccagaggctgggaaagaacattcatggtagcttttattattatttccattattgtaagttgaggaagagaaaacccaggaaaatatacaaagagtgattggaattaataagagtaaaacaaggtggctgtataaaaggtcaatattcaaaatcaattttgttattacttactagcaacataattttttttttttttttttgagacagagtttcactcttgttgcccaggctggagtgcaacggcgtgatcttggctcactgcaacctcc

SEQ ID NO: 205748 - DNA, 605 bp, Homo sapiens
gcagaaatccgtctctgtgagcggaggagggtgctgcttatgcgagagcaggtttgggagctcactaaagcaggtccctgattctggtcttgaatagcggaggaggaaaagaagatgatgggggaaaagaaaagaagccatttatgcatccctccctaattcagtatccgagcatgagggagtgtcaagctagtggggaagaagagagggtttagttttgaatgaagttgggagtttttattattgcactgaactaaataggcattttactaaagtcaagactgttcttgttatttaaaggaacgggatcatcaatggaactctttgagatttcatccagaggctgggaaagaacattcatggtagcttttattattatttccattattgtaagttgaggaagagaaaacccaggaaaatatacaaagagtgattggaattaataagagtaaaacaaggtggctgtataaaaggtcaatattcaaaatcaattttgttattacttactagcaacataattttttttttttttttttgagacagagtttcactcttgttgcccaggctggagtgcaacggcgtgatcttggctcactgcaacctcc

SEQ ID NO: 205749 - DNA, 330 bp, Homo sapiens
aagaaatgcattagtgaaaagtattaaaaaattacctttgacatctctagcacacggagcaattctagatggttgataaaagagcataaatcaatcgacacaaatatccccttaaaccttgtctttcatgtccagtatttaattcttcccatttctagtatgaagataggaattccattatcactaagaaaatccactctgggcatccaagtcgatatttctaaaaattcactcactattaattaatgaatagtgcaaattagggaaataacttgcatatgtgttagtgtgtgtgtgggggaatactcaactaaaaaggggagagagaaa

SEQ ID NO: 205750 - DNA, 596 bp, Homo sapiens
atgggctttccctctccacggatgcccagccttctgggcaggcgcatggccgggcggcgcccagcccgcagccccgatccggacaccccactgcatccctcccttcccggtcccttcctcgcacgggcgcccgagagacggacaaagagttggggccaagtttgagcgccgggcacggccaggctcagggaaggaaggtccccggaagacacctgggtaccagagttggtgcgaggaggaaaagctgggaggcgaattcacaatcctgggggtggagggcaggcaggggaggggaatcaggccaatcccagccgagtgagcccccagcgagctggggctccggatgggaggcctgtctcgcgctccaaagaaaagcaaaccgccctcccaggtccgcccggattgccgaagcccctctggaaaaactccttcccctcttacaccaaactttgcgccgggcctcgttccctcccgggtaggcagcggcgcaggaagggttaagccagcccgtcccagctgacagtcagctgattgggccctgattgacagctccgaaaagtttccttgtttctatactattatgctaatcgcggccg

SEQ ID NO: 205751 - DNA, 406 bp, Homo sapiens
gagaagaaaagatacaattaagaaatttgtgtgctaaatgctagggtaatatgggttctagaaattttggcacaatctttttggtataggtgttagtaaaggggcatcagctgcatctattttggaagaaaaactgagtttgacaataacatttcaaaatctttattattttagagaagaaattgcgtggccgatccaggaacgctatctcagcactgaacaaagactacttttattgaagtcactgtcattttacaatgatctgatttgcttttgatagagtcctcagaacatcttggagcaaggtgctcaggcttcaagttaagactttgctttttataaccatgaagagttttttaacattgtaaaaaagtatgacatttaaataggggaaaactaacaaaaa

SEQ ID NO: 205752 - DNA, 1867 bp, Homo sapiens
  misc_feature (10)..(10): n is a, c, g, or t
  misc_feature (27)..(27): n is a, c, g, or t
  misc_feature (50)..(50): n is a, c, g, or t
  misc_feature (64)..(64): n is a, c, g, or t
  misc_feature (90)..(90): n is a, c, g, or t
  misc_feature (97)..(97): n is a, c, g, or t
gatccccgcntcctgcttctgctgctncctgcttctgccgcttcctgctnctgccgttgtgttntctttcagggtcttgtccagttcttntcttcantgattgcttttcctcttcactgcatgcggtcatgattttatgctcagcttcaagttcaaaagacattcaccatggagattttgagacacaaggatattattgatgaccttgttaaatctgggcataaaatcatgaccgcatgcagtgaagaggaaaagcaatcaatgaagaaaagaactggacaaggtactgaagaactatgataccatctgccagattaattcagaaaggtatctgcagctggaacgggcacagtccctggtcaaccaattctgggaaacatatgaagaacttgggccatggctgacagaaacacaatcaatcatctctcagcttcccgccccagcccttgaatatgatactctaaggcagcagcaggaagaacatcggcaactgcgtgagttgatagctgaacacaagcctcatatagataagatgaacaaaactggccacagtactgaatgagccctggggaaggcttttctatccaagagaagtatgtggcagccgacaccctttacagtcaaattaaagaagatgtcaaaaagcgtgctgtggcactggatgaagccatttctcaatcaactcagttccatgacaagatagatcagatccttgagagcctggaacgcatcgtggaacgtctgaggcagccaccctctatctctgcagaggttgagaagatcaaggaacagatcagtgaaaataagaatgtgtcagtagacatggaaaagctacagccgttgtatgaaactcttaaacagaggggagaggaaatgattgctagatctggggggactgataaagacatatctgccaaagctgttcaggataagcttgaccaaatggttttcatttgggagaacatacacacactggtggaagagagggaagccaaactactggatgtgatggagctagcagaaaagttctggtgtgatcacatgtcattgatagttaccattaaagatactcaagatttcatccgggacctggaagatcctggaattgatccttcagtagtaaaacaacagcaagaagcagcagagaccataagggaagaaatagatggactacaggaggagctggatatagttattaacctaggttctgaactcattgcggcatgtggggagcctgataaacccattgtcaagaagagtatagatgagttaaattcagcgatgggattctctaaataaagcttggaaagaccggattgaccaacttgaggaggcaatgcaggctgccgttcagtaccaggatggactgcaggcggtatttgactgggtagatattgcaggtggtaaattagcttcaatgtctccaattggaacagatctcgaaactgtcaagcagcagattgaagagctaaagcaatttaagtctgaggcctatcaacagcagatagaaatggaaagactgaatcatcaagcagagcttttgctaaagaaagtaacagaagagagtgacaaacacactgttcaagacccattaatggaactgaaattgatatgggatagcctggaggagagaatcatcaacagacagcataaactggagggtgctctattagccttgggtcagttccaacatgccctggatgagctcctggcatggctgacacacaccgagggcttgctaagtgagcagaaacctgttggaggagaccctaaagccattgaaattgaacttgccaagcatcatgtgctccaaaatgatgtattagcccatcagtccacagtggaagccgttaataaagcaggaaat

SEQ ID NO: 205753 - DNA, 528 bp, Homo sapiens
ggtcgttctacacggatcccccctggcttgctcaggtctggggggactgataaagacatatctgccaaagctgttcaggataagcttgaccaaatggttttcatttgggagaacatacacacactggtggaagagagggaagccaaactactggatgtgatggagctagcagaaaagttctggtgtgatcacatgtcattgatagttaccattaaagatactcaagatttcatccgggacctggaagatcctggaattgatccttcagtagtaaaacaacagcaagaagcagcagagaccataagggaagaaatagatggactacaggaggagctggatatagttattaacctaggttctgaactcattgcggcatgtggggagcctgataaacccattgtcaagaagagtatagatgagttaaattcagcatgggattcctacacagtgcaatgtctagtgataatataaatactaaaagcaacttgttaaatgtataaataaatgtgatttatttttgctccttta

SEQ ID NO: 205754 - DNA, 1018 bp, Homo sapiens
ggtcgttctacacggatcccccctggcttgctcaggtctggggggactgataaagacatatctgccaaagctgttcaggataagcttgaccaaatggttttcatttgggagaacatacacacactggtggaagagagggaagccaaactactggatgtgatggagctagcagaaaagttctggtgtgatcacatgtcattgatagttaccattaaagatactcaagatttcatccgggacctggaagatcctggaattgatccttcagtagtaaaacaacagcaagaagcagcagagaccataagggaagaaatagatggactacaggaggagctggatatagttattaacctaggttctgaactcattgcggcatgtggggagcctgataaacccattgtcaagaagagtatagatgagttaaattcagcgatgggattctctaaataaagcttggaaagaccggattgaccaacttgaggaggcaatgcaggctgccgttcagtaccaggatggactgcaggcggtatttgactgggtagatattgcaggtggtaaattagcttcaatgtctccaattggaacagatctcgaaactgtcaagcagcagattgaagagctaaagcaatttaagtctgaggcctatcaacagcagatagaaatggaaagactgaatcatcaagcagagcttttgctaaagaaagtaacagaagagagtgacaaacacactgttcaagacccattaatggaactgaaattgatatgggatagcctggaggagagaatcatcaacagacagcataaactggagggtgctctattagccttgggtcagttccaacatgccctggatgagctcctggcatggctgacacacaccgagggcttgctaagtgagcagaaacctgttggaggagaccctaaagccattgaaattgaacttgccaagcatcatgtgctccaaaatgatgtattagcccatcagtccacagtggaagccgttaataaagcaggaaat

SEQ ID NO: 205755 - DNA, 457 bp, Homo sapiens
taaacgaacagattcctctcaaaaaatacaaactactacaactcatccaatatgatataatttctattaagaaaattattttacagaggcagaaaggataaaatttttttttaagatagaagtcccaggtactcaggaggctaaggaagaaggttggcttgagcccagcagttcaaggctgtaataagccataatcacaccactgcactctagcctggatgacagattgagactgtctcaaaagaaaaggaaaagataaaggaaaggaaaagaaaaagaaaaagaaaaaaaaagaaaaaaaagaaaagaaaaatattaaggaaattgaatttgtaatttttttttaaatttatttatttatttgagatggagccttgctctgtcacctagactggaatgtagtgcacaatctcggctcactgtaacctccgcctcccaggttcaaacaattctcctg

SEQ ID NO: 205756 - DNA, 330 bp, Homo sapiens
ctcctcttcttctatatgcaaaggctgcacagctcctggttcacctgcacctctccagaccaccatggtgcctgcagctctgagggcattttaaatcatcacagaacaacaagcatataagcattatgagcgcctctggacctctgacgtgccttgtggaggcctgccaggcccacgttttaatttacatgaactcgatgccctttttgacagggagagatctgtttctttatttgttagcctttcccctggacctgctagatctggaccatccccaggaaaggaaggtcacaccacaaagataaatataaacaaaatgagttaattaaa

SEQ ID NO: 205757 - DNA, 243 bp, Homo sapiens
tcaccactgcactccagcctgggcaacagagtgagaccctacctcaaaataaaaacaaaaaacagagaaaagaaaagaagaagaaagaaaaaaatctaattagctattgaatgaaaagttggtgtgtaagcaaaaaggaatagaaacagtaaagcagggcataaatttgctcttagcaaagcaagtatttattgctggagggataattaaaattattattcttcctcctcctcctcctcctct

SEQ ID NO: 205758 - DNA, 444 bp, Homo sapiens
ggtgggcggatcacgaggtcaggagatcgagaccatcctggctaacaaagtgaaaccccatctctactaaaaatacaaaaaattagctgggcgtggtggcgggcgcctgtagtcccagctaatcagaggctgaggcaggagaatggcgtgaatccaggaggcggagcttgcagtgagctgaggtcgcgccactgcactccagcctgggcgacagagccagactgtcaaaaaaaaaaaaaaaaaaaaaatcaatatattcataggttctggagattaggacatggacatctttgggaagccattattctgcctactgtacctgagctttcccaactgggtattctttatttttattatatgtatatttaaaatttatgtttaattaaaaaaattaaaaattatatatatatttatcatatacatgttgttttgaaatatgtatat

SEQ ID NO: 205759 - DNA, 170 bp, Homo sapiens
cggaggtataagagcctccaagtctgcagctctcgcccaactcccagacacctcgcgggctctgcagcaccggcaccgtttccaggaggcctggcggggtgtgcgtccagccgttgggcgctttctttttggacctcggggccatccacaccgtcccctccccctcccgc

SEQ ID NO: 205760 - DNA, 443 bp, Homo sapiens
tgagaccctgtctcaaaaaaaaaaaagcattccagagtttcaagttattcctggactcaactaactggaggagcagagccatgaggcagaaggtggagaaaaagaagaatgacattcccaatggggttgagtgggaaaagctggagtctgggaaaaggcaaagagaagtaggtttcagagaaggtgatcaattctgtttgtacctcagtgcccagtctatgtgaagagatgtggctggaattaaatacaggctctaaaaaaaggccagagtcaggtgtagaggtctgggaagcttcagattagatgtgaggaaagccaaggacatgtattatgaaatttccaaaagactgaatgagagatgaaaaagaatgctgaggtcgccatctggccagtgctctacttgcaactctgattttctctgatttaacttagtaaggcaatcc

SEQ ID NO: 205761 - DNA, 296 bp, Homo sapiens
tgtcaatgctcaccagcccaaacccatgagaaacacaactgcagttgaacaaagtagggtctgttgacttatttcacaatgaggtgaccacacagcatgaggaatggaaatctcagaagttgcatgttagaaggctgggagcgccaggtgtggtggctcacgcctgtaatcccagcactttgggaggccgaggtgggcacatcacgaggtcaggagttcgagaccagcatggccaacacggtgaaaccccgtctctactaaaaataccaaaattagctgggtgtggtggtgcgcgc

SEQ ID NO: 205762 - DNA, 479 bp, Homo sapiens
cactttctttattgtccattcaaaacacttgctgagacctagggtgtcagattctattttgcctgttatttgacattcccttctcttcgcaggccatttagctacatatttcctattggactatctgctttggcatttagtaaataaataacgtaagtcactgagggtatgggaagaaatattgagtcataaataccattttctcttagggaattttcctctgaaggcttgcaagtgtggtatagttcagtgtagtgctaccagcttctgttctgaggacacagctaattgggttgataatccaagataatttaaacagattatttaacctttttatgttagtgtttctattttgtatagtggttataataaaaccatttactacttaagattaagatcttcatagatctgaagaaatattgtactagaatgcttagtgaaaaatgtctgacacataataaatactccatacattttgg

SEQ ID NO: 205763 - DNA, 532 bp, Homo sapiens
ccctcacccctaactccctatttggttcactccagaccctgagctaggacatcaactatgggacacgtcatacaaaacacgtccagaactgagctcttggccgtccctgcctttctagcctgcctggcccggggatggcagttccttcctcctgtctctcttcccagaccagagtccttggagttgcccctgattcttctctttctctcacatcccacatccggtctctcagcaaaccctgtccattctaccttcaaattacaggttgaacggcatgacagtgccacattcaactgttctttttttttttttttccccactgtaatcttgacctcttgggctcaagcgatcctcctgcctcagcctcccaaagagcggggataacgggtgtaagccatggcgcccggccaagtgtgagtcctttaaagcggttggaccttgcgcaaggtggtaacccttcccctgccacgtctcaaacacctcttggtccagctactatgctcccatcaggacccaatgggacctatgtccc

SEQ ID NO: 205764 - DNA, 389 bp, Homo sapiens
tacacacgcacattgtgataaccacagtgtacaataaacagtatgcccatctccaatttctctacaattcttctcagttattggtgaaagcagtgcatacccaaaactagatttgcaccagaacagtttcaagttgaatatttgaaggaatgcccacatctgaaagaagcaattgaaattgatttagttcttatcatagctgacaaagttacagaaaattttaaagaatgatacagtgaaaacctacgtaatatgccccacctagatattagttattattttgccatatttgctttattatttgtgtgtgcacttttattgcttgtaataccattatcacactgaaaacattttaataaaaaatagccattgttacatttccaaaggtt

SEQ ID NO: 205765 - DNA, 135 bp, Homo sapiens
cctctatgactgcctctaaaagagataccatttacctgggtgcatgtggctttcatgctgaaggcataatacaactgagtaaaagttaaccctctgattatagactactagccccacagtaacattaaatttttt

SEQ ID NO: 205766 - DNA, 185 bp, Homo sapiens
gccgaggattcaaaagtgcactcttctatactctactttttcctacagagaacctattaatatcacttcaaactactgtttcacagaataatatatgcgctctcgtctttcctatttcaaagtatccaccacttaaatataaaagcacttctgatttctggtagatatagaagagtgcacttttg

SEQ ID NO: 205767 - DNA, 456 bp, Homo sapiens
tgggaacccctgcctgtcttgttttctgtgatgtttccccggtgcctagaccagagcttcacacataaatcattgagtattactgaattgaaggaattgttacatattggacacaccagagatcacacggatatttaaaactgagtagcatgagcaactaacaatgaaattagacatcaaaggattcaaattttcatgggccttgttgccaatccacagcagtgcttttcaaacactgatgaataccagaaacaactaaagaaattactcaaaatgggccgggcacggtggctcacgcctgtaatcccagcactttggggggctaaggcaggcggatcatgaggtcaggagatcgagaccatcctggctaacacagtgaaaccccgtctctactaaaaatacaaaaaatagccgggtgtggtggtgggcgcctgtagtcccagctactcgggaggc

SEQ ID NO: 205768 - DNA, 218 bp, Homo sapiens
gggaagctttcagtcaggctagctgagggaggcttcggtttccccatgacttagggagaggagctgggagggaggtcccgggcccagggccacatgggaagaactagatagaggctgagactagtgtctcagggccaaatgccaagtcagggtgggctctgtgtgtcctctcatctgaccacagtgtcaccctgagcagggaggtggggcctagagct

SEQ ID NO: 205769 - DNA, 368 bp, Homo sapiens
ttgctttacccattccaaatagtggttagatggctaagagtgctcttaacatttccaaatttagtttgcttttacatcaaagttcatttgttttatgaatgctgtccagtattaataatttaatgaccattcactactgtgtgctcagaacagtaccaagtaataccgaacacagtaaattaaccaagttctgataactcaatttgtatatgtcttatgcacatgaacagctttccacttcacaccaaccctcccaactatgtctaggacaggtgacctaattaatccaaaatctctttcttatcctttgagtgcttaaggtaactaaacattcaccatattattttttcccacctgtattccccaca

SEQ ID NO: 205770 - DNA, 763 bp, Homo sapiens
ttttgagtggctgtggataaaggcaaggggtgattttattttactggtcatttaaagattacattctttttaaagaaaaaaatctatgatagttttacaggatttcaaggcaaattcatcagttttgtttcaaacacacccaatgggtgtttcccttgtctccaaatgaaaagccttaatccaccttttcctacatgtgtttctacagcatcttctggctgtgagtttgtacaccactacagaattattattactatttcaactcccatgaaatgtactacgactggcaggcatatgagttctgaaatttaaagtgcgttactagagaaactaaaactcatgttggccgcaaggatggacaacaatacgaaatgctacagatggcaatgggaggcctaaaacaatgtgcagttcctttctattctggtttgccccattgtgttctgaatagactgaatcactgcccagcttcagggccagcctctgaaaggccccattgtaagggctatgctttccagagcagagttaaggttgctgtagtaaccttcactatgaatttcctgaccagtgtgatgaaaatctcaactgaactgcgacagtactacagctacaaacaagaccgcgaaatgagcgtgggtctacccatttagggggtctttcttatctgaacatagcccactatctactacttcaggcatccacattgccaaagaagggactaaatttctacaagccagagcttgagaggtgaccttgttgtata

SEQ ID NO: 205771 - DNA, 260 bp, Homo sapiens
gccgtagccgtgtgaacgctcttcgggctcgcgtcgtcgacccgcagccgcggggcggactaagaagggagccgcctgctgcgaggccgccgggctcccggtttaaatgtgatactggtgtagatctccttgttctaagctatattcatccaacaagccataaagccataatgtggtataacatcctttttgagaggtgaatattattgaatgaaaatggctgacagaagtgggaagattattccaggacaagtgtatat

SEQ ID NO: 205772 - DNA, 593 bp, Homo sapiens
gcctcacaaagtgcggggatacaaatgtgagccattgtgccctgtcactaacagcttttaatcattccattaatcatgtgcaaataaaattaatgacagcattatttctgtagtttacaggttagtatcttaaagtgacagccacatcactaaaattgtttgcattattctactttagagctttaagatttagaattatgttaatttgatttaagacatcattacttataatttctcatggttgttgggaacagtggaaacaagtaagttgctccccactgacctcattatagtgagataatcattgaatggcgtgcacatgattcaatagcagatacactcatggggaggaaaaacaaggaggagaaataaaggaatctttgatgatgcatagaatcagaattcattatccaaacccaggatgaatctaaacttgctcatcttagggtacacatcaaaacatacatgcatcatttctctagcctgttttttagttctggggttgcaattccatttcaaaagagaggagatgtttaaaagagggtgttgttttgcagagtgaaagtttatcataagtcatactgcccataatc

SEQ ID NO: 205773 - DNA, 897 bp, Homo sapiens
ctaaacctataacctccaaggactccatttccaaataccagcaaccacatgtgtgagcttagaagaggatccttccccaggtgagccttgagatgaccctggcctgtgacttgatggcagcttttgagagactgagccagaggcctccaggtaagcccttctcagattcctgaaccacagaaactgtgagataatcaattttattgatatcttgtggatattgatatccccagttttattgtggaatagataactgccacacagctcctgacaactggcatcttgacacatgttctgtgctccaggtcccagtaactgtgcccatccattgttaccacaggtcacagtggccctggccctggggcattatactctctcttggtgtattagtccattcttaggctgctaataaagatatatctgagactgggtaatgtataaagaaaaagaggtttaatggactcactgttacatatggctggggagacctcacaatcatggaggaaggtgaaggaggatcaaaggcacatcttacatggtggcaagacagagagcatgtgcaggggaattgccctttataaaaccatcagatctcatgagacttattcactatcatgagaacagcatgggaaaaacccgcccgcatgattcaattacttcccactgaatccctcccatgacacatggggattatgggagctgcaattcaagatgagattttgggggaagggcatagccaaaccatatcattcttccctgggcccctcccaaatgtcatgtcctcacatttcaaaatacaatcatgccttcccaacagtcctccaatgtcttaactcatttcaacattaacccaaaagtccaagtccaaagtctcatctgagacaaggcaagtccctt

SEQ ID NO: 205774 - DNA, 789 bp, Homo sapiens
tgagatggagtctcactccatcacccaggctggagtgcagtgatgcaatctcggctcactgcagtctctgcctcctggattcaagcgattctcctgcctcagcctcccgagtagctgggactacaggcatgtgccagcacgcccagcttgttttttgtatttttagtagagacggggtttcaccatgttggccaggctggtctccaactcctgacctcaggtgatctgcccggctcagcctcccaaagtgctgggattacaggcgtgagccaccccgcccggccaagtttgccatcttttatgggtgcagtttgtggtgccgcaaaatgatgatagtagtaacatcagagagcattgatcacagatcaccataacaaatataataatgagaaatttgaaacattgtgaaaattaccaaaatgtgacagagacatgaagtaagcacatgctattggaaaaatggcactggtaaacttgcttgatgcagggttgccacacaccttcaatttgttaaaaactcagtatctgcgaagtacagtaaagcaaagcacaatcaaatgaggtgcgcctgcatattacaaccaagaggcttttcgcagaaacacgagtgtgcttcaacattcaaaaatcagttggtgtaattcaccacattaagataataaaggaggccgggtgcggtggctcacacctgtaatcccagcactttcagaagccgaggtggacagatcacttgaggccaggagtttgagagcagcctggccaacatagtgaaatcctgtctctactaaa

SEQ ID NO: 205775 - DNA, 385 bp, Homo sapiens
cccatgctgtgtgctacagagatatggaaaaaaaaatgacgtattttcccggctcttagggagctacacagtggagatgggtacagggtggggagaaatactatctcatatagctgacatttagagagtgtgcaagcactgttagagattccctatattaacttatgcagtcattaccacaacagatgaagaaacaaaatatggagacattaagcagtttgttcaatgcccaacagtaaatgacaaaactgggatttgaacccaaagaagtctggtgccagaacctgcctttttaactacaatcctatacagcctcttaactataactctattaattatctatacagtatagtgctaaaaaatgctaaaagtgggtataggactg

SEQ ID NO: 205776 - DNA, 854 bp, Homo sapiens
ctgattgtctgcctcagcctcctgagtagctgggactacaggcacgcgccaccatgcccggctaatttttgtattattttggtgcagatagggtttcaccatgttggccaggctggtctcgaacttctgacctcagggcctcccaaagtgctgggattacaagcgtgagccactatgcccggcctgcaattattttaaaaagtagttcttcccaggttgcttttccctccacagtattaaacagtcattttaaatgttggtgctgtcacttagcaaacgatgaagtagagataaagtgaagctgtgaggctctaataggccttccacaggggagcccgagatacagcaggaagtcccagcggccttgcctccggagcacagcttcataaaaccagctcagactctttcaaacgagctgaggctcctttgatctccgcagggattctctgttcaattcagaaggaactgcttttaagccactgggtcaagcggatattttaagcctggtgcccagcattgaacatttctccttgacatatgcacgttcttctgtcttgtgagtacatttggggtagaatcagtgtttttctgctgtatcaaggaaccagtttcccatctttcagggacatggttttctggctgagctggcccagggcaagcaggcagtcatcctgcatttatctccttctagaaagttctggattttactgggactgtgcgctactccctgttcctcagaatcccagggtttttccaagttgccataggggctctccaaatatttcacttgatactgaattttacaatgtttatagctattgaaacacttgtaattaaacacataaccaaatgta

SEQ ID NO: 205777 - DNA, 538 bp, Homo sapiens
gtgaggctaaacagcttagttgcagagatggagagctggtctctaagtgctcctctcagagctgtctctatatgaatgctcagtaaacatgccagtcatctgcagggatagctccaggagactgtaagctgcttgcttaaatctggggtctagatgagtgagaatgagattttctaccagcaagcatgacaaatcctcaaatcatgccagcaaagtacttcatctgagagagggtttacctctttcagggccttatttcacactggaaatattggttggatgtctactccaggaaaggcctgtgcccaatccttggagtggtgggctacaagcatgagcaggacacagaccctgcccaccaggggtttacagttgagtggcagaggctgacttgtgggcgccgatttaacacaaaagtagaaataaccaccatcgacaactccaccagccactgctgctgatgggctggcagtgagtgcttcagggagaaggtggcatttgagctaggttcctaaacagcaagtaggatagcaggtac

SEQ ID NO: 205778 - DNA, 175 bp, Homo sapiens
caaaaaacattaaattgtacacttcaaaggggtgacaatgtatggtatgtgaattatatttcaataacgctattttaaaaagatgtaaatgtaaaaaaaatttaaatattgacatcattaaatgatattaacaaattagtttggctaacattaatctgaagtaaaatttagattt

SEQ ID NO: 205779 - DNA, 338 bp, Homo sapiens
tcaagcctcatgtccatgggcttgatgattgatgagtcaaagcttcatattcctcggccgggtgcagtggctcacgcctgtaatcccagcactttgggaggccgaggcgggcagatcgcggggtcaggagatcgagaccatcctggctaacatggtgaaaccccgtctctattaaaaatacgagaaaattagccgggcgtggtggcaggtgcctgtagtcccagctactctggtagctgaggcaggagaatggtgtgaacccgggagatggagcttgcagtgagccaagatcacgccactgcactccagcctgggtgacagagcgagactctgtctca

SEQ ID NO: 205780 - DNA, 292 bp, Homo sapiens
accatgtgttagaggtttaggagttacaggaactgctccctacaggtggcctcttctatgaaaaggggaccgatgatttttggctgcaagctgaagggtagcaccactgtcaccttatcacctgcttctaaagatccagacgtctgctggccagaggagcatctgctgaaccttctcattagaggaaaggtgtggaggaagggagtggaggtgtttgccatgaactattttcattattcagaaagtctggtcgatgtacacttacccgaaataaagctgagcagtacagttt

SEQ ID NO: 205781 - DNA, 209 bp, Homo sapiens
aaattctctgggcgtggtggcatgtgactatggtcctagctactctggaggctgagatgagagaatcacctgagcccaggaagacaaggctgcagtgaaccatgatctcgccaatgcactccagcctaggtgacagagtgagactctatctcaatttaaaaaaagaagaagagaggaagggaagaaaggagagaggaagggaaggaaga

SEQ ID NO: 205782 - DNA, 352 bp, Homo sapiens
ctatacaataaaaggatcctgggttcccgagagacttcgtgaagcagaacatttgtcctttccctccatcctattggatttcacataagtaaaaaataaaatcctattttactaagccactgagatttggaaattatttgcattagcaaatagcctgctctgcataatacaataaaataaagatcaatataagagctttttttctgtatcaaagatagatttcttcagcattgggagagattttctgactcaaagcccaaacagtagcgtcctgaaatcaaagccacttcaagataaagcaggattctaggactctttctgttttacaacttttattttagattcacagggt

SEQ ID NO: 205783 - DNA, 350 bp, Homo sapiens
acaaagtttagtttcttgccatccaataacaacttattgaagttactaaattttgttttccaatttaatggcagaaggactgtgtgtgtgtgtgtgtgtgtgtgtgtgtgtgtgtgtgtgttttcctgggttattgagtttattgcttggaattgatctaattatgtaaagtggagtggttcatttcatttttagatttttcttttttgtatgtacacatttatttgataacatctaagaagtcgactatatgtttttcagtcctgtttctttttcattgtgagttaatttgctttttgtgcaaatactgggtatagacacaccacaagaatgtaatttgttttttaatc

SEQ ID NO: 205784 - DNA, 494 bp, Homo sapiens
ctagagcctttgcatcctagaaaccaagtctattggaattgactcctcagcaaggatcatgctacatatgttgaaagataaagatcaagagccacatatttaatagaccaagcaaaatcaagccaccccgctaagtatctctccataatttttactaaatttcttttcctcttttggagagaactaaagccagaaatcttcattagtgactgaggagtagagggggcaatataagaattatatatgcaatgtttttgtacatctgaaaagagacatgggagttacacatagaactcctatggatgaagaggatcttaagatgttatgcacttcacctgccaaatgatacctaattcattcactagcaggctataggaaacaaagggatgaaagagaaaagaccaactttcttaaatttgggaaaatgcccttttaattaagggatgaggacggttcagtgctgttggtaataattttgttgagataagtaaggc

SEQ ID NO: 205785 - DNA, 503 bp, Homo sapiens
cctatctgcctaggcatttggctgccctcctgtcactgtcaccagggccatagtctgagctgccttcctgcccttcaggtcctgcacagtgggtctgactgagcaagaggaacctggaccagttggctgtgcccgaccttgccctccctccctgattcatggcctgcccttggcttgtttcttcagtcaatgacagctgagtttgagatggtatctattccagcatcttcatgtacatttcagattcatattcttcaagaataaaacaagacttcacggtattaaaaatggaacaccagtggattgcatttccaaagcagttgagaattgtcgggactgacagctcacttcagttcagaataagactggaaaagtattgcttgcacagcaaaaacgatgtagatgcttaaatcaatgtgtggttcctgattgcgtgacaaaagtatagaattatatttgggtattgtgaaataaagttttggaaaaaggatagaaaaaagaag

SEQ ID NO: 205786 - DNA, 480 bp, Homo sapiens
agtcaaacaagcatatgaaaatttgtttggcaaaaacacatatactccatgacccagccttttcactcctaggtttatattcttccaacagaaataagcacacacgcacatgtaaaacagatgtgcacattatagaagctttatttgtaatagccctgaattagaaacaacgcaagtgaacatcaacattaggtaaattttgttataaacaatggaatactatgaattacagccatacagagataagtatctcaaaaacaatgttgactgaaagataccagacacaaaaatgcataatgtatgattccactcagaccaaattagaaacaaactatgagatggtggtaatagtggttatcttcgcaaggtgacacttttggggtgatggtaaaacagttcttgatctaggtggtggttatataggtgtgttcattttgtaaaagttcattgaaagcctatgtgcatgctatacctgaattt

SEQ ID NO: 205787 - DNA, 267 bp, Homo sapiens
agcttcgggttctgacagcaaagatacagaaaaggggccccttagctgtctcagctgaaatcagcaaataaagtgctgcttggagcttgaattcattctggagaccagctaagtgggaattactcagactttgttggagggaggtgatgaagcttttgccaattgccaatgctataaagcccaaaactttgggaaactttccagtctgacagttacatatagtatcactttcccttaatttgaatattgattaaaaaaataagaaca

SEQ ID NO: 205788 - DNA, 399 bp, Homo sapiens
caccacattcccaatataaagcatttctgtcacctcagaaaggcccctcatttccctttgtaggcaatcccttcctcccaccatcagcccctgttagctactaatctgatttctgttcctagttttgtctttttcagaatgtcttataaatgaaatcatgtagcatgtagcctcttgtgtttgacttctttcacttagtattgttttttattttttttgagacggagtctcactgtcactcaggctgcagtgcagaggcatgacctcagctcactacgacctccgcctcccaggagaattgcttgaatccaggaggtggaggttgcagtgagccaagatggagccattgctgtccaccgcctgggtgacagagcaagactccatctccaaaaaaaaaaa

SEQ ID NO: 205789 - DNA, 720 bp, Homo sapiens
attgtaagtataatgatataactgatattcctgaaataaagtatttaagggtaaggattcagaaaagaggattgttttgttaacatcctgcaagaataagaagtacagtcagccctccatgtctgtgggttccttatccatgaattcaaccaaccatgaattgaaaatatttgagaagaaaaattgtatctgtaccgaacctgtacagacttttttccttgtcattttctaaacaatatagtatgaaaactctacatagcatttacattgtattaggtattgtaagtaacctagagatgatttaacagatgggaggatgaggataggttacaggtgaatattatgccattttcaatcaggaacttgagcatctgtggattttggtgtccatgggaggtcttggaaccagtccccccatggatactgagggaagactaatttgaatttcttaatggtttgtagaattttttaaaaaattggcttacacttaagctaaattaccaattttttggaaagattttatatcatatcactttcttagctattgacagtataacaaataggtgttaaagagaactttattgcatatctagctattcatataataaatagaaacagtgtatatactggcaaacataagagaccaaagacatactattaactatagaatctgtgttctcttctgatcctcagcatattgattttagttcattgtaaatg

SEQ ID NO: 205790 - DNA, 253 bp, Homo sapiens
aactgatgaaagggctggattaacatccagcataaccaattgcagaatatggaaacatgcatagaggcaggaacccagatccagagttaacctggagatgatatgccataagggaatctgcagaaatcttgggaggggcttcagactttcacagagaatcaaaaaagggctaatgcaacctaggtgtccatcaatatgaattggataaagacaatgtggtacgtatacaccatggaatactacacagctgtaa

SEQ ID NO: 205791 - DNA, 520 bp, Homo sapiens
tgagatggagtctagctctgttgccaggcggagtgcagtggcatgatcttggttcactgcaacttccgcctcctgggttcaagcaattctcctgcctcagcctgcaagtagctgggactacaggtgcacgccaccgtgcccagctaatttttgtatttttagtagagatggggtttcaccatgttggccaggatagtctcaatctcttgacctcatggtctgcctgccttggcctcccaaagtgcttggattataggcatgagccaccgcgccctgctgctttggtcacttttatatgagtatgttgcacaatgagagaaaaaccatcagtttttcaagcaagaaagtgggaatatcctctttaacaactgttcctaactttatttttgaatttaggatttcagctaaagtattgctattgtctcttgatttcttaagctttaaatttttaccacaatgagactatggataaatagctactataactcaagcagtatgttatgtactaggaaccatgata

SEQ ID NO: 205792 - DNA, 789 bp, Homo sapiens
gttacttggagcccagactcagggaggcaccgtattgactcatgtgacagggaaagggacactgatgaacagcagttcactgttaacacatgtcacatgggtacttctcattcaaaaggggtgagaaagtacattcctactatgtgcctgggaggagaggagaattggagtgtttgtaaacgagtcctagagagacccacaaacgtcttctgatggatgagataccggatgacagcgtatctttttcttctcaacataagcctgtattgtaaggaaggtagaatcttatcattgcaccttctcagataggaagttgagaatcagaatgcctggacagcgtcactatacacccacagctagtgagtagagggatcaggtttattatgtctttacagcataattatgtctccatatatttcattgatatgaaacctgtactgtgttctgctactttacattctatgatccttttatataattgctactttattttataatcaaacaaagagccagtttatgataagcatagattcttaggtttaagtgtgtaaatttataactattaccatcggtttgtcttttatactttcctttaaataatattttttagtgttaaaaattattcctaccttcagtccacctttacattttcgctaaaaaatattctgttaagttgaaaaacgaagcaaatcattgccactggacaccatatttatatcactgggaatgatgttgtttctcaataggatttgattttatctgaaattccaatgtttccaccgacaatat

SEQ ID NO: 205793 - DNA, 990 bp, Homo sapiens
gactaagggaagatggtgtcctggagctggcatgtttggggaggaatttgcatcgggtggttctttggcaaagatggtcaggaggtgacacgggactgagatctgaaccaggagactgaggcagccggtaggaaagtgcaagggggagcactccaggcagaggcaacggcaggagtgcagaggtcctggggcaggaaggcgtgggacgtgctctgggagcagcatgggggccggagggtgggagtgcagccgctgcggtcgggattctgcgtagacgtgcgacagctggtcagtactccttggtgtcagggacccaggcttactccatcctgtgctgccgtgatgagcttctcatcctcatggtctagtgtggctgcaccggctctggccctcatacctcccggcaggaagccttcttctaggtgaagaagagcaaatccccacctttcaaggaccctcactgcaagttgtccctgtgactccgtttgtgtcccattgagtacgacgcttccctgcacaggatgctaggacacgttgtctttattccgcacacagctgaaatttcttactgagaagaggaaagttgctgttgaacaaaaactagcaacctcagccagtcagtgaccgaggggcagggtaagaagagatgaagatggaggggcagcccgaggccggctcccagagcgccgcgtgaccagagcggaccctggagtaccgtcagtgcaggaggacgtgcataggagagatcagagcagagcgacttgaccttcagaaggtccctccacagagggaagagcagagtctctgggccgaagagtggtggggagggtaatgcggacctggccctcactgtgttggggaggaagctagtgctggggaaggaggctggagcgctgcggtctgcctgacgttctggtagcttagggctcatgtggcagtgcagagagggactcgagtgtccctgaggttctggcggaacctgggtgctgc

SEQ ID NO: 205794 - DNA, 159 bp, Homo sapiens
aaacaatccaagttgaacattcactaactttccatgcatttaacaacagaatctgccgtgcaggttctctccttgagagggccgatacactcatattccacatctcagataaagctcactgtgttgtatgtctccttgagtgtataaggagtgactctc

SEQ ID NO: 205795 - DNA, 181 bp, Homo sapiens
tagcagacagaaaagcaatgtagaaataaaagatcacaggaatatgtaagcaaaacaatttttcctaagaagatgtagtttggagctctatttcagatgctcaaatgtattgctctatataaatcccataagtacatgtcatgactccaggtagtttattgtactcatgaataaagacaca

SEQ ID NO: 205796 - DNA, 542 bp, Homo sapiens
ataaaaaagaaagactccaccaaaaatctcttagaactgataaatgattccataaaacttcatgatacaaaattaatgtacaaaatttggtaacatttctttacatcaacagtgctcaagtgagagccaaatcaagaatgtgtttctatttacaatagtcacacaaaaatattcctaggaatacatctaatcaaagaagtgaatgatctctccatgaagaactacaaaacactgctaaaagaaattattgatgacaaaaacaaatggaaaaacattccctgttcatggactggaaaaaaaatcaatattgttaaaatgctcatacaacccaaagcaatatacagactcaaactattcctatcaaacttttaatgtcatttttcacagaatagaaaaaaatattttaaaattcatatggaaccaaagaaacacccaaatggccaaagcaatgctaagcaaaaagaacaaacccagaagcaccttgttacctgacttcaaactatactataaggctacagtaaccaaaacagaatggtactagt

SEQ ID NO: 205797 - DNA, 324 bp, Homo sapiens
  misc_feature (19)..(19): n is a, c, g, or t
tcagacgctgaactattgntgtatgaaaataaaaactctcattgaaaataaaacctaaaggctgggcgcggtggctcacgcttgtaatcccagcactttgggaggccaaggtgggcggatcacctgaggtcgggagtttgagaccagcctgaccatcccttgagacacgactcatgggatgaatctcagtttgtgtagtgattaagcgcacaagtcttggagtcagcttggcctgggttagattctctctcatctcctctacctatctactacctctgtgacttcaggcaagtcacctaatgtcactaagcttcaggtccttta

SEQ ID NO: 205798 - DNA, 474 bp, Homo sapiens
tgtttgacaattggctgggggagggaagtgatttgtagcatttgtctctttccatggcataaaaactcccaccacggctgatttcaaattgtcagtgtgacatcatctggctcacaaaattcctgaatgtgtaataacagtcagccctcatgagccaggagaagccaactcaggcacaccactcagacactgaatgtgggagcagagtgctctgaaggccagactcagggatccaggctccctgagggctttcccaacaacctaggagatgggtggaaggctggattgtattatttatttattgctattaagttacccctaaagctaagcagcttaaaacaacaaatatttattatcttgcacaatttctgggagtcaggaatcagagaatggcttagctggctggttctggctcagaatctctcatgagtttgtagtcatgatgtcagccagaactgcagtcacttgaagctc

SEQ ID NO: 205799 - DNA, 455 bp, Homo sapiens
acaaagtagactttctaatttttttgataattatataagacatgaacacagtttttaattagaacaaacataatatgccatttgaagaatagtatcaagatgatagtttgattaatttgattagtacttgcttactacatacaaatatgttgggcaagattgtaagccattaaacacacacacaaatatatagacatcatacataattgtttaaaataaggaaaccgcagattcatgagcagtgaaaaattgacattttcaatcttagtaactttgaaactatcataaaaatttactattttgatttataataactaaatgtacataaaactattagagaactttattagaaagtttgactaggcatggagataaatgtgtttcacaattgaaaagtaaacaaagacacaccttattatcaagtaccaaacaaaagcatttaaaaaaagattaag

SEQ ID NO: 205800 - DNA, 797 bp, Homo sapiens
gggtaacacatgtaatctgagacccagtactgtggattccaaacagccccatggaggagcctccagctcaccgtgctctcccgggcacctccctggtgcaggttcagaaagacacggaccacagcccctggagggacagtgcctgctctccacccatctccagaacccagggaaacaggcaatttcacagatgagtcttcctttttcagtcaagataaatgttaagggccatgtatggtggcacatgcctgtggtcccagctactcaggaggctaaggcaggaggatcgcttaagcccaggtggtgaaggctgcagtgagctatgatcacaccgctgcactccagcctaggtgacagagcaagactctgtttctaaaaggataaatacatacataataaaataaagttaaattaaaaagagacatacaaggaagtaaaactgaggccaagcacagtggctcacgcctgtaatcccaacactttgcaaggctgaggagagaatcactcgagcctaggagttcaagaccagtctgggcaacaaagtgagaccctgtctctacaaaaaattttacaattagctgggcacggtggtgcattcctgtaactgcagctacttgggaggctgaggtaagaggatcacttgagcccaggaagtcgaggctgcagtgagctatgatcatgccactgcactcaagcctgggtgacagagcaagactctgtctcaaaaaacaggtaaagctgagaaaagaggaggcctgttctttcactgggtggttgtaagcagccatgcagaatgc

SEQ ID NO: 205801 - DNA, 631 bp, Homo sapiens
tctcaaggatcccacgtgctttgtgtgttagagcagtgaccatcacctcccaacccaaggacctttgctgctctgcttcccacatgggactgccagcaccctgaaggcagaaaaactgaatgtacccgttaaaggaggagaagctggtggtgtatgttgagataaggagggtggggagtgtacagttacaggctgcacagggagggcaagatcaatgttgacaccaaagtgccaaaggctgtctgcgccaggtctggggcccccactggtcataccgcctgataaaaccattgcagtccacactaggtctggaggcttcgacacccacagcatgtgggtgttctcatgcaggccatgagtattcggggtgctttaagtgcaggggagttctgttgtccacgttattcttaaagcccagaataggccctgttttattctacagagataggaaggcactggggctcacagagtggtgctgcttcccaccctcacccttctgcccccacctgagcacagtgtggtgctcagtgatggttatcctatattccaaatacgcatggcccaggactggcagagtcggagctcggggtctagctgtgacctggggatcggttggagtagcttcttgacc

SEQ ID NO: 205802 - DNA, 501 bp, Homo sapiens
ctaaaacagtaaggtgttactatatagacaggaaatgcaaatatttactttgaaaaatagcttgtgaagcttggcataatgttatctcattaaaaaatatgaccagggatataaagttgcttcattctgtatatcaattttttccttcgaaattgtaaagaacaaagttttgaatatctagttcttctaggatttgttttatcaactgaaagtagcagcggcctttatatattagccaatgtgaacaaaggacaagaaagaatatttgtagtttgttttgtacattaaaaaaagttaaattggtgaaaatttaaaatgaatgaatgtagtctctaaagagactctccatccaaagtgtttcaatagttaagtaattgaaatataaagtttaatgatcctatagtgctaacagtgctgctattaggaaaatggcagtaaaggtgacaatataggtgtatattttccaaatatttaatattttcattactttcttcaaaattg

SEQ ID NO: 205803 - DNA, 133 bp, Homo sapiens
tcccagaatgctgggattacaggcctgagccactgctcctggctgcttggtaacttgttaaatcattcctgcagcattcaacttttgagctgctactttgttagttgtactgtacttgttatgataaacttaa

SEQ ID NO: 205804 - DNA, 568 bp, Homo sapiens
aaaaaaaaaagaactttaatgtagctactatacatcttataaatatgattaaggatttaaagaaatacatgatgtgatgaggagagaaaaagaagatatataaaagcccaaatgaaaacttccagagatgaaaaatatctcaggtatttacaccagatgagattaacagcagattagataatgtagaagaaaaaaaaaagactaaacttgcagacattgacaaaagaagctatctaaaacaaagcagagaaaaatgacctacatttattaattgaaaaatgccttgtagagctgcaggaaatatcaggtagtctaccaaacatacaagtagactgggattacaggttcctgccaccacgcctggctaatttttgtacttttagtagagatggggtttcactgtgttggcaggctggtcttgaactcctgatctcgtgatccacccgccccagcctcccaaagtgctgggattacaggcatgagccaccatgccccgccacaaatattttttaaaagtagccaggcatggtgacacatgcctgtggtcgcagctacttgggaggttgag

SEQ ID NO: 205805 - DNA, 312 bp, Homo sapiens
gtgttttatagttttagacagtgagcctgttcactagggctttatgaaatctgccagactggttttagggaacaagcctccagagggtattttgcatttgcttctgtcaggtgccaccaacacagaaattactgaagcagacttttagtttactatatcttagtattgtcagatgttgatttagtgtttaccttataggctggcttgtatttagaaattctcagaattatacacaatgtgggtgtggggaaaaaaaaaagggaattctcaggagaaaacttttttccttaccccgaacccagacagtgacag

SEQ ID NO: 205806 - DNA, 577 bp, Homo sapiens
aagaccagcctggccatcatggtgaaaccctgtctctaccaaaaatataaaaattagctgggcatggtggtgcacacctgtagtcccagctacttgggaggctgaggcacgagaatcacttgaacctgggaggtagatggttgcagtgagagattatgcatgccactgcactccagcctgggtgatagagcgagactctgtctcaaaaaaaaagactaaaatgtggagatcataacgacagaatataatgttaatattgtataccctgatgatatacaaatgatcaaactaataaaatttgagagaaggaattgccctatggtaataactggtattgaaaaagatgtttaaacatcacagatcaaataatagaaatataaacatattcagcactttaaaagaaacattaaaataaaactaaaacactaaagataatgctattagtttcaatactattgattaaatagggtaatgggagaggaggcgtgctaattttaacattactcatgttgaggaactaataggtattgtctaaagagatagaaattacaaaggtaaccattagaacaaagctata

SEQ ID NO: 205807 - DNA, 284 bp, Homo sapiens
aagaagataacacaaagaattaactcagaaaaacaaaaatcatagaaatacagaatacactagtctacaaacagccatacaactccaatgaagacagcatttcaagacaaacagataaacctagaaagccgagaagacctaatatgtgtcaagactggcataagagaaacaaaccaaagttataatcagcaaagtgacactgaatgtttgctagacctgaatgacactctctgtaaaaggtgttcaacgggcaagctgctatgtggatgttttttttttttttg

SEQ ID NO: 205808 - DNA, 496 bp, Homo sapiens
tagatatttattgaatgagtgtatacatgggtgaataaatgaatgaatggttttctgcccagtaagaggacctattttggtattaaggattgcagcaagcttgactgacacaaacaagtcccaaggacttgggaaaaattctaagccattcttggagagccttatagaactatatctgtccagtaattcttgctccttcagtgtagaaatggcctccctaaaatgtacttgtcaattctgtgtcaataagtcgttttagctatcatgatagtctcaattgtttgaaacaaaaatatttctttagcagctttatatggcagaagcattttccacattttaaggtgtcaagatttaccctttgtgatgatatatgtgttctcaaggtttaattacactttatcataaaatatagttattactggattaaaaatgactgttttgttaacagactgataaatatctttgaagggctcaaaatgcagtcatggaaatatgt

SEQ ID NO: 205809 - DNA, 180 bp, Homo sapiens
gattttgtgagtcaattacagacactacacaaacattaattataattccaaatatatgtcaactctgaatcattcactgtaatccatatatacggcaatctatcaaatacagaaatttgttttttatacaaagtacaatttttgaaagtcatgctatcttgtacttaatgcatatttttc

SEQ ID NO: 205810 - DNA, 759 bp, Homo sapiens
aggagtaagctggtgagaggccttccatggcctcccactctctgtgggctcctgtccctgtggggccaccacgctggccaccagctgcctctacttctgccttacagcctccctgccttctgctctcaacgttgaaacagccccctccacagctcccgaacctgtgttccagcggatgcttctctcccttgatgatgcacccgcctgagtcaccccctaatttctcccctgggggattctgactttccacttctcttgggtttctcttccccagcctctcagctgtggttggtgtggagtcagggccgggtgcctataagggcctaaggtaggacttggtgactcggcggtggtttcccttggttccgacttccctcttgcctctctgtctattactggctggtcaactcctccagtgccccttcctccaggcagcctcctcagccctgcccacctgctccatctgagcctgccccagtccccagcctgagtcctcaagcagaaccaatcccccctacctcagctgatgattccctgtgcagagtttgtattggggctcccctaacaagagctgatgctgtatatgcccagctgtgccatctcattgacttctccccaggatcctaggagggagggaacactttacagatggggaaactgaaactcagagaggttaaataacttgcctgaagtcacagccagtgaggtcaaagtgggattaggatttaaagccaataaacccccaaagctcagcactga

SEQ ID NO: 205811 - DNA, 932 bp, Homo sapiens
ccctcttgggtcttttacaagtgaactttctttcctgttttaaagccttttaaataaacttccactcctgtgctgaaacttgccttagtctttttttctgctttatgcccctcagtcgaattctttcatctgaggaggcaagaattgaagttgctgcagacgcctgtggattcaccacaagtacattggagtaaccactgggaacaacaggttgccttagaagctttgcagtagagttggggtttcaccatgttcccagctggtcttgaactcttgaggtgaagcaatccgcccacctcagcctcccaaagtgctgagattacagacgtgagccatcgcgcctagccttgcaagttgttttttgttgaacagaagaagctattcaaaaatgtccaggactctgttatttattcagcaagcttacaaagccatctttgattgactgattctttgacaatgactatctggatgacacaggaaggatgcaattctggccttggagagaaaacttgcaaggaaaggaacatgtttgaatttcagatgtgttcctcaatgaatcacgatcttcagggaatgtttcatgtggaggaaggggctcttggtcaatgagcctgaagactgcatggcaacctttgccagcttttggcctgaaaactcaacttcttcatttgagataattcctgttttatatactttcatttgagatattcctggtgtatcaactgaaacaaaatctatgaaatatcagattcacaaaaatacattttgaatattgaacgtggatagatgtatttaaatctttcctattttttgcactttcataatatatatcattctttatttttctactaataatgatgaatctacagtatctcagggccttattttcaatatcttaactggatttttaataaaagtcttactgaataggt

SEQ ID NO: 205812 - DNA, 781 bp, Homo sapiens
ccctcttgggtcttttacaagtgaactttctttcctgttttaaagccttttaaataaacttccactcctgtgctgaaacttgccttagtctttttttctgctttatgcccctcagtcgaattctttcatctgaggaggcaagaattgaagttgctgcagacgcctgtggattcaccacaagtacattggagtaaccactgggaacaacaggttgccttagaagctttgcagtagagttggggtttcaccatgttcccagctggtcttgaactcttgaggtgaagcaatccgcccacctcagcctcccaaagtgctgagattacagacgtgagccatcgcgcctagccttgcaagttgttttttgttgaacagaagaagctattcaaaaatgtccaggactctgttatttattcagcaagcttacaaagccatctttgattgactgattctttgacaatgactatctggatgacacaggaaggatgcaattctggccttggagagaaaacttgcaaggaaaggaacatgtttgaatttcagatgtgttcctcaatgaatcacgatcttcagggaatgtttcatgtggaggaaggggctcttggtcaatgagcctgaagactgcatggcaacctttgccagcttttggcctgaaaactcaacttcttcatttgagataattcctgttttatatactttcatttgagatattcctggtgtatcaactgaaacaaaatctatgaaatatcagattcacaaaaatacattttgaatattgaacgtg

SEQ ID NO: 205813 - DNA, 647 bp, Homo sapiens
ccctcttgggtcttttacaagtgaactttctttcctgttttaaagccttttaaataaacttccactcctgtgctgaaacttgccttagtctttttttctgctttatgcccctcagtcgaattctttcatctgaggaggcaagaattgaagttgctgcagacgcctgtggattcaccacaagtacattggagtaaccactgggaacaacaggttgccttagaagctttgcagtagagttggggtttcaccatgttcccagctggtcttgaactcttgaggtgaagcaatccgcccacctcagcctcccaaagtgctgagattacagacgtgagccatcgcgcctagccttgcaagttgttttttgttgaacagaagaagctattcaaaaatgtccaggactctgttatttattcagcaagcttacaaagccatctttgattgactgattctttgacaatgactatctggatgacacaggaaggatgcaattctggccttggagagaaaacttgcaaggaaaggaacatgtttgaatttcagatgtgttcctcaatgaatcacttgaagatgaaaattctaagtaatctcaccaggttggacaactggctatgaaatggcatgaaatatgtaagttactattgtcagct

SEQ ID NO: 205814 - DNA, 738 bp, Homo sapiens
gggaaggaaggatcagacgcggctgtatacaacttcttaaactcactgtgtgctcaattcccagaagtaaggagggcactgcgcatgcgggaagcccaccctaagggaggaattatgggaaagaggcaagcctgtaaagcccgaggatcaaggttaaacgctctctttttgaccttcaggcaccctcttgggtcttttacaagtgaactttctttcctgttttaaagccttttaaataaacttccactcctgtgctgaaacttgccttagtctttttttctgctttatgcccctcagtcgaattctttcatctgaggaggcaagaattgaagttgctgcagacgcctgtggattcaccacaagtacattggagtaaccactgggaacaacaggttgccttagaagctttgcaggttgttttgtttttttgtttgtttgtttttttgagacggggtctcactttgtcgcccaggtttgttgcccaggctggagtgcagtggcgcaatctcggctctccgcaacctctgcctcccgggctcaagtgatcctcccacctcggcttcccgagtacctgggactacaggcatgcaccaccacacccggctaattttaatttttattttgtatttttagtagagttggggtttcaccatgttcccagctggtcttgaactcttgaggtgaagcaatccgcccacctcagcctcccaaagtgctgagattacagacgtgagccat

SEQ ID NO: 205815 - DNA, 799 bp, Homo sapiens
tcccttggttccgaagactcctgggggctgcctaatgatggtgtatggaagctgtagcatttctggcacctgccaacttgtcagagctgcctttcccttcctggcactttgtctatgtggcagatctgaatcaagaagccagaggctggaacttgtggaccccaggatgctcacctgaggcttcccactcccctcctcctctcccaactgtagatgattggctatcccgggaggctgggaggccaagaggctgggcacatgtgtccaagatgctggggcagttcttatgaaggcctggctagttaggagagtgagcatctccagagaagggattgggcaggagagttaggagccctcgatgcagacgtgctgtggcccagggtccacccccaccacaccctgcctccctggatgctccgagccattccccagcatcactgggtgtggctagcatggctgctttgggagtgggaataggagaagggggctgctaggtggggagctgggggtgctgagaggatgtggggggatgtgagatggagagtgaagcccaggtgggtccacaggccctagctggtccagacattctggccagcagagcggagggaatcccccaaggggcgggccagtctacttgaatcgcctggccccaggagccctcccctcccccggattgttcttgctccagaacaaaggcagggtggacacttgatccctgcatgtggggtgagctggctaagcccccagccctttgattgggcagctgtcatgggagagagacagctgggggggaggggca

SEQ ID NO: 205816 - DNA, 155 bp, Homo sapiens
tgggtttggaagggagaagaagggaggaaaatgaaagggaagaaggaatgatgccgaaaggtaagggtttcctaatcaggtgaagcatagtgcttaattgatagattgcgtagatggccatgtgcttttgtaacttggggctctgaggtctttca

SEQ ID NO: 205817 - DNA, 856 bp, Homo sapiens
caagaaagtcctcatagaaaagtcaaaaagagaagatggcatgtagagataagagcatgcaagaccgcttgagatggggccgctttactactgtccgacatggggcctcgtttactgaacaatgggcagatggttatgcttttcagaatcttatcaagcatcagaaaaggataaattcacagagggaagagatagacaacggaaaatgttagcaaagcggaaacctcctgccatgggtcaggaccctcctgcaaccagtgagcagaaacagtggaaaagcaggaccaatggagctgaaaataaaacgttaacattagcagaataccatgaacaagaagaaatcttcaaactccggttaggtcatcttaaaaaggaggaagcagagatccaggcagagctggaaaggctagaaagggttagaaatctacgtatcggggaactaaaaaggatacataatgaagataactcacaatttaaagatcatccaatgctaaatgacagatatttgttgttacatcttttggatagaggaggtttcagtaaagtttacaaggcatttgaactaatagagcaaagatacgtagctgtgaaaattcaccagttaaataaaaactggagagatgagaaaaaggagaattaccacaagcatgcatgtagggaatactggattcataaagaactggatcatcccagaataattaagctgtatgattacttttcactggatactgactcattttgtacagtgttagaatactgtgagggaaatgatctaaacttctatctgaaacggcacaaattaatgtcagagaaagaggcctggtccattatcatgcagactgtaaatgctttaaag

SEQ ID NO: 205818 - DNA, 445 bp, Homo sapiens
catgcaatttcagtctcctctgtctgcattctctcctagctctgtgattctaatggcgtgggaaagataatctctcatttctttatcaaatagaacagtgaggagaaatcaataccaaatggaatacctaatattttatatcccagcagtcttctgaacattgtttattctatagtccatttgacagagaaacaaaattgatcagaaggtactttccactaccatacttgcctacttttaggtttgattttctaccttgagttggttaaaatacctctctatgctgacttgtaattcagacagtcagaagtaaatgtgatgtagtccaaaaaggtgccctacgttttggttacttatagaatatagaaggccttcaaatgtttgttgatttttatggaaggctttgaaatatttgttgattgatgttcagtaattttcagatttc

SEQ ID NO: 205819 - DNA, 149 bp, Homo sapiens
atgtggaaaatactggttcaccgagttttattttgtgtgtacagtacttcccgtttcatcatacagaatattcaaagacatgtactagagtattgaggcttaataaaattatttttattgcttcaagaacattcctaagtgaaactaac

SEQ ID NO: 205820 - DNA, 374 bp, Homo sapiens
tattaggactggaagagacctgaggggtcatctggtcaaccagcttattttacaaatgagacacaggctggcagctcgcccacagcctgtctgtcacacagggagtgggtggtacacacaagacgataactcaggcttctttccaatttcagctgccctcagttttccatttcatttggcagttgtgcattttggcatttgctggattcacacattttggtttgtagaaaattaccaagttttaacgtatgaatgattgaggtgaaggcagaatattgtcacagaaacacttgatggatagttttgctcctctacttaagtctgatggaaacatttgaaataaaattgacttcaactcagtagtccctttttct

SEQ ID NO: 205821 - DNA, 170 bp, Homo sapiens
gatattctttatgagtgaaacactcttaagtgcatggttttggtgataattttggctacacaaaagcctacttttaaaaagaaaatccttttttttttttttttgagatggagtttcgctcttgttgcccaggctagagtgcagtggcacgatgatctcagctcattgca

SEQ ID NO: 205822 - DNA, 179 bp, Homo sapiens
gccatggtgattgattcagagatgggcatgtgactggtttgctcagttagagtgaaacctaggattttgtttggtaattgagataaagacacttttcttcaggaagatgtggtgtacggaactgttccagacattttgtcaccatgataaaagtgagtctgaaaagtaaaccatcatgt

SEQ ID NO: 205823 - DNA, 414 bp, Homo sapiens
gcaacattaacaacaaaaaaactaactcatttacaacacatccttctgaggagatgtggtcctacagttgtctgtgggacaataagcaatcagtgagtggtatttagattcccctggctttgtgaaagcatattatttttctgaaaacttctccaacctaagctgagagccccatagatactaatctgaagttaataattaacataattaatatgtactatgcctaaatatacatctcccctcttccaaatgtttgattcaaaactagcattttcaccagcctgggcaacatagcaagatcttatcgctacaatttttttttttttttaattagccaggcatggtggcacgaacctgtaattccagctactcaggagagtgaggtgggaggatcacttgatttctggaggttga

SEQ ID NO: 205824 - DNA, 213 bp, Homo sapiens
taaaaatacaaaaattggccaggcgtggtggcacatgcctgtaatcccagctactcgggaggctgaggcaggagaatcatgtgaacctgggaggcagaggctggagtgagccgagatctgagatcgcaccactgtgctccagctcaggcgagactccgtctcaaaaaaaagaaaaaaaaagaaaaaaaaaggtctaacttgcatgcaatggga

SEQ ID NO: 205825 - DNA, 534 bp, Homo sapiens
tggagatcacagaaagaaagaaactcatgaaagcaatctcttaaagctgtttataaacttgtgggtccattcccaaggtgagtgagtatggatatgatcctcaacagtacacaccgaccctgacaaccgaattacaaatagaacaccactataccagtcccagactggtgactgggtggcatatacatggggcagatctgagcaacactgcaaaggctttgacaaggctggctggacctagcccaatcagatcaattggccaataaaacaaaaatatcaaaatccttggagcataaaaatgctccaagaagtaagggcaaacactcttaaaatgaaaggaaagttttaagtttcagaataaaaaaatgtaaagacgggctatataggaattttagaactaaaaataaaataaccaaaaacattttactgaataggtttaccaacaaaatgcaaatttcaggaaacttgaagacagatcaatagaaattatctaaccagaacaatagtgaaaaaaattggaaaataaacagagcc

SEQ ID NO: 205826 - DNA, 330 bp, Homo sapiens
gagagttcttagttattcatttgttgttattcagtgattagaaataaatgtttcctgataaatcagagtctatgcactaatttcatgctaaaatatacaaatcttgaaaagattgcctttgatctgcctaggaagaacatgaagttgaagaaataaacacacacacatacacaaatcttcatttatcgctgtagaaactaggaaaataaattttcttatgttacaatgtggttttttttttctgcaatgtatcttctattactttgtttctctctcaggaaacagaaaataaaattaaaaattcttctgaaggatgtctgtttttatttc

SEQ ID NO: 205827 - DNA, 539 bp, Homo sapiens
ttatttgtgcaaatttacagattacatgaggaattatgttacatgtatattatgcatagtattaagccagggtcttcaggatgttcatcaccaggtacaatacatttttgttaggtatagtcatcctgctctgctatcaaacattgaatctactcctatcttaatgtatgtttgtaccctttaactcacttctcttcatccttcccctttcccccactcacccttcccagtctctcttatctattttccattctctacctccatgtgttcaaatttttagctcccacatataagtgagaatatatgatatttgtctttttgtgcctagcttatttaacttaagataatgaccttcagttccatccatgttgctgtaagtgacattattttgttttgtttttttatggttgaacaatattccattgtgtatatataccatattttctttatccattcatccactaatagatactcaacgctgattctgtatctttgctgttgtgaatagtactgcaataaacatgttgatttattttcct

SEQ ID NO: 205828 - DNA, 510 bp, Homo sapiens
aatgggtaacatatttttgcctttaaaattctgtggttcaatccgtgcaagcacagcttctccatctagcaagaggttcacagggatggaatgaagattaactgcttttgaaagccccaggagaaaggcagtaaatgaatgatagggggtaatacaccagtatctagtgaatactagatactgaatgtccactgatggctataccattgttgaaagggggcttgtaataggtaaaatggttatgaagatgccaaatagatcaaattggtgctttaactcataattatagtttagtagagaaatgcgagacaagaattattattattccttaaaattcattcccatagtgatatgcatttgtctgctacattctttctttcagcagataataccacaagtgaagtcataaataaaagctattctactcatagcagaaattatttctagattcacattaatgaaaaagttttaattttatttttctttcttttaacgtgaatgcaaaataat

SEQ ID NO: 205829 - DNA, 675 bp, Homo sapiens
cacctgccaataaatggtcaacatgattatggttagaataaggattctaaaagcattataaagtgccggatcatgaaagatcgtagctcttcattgattcagtatttatctcttgagtacttgctttatgccagatacagagtttggcactggggacccagatttacaatgtgttgaaacaaatggaagtttctcgtgaactcttggtcactaatgagatgagaccatcccgttccaccgcactttcaagttaatccatgctcttctatagaatccttacattccagctgtgggatggctgtgtctcatatctcctcagatcaaaaagcatttctgcgaacagtgatattgaacattaaactggctgcatcaaacttgaaaggatggggcggtgattttgtgtcacaatatttttaacattatgcctggcgaatgtgcacatgttagatataaaggaggtttccaaaggggaagctttactacttggacttttaaattgccaggctgcattcttgggaaagccacataaaagaatacccctttttaaatgagtattacctcaaaaagtatagctcttttacgaaaggaatatgttgttctgaagccttgtccttgatgattttactgatattgtgatggttatttcaactaacataagaaggaatctattagata

SEQ ID NO: 205830 - DNA, 508 bp, Homo sapiens
tatgtagaatttggataaagtctaggaaaataaataaatccattcagatgtttcttgaagtcaggtgaaataatcagctactttctcatttattccttagaatggctacattttatttgattgctattttcaagggagtcctatattattccttttctgcttatgaatggatctgaatcctttttggttataaatatcagtggttatgtttctgagtaataaatgtcatgctttgcctttcttggtttcaatgttgttagcattatgaacattatctcttaatgcttgcatttcttcaatattgattccattaactttctctagctctgtcatttttggctttaaatattcaatctcctttaaccaaatggattactactgaaaaccactagaattagttgatcaacttaacgatgtgttgatctgtaaggattgaaacctcggtaattttagtatgccagtaatgcacagtacagcatacttaccaataagaacatcaaacattcat

SEQ ID NO: 205831 - DNA, 351 bp, Homo sapiens
caaaagaaaaaagaaaagcagttgtttatcttttggcttaagccaaaagaacctcaaatgaaagaaaacaaacagatgccattagaaaatgcactaaagatatgatgaaagcttatcagaaataataataaaaaatcaaatgtagcacatcctatgtacctggcactgttataggagctgtgtctgtattaacacgtaagtgtttgaggtaggtactgttattatccctatttgccaatgagagaaagaaggcaagagagcttaaggaagttttcctaattgcccagctagaaggcaggacaggtacaatttggtgctaggtgattaggcttcagaatcatccctcagtca

SEQ ID NO: 205832 - DNA, 661 bp, Homo sapiens
caaagatcacttattccaatgacatgtaagtagactaccaaagtactttctgcctggccagcaaacacatactacttaaaaactgaaagatttgcagaatagttagtgaagacaccagcagtgagttaataatcaaagagctggtgaacatataaaaacaggtgagtaaatgtagctcaacttcccatagtaaacgtacaccagagaagtatttcctattgaataaatttagcgaataaatttagcaaataaattacattctccattctaaatatgtaaaaagaaaactttgaagtgatcataaacttgaaggtacaggttctatataagaggggatcccaataaaccatttgtaatcaagaacaaaatagctcaggagaattttacgacccccttatcaaactatactggtacacagtttcattataacaacatacaaaatgtgtatagatttaattcaggattcaaataggatttttacacaacctagctaaagctctttcctatttgtgcctttgtaataaataatttatataattttttttctcactctgccacccaaggctggagtgcagtggcgctatctcggctcactgcaaactctgccttccgggttcaagcgattctcctgcttcagccttccgagtagctgggattacag

SEQ ID NO: 205833 - DNA, 324 bp, Homo sapiens
ggacactatagttccacctgttcttctccaagaattgcaacaaagcattttcaacctcatctgcagccaattttaaggaaatctaataaagaggtttgcagagcacctgagagcagctaagatcccaagacaaagtagaaaattacctattgaaactacaaataaaaatgaaatttaaatatatcgttttatatatgggccatttgcttgctcaatctctttgtacctgggagtggagggaaaggctgggagtaaaatgggactggattaaaatatagtgattgtagatttttatgacatatgaaataaattgtaaatattaaa

SEQ ID NO: 205834 - DNA, 445 bp, Homo sapiens
tgagattcagaccatgaactccaaacccaggctgcttaggttctcatcctaactctgtcactaacaggccatgtgaccttgggctaggcatttaaactctttgtgcctcagtttttccatctgcaagatggggatgacaataataccactacaccagaagggttgacgtgaggtttaaatgaacgaatacacttaataaggcacttagcatagtacctggcacacaagtgctattaaatagttgtgcactggagtaagcttatactggctcatgagagtcaaatgttagcacctcttcctaccttcgtactcagagacatcagtcatcccctgccagagccaggtgttaaacatttatcagcataccacataaacatcatattttcaaaaagtttgtgtaaaaatggaattaaaagataaaaattaaaaatataaactttatttc

SEQ ID NO: 205835 - DNA, 292 bp, Homo sapiens
tctgctgagtgttttcttttttaatcacaaaaggagtggaatttgtcaatactttttgtgtttattcagatgatcacgcagtttttgtcctttttttctattaatatggtgtaataaattgatttttgtatgaagaaccgaccttgccgttccttaaataaatcctacttttcatggcatataatccatttcatatattgctgagttcagtttgttagtattttgttcaggactgcgaaaagttgtgtggtttttttgtttgttctgagcccagacaggtgcagcgtagaat

SEQ ID NO: 205836 - DNA, 636 bp, Homo sapiens
atcatcatcatcatcatcatcatcatcatcatctagttatggccatgagaagtctccgtaatataaaccatccacactatattcatttgacattttgaaaattcaggagaaatacctgcatattaacctaatacactattacatagcctttagaaattgtaattttgaggtctataagtataggagcatgcttttgataacagtaagtgggggacaaggaagccaaacatgacactatgtatgctataattataataatataaaacagaaatgtgggaatagcattgttaggagttcagcctttagaatcattaaggaagaacctggttagaatctttattagctgtataactttaagcaagttatttaacttctctaagtttcagtttccttattcgaaataaggatgataatggtacctatgattcctctagggattaaatgagataatttagcaatggtcttggcacacatgtaataactactcagtaaaaattagctgttaaatctagaatatgacaggtatggtggctcatacctataagcccagcactttaggaagctgaagctggaagattacttgagaccaggagtttgagaccagcctggtcaacatagcaagaccccttccctaac

SEQ ID NO: 205837 - DNA, 654 bp, Homo sapiens
cttgtgctttgcttacttttgcaagtaatggcatgcttatcgttgttaagaaggctttcatatgataaagcttttaaagctgtgtaaatcaatagatattagaataataatgagagtttcaaaactcactagagccaacacaagctgacctaacccattacggcccagaataatgaactaaaaaatcattgctgagctgccctccaacagaaaaaacaatttgaaaaaaacaggaagtattcattttctattaatggacccactttacttgcagatgcagctagataatgcatcaaagccaattagggttccagaaggagcgtctttactaatagaagggtcaaactcttattgacagagttgaactttaagcaagaaaatgtgttcctggaaaggcaagtggcatcttgattctgccactttgaatttctagttctcatctttagggagaaggtttttcttctacgcccagtgtactataaagacagagacatatgcagctacaaggtttaatcagaagccaggcaggtggatggataatgactatttcaatttgtatcattccttgagtgcagaatcatttaagtgggagaagggtctaattgcctttgaataactagtttccagtcagcactttaaatagccccttttttt

SEQ ID NO: 205838 - DNA, 586 bp, Homo sapiens
agacaaggacactgaggctcagagaggtgaagtgactttactttttatttttttcagacaaggtctcactgttgcccaggctgagtgcaatggcacgatcacagctcattgcagcttcgacctcctgggctcaagcaatccttgcacctcagcctcccaagtagctgggacaacaaacgtgcacctccatgcacatctaatttttgtttttttgtagaaatggggtctcactgtgttgcccaggttggtctcaaattcctgggctcaagcaatcctcccactccagccacccacagtgttgagattacaggcatatgccaccatacctggcctgacatgacttattacctcaaggttgccacagtaaaggagggaaaacaagatcctcagatgtgccaggtgctcctcctctagctcgctggcctgatacttgccatttcctgtgtcaggaacactctagttcctgctcatcccatcacagcacctacttatctcatggggctgaaattgccttgtctcgtctcccccactggactgtgagcaacaagccacatcaaggctctgctgtagcccagcacaaaacctg

SEQ ID NO: 205839 - DNA, 260 bp, Homo sapiens
ctcaatctctacatatcacagctcaactattgtttccaaataaatgtggactcaaaatgtacagaaaataattttatataacctcttcttcatttattcactttaaaactagtacaagcacccaattaattaagtataaatagactgttgttctgataaactccaaagtacttttcatggtaaaaagcactggaaagaatcctaaggtaacactgatctcatcaggcagatggcatttatttggcacgttgacaataaaa

SEQ ID NO: 205840 - DNA, 784 bp, Homo sapiens
tttaacaagaataagtttctattttatcgacacacttttcaagtagatgttgagatctcctaataaagccgtcagtgcttctttgttaacttattcctaacaactagcataacggagccaatcagaatctgaaccatgcggtaagactgcagtgagtctaagtttgtagagtaagtcagaggtcctggcaaagaaagccttgttaggcattaggacaagcctcctgtgagttataaggaattgccttgcaaattgatggaacatgagaaagtaatatcagccatgatattccagcactttttaagaagacctgacctcatgtgtgaagtctgagccatagtccactgaaagacatagcagaccccacctagggtacctaagcatagtgagggttggaggttacttttaattcacaacattagggcttatctctaacactaacatcttctttcccagagctaggaaggctcctcaaaggaagaaggggaatacaacttcaagagataaatccagaacccatttgttgtcaatctttgttgtgtttggggggggggctgttgttgttgttgttgttgtttatattagctttagatactgacatatcacataccagatttatttccttttgaactacaatagtattgtgctgcagattctgaataaatgtaaaatcagagtggagtatcagccacaaagctaatagcaatacattgaaaattcatcaagaaattgccaagattctagaagactacattcttcacccagaatataccatccccatcta

SEQ ID NO: 205841 - DNA, 132 bp, Homo sapiens
acctagaatacattattagttcctggaagccagaaaactaagtaataaagctcttgaaatcagggaacatatctgctatgtattccctacagtaaccagatatgcatgacatgttcactgacatgttccaag

SEQ ID NO: 205842 - DNA, 469 bp, Homo sapiens
catgcctgtaatcccagctactcaggaggctgaggcaggagaatcacttgaacccaagaggtagaggctacagtgagcccagattacgccgctgtactccagcctaggtgacagagcaagaccttgcctcaaaaagaaaaaacaaaagacaaaacaaacaaacaaagaaacaaactgaatgagtccccccagaacctctgggcaggtgaaaaaaaaaattagtttttagacctacaaacttatgaatcagattctgaccaaattcctgcctatgaggtcctacaagcagtaggtcagagtcttcccaaacccctctgagccatagccagccatatgcatcaaatggttttcatgtttgttgaatgaacacatggatgaatgaatgagcaaatgaaaaaacagattactggctggttggctagttgaatagatgaacagaaggatgaaaagaaccatttgatataatact

SEQ ID NO: 205843 - DNA, 405 bp, Homo sapiens
caaaagaaaatatccaaattactaagaaacatataaaagctttccttttcactgtcattagtttttgaggcaatgcaagatacccgtataccgtcatcagaaatgttactcaaaagtgaaataaaacaaaatataacctgacaatatcaaatggtaagaagaatgtgaagcaacaggtcactcacatcctacttgtgtgggagtaattttgtgcagcctctgtttatcaggttacacaaggctgaatacacacattctaataaatctactaaggctaaacatataccttctaataaatctatcaagtttctagatatatagccttcagaaattcttacatgtgtaaatcaagactgtaatgagaatggtcataacatcattatttatgttagtgcctatccaagc

SEQ ID NO: 205844 - DNA, 471 bp, Homo sapiens
tcctgacttcaaatgatccgcctgcctcagcctctcaaagtgctgcgattataggcaagagccaccatgcccagcctaggaaaaaaacacttttaaattagccaggcaaggtggtacaggcctgtagtctcactactcaggaggcagaggtacgaagatgacttgagcccaagagtggaggctgcagtgagctactatgatcctgccactgtcctccaccctaggcaacaaagcaagaccttgcctctttaaaaacagcaacaacagcaaaaactatggtgtgaggtaggagatccagctgctttcttttgcatgtggatatttagttgtctcagcaccatttgttgaaaagatttcttcactaatttgtcctgcaacctttgtgaaaaattaatttacaaatgcaagaatgtatttctagactctattcttactccattgatctctgtctttaggtcagtaccatactgt

SEQ ID NO: 205845 - DNA, 158 bp, Homo sapiens
cagccacaccaaaacacattatagtcaaactcaaaagccaaagacagagaatcttgacagctcatcacatacaaggaatcctcaagaagattatcagcatatttctcatcagaaactttgaagactacaaggcagtgcaatgatatattcaaagtgct

SEQ ID NO: 205846 - DNA, 608 bp, Homo sapiens
cactgttattcaacagtaaacaagaaagacatgttttctgcccttgaggagtttcctatgggtgataatgaaatatttgtttcttaatctttctggagatcttcagtagctggtacgaaatgtgacatcaaggaggtttaagaagtccttcaggagatcactggtgatatgttggaaggttgcctagatattacacaaatgaatcagagttaagaatacatgtgttggctgggcgcagtagctcatgcctataatccatttgggaggtcgaggcgggtgcatcatgaggttagggttcaggaccagcctggccaacatggtgaaaccccgtttctactaaaaatgcaaaaattagccaggtgtggtggtgcacacctgtgatcccagctactcagaaggctgagagacaggagaatcagcttgaacccaggaggtggaggttgcagtgagctgagatcatgccattgtactccagcctgggtgacatagcaagactgtcccccgctcccaccccgccgcccagaaaaaaaaaaaagaatacgtgtgtcttaattggatcactgattattttttcttcctagagaccaagttatagattgggtgttttg

SEQ ID NO: 205847 - DNA, 629 bp, Homo sapiens
gcaaggggggtcagagccagatgaggagcttgcaaagctcatcctttggtgctctattggatagtctgcaaattattttctgactccaggatgacaaaaatatgtgaatccattttcttttctctctcatgagcatcacaagcccgtttatttttatatccattctgtctaaattactttgctctacaactttatagcataatcatgagagcctcttttcttgcatggatgttgcaaagagcatgaagtcctccatggcttttaaagaaggcttttgttgaattagcagaacctaccagagctcctggaaattctgggtttccggtctctgggggcgtcttcactccaagcctcggtgcccttacttggatttgcaagtttagagttaaagtaagtgtcagaaatacgtgtggtgattacagacactttgtagccaataatttccatagtggaactgatatcacttcttgacctattttttcagaggacttttgcgcaatagttactttagaagcaccctcttgaaaagaaatctgaaatggacgtaaaaggctatatttatttgttcatagcatttcttgatgacctgctttatgcaagatttcaaagagctcacagctattaatgac

SEQ ID NO: 205848 - DNA, 559 bp, Homo sapiens
cagtctcactccaatttaatattattcctttcaggatctagatataaatacagtttttgccactagacaactgtcttctcatacaccgggaacagtcttttgttagctacaaaaataacaaaatgcaaacttctggtcgataagtaaggtgaaaaaataatcttaagcccctaatactacacattcaaatgttttaagatgaaatttcttcgacgtttttcatattaccaattttaacgatctaggaaaaaaaaactacagtatattacagcaaattaaatggtagtcttccatttaataattaaaagctaattttaagttgtctagactccttaactctagcatactttaagttattgtggatttttcccctttcaagaatgcttttttgtaaagcccatttaacaagcttccttttcttgccaatttgacctagtgtatttccagtgctataaagtgtaaacattaggaatgtatctttgtgttaaatgttctggtctctcaaacgatttcaactttgatggatgcaatagatctaacaatgttccccctttaacaa

SEQ ID NO: 205849 - DNA, 620 bp, Homo sapiens
gttattttaattctcctttggcacgtaaattaatatatccacaaattccaggtattaggacacagacatcttgcagggaggcggattattctgcctactacaagtgagagaatcggaagactggctggttaatagcacgtttcgatagaacaattttcaagcaataagataccaacctagtggaacttaatgcagccctgaagctgacaaagtataactaagaaaactgtaacaaaacacagtccagaaaaggccttttctgttataaatttacatagataaatatttatataagaagttacttgaaaataaaacccactgataaaccttaaatcacatacttaagaaaatcacttttaataaaataaattaagaaggagagtaaaataatacttagcaaatacagcagataaaataatcctgattgtaacaaattggggctgttctggaaaatgtgggagattaaaaaaaaaaaaaaaaagaggccaagctcattagtgtattactaacaggtaatgatcacattaacatgtcaagcaaagctcacacaatttaggtgattttataaaagaagaataatttgtgttttttcaaaaaacaaaaacacaggtgtcaattcc

SEQ ID NO: 205850 - DNA, 319 bp, Homo sapiens
ttcaataaactggaggccttaagagcagagctgaggcttacttgaagaatacattttcgctgaggatagaactttagctcatgcccaacagttccagcctgccctatggattttggacttgcatagccatttccttgcaataaatcatgtaagccaattccttgtgataaatctcttaatacttaaaaacagcaacaaacaacaacaacaaaataacgaaaagcagtcaacgacttggctcaaaaatattctaatgactaaaatcctgtaaaaatttcatccaaaatagttttttctttttgcccaggctggagtgcaa

SEQ ID NO: 205851 - DNA, 944 bp, Homo sapiens
ttactttcttgtgtccaagttgccccatctttggcccttgggaactccttcaagttgccttctgtgttgttttggcaagaccccatcagtctgtgattgcttccttgctttctggcgtaggatgaccatcttgctcattttgtacgagtcctgccagacctggaaacagctgtttcttgaaggagcgctgtgaactgcattttaagatttttgtacttttgttaattaatttagactgcttccatacagtgtgattatcttcttaggctgtgagtacttctgttagatatttatttgcggggccatgctgctaatactagcatgcatttgaagtcgtattgctagtgttagactacatttggaggcgattttttttttactggcaatttacatgttagtatgctgttcactctagtgctcacaggttatacagcataactgtttgccttgtatttactggtttatggtttaatcgtttagacaagcttgacaagcctccatcaaaacctgttcaacttgtaccaaactgtcttacccttgtctttcctgccttctaaagctcagcaaagatgaattgtatgatcagccattttgtgagcagatatttccatcaagtaagagccggtcagcattctagctgcatgcctccactgatgccaaggagtgtggttttatcttgttgaggatctgtgatgtgtaagaggacaccactactagataacaaatgagtactacaggatttcagaggataaaatgtggtttgggttaataaggcaagggttgataaaaggaataggacttaagatgggagttcctagtagtttagaatttacacaggcagaaaagagagaaggcatcctaatggcatatgactgggaacaaaggtacaggggcaggaatgaacataacatgattgaacagcggaccctaagggtaccgagctc

SEQ ID NO: 205852 - DNA, 255 bp, Homo sapiens
taaacaactcttaaaggaaagctgagccggctcctgttttcacaaatctatgtaaccatcgttgaatgggttccaagcatcaattgttcccagtgagtaaggacataggatatggcaaaaactcacagcaatttattaccagaatgttttaaaagaaatggaggatttcagaaaaggaggagctccacggattcatgtttaaattcaccacaaatgatttatctttgtgttccatttcttgtccaaggtcggttt

SEQ ID NO: 205853 - DNA, 263 bp, Homo sapiens
tcagacgctgaactattgttggtggccagaaacagattggtctattaactaagactcaggcaattgtgtcagacaggcatgtgaaggtgacagggggccctgtcttctgtactcctctcccctcccccaacaggcaggggcttccctcctcctaactcagcatggggctgctggattagggtagctggtggttggatctgtcatctgggacctattccaacccctaccccaatcttttctgcacatagttcagcgtcttattt

SEQ ID NO: 205854 - DNA, 250 bp, Homo sapiens
caataaagcagcttatatagaatgagatctaactatttaaattctgagactttggaaaatggatcaacagtgaacagtgattatctaacgcggtctcacagaagtagctgtaactttgggtttgggattctttcacttctgggtagctgctgagaagtgaaggggctcagaagtattcaggttcactccatgttccttccaaatcctaaaattcggtcacctacagaaagtcccaatcacctgaatttca

SEQ ID NO: 205855 - DNA, 166 bp, Homo sapiens
cccatccccctctcccaggctccctcccttcgccgtccgctttcctgtgcgagtcgccggacgcaccgcccagcccgtccgcagccccgcgccgggtcggggcctcgggccgggccatttcggagggaccgcggcttcggggaggggctaggaggggggagaggga

SEQ ID NO: 205856 - DNA, 423 bp, Homo sapiens
gacagaaaggagatcagtggttgcctgaggacaggaaggagaaataggaattatcaaagttcaggaagaaagttttgtgggtggtggatatattcattttcttgattgtggtgaagttttcatggtggtatacatgtgcctaaacatcaatctgtatatatagcaaatatgtacagtttattttatatcaagtacacctaaataatgctgtttgaaaacacaaagtaaagaatatgtgtatgtactgacttggagggcatgctaagatatgttaaatgaaaagtttcatacaggagtatatatagggtgctatatttggcataaaaaagaaaggaaaataagaatgtttgtttgtatttcttgattttgcataaaggacaagcaaaaagtaatgaaaggattattgatgcagagtgagtgggg

SEQ ID NO: 205857 - DNA, 117 bp, Homo sapiens
ggacccacagcaggaaaatggcaaagcctagttctcagctctgtcccatctgactccactctagcctggccattccccctcaaggggacatctgaggcccaggtccataggttttcc

SEQ ID NO: 205858 - DNA, 534 bp, Homo sapiens
gaactgacgctatctccctccccgcatcaagcttatctcctctcatactatgtcctttcaaggaggttgttttccacactcctttctatgccaaatgaattcaatgtcagtttcaatcccgtttgtatttttgaaaacttaatatgcacctgggactgtactaggcactgtgacaacagcaaaataaaatgtttgacataagttgggctctttaagagttaagaatttagttgagacaagatgtacacctgcaaagagttcaaaagcaaagaggaaactacaaaactatgtgaaaaatgtgcgcactgtgaacttcaaagtgccccaggggctcagagcgaagaagcagtgttgtctggagtgttcaggttgctcatgagggcaggtcagcactgggacttgggaggaatcttgaaaggaagagaaacagactatgactgattgacacaaacttagggagaaaaacaatttcctagtgaaaattttggccccggcacaaccgctcttctcttactcaccggcgctcatgtccac

SEQ ID NO: 205859 - DNA, 609 bp, Homo sapiens
cgagggccggggtttggggtcgcggccacctggcgccccgcgcagtcggacatggttgggtgcctggccgcgccgggccggttgggcctttgttcggtgtgcgcggagggtgagggaagagtgcccaccgggccgcatttagtacctgggtaggaaccggcgcaacttgggggtcatggggtcctcggcgacgcggagtgaccatcccgtcacttttttctcggccgtggccgaagtaattaggccgttcagtagctggtctcagttccagttctttgaaccagtccaggaaaacccacctggtgccgtcctttttcctttagcaaccgtgacacactttccctgtcgctgacggggtgatgcagcttttactagtttgtggtttagaatggtcaaatggtcattttcatctgttaacacagaggaacacttttctttttcttgtttttgaagtgagtggtataagaataagctttggaggcgaccccccgaaaaatgagcttgatggggattcgaaaatgtttactgggtatggtgatttgggccattataggttagccgcagtcatacaattgagggtattattaaaggagtttcattttaaggccg

SEQ ID NO: 205860 - DNA, 555 bp, Homo sapiens
tgaagaaatggtttgtatatatcaatttttatctactcagtatttaatgaaatatgttaggaagccttagaacacaaacactccatttaaaaggtagacattgtcagatggaaaaaacaaagcatggccgagcatatactgtctaaaaaaggtgagctgaaaaatataaagactaaagaggttgtaagttcaagaatagggggagaaatcatggaaaaaataagcataagaaagctggtgtagctacatttctaccagtcaaagtagacttcaagagtatcatgaacaaggagaaacatttcacagaaatcagaatcaacgcgacaaagttatgggaagtgagtgaaataattatctgtaaacgccagggcagactgactaaatagtggggaccctgaataggagtatatgctttggtatctctgaagtggtggcatgatagcactttggttcttttcaacttcatggaccctcatttcagttctgaattcccttcttctagaattattttactttctattcataaacttctgtcatttccaaagagagagagaa

SEQ ID NO: 205861 - DNA, 178 bp, Homo sapiens
attacaggaaagcaggctatgaaacaatggctggttatcatttgactacacacaccaacattttatcagaattcaggctccttgcataatcctaatcttgtggcctttcattagtcttacaaaggcagtttcagtccccagacaatgaggagatcagttttagggagggattatgacc

SEQ ID NO: 205862 - DNA, 742 bp, Homo sapiens
ttgctaatgcccaaattagaaattcatcacatgcattgtaaaaactgcagcttaatcaaatactgcaaatacccaaatacagtctgttttatggtcagtgttgctctgattcgcaaagagtgagactgtggcaactggatgaggatatatgggaagagccagaggagctgaggatgcttgactctccagcctcctctgaaacacatcctaccctatccttcacactttcacacttgataaaggtggcagagcctttaattatgaagccagcccaatgtttaatgttgaaatcccagagtttgcagtggaagtggcaatatgcaatgacagattaggaaagacagggatctgctcccccattatcttgttcccctacccacattagtctattctgcaacagggcctgaggctcagtcattaaggaaaggataacaggtatggaaggagcaagggtttagttaagggggttgacactaagtaaaagtaatcttgggggttctccactgtagaccaagaacagctctgaaaaatcagcattattcctgatagtccaactgtcccctctaccaaattatacttctagatatgggcaatgcaaattatatgttagcctttttagattatggttttaaggacttgaaggttcaaaatatgaccttttcagctcggaagccaagatggccaaataggaacagctccagtctacagctcccagcatgagtgacacagaagatgaatgatt

SEQ ID NO: 205863 - DNA, 444 bp, Homo sapiens
ctaatcagaaatatttataagagtagcaatggagtttgtatatactcccacaaaataattatttcaatccttactggaataaaatctttctccattctaatctctggtctaaagacataatttgttaatgctcttttcttttcaattcattgtgttgtaaaattacttataatttatgcaataaagcatattagagttacagtattctctaggtttaatccaagtccatttaattttcctcaaaagactattatctctattttaatgatatattttactatctcatttaaagcatttataaaagttatgtcatgttgcttaagtttgggatatgtacaatttatactaagattttatcccctctcactgtcttatttaccatttattgaatatcctgttacttgcaaggtattgacatatatcacattggagaaacaatgataa

SEQ ID NO: 205864 - DNA, 396 bp, Homo sapiens
cccccagaacgcggagaggcagcctgagtcttactctcccaccacatcaattcccagcaccgtgggccccggggccactttattttttgtatttttttgagatggggtgtctctgtcgcccaggctggagtccggtggtgcgatctcggctcactgcaacctccgcctcccgggttcacaccattctcctgcctcagcctccggagtagctggggttacaggcccccagtccactttcttggagtctgctgtgtctgaccaaaaagcccatcttcgccacatctaaagctggaagttcatttgccagcgttgtttagagcaaaaagagacacatcgtcatgcaaatcttggactcacatttttgaacctcagcttcttcacccagataattatgac

SEQ ID NO: 205865 - DNA, 371 bp, Homo sapiens
agtggggcctctggaaggtggttaggtcatgagagtggagccctcgtgaatgggactagtgccctataagaagcagacaggacgggcgcgatggctcacgcctgtaatcccagcactttgggaggccaaggtgggtggatcacgaggtcaggagttcgaaactagcctggccaacgtagtgaaacactatctctactaaaaatacaaaaattagccagatatggtggcacgcacctttagtcccagctactcaagaggctgaggcaggagaatcgcttgaacccaggaggcggaggttgcagtgagctgagatggtgccactgcactccagcctgggtgacagagcaagactctgtctcaaaaaaaaaaaa

SEQ ID NO: 205866 - DNA, 332 bp, Homo sapiens
ttgctcaatccaccaattcaaatgctaatctcttttggaaacacccacattaggcacacccagaaatactgtttaatcaatatctgggcatcccatggcccagtcaagttaattcataaaattaaccgtcacacatgataagcactttaacgctggcacattcggttctcacagttgcctcataaggtaggaagtacagttaatcctgttgcccagatgggaaaagtgaggctttggaagttaaatattttatctcagatctgtccaccaccagaacccatactgttggtcattacaaaactgcctctagcagggcaaatcaaagaggagat

SEQ ID NO: 205867 - DNA, 328 bp, Homo sapiens
agatggtgttgggcaagattgatctacctagattgtaaattttagtactgtttatagattagtaacatccttctggggagaagaaaatggcattaatatagacttaaattgtttgtggaaaaaaagtttccttacaggcaagaaaagcgtaacatgaaagtagttttcctaatgccaaaggctttctccgctgcccactgtgctgttttgccaaaattttggcattgttcttttctcgggtcattaccgttcatgctggatttggggcctaagtaaaaaaggaatatgctgtcggtttaattttggaggtgaggaaaccatgccatcg

SEQ ID NO: 205868 - DNA, 284 bp, Homo sapiens
ccgccccctacatctgcaacgagtgtggcaagagctttagccactggtccaagctgacgcggcaccagcgcacgcacaccggcgagcggcccaacgcctgcgccgactgcggcaagaccttctcgcagagctcgcacctggtgcagcaccggcgcatccacacgggcgagaagccctacgcctgcttggagtgcggcaagcgcttcagctggagctccaacctcatgcagcaccagcgcatccacacgggcgagaagccctacacctgccccgactgcggccgc

SEQ ID NO: 205869 - DNA, 209 bp, Homo sapiens
gtcccccagttgaccattatatcaggtgagccatgcagcagactaggaagagttaagatctcttgggttcagtttcctgatattttagagaatcttaagttacaacaattctacattcccgaattgggacatccgtccacgagaaaggcatttccccactcccaccatgatctagagcaaacacgaacaacctctgaataaagcaaaga

SEQ ID NO: 205870 - DNA, 732 bp, Homo sapiens
cataaactgatactgcaactttttaaaatgtattttatttcacttactttattggcatctactaagatcccagcattattatagttaaataaactgaaatttctgaaattcttcaggaatattacatatatattaagattctcaattataaaagattaagattcttaagacctgtcagttcccaattggtgagtgtgcatactgatcagtatgattatagattcattaacagctttatgaggaagaaaataggctacaagaggtgaaaatgtgttctcaaaagttacagagttggtcgtagcaatctaaaagcgaaaacccaaatgtgtcgagtctgttcttaccctgccatcctctgctactcatggggtgcttttattggaaagaactgcagggaaggatgtttttaaataactctgacagattgagattggatacttttgcatttaatgtatacttctaggaatatcaacagagttaaaattatatttaatgcgtattatgtaaaaagagggaaaagaggagagagtgagggtgggaaaacatacctctcaagaatcatgaaaatcagatttaaagattgggtaatatgatagataaggtaacctgaacccatttgtagagcccatggactatggtaaacttgcaactgatacttcgcttgtgtagctcaagaggcgacaagagctatgcttaggatgcgaaggatcggggaactgggttttccctgtc

SEQ ID NO: 205871 - DNA, 898 bp, Homo sapiens
cataaactgatactgcaactttttaaaatgtattttatttcacttactttattggcatctactaagatcccagcattattatagttaaataaactgaaatttctgaaattcttcaggaatattacatatatattaagattctcaattataaaagattaagattcttaagacctgtcagttcccaattggtgagtgtgcatactgatcagtatgattatagattcattaacagctttatgaggaagaaaataggctacaagaggtgaaaatgtgttctcaaaagttacagagttggtcgtagcaatctaaaagcgaaaacccaaatgtgtcgagtctgttcttaccctgccatcctctgctactcatggggtgcttttattggaaagaactgcagggaaggatgtttttaaataactctgacagattgagattggatacttttgcatttaatgtatacttctaggaatatcaacagagttaaaattatatttaatgcgtattatgtaaaaagagggaaaagaggagagagtgagggtgggaaaacatacctctcaagaatcatgaaaatcagatttaaagattgggtaatatgatagataaggtaacctgaaaacccatctgctagaagacacatggaaacattgggtaaaatatgacaaataattattttaaaagcatatgtgtaagctccaggaaggagaaaaagagggtaatgcttatggatgagaaatgaagagagagaactgtagattaataaactgaaattgatgttacagatgcccctggctgacttttataacctgttactgcacaggggtagacatactgggagcttccttttaattcccatactgagaaaagaagagtcctggggttcacatggcctttgtgagactca

SEQ ID NO: 205872 - DNA, 456 bp, Homo sapiens
cacagtggcttatacctgtaatcccagcactttgggaggctgaagtgggaggagcgcttgagcctgggaggttgaggctgcagtgagctgtgattgcaccactgcactctagcctgagtgacagagtgagaccttgtctcaaaaacaaaaaacattagctgggcatggtggcgcatgcctgtagttctagctactcgggaggctgaggcaagagaatcgcttgaacctgggaggtggaggttgcagtgagccaagatcgatcgtgccactgcactccagcctggatgacagagcaagaccctgtctcaaaaaaaaaaaaaaaagagagagagatcaaaaacctataaatatttttcatcatactgtcttttcattttataacctttttggtttttaattgctcctcccctgcccctcatttttcccgtttgtctaattttctttgaacatttaagg

SEQ ID NO: 205873 - DNA, 443 bp, Homo sapiens
gttgcccataacagaccatacgcataggacttcctcggtatgtaggacaggcgtacgagccaaagggcagttgctatattcacccacacagaccataaggaatccatgcttcctggaaactgcccattgatgtcaccctgtgcagctgtaacctgtgtgagtgttctgactcagtcataacaatgacattttggctgggcacagtggctgacgcctgtcatcccagcaatttgggaggctgaggcaggtggatcacttcaggtcaggagttcaaggccagcctggccaacatggtgaaacctcatctctactaaaagtacaaaaaaaaaaatagctggcagtgatggcgcacgcttgtaagccccagttacttgagagtgctgaggcaggagaattgcttgaacctaggaggcagaggttgtagtgcaggaacccactcggga

SEQ ID NO: 205874 - DNA, 817 bp, Homo sapiens
gatgttgatggggaagcacttagtcctgggaacattggcaattacctgtgtggccacaaggagagagaattttagcatgaagtggattccacaaaaggccagttggggaaatggaaagaaaccaggccctagtgacatcagtaagccactgggttaaacccacactgaagcttcatctacctttgaatttcttgtaggagctaatagagtacgtattaagttgagtttgttacttgaaacctaaagcatctgaagcaagatgaggggattatttcttatttgtaagaccttcctaggccccacatgatggctcatgactgtaattccagcactttggcagtgtgaggcaggaggattccttgaggccaggagtttgaaactagcctgggcaacatagtgagagactgtctctacagaaaaaaaaaaaaaaaaaaaaagcctaagtttgattctaggcttcaccaattgttaactgggtgactgagaaaatttccaaatctctctgcttcagttttctttatagtaagattccagatggatgtgatagagggctttattttctagagtgggaggaagagccattgtgaaagagaaaagtagaaaaagaaaatagcaaactgtgtcctcaggcagatcagtttaagtaaagaatacagtaatccctcagtatccatgggggattggttccaagaccttccttggagactgatgttggctgataaaaagtggcatagcatttgtatataacctatacacatcctcttctatactttaaatcatctttagattacttatatctaatacaatgtaaatgcta

SEQ ID NO: 205875 - DNA, 750 bp, Homo sapiens
ccttccactgttgtggtcttttggctgctctgacagttggactgaagggcttttccttttgattttttcctctttttcaatctcaaagttcagactcagactgctttagtgagaaaaaaaaataagcaaaactaagagctctttaatcctaagaaggagctttgtagcagttaccttgaagaagagtttactccccaaaggagtatttagtattacttagatactgagtcactgaacagagagagagagagagacagagagagagagagagagagagagacagagagagagagagagagagagaaagagagagagtgagagtgaatatgtatcccagccagcaagaaagaaaagatacttaatctaaagatgcaggggaagttgtggcctcttcctgaaaattattttatcagctttttaaaaatcaggatgagtgctagttgtgtttaaagtattgtgttctggaaatactaagagttgggatgtctaccagagtgagggttagaagcattttctttggcagcaagaagatatttttatagaagccatgcctgttctgggggttgcctcaaaagtgaggcagccagctgttgggtcaaagcctgtgcatacctgctcttccgataccaaatcttggcactagtgggtcacagcactgttcttcaagacctttgggacttgttgaacagagacctcatgcttcttgtcagtgcgttaaaatcaactgtgaattggggagaaaaaacctta

SEQ ID NO: 205876 - DNA, 514 bp, Homo sapiens
caacatggtgaaaccctctctctactaaaaatacaaaaaattagctgggcgtggtggcgggcacctgtagtctcagctactcgggcggctgaggaaggaggatcgtttgaacccaggaagcggagtttgcagtgagctgagattgcaccactgcactccagcctggcgacagaacgagactccgtctcaaaaaacaaacaaacaaaaactacaaaaatttccagtgacagctggctattgtcaccaatggatttctaattttgctgcccttgccaaacctctgtatgccctccttgaagacaccatcccagcacccattttctggccctgagaggcactaacctcctttgtagccttaaaattagcatttcccatacctctgatgttggcttactgaattttgactaatcttttcacttctattaccatgaaaataatggaattgctggaggtattctatgcaaccttttgcctctcagatatatcctatatttctcatgccaattgaatcctg

SEQ ID NO: 205877 - DNA, 505 bp, Homo sapiens
gtagcctttgctctgtgagctgggaattttagaaaggcttccagaaaatgctctgattttctgcggttgtcactttgatgggagccctttcccagctcggcttgtcccttcctttcagagacctagggaaagagaactcacactggtggagtagggatgggtgctgggcacctgcgcacggggtgtctggcacatgtgactaaatgaaccggaagctgagtgggggatgtgcatggcacaggactcgagaacaggtccgccctgagggaaactgagtcaaactgaggaccagccctttgtttcaggaactgttctccctttcccatatgaatatctcgttctcactctgcagtaaaatgcatctctctcccactgtcttcccacacctcagtttctgatcagctctggcccgacattggcgtgtgagccaatcatgtgtttacagcacgttgaggtggatcacgctctgtggtgcttggtgtttttacatttttggcgacctttg

SEQ ID NO: 205878 - DNA, 609 bp, Homo sapiens
gcttgttgggtacttgggacaagaagtttgatttgggaatttaatttatggcagataacagataatcagtctcagtcttttctgttgcagatataaaaagcagcagtggttatctttaatttttaaaagcattttatcctttttctgttgtttgtgtccataagaaaaatgcatgcataccaaatatccatcataaaatagggaactaagaattttgtgtgcactggattttctttttttaaaattattgtttgaaatctgttaaacaagggcttgaactcaaatgaaagaactggcttttactttaagcttaagctcaccaatgcactcttagagttacttttgttcagggctctgtataaccaaatggaattagcctgaggaaggtacggttttttccacagcattttgtttgtgatgaggaggctaagatagtttaaactgtgtgagctggcactgttgtaaccataaagatttgaggtatttgggttttggttgtagccaagcctagcttgggagctgcgtgtgcaggagtacaggtgtctgaacagagtgtggctgctcagtgctggatgaggctctttggtgacagtctttgaaagcaaatta

SEQ ID NO: 205879 - DNA, 317 bp, Homo sapiens
gttagggtccagaaggcctctgaggtgccattgcttacttccttactgaggaaactggctcttgtcctgggccatgtagttccattctgggctctaggctagtggtgcttctgtccatcaagggtatctgggtgagttgtaggttaacccagaatttagtagggatataggggtttgaataggaaagtgatctggggattcagaaatttttctgatgtatcaatgagcaacttctcagtggatttttatacctcagggtcatttgcaaatctttatcttttcctatttcttaggtgttcaagttggttaataggaga

SEQ ID NO: 205880 - DNA, 467 bp, Homo sapiens
ggaaatcattttccaaaccataactgttctattcagagctttgaagacagatatcaggtcttcagaaccaatgaagaagaaaccattacttatcaaagaagacggagtctcgctctgtcaccaggttggagtgcaccggcgcgacctcggctcactacaacctccgcctcccaggttcaagcgattctcctgcctcagcctcccgagtagctgggactacaggcgtgcaccaccacgcccagctaatttttgtatttttagtagagacagggtttcaccatgttggccagggtggtcttgatctcttgaccttgtgatccacccgcctcggcctcccaaagtgctgggattacaggcgtgagccaccgcatgtggcccaccattaaaattcttaacctaaagaggataattcccatgaaaaatggatgctatgggtcaattaaataaaatcaaacaacacattttat

SEQ ID NO: 205881 - DNA, 860 bp, Homo sapiens
ctgttattactggaagcttttttgtttgagactatactggtagcttttttgtttgttttcttcttcctgcataatcatcgtttcttccacgttgctctcttctgtttattttgatgtctgtgtttcgtgttcagggttttctttgattagtttcttgcttagaatcacacaaagaccaaatcctcataatgagaatccttatttgcagttttgtgtagttctctaattatcgtgaagtgtaatagaaaggtagggatagtgtattgctcacagaagctgctaagttaaaagtgctcagaattctagagctgctaacattaaaaacaaaaatggccttgtgttttacttgattaaaattaagccttaagtttagaacatctttaaacttggtttaaaatgttcattttagggtgtttgccagcttcccagtaaaaatgatgaaaaagaatatccacacagaagaattgatatcaggttgatacccaaagatcagtattactgtggtgttctctatttcactgggagtgatattttcaataagaatatgagggctcatgccctagaaaagggtttcacaatcaatgagtacaccatccgtcccttgggagtcactggagttgcaggagaacccctgccagtggatagtgaaaaagacatctttgattacatccagtggaaataccgggaacccaaggaccggagcgaatgaggcctgtatcctccctggcagacacaacccaataggagtcttaatttatttcttaacctttgctatgtaagggtctttggtgtttttaaatgattgtttcttcttcatgcttttgcttgcaatgtagtcaataaaacctcatgtactatta

SEQ ID NO: 205882 - DNA, 1325 bp, Homo sapiens
agcgccgtgcgccccgccccccatcgggggcaaccattgttccgccggtcgcgccggagctgggttgctcctgctcccgtctccaagtcctggtacctccttcaagctgggagagggctctagtccctggttctgaacactctggggttctcgggtgcaggccgccatgagcaaacggaaggcgccgcaggagactctcaacgggggaatcaccgacatgctcacagaactcgcaaactttgagaagaacgtgagccaagctatccacaagtacaatgcttacagaaaagcagcatctgttatagcaaaatacccacacaaaataaagagtggagctgaagctaagaaattgcctggagtaggaacaaaaattgctgaaaagattgatgagtttttagcaactggaaaattacgtaaactggaaaagattcggcaggatgatacgagttcatccatcaatttcctgactcgagttagtggcattggtccatctgctgcaaggaagtttgtagatgaaggaattaaaacactagaagatctcagaaaaaatgaagataaattgaaccatcatcagcgaattgggctgaaatattttggggactttgaaaaaagaattcctcgtgaagagatgttacaaatgcaagatattgtactaaatgaagttaaaaaagtggattctgaatacattgctacagtctgtggcagtttcagaagaggtgcagagtccagtggtgacatggatgttctcctgacccatcccagcttcacttcagaatcaaccaaacagccaaaactgttacatcaggttgtggagcagttacaaaaggttcattttatcacagataccctgtcaaagggtgagacaaagttcatgggtgtttgccagcttcccagtaaaaatgatgaaaaagaatatccacacagaagaattgatatcaggttgatacccaaagatcagtattactgtggtgttctctatttcactgggagtgatattttcaataagaatatgagggctcatgccctagaaaagggtttcacaatcaatgagtacaccatccgtcccttgggagtcactggagttgcaggagaacccctgccagtggatagtgaaaaagacatctttgattacatccagtggaaataccgggaacccaaggaccggagcgaatgaggcctgtatcctccctggcagacacaacccaataggagtcttaatttatttcttaacctttgctatgtaagggtctttggtgtttttaaatgattgtttcttcttcatgcttttgcttgcaatgtagtcaataaaacctcatgtactatta

SEQ ID NO: 205883 - DNA, 726 bp, Homo sapiens
ctgttattactggaagcttttttgtttgagactatactggtagcttttttgtttgttttcttcttcctgcataatcatcgtttcttccacgttgctctcttctgtttattttgatgtctgtgtttcgtgttcagggttttctttgattagtttcttgcttagaatcacacaaagaccaaatcctcataatgagaatccttatttgcagttttgtgtagttctctaattatcgtgaagtgtaatagaaaggtagggatagtgtattgctcacagaagctgctaagttaaaagtgctcagaattctagagctgctaacattaaaaacaaaaatggccttgtgttttacttgattaaaattaagccttaagtttagaacatctttaaacttggtttaaaatgttcattttagggtgtttgccagcttcccagtaaaaatgatgaaaaagaatatccacacagaagaattgatatcaggtattgttcagactttgttgctgacctgttaacttttccaaacttgtctcgttttctccctccctgtttgtatcttggagttcacattcatatctagagcctttttttactcccaagagccatatgttcttgccaaatgcaatgtttagctccaaagtatgtaaagaataatgactgtctacagactccaatttattttctctagatttgcacctcaccatgatgccttccacagctcaaaagtcatttcct

SEQ ID NO: 205884 - DNA, 1267 bp, Homo sapiens
agcgccgtgcgccccgccccccatcgggggcaaccattgttccgccggtcgcgccggagctgggttgctcctgctcccgtctccaagtcctggtacctccttcaagctgggagagggctctagtccctggttctgaacactctggggttctcgggtgcaggccgccatgagcaaacggaaggcgccgcaggagactctcaacgggggaatcaccgacatgctcacagaaaagcagcatctgttatagcaaaatacccacacaaaataaagagtggagctgaagctaagaaattgcctggagtaggaacaaaaattgctgaaaagattgatgagtttttagcaactggaaaattacgtaaactggaaaagattcggcaggatgatacgagttcatccatcaatttcctgactcgagttagtggcattggtccatctgctgcaaggaagtttgtagatgaaggaattaaaacactagaagatctcagaaaaaatgaagataaattgaaccatcatcagcgaattgggctgaaatattttggggactttgaaaaaagaattcctcgtgaagagatgttacaaatgcaagatattgtactaaatgaagttaaaaaagtggattctgaatacattgctacagtctgtggcagtttcagaagaggtgcagagtccagtggtgacatggatgttctcctgacccatcccagcttcacttcagaatcaaccaaacagccaaaactgttacatcaggttgtggagcagttacaaaaggttcattttatcacagataccctgtcaaagggtgagacaaagttcatgggtgtttgccagcttcccagtaaaaatgatgaaaaagaatatccacacagaagaattgatatcaggttgatacccaaagatcagtattactgtggtgttctctatttcactgggagtgatattttcaataagaatatgagggctcatgccctagaaaagggtttcacaatcaatgagtacaccatccgtcccttgggagtcactggagttgcaggagaacccctgccagtggatagtgaaaaagacatctttgattacatccagtggaaataccgggaacccaaggaccggagcgaatgaggcctgtatcctccctggcagacacaacccaataggagtcttaatttatttcttaacctttgctatgtaagggtctttggtgtttttaaatgattgtttcttcttcatgcttttgcttgcaatgtagtcaataaaacctcatgtactatta

SEQ ID NO: 205885 - DNA, 1286 bp, Homo sapiens
agcgccgtgcgccccgccccccatcgggggcaaccattgttccgccggtcgcgccggagctgggttgctcctgctcccgtctccaagtcctggtacctccttcaagctgggagagggctctagtccctggttctgaacactctggggttctcgggtgcaggccgccatgagcaaacggaaggcgccgcaggagactctcaacgggggaatcaccgacatgctcacagaaaagcagcatctgttatagcaaaatacccacacaaaataaagagtggagctgaagctaagaaattgcctggagtaggaacaaaaattgctgaaaagattgatgagtttttagcaactggaaaattacgtaaactggaaaagacttttttttttcttaaagattcggcaggatgatacgagttcatccatcaatttcctgactcgagttagtggcattggtccatctgctgcaaggaagtttgtagatgaaggaattaaaacactagaagatctcagaaaaaatgaagataaattgaaccatcatcagcgaattgggctgaaatattttggggactttgaaaaaagaattcctcgtgaagagatgttacaaatgcaagatattgtactaaatgaagttaaaaaagtggattctgaatacattgctacagtctgtggcagtttcagaagaggtgcagagtccagtggtgacatggatgttctcctgacccatcccagcttcacttcagaatcaaccaaacagccaaaactgttacatcaggttgtggagcagttacaaaaggttcattttatcacagataccctgtcaaagggtgagacaaagttcatgggtgtttgccagcttcccagtaaaaatgatgaaaaagaatatccacacagaagaattgatatcaggttgatacccaaagatcagtattactgtggtgttctctatttcactgggagtgatattttcaataagaatatgagggctcatgccctagaaaagggtttcacaatcaatgagtacaccatccgtcccttgggagtcactggagttgcaggagaacccctgccagtggatagtgaaaaagacatctttgattacatccagtggaaataccgggaacccaaggaccggagcgaatgaggcctgtatcctccctggcagacacaacccaataggagtcttaatttatttcttaacctttgctatgtaagggtctttggtgtttttaaatgattgtttcttcttcatgcttttgcttgcaatgtagtcaataaaacctcatgtactatta

SEQ ID NO: 205886 - DNA, 1238 bp, Homo sapiens
agcgccgtgcgccccgccccccatcgggggcaaccattgttccgccggtcgcgccggagctgggttgctcctgctcccgtctccaagtcctggtacctccttcaagctgggagagggctctagtccctggttctgaacactctggggttctcgggtgcaggccgccatgagcaaacggaaggcgccgcaggagactctcaacgggggaatcaccgacatgctcacagaactcgcaaactttgagaagaacgtgagccaagctatccacaagtacaatgcttacagaaaagcagcatctgttatagcaaaatacccacacaaaataaagagtggagctgaagctaagaaattgcctggagtaggaacaaaaattgctgaaaagattgatgagtttttagcaactggaaaattacgtaaactggaaaagattcggcaggatgatacgagttcatccatcaatttcctgactcgagttagtggcattggtccatctgctgcaaggaagtttgtagatgaaggaattaaaacactagaagatctcagaaaaaatgaagataaattgaaccatcatcagcgaattgggctgaaatattttggggactttgaaaaaagaattcctcgtgaagagatgttacaaatgcaagatattgtactaaatgaagttaaaaaagtggattctgaatacattgctacagtctgtggcagtttcagaagaggtgcagagtccagtggtgacatggatgttctcctgacccatcccagcttcacttcagaatcaaccaaacagggtgtttgccagcttcccagtaaaaatgatgaaaaagaatatccacacagaagaattgatatcaggttgatacccaaagatcagtattactgtggtgttctctatttcactgggagtgatattttcaataagaatatgagggctcatgccctagaaaagggtttcacaatcaatgagtacaccatccgtcccttgggagtcactggagttgcaggagaacccctgccagtggatagtgaaaaagacatctttgattacatccagtggaaataccgggaacccaaggaccggagcgaatgaggcctgtatcctccctggcagacacaacccaataggagtcttaatttatttcttaacctttgctatgtaagggtctttggtgtttttaaatgattgtttcttcttcatgcttttgcttgcaatgtagtcaataaaacctcatgtactatta

SEQ ID NO: 205887 - DNA, 965 bp, Homo sapiens
aggaggcaaaggttgcagtgagccgagatcgtgccactgcactccagcctggcaacagaacgagactccatctaaaaataaaataaaataaaataaaataaaataaaataaaatagagatttctccataaataattagaaaactcatgttaaaaatgttttcttcccgggctcgattccctgccaaaaaaaaaaaaagttttcttattcaggcatgatgttgttcctggtactctggatgctgaggtgggaggatcacttgagtccaggagttcaaggctatagtttgccatgattgtacctgtgaatagcacagtctccagcctgtgcaatatagcaagactgtgtctctaaaaatattgttaaatattttcttgccattacaaagtaattactctttttcttattccctaattatgattctacagccaaaactgttacatcaggttgtggagcagttacaaaaggttcattttatcacagataccctgtcaaagggtgagacaaagttcatgggtgtttgccagcttcccagtaaaaatgatgaaaaagaatatccacacagaagaattgatatcaggttgatacccaaagatcagtattactgtggtgttctctatttcactgggagtgatattttcaataagaatatgagggctcatgccctagaaaagggtttcacaatcaatgagtacaccatccgtcccttgggagtcactggagttgcaggagaacccctgccagtggatagtgaaaaagacatctttgattacatccagtggaaataccgggaacccaaggaccggagcgaatgaggcctgtatcctccctggcagacacaacccaataggagtcttaatttatttcttaacctttgctatgtaagggtctttggtgtttttaaatgattgtttcttcttcatgcttttgcttgcaatgtagtcaataaaacctcatgtactatta

SEQ ID NO: 205888 - DNA, 1120 bp, Homo sapiens
agcgccgtgcgccccgccccccatcgggggcaaccattgttccgccggtcgcgccggagctgggttgctcctgctcccgtctccaagtcctggtacctccttcaagctgggagagggctctagtccctggttctgaacactctggggttctcgggtgcaggccgccatgagcaaacggaaggcgccgcaggagactctcaacgggggaatcaccgacatgctcacagaactcgcaaactttgagaagaacgtgagccaagctatccacaagtacaatgcttacagaaaagcagcatctgttatagcaaaatacccacacaaaataaagagtggagctgaagctaagaaattgcctggagtaggaacaaaaattgctgaaaagattgatgagtttttagcaactggaaaattacgtaaactggaaaagattcggcaggatgatacgagttcatccatcaatttcctgactcgagttagtggcattggtccatctgctgcaaggaagtttgtagatgaaggaattaaaacactagaagatctcagaaaaaatgaagataaattgaaccatcatcagcgaattgggctgaaatattttggggactttgaaaaaagaattcctcgtgaagagatgttacaaatgcaagatattgtactaaatgaagttaaaaaagtggattctgaatacattgctacagtctgtggcagtttcagaagaggtgcagagtccagtggtgacatggatgttctcctgacccatcccagcttcacttcagaatcaaccaaacagccaaaactgttacatcaggttgtggagcagttacaaaaggttcattttatcacagataccctgtcaaagggtgagacaaagttcatggagttgcaggagaacccctgccagtggatagtgaaaaagacatctttgattacatccagtggaaataccgggaacccaaggaccggagcgaatgaggcctgtatcctccctggcagacacaacccaataggagtcttaatttatttcttaacctttgctatgtaagggtctttggtgtttttaaatgattgtttcttcttcatgcttttgcttgcaatgtagtcaataaaacctcatgtactatta

SEQ ID NO: 205889 - DNA, 1326 bp, Homo sapiens
agcgccgtgcgccccgccccccatcgggggcaaccattgttccgccggtcgcgccggagctgggttgctcctgctcccgtctccaagtcctggtacctccttcaagctgggagagggctctagtccctggttctgaacactctggggttctcgggtgcaggccgccatgagcaaacggaaggcgccgcaggagactctcaacgggggaatcaccgacatgctcacagaaaagcagcatctgttatagcaaaatacccacacaaaataaagagtggagctgaagctaagaaattgcctggagtaggaacaaaaattgctgaaaagattgatgagtttttagcaactggaaaattacgtaaactggaaaagattcggcaggatgatacgagttcatccatcaatttcctgactcgagttagtggcattggtccatctgctgcaaggaagtttgtagatgaaggaattaaaacactagaagatctcagaaaaaatgaagataaattgaaccatcatcagcgaattgggctgaaatattttggggactttgaaaaaagaattcctcgtgaagagatgttacaaatgcaagatattgtactaaatgaagttaaaaaagtggattctgaatacattgctacagtctgtggcagtttcagaagaggtgcagagtccagtggtgacatggatgttctcctgacccatcccagcttcacttcagaatcaaccaaacaggtgcctcagagtttataatcaatggtgatcagtcttacacaacagtgaatttcactttttaagtgatagttgggtattttcagaataagttttgttttcgccttcctgaaaagtctgaagagctttgtactgattgaattctgcgaaaggcaaatttctcgaaaaggatacctattattcttccatgagttgctgggaggacagtctaacatttgaaagagaaaacattgaatacaatagttttagaacgatttactgtctgtgataaatactttagaaatactataatcagattttcattaaattttatcttaaaaaatgaaatattgagaaaccttctattagaaaacctgtgaaggcaaaacattttttattttagaatatatgcctttggaaggtgaaacagctgactctttgattgcttttttttcccatgagccatttcaagaacaggaaaactctttgatttaaggaaacagataaatacaactgatcattgtttttacaatcgtaataccttaaacagtggtttctaaaaatatgtttcatttgataagatgaattttctattagagggaaaaagtacttgctcagaac

SEQ ID NO: 205890 - DNA, 762 bp, Homo sapiens
agcgccgtgcgccccgccccccatcgggggcaaccattgttccgccggtcgcgccggagctgggttgctcctgctcccgtctccaagtcctggtacctccttcaagctgggagagggctctagtccctggttctgaacactctggggttctcgggtgcaggccgccatgagcaaacggaaggcgccgcaggagactctcaacgggggaatcaccgacatgctcacagaactcgcaaactttgagaagaacgtgagccaagctatccacaagtacaatgcttacagaaaagcagcatctgttatagcaaaatacccacacaaaataaagagtggagctgaagctaagaaattgcctggagtaggaacaaaaattgctgaaaagattgatgagtttttagcaactggaaaattacgtaaactggaaaagtgatattttcaataagaatatgagggctcatgccctagaaaagggtttcacaatcaatgagtacaccatccgtcccttgggagtcactggagttgcaggagaacccctgccagtggatagtgaaaaagacatctttgattacatccagtggaaataccgggaacccaaggaccggagcgaatgaggcctgtatcctccctggcagacacaacccaataggagtcttaatttatttcttaacctttgctatgtaagggtctttggtgtttttaaatgattgtttcttcttcatgcttttgcttgcaatgtagtcaataaaacctcatgtactatta

SEQ ID NO: 205891 - DNA, 1208 bp, Homo sapiens
agcgccgtgcgccccgccccccatcgggggcaaccattgttccgccggtcgcgccggagctgggttgctcctgctcccgtctccaagtcctggtacctccttcaagctgggagagggctctagtccctggttctgaacactctggggttctcgggtgcaggccgccatgagcaaacggaaggcgccgcaggagactctcaacgggggaatcaccgacatgctcacagaaaagcagcatctgttatagcaaaatacccacacaaaataaagagtggagctgaagctaagaaattgcctggagtaggaacaaaaattgctgaaaagattgatgagtttttagcaactggaaaattacgtaaactggaaaagattcggcaggatgatacgagttcatccatcaatttcctgactcgagttagtggcattggtccatctgctgcaaggaagtttgtagatgaaggaattaaaacactagaagatctcagaaaaaatgaagataaattgaaccatcatcagcgaattgggctgaaatattttggggactttgaaaaaagaattcctcgtgaagagatgttacaaatgcaagatattgtactaaatgaagttaaaaaagtggattctgaatacattgctacagtctgtggcagtttcagaagaggtaacatacttcctaatcttgggttatttttgccctgatgttaaaattgcctaatatatgggaagaatttggattaaaaagatgtaatttgtggtacttcatagactcactaagacctagtagtattagttaagggtatttgtttatagatgggaatatgtaactaggggaaattcatcctgattttattataggatgatattttaatgactagttttaacgacgtttattaaatgactttaagtatattgaaatgctagtaatggttgtctttggccttttggctggatgatagtgaagttgtgggtagttttgttaatttacctttctttttcctttttttttttttttttgagacagagtctcactctctcgccacgctggagtgcagtggcaccatctcggctcactgcaacctccgcctcccgggttcaagtgattctcctgcctcagcctcctgagtagctgggaatacaggcgtgtgccaccatgcccagctaatttttgtatttttagtagaaacggggtttcaccatgtttgccaggatgg

SEQ ID NO: 205892 - DNA, 908 bp, Homo sapiens
tccagggtttttccctcaaaagcattaattaacatgtcactttatttatcttctatacagatctcagaaaaaatgaagataaattgaaccatcatcagcgaattgggctgaaatattttggggactttgaaaaaagaattcctcgtgaagagatgttacaaatgcaagatattgtactaaatgaagttaaaaaagtggattctgaatacattgctacagtctgtggcagtttcagaagaggtgcagagtccagtggtgacatggatgttctcctgacccatcccagcttcacttcagaatcaaccaaacaggtgcctcagagtttataatcaatggtgatcagtcttacacaacagtgaatttcactttttaagtgatagttgggtattttcagaataagttttgttttcgccttcctgaaaagtctgaagagctttgtactgattgaattctgcgaaaggcaaatttctcgaaaaggatacctattattcttccatgagttgctgggaggacagtctaacatttgaaagagaaaacattgaatacaatagttttagaacgatttactgtctgtgataaatactttagaaatactataatcagattttcattaaattttatcttaaaaaatgaaatattgagaaaccttctattagaaaacctgtgaaggcaaaacattttttattttagaatatatgcctttggaaggtgaaacagctgactctttgattgcttttttttcccatgagccatttcaagaacaggaaaactctttgatttaaggaaacagataaatacaactgatcattgtttttacaatcgtaataccttaaacagtggtttctaaaaatatgtttcatttgataagatgaattttctattagagggaaaaagtacttgctcagaac

SEQ ID NO: 205893 - DNA, 1430 bp, Homo sapiens
agcgccgtgcgccccgccccccatcgggggcaaccattgttccgccggtcgcgccggagctgggttgctcctgctcccgtctccaagtcctggtacctccttcaagctgggagagggctctagtccctggttctgaacactctggggttctcgggtgcaggccgccatgagcaaacggaaggcgccgcaggagactctcaacgggggaatcaccgacatgctcacagaactcgcaaactttgagaagaacgtgagccaagctatccacaagtacaatgcttacagaaaagcagcatctgttatagcaaaatacccacacaaaataaagagtggagctgaagctaagaaattgcctggagtaggaacaaaaattgctgaaaagattgatgagtttttagcaactggaaaattacgtaaactggaaaagattcggcaggatgatacgagttcatccatcaatttcctgactcgagttagtggcattggtccatctgctgcaaggaagtttgtagatgaaggaattaaaacactagaaggctcacagctggattcatgcccagtaaagggacacctgaatggaactgagtcacttttagacttaatatgggatgttatgacaattcttaagttaaaaaatgcagatctcagaaaaaatgaagataaattgaaccatcatcagcgaattgggctgaaatattttggggactttgaaaaaagaattcctcgtgaagagatgttacaaatgcaagatattgtactaaatgaagttaaaaaagtggattctgaatacattgctacagtctgtggcagtttcagaagaggtgcagagtccagtggtgacatggatgttctcctgacccatcccagcttcacttcagaatcaaccaaacagccaaaactgttacatcaggttgtggagcagttacaaaaggttcattttatcacagataccctgtcaaagggtgagacaaagttcatgggtgtttgccagcttcccagtaaaaatgatgaaaaagaatatccacacagaagaattgatatcaggttgatacccaaagatcagtattactgtggtgttctctatttcactgggagtgatattttcaataagaatatgagggctcatgccctagaaaagggtttcacaatcaatgagtacaccatccgtcccttgggagtcactggagttgcaggagaacccctgccagtggatagtgaaaaagacatctttgattacatccagtggaaataccgggaacccaaggaccggagcgaatgaggcctgtatcctccctggcagacacaacccaataggagtcttaatttatttcttaacctttgctatgtaagggtctttggtgtttttaaatgattgtttcttcttcatgcttttgcttgcaatgtagtcaataaaacctcatgtactatta

SEQ ID NO: 205894 - DNA, 1191 bp, Homo sapiens
agcgccgtgcgccccgccccccatcgggggcaaccattgttccgccggtcgcgccggagctgggttgctcctgctcccgtctccaagtcctggtacctccttcaagctgggagagggctctagtccctggttctgaacactctggggttctcgggtgcaggccgccatgagcaaacggaaggcgccgcaggagactctcaacgggggaatcaccgacatgctcacagaactcgcaaactttgagaagaacgtgagccaagctatccacaagtacaatgcttacagaaaagcagcatctgttatagcaaaatacccacacaaaataaagagtggagctgaagctaagaaattgtccatctgctgcaaggaagtttgtagatgaaggaattaaaacactagaagatctcagaaaaaatgaagataaattgaaccatcatcagcgaattgggctgaaatattttggggactttgaaaaaagaattcctcgtgaagagatgttacaaatgcaagatattgtactaaatgaagttaaaaaagtggattctgaatacattgctacagtctgtggcagtttcagaagaggtgcagagtccagtggtgacatggatgttctcctgacccatcccagcttcacttcagaatcaaccaaacagccaaaactgttacatcaggttgtggagcagttacaaaaggttcattttatcacagataccctgtcaaagggtgagacaaagttcatgggtgtttgccagcttcccagtaaaaatgatgaaaaagaatatccacacagaagaattgatatcaggttgatacccaaagatcagtattactgtggtgttctctatttcactgggagtgatattttcaataagaatatgagggctcatgccctagaaaagggtttcacaatcaatgagtacaccatccgtcccttgggagtcactggagttgcaggagaacccctgccagtggatagtgaaaaagacatctttgattacatccagtggaaataccgggaacccaaggaccggagcgaatgaggcctgtatcctccctggcagacacaacccaataggagtcttaatttatttcttaacctttgctatgtaagggtctttggtgtttttaaatgattgtttcttcttcatgcttttgcttgcaatgtagtcaataaaacctcatgtactatta

SEQ ID NO: 205895 - DNA, 1241 bp, Homo sapiens
agcgccgtgcgccccgccccccatcgggggcaaccattgttccgccggtcgcgccggagctgggttgctcctgctcccgtctccaagtcctggtacctccttcaagctgggagagggctctagtccctggttctgaacactctggggttctcgggtgcaggccgccatgagcaaacggaaggcgccgcaggagactctcaacgggggaatcaccgacatgctcacagaactcgcaaactttgagaagaacgtgagccaagctatccacaagtacaatgcttacagaaaagcagcatctgttatagcaaaatacccacacaaaataaagagtggagctgaagctaagaaattgcctggagtaggaacaaaaattgctgaaaagattgatgagtttttagcaactggaaaattacgtaaactggaaaagattcggcaggatgatacgagttcatccatcaatttcctgactcgagttagtggcattggtccatctgctgcaaggaagtttgtagatgaaggaattaaaacactagaagatctcagaaaaaatgaagataaattgaaccatcatcagcgaattgggctgaaatattttggggactttgaaaaaagaattcctcgtgaagagatgttacaaatgcaagatattgtactaaatgaagttaaaaaagtggattctgaatacattgctacagtctgtggcagtttcagaagaggtgcagagtccagtggtgacatggatgttctcctgacccatcccagcttcacttcagaatcaaccaaacagccaaaactgttacatcaggttgtggagcagttacaaaaggttcattttatcacagataccctgtcaaagggtgagacaaagttcatgggtgtttgccagcttcccagtaaaaatgatgaaaaagaatatccacacagaagaattgatatcaggttgatacccaaagatcagtattactgtggtgttctctatttcactgggagtgatattttcaataagaatatgagggctcatgccctagaaaaggacatctttgattacatccagtggaaataccgggaacccaaggaccggagcgaatgaggcctgtatcctccctggcagacacaacccaataggagtcttaatttatttcttaacctttgctatgtaagggtctttggtgtttttaaatgattgtttcttcttcatgcttttgcttgcaatgtagtcaataaaacctcatgtactatta

SEQ ID NO: 205896 - DNA, 460 bp, Homo sapiens
ttaaggtcgaataatagatcccttcagttataatcagtgataagcctgtgagttttcagcctcttactcccacgtgacaatgtaacctgcttacctgcattcttgaggcagagaggcccttgctgcagggtctttaaagactgcgtgaccattcacaggacacttcacagaattaaggccatgaggaagtaatgctgctgctcaaggaaataagtgtccatcatttttcttgaactttcttctgcataagacaaacttgtacattgcttaggaaaggcatttctctttctgtgccaacttttgttgctgtcttgattaggagtgaccatatgccagtggttaataacaaaaataatgcagtctgtctgacttattatttaaagctttttttaacttagatactctgaaaagcccaaagaagatgaatacattgaataaacagaatggagtattttcaaag

SEQ ID NO: 205897 - DNA, 510 bp, Homo sapiens
ggctgtggcctcagtctgtcccatttctcagaaggataaagctgagggccagagggtttctatgactgcactgctgcaaaagcagtgagcggcagagcccgcccgggacaccagggtgccctgactcctccgcccgggatgccagggtgctgactccgcccacccgggacgccagggtgccctgactccgcccacccgggacgccggggtgccctgactccgcccacccgggacgccggggggccctgactccgcccccccgggacgccggggggccctgactccgcccgcccgggatgccggggtccctgactccgcctggctctcgctgcgtccggctcctcggctcagccccacccctgcacccaccctggtatttttttcaatattttttttctttctgaaaagcagtattgacttttatctgctaaagaaaaatgatctaaaaagtgacagccctgggaaaatattatgctataatttttaaggaataaaagaggatgcagtaag

SEQ ID NO: 205898 - DNA, 351 bp, Homo sapiens
ttcatctgttgttggacagggtctgtgggatggacacccgcagcagggcagtgatttttacccctagtgcaattggttcctactgctatgtgctttctccattggctggggttggaccgcacagtctaaactgacccaattggctaatgtttgaaattgaacacagctatctaggtgggaagggaaaggctattcgttatagcacaaggcacgtctaggcttgtcagggcacggcaagggtgggaaggattgtttaccacacatgggtaactacagaaactagagaaacaaagaatgggaagaacagggaattaaaaccttttgaagaggaatttatcatctctgacaatt

SEQ ID NO: 205899 - DNA, 412 bp, Homo sapiens
tggctgaaattgtgacacctttgctttctgacggttcagtgtacacactttgtttcatgtacagaaatggtgaaaaatatgatataaaattaccttcaggctatctgtataaggtgtatatgaaacataaatgaatttcgtgtttagacttgggtctcatccccatgatgtctcactatctatatgcagatactccaaaatctgaaaaaaatctgaaatccaaaatacctggttccaagctttttgaataaggagtacttagtcaaaatgagttcacaatatacatattgttttataatttgacctttcccatttaatagtatatcttgaacttctttccatatgttattgtttatttttaaattttttttgaaaatactttatagaccaggacatacttttcaagttgcct

SEQ ID NO: 205900 - DNA, 424 bp, Homo sapiens
acactggagaatttcaagaaaatgaagcagaaaaccataacacttggccccatggaaagtgaaaagctaccagccatattctccgtcctgtaatctctcagtttcatgagcctcgactttacttccctgtgtatatctgcactcgaagactctgcctatgaccttttcagcctctggatcccaaaaaagatgttctacctatcagatacgtgttgaagagtttccttggtccagtgagctgtgacttgtgagaatggagatcacaatgtatattattccctgtgcctacccttttatcctagagtatcaaccaacataaattaatggtgctgatgtaagcatggaaacaatgatttacaaaacacaacaacaacaaacaaaaaactgttaaactgtgattaaaaagaaaatcaacaaacaaaaa

SEQ ID NO: 205901 - DNA, 924 bp, Homo sapiens
  misc_feature (770)..(770): n is a, c, g, or t
  misc_feature (924)..(924): n is a, c, g, or t
tattcttttagatagcaagattttaaaaaataagtcaaaataccaaaaatcctagactagaaggtaatactatcaagaaagggtaataatgatgacctcataatctggtagcatgggtattctgtggagacttgggggatgacttagtccctggaaatatccaaaaccacaggttgaaacattattgcaacattgagggttttaaaaccctctaggaacactgagggcctcaagctaaatgtgaacatgaatatcttatggaagatgagagagtcctctatcgcactggagcaaaaagatgcagggcgaatgtagaaagcagagttttttgttttttgtttattttttagcctacaatttataccttctctctctctcccccattaaacacaccaggaacacttaataaattcataatgctgaattggcaaccaaatttgtagggaagggtgtggagcagggaggtgaaaaccaagggattccataagaaattgcctctgctacctcatccatctcttaaagcaaataatacatgcagcactcaggctaatgaggtctccaaagaatgtatgtttttgtgtggttataacaaattaaaaaaataagtcatcagctcagcaggaaagtgcttaaaatcttgttttgtagtctttaatgctgttctgaaattaaatacaagagctttctcgaatatataatttgtcctgtcattctaggtagtttccgtggttggatggattgccttggtatggaaggttggtgtgtccccncaacttcctttgatgtagcttaacccggtttgggggcccgatgataacagggcggagccctgggtccattatcgcacaggtgtgtagagcggccttttggcaaaacttctggacccggaaattttttagacatcttcaaaaagataggcggggn

SEQ ID NO: 205902 - DNA, 498 bp, Homo sapiens
gtgctgggattacaggtgtgagccacagcacccagcacgcaatttatttcttggctggagttccacttgtattggtgcaaagaggagaatatttagagtttaaaacaaatggttcataaacaaacaaacgaaatgaatctgtatataaccttaacaggaagaggctattttagcctctattgttgaatgaccttacataaaagctttccgcagagagagttgaaatacttacaattattttatcatgaaaaactatgtcttttaatgccactgaagtaactttgttgagtctaaatctaacacatactaaagacttttgattgtttgagaaaaggcttggtccatagggatttttatttgtttaaaaatatttaataaaggccgggtgtgatagctcatgcctgtaataccagcactttgggaggccgaggcgggcggataatttatgtcaggagttcaagaccagcctggccaacatgatgaaacttcatctccact

SEQ ID NO: 205903 - DNA, 214 bp, Homo sapiens
tcattgtaagttgccaagatgaacaagtcacctttgatatcatattcaactggcatttggtatggaaaaaaactttgtaatttacaagtcttggactggcaacattgagctacattagccaagcacaaaatctggaaagtctaatggcagggcagcctcttctcttcacatacattgaaaaaacagctcttcaggaccactccctccctgctta

SEQ ID NO: 205904 - DNA, 391 bp, Homo sapiens
tttgcaatttagctaagaagctgtcttgctttttgagaggggaagttccaatattgtaagcctaggtttctgaatatatttttgttttttaataaatgtagaaagaatgttttttgttaatcctggcatttgtctagagcaaaagcaaaataaatgaaaagtgaggaaaattaaaaggctcacgttataacatgtgctgtctagagaataaaaactcatttgtgcaaagttggtatggcttttatgaaaatatttcagtccgagcaccttgcctgtttgctgcagtgctgactgactcatgattagggatctgtgttgcctttattgctctcggtttgccctatggcttgatttattaatatatttaaatatacaattttaaccttatcat

SEQ ID NO: 205905 - DNA, 336 bp, Homo sapiens
tgaaccagatctagaagggacattcatcactgtcactgggatgctgttaattaaaactcgagcatacaaccattcctaagaataaaagaggcagtgggatgttgcttatttgtgagttcattggaaaatcactagcttgtttttgccacaaaatattttttatgttgttacccaatacccccccccactgagacacacacacacactcaacacaaatacaactagagcaaaaaattcattaaataatcctctgtgtgtgatatagtctcatagtttctattctattttattgttttaaagtgctgtcatgacccattaaactgttattatggctga

SEQ ID NO: 205906 - DNA, 548 bp, Homo sapiens
ctgtgcactgtttagggaatgctatcagtctgaaaaagcagcagactcactcattttacagatcttgtaagggtagattcctctctgactttcgattgcttttttctccaaatccccattggatctctgccacgcatatgtatgttaatgataaggcggggatttggtcttgctcctgtggctctcaggattccacccactgacccctcgtccccagctttatgtgaaataactactctgcctgccctgattcctgttctcagccatctccagaatgtaagtctgtatctatgggacttggaatgggagttgtggtagtgagtgccattagacaaaaatgaccagacttggaattcttactcattgcaatttctataattaaaagtaaatctttctttggttatttctgtcgccttcaaatgcagttattcatcgtttaatgatggggatatgttctgagaaatgtgtctttaggtgattcatctttgtgtaaacatcatagagtgtatttacacaaacctagatgatgtagcctactacacacctag

SEQ ID NO: 205907 - DNA, 474 bp, Homo sapiens
accacctaacacttagctcaaaccctgtgctgctggggaagttcccttctcctctactccaacttcttgcttcggggcggactgtctctagtctgtctgttgtctcccctctgaatcttcttgcttttcattttccttttctataagctttcttatcaaaaggaaaaattactgattggaccaattgacgctgaacatgccttaaaaactagtaaactattccaaaaatctccgtgatgatttcatgttccgtttcttcactcctgagaaaagctgtgctcctccccttacccttgcagactatcctgcctggtggtctggcatcttcccgatgtcccgtgggctgcagagatggaatcagggggtgagggggaagcaaagcaaggcagagctgggtacagcctagaagaggttaaataaggtaactgctcgagcgaaagccatacgtactggaacgccatcgggaaccaaatt

SEQ ID NO: 205908 - DNA, 365 bp, Homo sapiens
cttgtttttttttttggcataagaagcccatgtgaaaacacagttgaccctaagcctatgaaaaatgacttgtgtgtgggactggggtggctcataggagaaggaggatattcgtctggatttttactggtatgtatatatttttgggtactggagatggggacagtgagtatttgaagctcacagcaggcccattttgcaagttttcaggaaactgaaattcagagagattaagtattttgccatgaatcactttgtagtaagtgggagagctgttgcaaacccacgtctgtctacatccacagcctgtgctcttttcatatacaagggaatatggaggagaagggaagtgatggaaggcttta

SEQ ID NO: 205909 - DNA, 434 bp, Homo sapiens
gaaaggtaagggaagggagccaagtaggtcccctgtaaggactttgacttcagagagaagaaaggttttacacaaaaagatgatctgattattataaggatcattcagatgctgggttgagaacagacaaggggacaacagcagaaacgggggtcagttagcaggctgcaataatatatgttgtgcaaaagtaattgcagttttgccattacttttaatgtaatgcaaactacttttgcacaaacccataatgagatgagaagtgatacaggctgggaccagagtggtagttctggaggtagtgaaaaagtgatcatagccaagcatgatggcacacccctttgtcccagctactcgggacgctgggcaggttgaagctgcagtgatccaagatctctctactgcactccagtttgggcgacagagtgagacct

SEQ ID NO: 205910 - DNA, 479 bp, Homo sapiens
ggcctggcagcgcttagcgcggcggagctacaaggccaaggtcacagcgggcccaggcacgagcggccccaacccggcgtgagcgtctcggataggcggcggcccgagcccaggcccggccgcatgctgtttccccgcgaagtgcgaaaatatcgcggaggggccgctgccgctggctcagacccaggggacccggtgacacgttcgtttttaaccagcagctccaggactggatgtcgttatctttcctggctagcgagtcatgtcattgtgtcaaaactgtcctgcaaaatacgcagaagttctgaatcacatttacttaactgtcgtcagcacacagtttaaaaatatacacgaggccgggcgcggtggctcacgcctgtaagcccagcactttgggaggccgaggcgagcggatcacctgaggtcaggagttcgagaccagcctagccaacatggtgaaatcccagctctactaa

SEQ ID NO: 205911 - DNA, 309 bp, Homo sapiens
ccagagcatggagctctatgtctaggtctttggtaaatattccagttgccagatttagtggtcatttctttgtctctgatccactttacctccctccagcatttgccagtggccagcacctcctgaaaagatagtccccctcgcttgtgcttctgcttctgcgtggctagacttgcctagttctccttttatgtctctctcctgtcattctcacttccttctgctgctgcttctgcttcctgcccgataagtctaggcgtttcttagggctccacccttgatcatgaccttgtcttctccgggacattt

SEQ ID NO: 205912 - DNA, 780 bp, Homo sapiens
atccttttcaaaactattattttctttacagcaaagttctaaaaacttggtttcttttgatttctccccctggcaggaaaatgacacatttggggccaaggcatgaaagcgtggcctcttgggagaagggggagggctattgctttcgagcccgcaaacagttgcaggtgcaaaaaatgtgcacacaaaaggggaggtctggtaggggccccttttcaaatgtaaccttttaagttcaatacatctctttgctcttccttttgtgagctgcgtgcttccctcccacgctctaatgcacatcccggtcttcaatgtggcctccagaaggaatcttcatgtttgttgtgaagttttccgtaattacataatcgttgaagtctgtgagttcgtgttgaggtggctgaaaaatgcgagcttgaggattacagtaacataattagatcgcttcctgtaagaacccagcgacttttccctgggtccgtcttcgattggctgccctccgaggccttcctcctcccgagtgaatcacagcccgctcagtgggcatttctgccggccaaccgctccaaggtgtttcgcggcatctgtttgtgttgtgggtgaattctacaaacacactctgttgatttgattatgaaggaaggagcaacaaagccagagggctgtggtttcttgaatgcctttgtgtctatgtggtgacagaaccagtgcttagtttgtctgggccacggtaccttgactcatccggtggtgtctagaagccttgattccttgccttgg

SEQ ID NO: 205913 - DNA, 507 bp, Homo sapiens
gggtttcaccatgttagccaggctggtcttgaacctcaggtgatctacccccctcggcctccaaaagtggacttggtgtcttcttgacaccactatttagctttctaacaggcatctaaacttaacatgtccaaaacaagtggacccacctgcctgcactaacctttcatatttgctaaatgacaacttaattgaagctctactttgttctaactgctttcactacctccaccactaaagccctggtctaagcctgattatcactcacctagattagtgcaatagcctcttatcagctcccttgcttccatcttttccccctaaaatctgttcactgatggcagccaaagtggttctttaaaaaatacaaatcagtttatgccattgttttactcaaaaccctccaatggctcccatcttactcagagtgacatccaaagtcttcaccatagccttcaaggcctacatgcttcctgtattcactctacgtctctctggtcagccccc

SEQ ID NO: 205914 - DNA, 657 bp, Homo sapiens
agggcccttacatatttgcagacacccagcatatacttgcaatcttttcttcttcaggttcattaccctagtccttttagttgttcttcatttgacataatttcattattcactagtgaaccttgctgcccttccccttgataaaccgaatttgtcagtgtcattcaagtataactgacctcacagaacgtgataccacaagcgatgtggtctgattagcacagagttcagtgaatgaatcctacactaggattggatgaaatttacttagccataccacactaacacttatgtgatttttatgtttactatggatagactatttctcctgtgtccacttcttcctcttacacagttgttatttcaaaactgaagtacagattcttacacttaccctcaggagattcatcatgttagtattagtctctcttttcaggctttatgaatgttaattcagctaactcatttttgagctatctgtctcattttgtgccatctgcacagcataagtttgatttctgttgcttttattagtagttttactaaatacataaaagtgaaatagtgaaacacagagtcttgtagcatccactgtgggatcagtcttttagacaagaatgatgcagttgctgagtcaaatgaataaatgaataaatc

SEQ ID NO: 205915 - DNA, 364 bp, Homo sapiens
caatacaacatacagcggtaaacaaattcaacataatctctaacaaaattctaatagcgcaatctttttacagaaatagtttaaaatttttaaatttgattaaaaactatagcaaaacatccattaaaaagaagatgcattatactttctgatttcaaaacataataaaagctacagtaacaaaaacaatgtggtattgacacaaaaatagataaacagatgaaagaacaagacagcccagaaatgaacccttctatatatgatcaaatgatcttccacaaagttgccatgagcacacaatagagaaaagatcgtctcttggaaaagtaatgttgaaaattggataacactgataaattaagtt

SEQ ID NO: 205916 - DNA, 491 bp, Homo sapiens
acccatagaactgaaaaagtaccctgacctcactttcggatgtccttctggttttcccattggctgaacccaccagaaaggcagagggcagcaaagtgtcacggtagtccgcaggtcgcttcccagggcacacagcaggatggtcaagggagtaagtaaatcagataggggcaaacagaggatcactgactcaagatgtggttttaattaatagaaatggaggctgagtgcagtggctcacacctgtgatcccagcactttgggaggccaaggcaagaggactgcttgaacccaggagttcaagaccagcctggggaacatgttgaaaccctgtctcttgaaaaaatacaaaaattagctaggtgtggtggtgcacgcctgtagtcccagatacttgggaggctgaggtgggaggatcacttgagcctgggaggtagaagctgcagtgagctatgatcacaccactgcactccagccctgtctcaaaaaaa

SEQ ID NO: 205917 - DNA, 219 bp, Homo sapiens
ctcccaaagtgctgggattacaggtgtgaaccactgagcctggcctccttattcttaatgaccacttggaatccaatgacagaatctgccaccacaacttccagcctccaggggacggacacccactttcaaggatttcttcccagggacatgaccctatgccagcccacaccacagtcttggtcatcactcctgtttccatggtgttaacagcagcag

SEQ ID NO: 205918 - DNA, 388 bp, Homo sapiens
  misc_feature (2)..(2): n is a, c, g, or t
  misc_feature (4)..(5): n is a, c, g, or t
antnngaaattcccgggtcgaaccaagcgttcgggaaaatccagttaccttgccttttggcagcctttaaaatccacccagacgtcttgtctgggggccctttcaacatcttcaaagccaacactgtcacagcaagtatttctcacactgccatctccctggtactgcctcttctgcctctcccttccacttattaaggccccttgtgattacagtgggcccacatggataatccaggaccatcaccccaccttacaatcagctgattgacaaccttaattccctttttccatgtagcttaacataggctctggagatgaggatgtggacatctttgggggaccattattctacctaccacatccatgtttcctgttcatttcaataa

SEQ ID NO: 205919 - DNA, 338 bp, Homo sapiens
ggtatctgtcagcctctgtatcccttagaattagaaacaatactaattactctccaacactcgatcttgatatatcattgtatattcaagaagtggaaaataaaaattaatgtagagtctaatgggccacatggatcaagaccaaaaaaaagtacaaaaagaccaaaaagtatatcctcctaagatgggaagatattgtgtctgattaaatattacatatggaaaatggactttgtatgaggttctgtatatgatgatgcacatatgggattatttagaatgtaaaattgctgtgattgaaacagaattcctgaatccaaattagacaaatgtcagtt

SEQ ID NO: 205920 - DNA, 460 bp, Homo sapiens
aaaagaaaaataatagaaaagcagctttgtagaggaatgaaatgtcctgaaactccctactcccagagaaatgtcttccctggcttacttggatttattgaggcaaatccttaacctacttacatgctgtttgtttgttcaacctggaaagaaatccatttgcatcgcacccacccacccaaagaggactggagtatgctcccattcaggagagagctctgctgtagggatggtacactctacaattgctgaagaaagccagttgaatgatcaacagggaccactgtaatccttcaatcataattacaaatacacagactttgaggaaaagtaaaccattaattagaaacatctataggaacaggtggaacagatggtccttgagagattaataatggcaatagaagttaatttaacatttccattaaaattattaaaaacatttgacagaatattgaaa

SEQ ID NO: 205921 - DNA, 419 bp, Homo sapiens
cctaaccatttttatactctagttactaataatggttctcaactctcttagccttgacacttcctatttcatattctttgtaatgcttgctttttatctaaaattaatgatgaacataatctgcccacgcatataatgttcaagaaataaatgtgcatatgagagtggaaatgaaagtaatataaacatctaaaatcatgtattacatttctgaaattcaaaaaacttcaaacatttttcctaagacacagacatttgggagcaaaacctggtcttaattgaaataaatttaattacagtttttatacaagtggtgaatttctgtgttttgctgcaaaaatgttagtatgtttggtcacaggctactgttccagactccactggaacagtagtactacttaatatgctttgaaatgcaa

SEQ ID NO: 205922 - DNA, 368 bp, Homo sapiens
ggaatactacacagcattaaaaaagaattaattattgagacatgtaacaacatagatgagttagacaacatagacttatctattatacatttgcttatgctttcatttggacaaaagatatactcagaagagatcacagtagtatctcttaggcctagaagctcttaggcaggccaattaaacatctgagagtaccactgatactttcttcaccaatttctcctgatcacttagcctcggaaggacagtacagcacatttttcaggatactgggcttacagtcagagacccaagttaaaatactggctttgccactacttgcaatataacttttaagaaacctaagatctctaaattttattttctcc

SEQ ID NO: 205923 - DNA, 750 bp, Homo sapiens
catcgtggaggtgaaggtgctagacgtgcagaagcggcgggtgcccaacaagcattatgtctacatcatccgggtcacgtggtccagcggctccaccgaggccatttaccggcgctacagcaagttttttgacctccagatgcagatgttggacaaatttcccatggaaggaggacagaaggaccccaagcagcggatcatcccctttctgccaggtaagattctcttcagacgaagccacatccgggacgtggctgtcaaacgcctgataccaattgatgaatactgtaaggccctcatccagctgcccccctacatctctcagtgtgatgaggtgctgcagttctttgagacaagacctgaggacctgaatccccccaaagaggagcacattgggaaaaagaaatctgggggtgaccaaacctcagtggaccccatggtcctggagcagtatgtggtggtagccaactaccagaagcaggagagttcggagatcagcctcagcgtggggcaggtggtggacatcatcgagaagaatgagtcaggttggtggttcgtcagcactgccgaggagcaaggctgggtccctgcaacgtgcctcgaaggccaggatggggtgcaggatgagttttctctgcagcctgaagaagaggagaagtacacagtcatctacccgtacacagctcgggaccaggatgaaatgaacctggagagaggggctgtggtggaggtcatccagaaaaacctgga

SEQ ID NO: 205924 - DNA, 560 bp, Homo sapiens
gagagagcccagagcttacgtttgagaactatacgttcttcatccattagttatagtcaagagtctggagcagcagctgatgatataaagccatgtccacgatgtgctgcttatataataaagatgaatgatgggagctgcaatcacatgacatgtgctgtttgtggttgtgagttttgttggttgtgtatgaaagaaatctcagatttgcattatctaagtccatcaggatgtactttttgggggaagaaaccctggagccgaaagaagaaaatattgtggcaactgggaacactggttggtgctcctgtcggaatcgctttaatagctggcattgctattcctgcaatgattattggcattcctgtgtatgtgggccgcaagattcacaatcgctatgaaggcaaggatgtttcaaagcacaaacggaatttggccatagcaggtggtgtaacgttgtctgtaatcgtgtctccagtagtagctgcagtgactgtaggtatcggtgttcctattatgttagcttatgtctatggcgtagttccaatttctctttgtcg

SEQ ID NO: 205925 - DNA, 899 bp, Homo sapiens
ggcccgtagatcgatcaaacaggtggtcagagaaggtttaagggggcagtgagaaaagacttgaaggaggtaagggagtcagtcagccatgaaatctggggaagagtattccagaataaggaggacaaaggtcctagaatagcaatgaggacagggaagctggagggaagccaacaaaggggttagctgtaggtgtcaagggacatgcgtggaaacaaggggtacagattatgtagggtttatgcgacactataaggaatctgatttttactttgaatgaaacaaggatccacacagagggttggggagactgtcatgctcagttttaccaaaataactgtggctgttgtattgaggacaggccttagcgaggacaagggtgaaagcagggataactgttaggaggctacaaaagaaaccatggaaagaaatatacacttcctacaaacttggatcataatggtgcagggatttactttaaggcaaaaataaataaaaacaaatttgtcagatgttaataggaaataactgtaactggctcttgtcattatatgtacattgtacatataaagcagcaaacaatgacatcttttaactactcacctcaagagaacatgttcctttacaatcagctattcactgttaattacatataatttgttgaaaaagttacttttatcaactgagaatactataaatctgctgtgtgaggtagctaacgcctgtaatcccagtctttgggaggctgagggaggaggatcacctgaagccaggagtttgaggctgccaagtgagcaatccagtctaacctggatgacagagggagattctcaactcaaataaatgaataaataaccttggattgctgtttctcaggtttgatcgagctacggtaccgg

SEQ ID NO: 205926 - DNA, 512 bp, Homo sapiens
atccagctgcctattgtgccttcggtcatggaagccatggcactacaagctgggcatggctactgaggcctctttgctacaagatggagaaaaacctgggtcttctgtcatataccacttggaggaaggggtagcctcccgtctttagttccttgctaaataccatggtgttgggggacccatcacccctctcccagaccctgtggctacctgcagagccccttgagatcaaatggagtgaaaaacaatggtttgtacaatttatggatgataccacaagcattgtatacaatggagtttgctggagagcttatgcgtttcatcctttaaccatgatgcttctgataaggacaggaacacaggtgtcagtacagttggccaaacttcaggcattcaccttagcactgtatgccctagccaacaattggccccatctgcacatttttacaggttcttgagccactgcctaagagttgccccatttggggaaagaactctgagaatctctaacc

SEQ ID NO: 205927 - DNA, 383 bp, Homo sapiens
tctcagcctcccaaaatgctaggattacacgcgtgagtcactgcgcccagcccccatgttgtttttaagagtctcatgttctaccgactgagccagccagagctatgttgtatttaaataaatatcgttctacatcttcctttctagttttatgccatttattttttattctttccacattacactggttagaacttccagtacaatgaggaaaaactggtaagaatggatatttctgctttgtgatagatcttaggagacaaggattaaatctttcactccttctagtgttgctacacagaaactatagagtcctaggaggctgggtgcagtggctcagcactctgggaggcctagacaggaggatcccttgagcccaggag

SEQ ID NO: 205928 - DNA, 345 bp, Homo sapiens
tttctggctgtccctccttgctaacgctcgccagagaaatattccgtggaggtgttaaaacaagactagtggaaagaaatggtaacttaaaaagaaagaaaatccatggcagtgaagaacagatttcatattagtactgtcataatattctctaatgtatcatataaataaaaatctgtttagaccagaattttaataagtcaccaaaggaaggttttgaatcctacagtttatgtatccccctttgcgatgtaaatgttcacatctcaagtgaagtagagtggggagacgcttcggagactagaggctgttaattagtgaggtatattttgatcagggcaagaa

SEQ ID NO: 205929 - DNA, 491 bp, Homo sapiens
aatttcttttttatattttatagagatggggtgtcttactatgttgcccaggctggtctcaaactccaaggctactttttcacttaaaatattttttaatatctttccaatcttttaatttgtttatcccacaaatacttcattccaaatgcacatgtaggaagactgtcatatttggctatttattgagctcacttactagttttaataggtttcctctggttttccaggcaattctgttatctacaagtagtgatgactttgactgtttttccatactttttgctaacttaattcttttcctggttttattatgttagttagacttttcaaagtaaagttgaataataatgaactcttactcctcatcttctggattttaaagggagtatctcactttacagttaagtatagtcagccgaaattccttatatgtgggttccacatccatgaatttaaccaactgcagatcaaaagtattctttaaaaaa

SEQ ID NO: 205930 - DNA, 217 bp, Homo sapiens
ctgggaccacaggcacccaccaccacacctggctaattttttgtagaaacagggttttgcattgttgcccaggctggtctcaaactcctcaaatttctgttgtaatttcttcttcagcctattagttactagggagtgaattttttagttcccacatatatgagtttgagactgtattttagtattgacttctaatttaattgggttgtgtttagag

SEQ ID NO: 205931 - DNA, 235 bp, Homo sapiens
agcattctctgttgaagtgattttaagtgtgatttttccttaatgcatacgaaatacggtttgatttgcagaactttgatttgtacacatcctcttgggaatataactgtgcctaaagctggctacatctgtacttttgacttgattgtttttcctgataagttagggaaaacacacatgtaaaatgaacttaattttaacttgcagtaaagaaacatttttcagaaagcattca

SEQ ID NO: 205932 - DNA, 609 bp, Homo sapiens
ctgctttattaaaattaggtgacttttcaagactccatgcaaaaggtggcatgcatagctctggccatgcaatagaaactaaagtaaggttcccgtgtataatccaatcacacagctgccccgccttggtctcacaccaggtctgcaagatggcagcccctttggtttgccctccagccttctcttaagtcctggagccgctctggtaattgagccttccttctggcatcctctggaaggctaattgaatacagcaggaggcagtcacagagctttttagcatttctacttcctttcatttgcacacttttccaataggaagcaaagctactcaattcaggagagaactcccctctcttcctacttaacctttctcctgcatacacaatcgggctactcaaaggtatgctgtttcctttccgctaaaagtttcctcctaattacctcgaggcatccaggtgtggctgaaaatatgctcaaccccgggtgtaaatatctgcacctaagggcagtgagtagcagagcaaaacagcttgtgcagggcgcagtgtgcttaaaacaacctgcagctatttatcgggtgactcagacaggatgcaggggccagat

SEQ ID NO: 205933 - DNA, 447 bp, Homo sapiens
gggctgattaaaaagcaccgcactcaaaagaagcaatctctatttttttttaaaatattgcatatatatacaatggtgtatcatgaaaatttcaaacaaagatgtagctaagctcttggtatttcttcatgtgatggtctttgtgatacaatgtgaagggaaaaggcaaggtgcaggaaagcatatgtagtttgctaaaatttgtgtgaaatgggagaaagattatatacatatacatttagattgacttgcatatgcataaaatgcctttgaaagaataagcaagaaactgatataaatagctgcctgtcaagatggggtagcataagagagagacttttaactttttgagttttgagccaagtcaaaacataaaataaaagataattccaaggcagacaaaacaaacaaaatcaaatccttcaaaataaaaaacttaaaaaaaga

SEQ ID NO: 205934 - DNA, 313 bp, Homo sapiens
tagagaaaaaagagtgaaaagaagtgagcaaagcctccaagaaatatgggactatgtgaaaagaccaaatatacgtttgattggtgtaccagaaagtgactgggagaatggaaccaagttagaaaacactcttcaggatattatccaggagaacttccctaacccagcaaggcaggccaacattcaaatttccaaaaatttccaattcatagacttaatcaatgcagaagctcaaattatactttgagatgccactaagtttaaacactgtaccccctataatcttaggaaagtaaatataaaatagaggaaa

SEQ ID NO: 205935 - DNA, 513 bp, Homo sapiens
ttaagatattgctactggcaattacaataagattatgtattatttgccaaatctgttgtatatactaaaattgtcatgtctgtgctttatttttggtagtctggtgggtgacaaaatgaatcaacagaataagaaattacacaatcaagatttgttaaactttgccttggattatggcctcactacattttactagagttggctcctctccttgttccatttctcacacttgcagatgagattggcattttccaattggtgacatatacaataggaaacaaatattttaggaaggcattctttcctcttttttagggagagtacttgttgtttgacagtctctttattcattctaaagtcatattaaccttccttagaaattctcaaccaaattgagatgcaaaagaaaactatgtggctatttaactttcctttcaatttactttccaaaatgatcaccaagattgcaaagaaggcaaataaatttgatccaaattaatttatattcttcct

SEQ ID NO: 205936 - DNA, 243 bp, Homo sapiens
tggttcccacaagtcaagtggacggtccgtgtccatccttgtccttgtttctccctgtacccagctgcctctagcacccagccttccttatcttatgctactcacggcagagagcagattgtggagagcacacagagagataaggcgattcaggcagagtgggtagttggcctgtggcgtggccctcccaaaacctctgggtggagagtgcgccggctgagcccagaaagcctcattcttatg

SEQ ID NO: 205937 - DNA, 397 bp, Homo sapiens
tccccccaccgcggttcaaatcaaaaagcgctaagtcctggctgatttctgactcagccagtcaaaagagggacacgcctccctaactgcaggagggtggggaagggcagctgcactcagtccgatggaggggaaaccagtaaacccgtcccttggcactgtcacttggcaatttctgaggtttaagacgacacggcgttctcccaggtcctggcctgtaaatgccagggaaacgcattgtacttgtgaagagagagaacacagagtttcgaaactgctctaaagcccatgtctcaggctgcaagaatgttatcagtctcacacatcgtgcccctgcctccaaggcccccatcaccacatactgatcttgccctgatttgaagcgggcgggagagag

SEQ ID NO: 205938 - DNA, 233 bp, Homo sapiens
agattgaccaaaggcacacacactgccacccctgaatctgtgcttctaatgtctgcaacattggtggcacaagtagtcttcagttcagaatgaaagactataaaatgaaaagcattctttcaaaagacaagactaaagacaagaggcatctaatcaaagtggaggatcatacaggctgaaagagaacgaagagaattgtaggaaaaaataatgtttgaaaaaccaaaaatttt

SEQ ID NO: 205939 - DNA, 401 bp, Homo sapiens
gaaaagcaggatggttagatactgggaagactatctttttaatttttttacaccaaacatctaaaattattcctattcagtgccttggtctcacccttgggaaaatttccaaaataagctaacattttccccattgtcttcccgcctaaggaatgtgtgctgtggcttttaggtcaatgatagccttgtccttcaatttcatctttactcagagtaggcgtgctgtgtggtgcaaatccatacatgtttgtttgaaaatccttttagaaccttgccttgttaggacctcctacacctgtgtcacagacacagaagtaccgtgtttaagtattgagcatacactagttttttgtgacagaatctcactccagcctgggagacagagtgagagtctatctcaa

SEQ ID NO: 205940 - DNA, 272 bp, Homo sapiens
tcaatgccgctgaattcatctttgtcctgaggcgcggctcttggagagccttgtgggtgactccgatgcgccgcagcacccgcatttactctccgcttggtagaagcagctgtgtcctcacccctgcggtcacccaagttacctgtcccctggagaacggtggcgccctgctcgagtttcccaaaactcgccttttgtgactgtgttagcgtgaacttgtgagccgagtttgcactgagagcgcgataaacaggtctaattttttaaaagta

SEQ ID NO: 205941 - DNA, 303 bp, Homo sapiens
ataatcccagtgtattactaaaggaaatataactactctttttcctctgtttttttctcaacatgtaatttctttacattttcatttcttctggtttttttctcaacatgtaatttctttacattttcatttcctcagtgaatacaatccataaaccagtttaagctaaagtaagccatgagccagtgatcttcccattttggcgttgagataaattcgatattccatttgttaaaagtacagatgtttggacattaccacaaacctactgaaccagaatttgtgaatgtgaggttatagcat

SEQ ID NO: 205942 - DNA, 258 bp, Homo sapiens
tctcgcgttatcataaccatgagaaagacaaaacaagaatctctcaggggctctaagcagcccaggactgtcttagcctcagtgtgggtgtctggggtgtggaggcggggggctgccaaagtcagaggtctctccctcctcatgcagaagaacctagcaggagtgtctaatcttttgtcttctctgggccacactggtagaagaagaactgtcttgggccacacaaaatacactaacactaacaacagctgatgagct

SEQ ID NO: 205943 - DNA, 682 bp, Homo sapiens
tgctggggattacaggcatgagccactgtacttggccaggagctagttttgactgatgactttttaatattccagccagccctacgaggcagattctcatgtcaccctcattatgcaggtgaggaaaccgaggcccacctggcagtcctggcactgcgctatgctccctttagtgatttttttccatcgggtcattcattccgtggatgtctactgagcagtcaggtagacctaatagaatatgccatctgagtcttaaggttaaatggaggaagcgggtggaagcaagtatgtccaaagttctgaaaaactcaggagtgagtgcagaaccagcctggggaagtccacagcgtcagacaggcagggaggctgcttgcctgcgtttttccgtgcttcctcctatggtcaccccacatgtttctgacatctctggatgcttgtgaacaggagcctttgcctacaactttctagtgttaggttttcagttgtgtcgtcacgtgtcttgtaaggcaacaaccctggtggttgccattcacctggcacgtagtgatgattgtgaggactgagtttatgtgtggaaagtgtagacgatgcctggcacgttgtaagtgcagtaggagtgttatctcttattattgtggttattctgttaacatggatggatgataggtggtgtttcatt

SEQ ID NO: 205944 - DNA, 290 bp, Homo sapiens
tataataattcaataacccttacaatacccctgtgaggaagagacaggtactactattatctcagtttaacttatgggaacaaactgaggccaagaagtgttaagtaacttgtccaagggttactcagtttgcaaatggtaaagtcaagatgtgaacccaagcagtgtggcaccacagccctcttaaccagtatgttctactgcctctcacttgaagtgtttagaattacggtgcataactttcaaacccctggaggacaaaagaaaacaatctagcaaaacttaagaaa

SEQ ID NO: 205945 - DNA, 621 bp, Homo sapiens
aagtgtgacctttgattgtctgtttgtgctcttttagactttttgatgtaggtgtttaggaatatgaacttcccttttagcactgactttgctgtattccagaagttttgataggttgtatcactatttttgttcaatttgaagatttttttaatttccatctcgatttcatgatcattcaggagcaggttaatttccatgtatttgcatggttttgaaagctccttttggagttgatttccagttttattccactgtggtctgagagagtgcttgataaaatttcaattttcttaaatttattgcggcttgttttgtggcctaccatgtggtctatcttggagaaagttccatgcactgttgaatagaatgtatattctgcagttgttggatggaatgttctgtatatatgtgttaagtccatgtgttccagggtatagtttaaatccattgtttctttgttgactttctgtctcattggcctgtctagtgctgtcagtgacatattgaagtcccccactattattgtgttactgtctatctcatttcttaggtctattagtgatggttttataaatttgggagctccagtgttaggtgcatatatgtttaggattgtga

SEQ ID NO: 205946 - DNA, 759 bp, Homo sapiens
aaaaatgactatccttgatatggtttggctatgtccccacccaaatctcaacttgaattgtgtctcccagaattcccacatgttatgggagggacccacggggaggtaattgaatctgaaatgctcttcctatctttctatgcttatttatcagtcctctgctaattcttttcaatgattgattcaatgatgaattcccatgctattctcatgatagtgaattaagtctcacgagatctgatgggtttatcaggggtttgcacctttacttctctctcgttttctcttgccactgccatgtaagaagtgccttttgcctcccaccatgattctgaggcctccccagccatgtgcaactgtaagtccagttaaacctctttttcttcccagtcttggatatgtctttatcagcagtatgaaaactgactaatacagtaaattggtaccagtggagtggggcgctgctgaaaagatacctgaaaatgtggaagcgactttggaactgggtaacaggcagaggttgaaacagtttggagggctcagaagaagacaagaaaatgtgggaaagtttggagcttcctaaagacttgttgaatggctttgacaaaaatgcggatactgctatggacaataaggtccaggctgaggtggtctcagatggagatgaggaacttgtagggaactggagcaaagatgactgttgttatgttttagcaaagagactggtggcattttgcccctaccacagagatttgtgga

SEQ ID NO: 205947 - DNA, 139 bp, Homo sapiens
tgaagttgtaatagccctgacgtatggtttacctactaagataccctcaggagttctcatctagcaagtgagatacaccttatttatcatacatagccagctctgctgtcccagaatctattggaaaatgaatcacaca

SEQ ID NO: 205948 - DNA, 512 bp, Homo sapiens
gtttttagaaagatgttttaaaatagtttactgaatgtacttaactgtgcacttaaaaatggttaaggtgatgaattttagggtgtgtacatttttaccatgaaacatttttattaaaaatttttagaaaaaggcaaaaaaaaatcatttgctgatcaaagaggaagttagttcagagagagagagggtgggccagacccaagataactgtttgaaacaataggaaaaatgagacagtgtcagcaattttgtttgtttgttttttcatcagtctattaatctttcttgtctctccagagctgatttagacacagaagtgccttggtgtgtgtttcggtttgattacagatttgtctggtgaacgtggcaaggggaagagaaaggaaggaaagaactggcatttatcagaggtctttgggccagcatttcctcatgtgttttcatttaatctcgccagcaatgctgtgagttagttttatgatctccattgcgcagatgggaatactgagtct

SEQ ID NO: 205949 - DNA, 379 bp, Homo sapiens
ggttaagggcaatggtttcagggtcaagcagccaagcagctacttagtggctgtgttctctcatcgccatttgggggaactgtaacagccacacctcatggggttgctgtcaggactgggatacatgcaaagatattgaatgactgagaaattaactcaacaaatggcaactgtacttaataaattaatttgacaaactatcctaacaggaattttacctttccagatatacttgtgatagttaaaaatattatcaatttaaagcatgctacaaagcaggcaaatctattagttatagacttgtctatatctacatttacatcaagtaagttttcataacttattaacattcacattcctaatttcatttttgtaatga

SEQ ID NO: 205950 - DNA, 446 bp, Homo sapiens
attctttctcttctgctgactaatgggtctgagcaaagtgttcacttatttcaagcttgaaagacttggaaaggtgactgtcaggactagaaagtaacattaacacttcaagatggcttatgagatttctgtggggaaatagattccttgaaactggcagtgtctgggtatacttttataggatggttcttagttccctcaaatgaatatgccttggacttagcctttggcatgcttcctttaaagctgctcaagccttaagctcaatcctgtgagaacacttctagaaacttcagtttcactttttgacaccctgagtatgtgctcagtgctctaccagaagaatccgtgcatgtctaatgggtattcaccagtacctccataagtaacttagcagatacagattaagatgctctatgaataaaacttgtgactgaagttttaac

SEQ ID NO: 205951 - DNA, 466 bp, Homo sapiens
actctcactcagagcagacaccagctggaatgctctgagccacgcagaatcccagaaatgtctcgattaaggtgattgaactgcatcaaatcccatcactagtaaggggcagcaaccctgtaccagcagggcaaggtctcagagcagatactcaatggacaatcaattcaccaaaactttcttctgaaggttccctcaacttagttatcaacaggttttcatttattctctaaagaaatcagaattaatattgagaagatattaagtgaagtaatatagaaaatccaggacagtgattggcatttaggaaaaagacgtttgtcttgtaatattaaagtttctagctacaattttcacaaagcatgcctctttgctttctctaggagtgtcacagccacagaggggcacatcaacctgatacaagagaaatggagcgaggagaggtgactgtctcaggggagtgata

SEQ ID NO: 205952 - DNA, 538 bp, Homo sapiens
tctaaatgtggacactcttcaatttatctctccggcctggacttctctcctgaactgcagactcatatatcacccacccacctagcagctccacttggatgtccaacagacatctcaaacttgatgtgtccagaaccaaactcctgatcttacccaactcccagcctgatctttccctggccctccctatcagctcagggcacctccttcctttcagttgctcaggatgaagtatttggggttgtgcttgactcttcttgtgtcagcaaacctgactgactgtactttaataatatatccagagtctgaccacatctcatcacatccactacgctcattctggtctaagtcacaatcgagtttttcctatacataccagattagtgtaatctccttctacatggtgctactgccccagactccccatggttaaatgagaaatgttgaattggatcacttcactcctctgttttaatccctctaagggctttgcatctcaccctgagtaaaagctaaggtgatagcaaaggcccccaag

SEQ ID NO: 205953 - DNA, 229 bp, Homo sapiens
gacatgatttgagccactatttagtttaaccttatcatgtaagacatgaagaaactgaggctcaggaaattcatataactgaattcatgacacagagccagcctagaaacctaggtcgtctgtcagacctggctgactcctgggacaaagtcattaggacaggtcttgtgcctggttggtcgtcttctcatggacccatctgcccctgccaatccctgcatctttttca

SEQ ID NO: 205954 - DNA, 235 bp, Homo sapiens
aagatctctgaacaacattcctctgttaggaagagaaagcagatatttccatgagaatgtgagggggatgaggagagtggagtatgctgctgtgatcaattatccaaacacaacctggttaaatccaactctctgtggctcctgcatccacacagctgcatgttatgcagcacacaatgaggctgactgcttccacttgcactcatgaccactgtcctccaatgtccttagtact

SEQ ID NO: 205955 - DNA, 534 bp, Homo sapiens
cagtaaagattagtttgcttgaattattctgtattgggtggctggagacagatttaactacaacatgaagttacaaggtttaattctcagctacataaactttacgtgtgcttacttaatgaaggtaagagtaagttccttattctctaggattagtgccaaagctcttttgaaagagtcttttgtatttactagtgagatcatagcagcggaagcaggctctcagcaaatttaaaatctgctaatgataaataggctttgaaaataagaacaaggctggacgcggtggctcacacttgtaatcccagcactttgggaggctgaggtgggcggatcccttgaatccaggagttcaagatcaccccattgcactccggcatgggtgacaagagtgagactccatctcaaaaaaaaaaaagacgaggaattctacttttggtattgaaagagtagattacatcaggctaaccctcccgggaataacaattatccacctgtaatcccagcactttgggaggccgaggcaggtggatc

SEQ ID NO: 205956 - DNA, 338 bp, Homo sapiens
taaaattaaatagctgtttttcaaaattttgtcttcgagaaaagatatttatgtggcatgaatatagaaagtacctctgctatgccccttaatttttagtgatgtcctgtactgtttacattgcaaattgtaactaataagttggagaggtctagatatctatccagatcttcatttaaattttggttatatatggctctgacttgatttatatctcctttttatgtttcattctctgtcagttttctgaagctcgtttttttatgtcacaagctataaatttgatttgtaattataagaatttagctaaacaatataatctcaagaaaagcagagat

SEQ ID NO: 205957 - DNA, 401 bp, Homo sapiens
gtgcatggtagaggagatgtactgtatgcaagtgaggagaaaacagaaaaagaccctgagattctagcttagtaaatggaagactgatataaaaaataagatatggatcatgtaagaaggaggacagatcatataaaaagaaagttgaaactacataaataacacaaaaaagaataatagacatatgagaaccttggcaacattcatcttcaagaaagaaactgacaaaaaggtacactaaacaggtacattcagaagacaaaccagtagtgaatagggtcataaaaggctcaaaacatctgctgataagttacctataacttacagagctttctcagggatgtcttccattgatactctgggttaagcccgcctaataaagcctttaatttcaccttgta

SEQ ID NO: 205958 - DNA, 380 bp, Homo sapiens
aaagtcaatcagtagacaatcagaatcaagacttgcagcttcttaatggttgaattcatgtttggcttaacttcttactaagaataaagcagaactatctgacagaacaagggtcctgagatttcctcccagtttctgcaagtgtggaaagtaagaatacccgggaggaagcccaactttatagaagtgggctgccattcaacttctaaagaatatactttaatacttaaatatactttaagcatatttcacagagtgaggcagacctgcagtttatttatttagcaaatattagttaacaaagtggtcccactttttaaaattcaaatacttgcctccgagagactgatccctaattcagtttgtcacccacagacctg

SEQ ID NO: 205959 - DNA, 663 bp, Homo sapiens
ctagaggatccctcggtgggtcgtactgtgtctttttaccataactatcttggagatctttccatatcagtaaattgaaaacaccctgatttttaaaatagctgcacagaattcactatacaagtatagctttatttcaccagccctggtcactttgtttctactttttaactgctatttgcaatgtagaaatgaataagctcataaatatgtcatttctagcatattctaatatatcctcagaatagactcccaaaaacagaatggctggattaaaggatgtttgaatttgcagtcttattattctttacagctaaaatgcccaacacaaggattgcaccattgggtattctcacggcaatgtatgaaatctatttctccaacatgtgacaacaaagcatattatcaaactttcagattcttgccaatctgaaaaatattacttcagactaattttgatttgtattttataatgaatgagggtattcatttttttttcatttatttaagagctatttgtatttccttgtctgcaaaattctgtttgcatcttttcctcagttgtctactgggttttcttcttgttcatttctaggagttcttttctaaataaagtaaattagccttttgcctctgaataagtttcaaatattggatccccaa

SEQ ID NO: 205960 - DNA, 247 bp, Homo sapiens
tgtccttgaaagccgcagggaccgtgcctttcaacatccctacccccgccctcccaacggttgtgacatgggaggatatttcttcacccttatttcagaaaatgttatcacccaaaactctttactataatgagcttgtgtactcttaaaacaaggcatggtaatgacaatttcaaaaataagatgtaaaatataaaaaaagaggcaaggcagaataaaattaaaagtgatggaaatgtaggattga

SEQ ID NO: 205961 - DNA, 381 bp, Homo sapiens
caggctggagtgcagtggcgtgatctcggctcactgcaagctccgcctcccgggttcacgccattcccctgcctcagcctcctgcttagctgggactacgggtgccctccaccacacctagctaattttttatatttttagtagagatggtgtttcactgtgttagccaggatggtcttcatctcctgacctcatgatccgcccgcctcggcctcccaaagtgctgggattacaggcgtgagccaccgtgcccagcccctgactttttaatgatcaccattctaactggtgtgagatggtgtctcattgtggttttgatttgcatttctctaatgaccattgatgatgagctttttttcatgtgtttgtgggccgcatcta

SEQ ID NO: 205962 - DNA, 692 bp, Homo sapiens
taaacagaaagtgttatcatctctgagcctttaacctattggagacagtatctaagctataagggcaagatatttagtaatttttagaactgaaaggaaatttagacatcatctagtccaatggtttccaaatcctaccatcaggaagaaaagaatctcaaaggcataacaatttatatatgcaaaacaaactcttacttgtgtgttttcctgtatcttcctgcacatgaaatactatgccttattagtattctatcaggaaaggatgtgacatttcgttatgcattttatatttaatcacatttagtatgtgagtatccatttagatatgattaaaactattggtacgatttgggacttaatgctttctaattatagaaacttacataatatatccaaccctaatactttcagagtgatttcataccatctcatttatatttcactgtctagtaaatttgaagtaatacctgggtgaccgatgatttttaataaggcaagagaaggatatccaaattggcatatttcagccgggcacagtggctcacacctgtaatcacagcactttgggaggccgaggtgggcagatcacctaaggtcaggagttcgagatcagcctggccaacatggcgaaactccatttctactaaaaatccaaaaattagctgagtatggtggctggcgcctgtaat

SEQ ID NO: 205963 - DNA, 687 bp, Homo sapiens
taaacagaaagtgttatcatctctgagcctttaacctattggagacagtatctaagctataagggcaagatatttagtaatttttagaactgaaaggaaatttagacatcatctagtccaatggtttccaaatcctaccatcaggaagaaaagaatctcaaaggcataacaatttatatatgcaaaacaaactcttacttgtgtgttttcctgtatcttcctgcacatgaaatactatgccttattagtattctatcaggaaaggatgtgacatttcgttatgcattttatatttaatcacatttagtatgtgagtatccatttagatatgattaaaactattggtacgatttgggacttaatgctttctaattatagaaacttacataatatatccaaccctaatactttcagagtgatttcataccatctcatttatatttcactgtctagtaaatttgaagtaatacctgggtgaccgatgatttttaataaggcaagagaaggatatccaaattggcatatttcagccgggcacagtggctcacacctgtaatcacagcactttgggattacaggagtgagccaccgcgtccggccaagagctttatttttcaagtaatttcaacatgattacatgtgaaccaaatattatcttttactcatataaactaacccctactgggt

SEQ ID NO: 205964 - DNA, 368 bp, Homo sapiens
ctaaatctgctatgaggctgttttatatcccgaacagctgaatgtatttcaattaggatagtaagaagtacagttaaagtagaagacttcatagattctttatgttgagtgttgccatagaggatggacatagaatcaacttcgactgctatttatatatgaataaataaggataatcattctggaactgttcctgtaaagtgaaatccttctacatgttagttgaaactctggtttttttacttatccaagtctttatctcagtgtacaaataatgtgaatgaagtctttctcacttcccttcaatttggtgttgcatggctttttagaaataaatagcatttcatgtccttcgcccaaaaaaagat

SEQ ID NO: 205965 - DNA, 665 bp, Homo sapiens
tacatgaaatgcttatggagtacttagtatgccagtactgaatatggagtatcattccaccactcctatagatcagtattactatttccctccttcacagatgaggaaactgaagcagggaaaagttaaacaatttgcccaaagttacacaagcagtaagtggtaggtaaataaggcccaacccaggatccacagctcaagcttataacgactctcctaactcacactccttcagctgtgtcaacctgaaaggtttagctgttcaagagaaaaaaaactagtttcttgcaagcattccaaggaggtccatcttgaagcccaacctgacagaatgtgaccagtagacttggccaagcccttccttatggccccagggaactcccaagctatggcaccacaggaagcctatgcaagctgaggacccaagacaagttaaaaacaggttcaacggaaaaggctgagaatcactggcccattctgtacccatgcctttaaaaataatacccagctgcgcacggtggctcacgcctgtaatcctaacactttgggaggtcaaggcaggtggattacttgaggtcaggagatcgagagttgcagtgagctgagatcgtcccactgcactccagcctgggcaacagagcaagactctgtctcaaaacataaat

SEQ ID NO: 205966 - DNA, 504 bp, Homo sapiens
tacatgaaatgcttatggagtacttagtatgccagtactgaatatggagtatcattccaccactcctatagatcagtattactatttccctccttcacagatgaggaaactgaagcagggaaaagttaaacaatttgcccaaagttacacaagcagtaagtggtaggtaaataaggcccaacccaggatccacagctcaagcttataacgactctcctaactcacactccttcagctgtgtcaacctgaaaggtttagctgttcaagagaaaaaaaactagtttcttgcaagcattccaaggaggtccatcttgaagcccaacctgacagaatgtgaccagtagacttggccaagcccttccttatggccccagggaactcccaagctatggcaccacaggaagcctatgcaagctgaggacccaagacaagttaaaaacaggttcaacggaaaaggctgagaatcactactgatctataggagtggtggtaccgagctcgata

SEQ ID NO: 205967 - DNA, 499 bp, Homo sapiens
tggtctagagatccccaagtggtctcagctcaagcttataacgcactctcctaactcacactccttcagctgtgtcaacctgaaaggtttagctgttcaagagaaaaaaaactagtttcttgcaagcattccaaggaggtccatcttgaagcccaacctgacagaatgtgaccagtagacttggccaagcccttccttatggccccagggaactcccaagctatggcaccacaggaagcctatgcaagctgaggacccaagacaagttaaaaacaggttcaacggaaaaggctgagaatcactggcccattctgtacccatgcctttaaaaataatacccagctgcgcacggtggctcacgcctgtaatcctaacactttgggaggtcaaggcaggtggattacttgaggtcaggagatcgagagttgcagtgagctgagatcgtcccactgcactccagcctgggcaacagagcaagactctgtctcaaaacataaat

SEQ ID NO: 205968 - DNA, 404 bp, Homo sapiens
ctctcctaactcacactccttcagctgtgtcaacctgaaaggtttagctgttcaagagaaaaaaaactagtttcttgcaagcattccaaggaggtccatcttgaagcccaacctgacagaatgtgaccagtagacttggccaagcccttccttatggccccagggaactcccaagctatggcaccacaggaagcctatgcaagctgaggacccaagacaagttaaaaacaggttcaacggaaaaggctgagaatcactggcccattctgtacccatgcctttaaaaataatacccagctgcgcacggtggctcacgcctgtaatcctaacactttgggaggtcaaggcaggtggattacttgaggtcaggagatcgagaccagcctggccaacatggtgaaacc

SEQ ID NO: 205969 - DNA, 253 bp, Homo sapiens
gaggttataagcaattccatgagccaaatccctaagttgggtttggttcacaaccagattttcttttctgcaaaatgacagcctacacttgtaaaagtccaaacttctcctagatgttatttaaatgttatagctctcaaaaacagttccaaatgaatgggcttcattttaaaagtatgtactacaactgaacaagcatcagaagtattaaaatttccttcagatgttttatgcttactgatatgactttgtt

SEQ ID NO: 205970 - DNA, 425 bp, Homo sapiens
atccccatgccaataacctcctccattactctgccttttaaaaaacttctttttttttttgagacaaagtccagcctgggcaacagagtgagactccacctcaaaacaataataaaggattgaaggtggtaatttgaaagtacaaatgaggaggggcccctgggtatctctacgttggaatgtttatatcataaatatttattgtgagtgatggtccttttatattggatctgaattgtccatttagtcctttaaaattggaagatggcatgaacagggcaagagtataataaactatgctgataaatgaaatcgttctaattcatttattcatttatacacccaaataacattctttcattgcatatctattatgtgccaggcatgcattactaaaaaagatttcccactcaagaaattaccta

SEQ ID NO: 205971 - DNA, 303 bp, Homo sapiens
taaatgtaatgtggtatcatgaatgggattctggaacataaaataaaaagaagtaaaaactaaggaaattagaataaagtatggactttaatactaatgtattaaaactggttcattaattgtaatgtaattcatgtattacagtaatgtaaaatgttaataatagagaaaactggatatcaggtaatcaggttcttagaaatttgcctatgcttaatacatatcaaataagcattaactattatggtttttaaaataattctccaggactgggcacagtggctcatgcctttaatcccagca

SEQ ID NO: 205972 - DNA, 453 bp, Homo sapiens
cctttaaagtgctgaaagacaaaaaaaaaaaaaaaacctcagtattctctattcacaaaaagtgctttgaagcttgaagacaaagatgtttttcagataaaagaaaactaagagaatgtattgccaacttacctgttgtacagaaaatcctaaaggaggccaggcatggtggctcacgcctgtaatcccagccctttcggaggctgaggtggacggatcccttgagaccaggagtttgagaccagccagggcaacatgttgaaacccttctctacaaaaaatacaaaaattacaaaatacaaaaaatacaaaaatacaccagacatggtggcacatgtccttagtcccagctactcagaaggctgaggcaggaggatcatttgagcctgggaggcagaggttgcagtgagctgagatcacccagcttgggtgacagagcaagaccctgtctca

SEQ ID NO: 205973 - DNA, 621 bp, Homo sapiens
agagtgccagcttacaatccttttattgtacctttcagcattgtttgcatatcatttgaagctcgggaagcatttgagtttgtactaggtgataggcacttggtgatacagagatgaattggatgtgatccatactgtcattgagccagaaacaaggttattctctggtgccgcccacaaggggcttatggaatatggggtaatagattcttcccctgctacattggttattttatgattggttccctgtgactcagaaagataaaattaggatgcttcttgtaagtctttaccaaacttctaaagtaattatttcgaaatatttttagcagttgaacaactttttaaaacaaactcctacatggaatctttatatataaagcagataaaagggaagttatttggttaaagtttgtgagcctgtttcctctttgtgtgttttccccactccctatacctgcctgtgacatcctctactttcccatggttcctaaggcatcaggctgaatactagggcaccttgaaatatagtttggaaagaaatgttctaagacaggattttccaactaccaaatttcttatagaggtctaagctttacctagatgatcttaattttagag

SEQ ID NO: 205974 - DNA, 647 bp, Homo sapiens
ccatggatttcctatcttttggacaattttatttttccagggctgtgaaatgacattttttttcagattccatttaaattacatcctcagcaaataacatgtcctcagcaaagcctaactttagaaatacagctactgataagatttatttttagtttcctctttacagaatctgtgccatcactgacgtgaaatagaaacacaatagaattaagtaaatgtacaactggtgattttggagtactgcaccttaagtattctgcaccatgaggtgaccttgtattcatagtcatcttcaaaatgggcatctgaatgactgtgtatctttatgagaaaactggacatggttgagaaatcacaggaaggagatagcagagatttctactggtgtagtgctggagaagtgtaattttgtgttgatagctctaaagattttaacttcggcttatagataagactatatagctgactgtagcaagtataacatacttagcatttgtactttcatgtttaagagggaaggagatcagtcactaaatatgaatgctgcatatgttagcaatagagatagtgattttgtaactttaattgcacttgccttaaatctttttccaaaaagaaattatatatataaacaaataagatga

SEQ ID NO: 205975 - DNA, 494 bp, Homo sapiens
ggtacataccagacattaacttgggataaatgagagaccaatcctgtcctctagtagttcacagtctagggaagcgagacaaacaaataatatactcaagagggataaatgttatgacagcgagactgtgggagtgtaaaggaagaccacctaactaaaagcacggtaggggggaatcagagagattcccttaacattccacttgactgaaaagtgtcgagaaaaaagtaagcttaaatgtcacataggaaatactaattcatgtttttgttaggtacttacttcaataacatctatttctatacaattccttagtttttaaaaatgacactgttgacaattatgttatccacatttgttagatagtattgaaaataccagccagtaaacaatagtcttttctgtacccttaactgtttgttgtaacatgcagttatttatgattttgcttcttgccttgtaaactaatggcctcgtttaaaatgaatgcttcc

SEQ ID NO: 205976 - DNA, 324 bp, Homo sapiens
ctgtcaccttgtcggggatcagtctgctgtgcgtgctcagactcttcccagagccagcagcaagaacccgaggcattaataaacttgagatgtagcttcgcttaactcgtgcagagggtttccgtgtcacttatgtagaaactagggcctaatttcaactccctcaactcctctgtcccaagactatccacgtcacctacttggtagcttgagttaaacaagaaacctttgaaatctccagtggccgacacgcagtgggaactccatcagttttctgttttctcccttcttccctcaataaaaattaagttgaactgactaaga

SEQ ID NO: 205977 - DNA, 576 bp, Homo sapiens
aggtgagctgacggttgtgtggaagcgggggatgaaggtggagggaagtggctgggttcaagaggtacttaggaggcagaagtggcaggactcagtgccagatccgttgtggggatgcttggggttctttaaggtgggatagtcagtgacctggctaacgagccctcaaagagggctggagacaggggggaagctcatgaggctcagcatccaggtctggagctgagtcctggccgggctcttccgtgagtcatctgcacacaagttctattagtgagagtgctggacaagatttcctgggggcaaagacccacctccaagagctccgtgatgtgccagggagaggggcatgagtctgagaagagagaaggaacagccaggggctggcgtgttgatggtagaaaccattacagagttcgcacctggtgggtaactgtggaatgtcacctggagacaggacaaaaatgtcctgtttattaaccgaggggggagagctggaaagacaagaagttgtggaaggaagaagggacattaaagatggggcctgacgggaaacagtggttcccagtgatgccc

SEQ ID NO: 205978 - DNA, 462 bp, Homo sapiens
gcattattggattattaaggctatgaagattaattgatttctctggttaactgagtgtcagaggatgatttgtttccattctgatgatgacatcttttaaacatgcctgatccatctttatactgattaaaattgaaactttttgtcatttgcaggcctaaggtgcctctctttgattacaagagattgaaactgcatgcatgctctttctggaaagtttagttttgtttttaataagccaattatgtcaatgttttctaataatttgctccttttttcataataaagtgctaaaactcaagttagctttaaggttctagacaattggacagacccaatgtgttagtattctttactttccatgagcacattttgtaaaatagtcttacatattgctgtacactgtaagaactcaaacttgtttctgaaactttaatcataataaaaaatatgaaaattgct

SEQ ID NO: 205979 - DNA, 584 bp, Homo sapiens
atatttgccaggtcatcaaaagccaatttccaaatgttgtcattaaacaattcagaagctgtaaacactgtgaggaccaaaaccgaacacattgcagggcagacttggccgggggtgcctgtttgtacatcagaagctcagaaccctaagaacaccctcaggaagcagggacttgatgccaggaagggtgtcactggagacccccacaaggggcctaaggcaggctaggggtatggggaggcttgtttgtgaagtcaggtttaagctgaacctcaatgttttgaaaggcaggtttgtaacaagacgggtcaggtattccaggctctggggatggcaggagctaaggcagagaggagagaagagttttatgggggccagtgggaggtcaaagctgtataagcacgaaagagccagagagccagattttggggtcagggagtggtggaagtcaccaatgcaaacacattcagggtccagacaagtactgcaaatgagacaggcaatggagtgaaaggacaatggtgtcgctgtgactcagttccactcaagtttccaggtgtaaatgtgggatcctctagtttctc

SEQ ID NO: 205980 - DNA, 1189 bp, Homo sapiens
ctgaaatacattatctattttttgtattggctttctcccaccataagcactgggattttgtcaggtctgttgactgctgtatccccagtgttagaacagtgcctggtcaatgtttgttgaatgaatgatgcagtaattgtatcaacttacattgtttctttctacctctctatttttagttcagagccctttggatgagacaggcgtttctgaacaaaggcattcttccagacttaattaggttccctcttctagggttaagtgcttaatctttgcagcatcttaaaacggtaaaaactaaattctattctttgatgccatctatgtaatcagtggttaactttcacacgcttctttcctgttggaataatagatgaaaagaccaagcgtggctttaagtccttctgttttataattcctggacacatttctcaaatttctgctgcaggttttcttgttatcccataatcttgacaggttttctctcacctcttggattcctgctgtcagaccttgttaggcttgttaattttctgtatagcatggaatgatggttttctagaaggttctgacaaacccttactctcatttatcttattgctcctctggtacagaatctttcattcctctcctatgttcccttgtatctttttttccccctaaattacctcccttaattccaagtgggtggaaggaaaaggaatggaatttggtcttaaaggatgaataatgacttcgttggaatatcagtaaaggaactctagtctgcgggaatggtacgagcaaacacatagaagtgtgaaatgtgtaatgtgtttggcaaaagtggtttgggatggctggagtgtgtgtttatctctagtgtgaagtctggccagaaaggtagattgtgatctttttcttttttttctttcagacagagtctcactctgtcacccaggctggagtgcagtggtgcaatctcagcacacggcaacctccacctcccaggttcaagtgattctcctgcctcagcctcccaggtagctgggattatagacacctgccatcacgcctggctaatttttgtagttttagtagagacggggtttcgctatgttggccaggctggtctcaaactcctgacctcaggtgatcctcctgcctcgacctcccaaagtgctgggattacaggcgtgagccactgcgc

SEQ ID NO: 205981 - DNA, 613 bp, Homo sapiens
ctgctctgtgatggcagcagtggcccatgtggagcagttgctacggagacactggctgcagtgaggaggagtggctggggctgtgcgctcctcgaagctggtgggagccaggaaagggtgggagccccaccccttctaaattggcaggcaggagccccgccctcccaggcacagctgcagccatccagccatgactgcaaacctgggcatctttgcactctcagaggcccagcaagcccccctgcccccacaggctcagttgtacctggtcccaccacctggcgtctctccactcccagagcccactccaacctcggatccaagttgaggctgaacccaggcacagtcggaacccggcctggtttgtgcaagctcaaggcagtgctgacatgccagccccctgccacctcagccccctccagactttgggcactgacgagcacaagagggaggttgaggtgggtctaagtgtggctcagcactggcctgaaggcactcctcagctcgaacagcctcggcaatgtgggcacagctaaccacagtgcatctctctcagctgctgagagctgaacagacgttgggatgacttgcctgcagaaaggagctaccgact

SEQ ID NO: 205982 - DNA, 582 bp, Homo sapiens
acagatgtcatgttctttttttgtttaaaatcaatctctgggccgggcatggtggctcatgcctttaatcccagcactttgggaggccgaggcaggaggccaggagtttgagaccagcctggccagcatggcgaaaccccatctcgactaaaaatacaaaaattagccggttgtggtggcacacgcctgtaatcccagctacttgggaggcagaggcagagaattgcttgaacctgggaggtggaggctgcagtgagctgagggactgcgctccagcgagattccatctctaaataaataaataaataataaataaataaaatcaatctctgacccccagacataccaggtctttgctgattccccacctgtctttcagatgcttttcctaccaccctgtcccttcttcaacctggtgtaaggatggtatactatataattaagagggaaaaaagaatttaggatctattatatggtcatctccccttatccatgggggtacctgaccccagtggatgcctaaagctgcagataaaactgaacattatatagactatattttttcctacacatgcaaaattt

SEQ ID NO: 205983 - DNA, 257 bp, Homo sapiens
tcctttctacccatttgcccctttgatttcttgacttataggttattttgatgtgtcatgttttcaaatattttgaggatcttccagagatcttttgttactgatttctaatttcattacattgtgttcacagaatatacttcatatgattttaatccttttaaatttattaagatttgttttatgacccagaatttgatgcatcttagtaaatgttccatgtgcacttgaaaagactatattctgtggttgttggg

SEQ ID NO: 205984 - DNA, 309 bp, Homo sapiens
ccttggcttttctcaagcgctggtagaaaggctgctgggtctgagatcacccaactgatgttgcgtcaccataaaataagacttcttgcctgtgagcagctcaagttagcaggcatatttgagtgtcttccacagatccccaatctggaaatctgaaaaccagaatgctcccaaatctgagaatttttgagcaccaccatgatgccacaagtggaaaattctgcacctgacctcaggtgactacacagtcaaagcatagtcagaactttgttttatgcacaaaatcattaaagtgttatataaaattac

SEQ ID NO: 205985 - DNA, 212 bp, Homo sapiens
agcaaatactgcccaacgtcctctggggggcaaaactacctctcattgagaaccactgccctgtatcattctaaggttaaaagattttcagggccgggcgcaggggctcacacctataatcccagcactttggaaggctgaggctggctgatccctggagcttagtagttcgagaccagagtgggcaacatggcaaaaatcccatctctact

SEQ ID NO: 205986 - DNA, 365 bp, Homo sapiens
ggtgggtaggttgtgtgggagacaggggaattcaatgaagggagattctttagcctttccttcaagtacatctttctcctgagtacatttacttccatcacaatggactagaagagatccttgcttagtggtgcagaacccttgagacctaatttagcttttataggaaattcaaaaagagaaagacggcacaagagcaagagaacagaacaaagatatgagtttgtacagagaatattgatacttgtggactgcttctgtaactcttttaaaataaattttctaagtaaatgctgacgtagacttttctgttagtggaaggctgagctcctcccgccaaacaatgcgctgcccaaatcatcttt

SEQ ID NO: 205987 - DNA, 746 bp, Homo sapiens
tccatgttggtcaggctggtctcaaacgcccaacctcaggtgatccacctgccttggcctcccaaagtgctgggattacaggcatgtgccaccgtgcccagctaattttgtatttctagtagagataaggtttctccacgttgaggctggtctcaaactccgaccttgggtgatccgcccgcctcggcctcccacagtgctgggatgacaggcgtgagccaccgcgcccggccacctgtgcctatttcttgacgatgacatcagttatggggcctgatcaccgatgaggcatctgccttggactttatgagctgacccacctgtaatgaacctgctgttagtccttgaggaggaaactgaggcaagctgtggctccgtggaggggactgagccacattcgactgtgctgtggcccagagtaggatggctgaaggtgagggaagggcaaggggtgccctgaagtgactgaggcagcctccagcaccacgggcctcagacagccccacctgcaaggaggaagccttaggcagaaggtgctctgggcagcgcttaccccagcgcggcatcagcacctgtgggtggcgtgggaatgggagttctctggaccggcccagctcaggaagttagaacctgggaggaacaccagtgaataggaccagggcaggctacccctccccaccgtgagcggcccctccctgccgtgggctgctgtggccgagagcagccccgtggaggggcatgttggg

SEQ ID NO: 205988 - DNA, 342 bp, Homo sapiens
taattaagtgaataaacttggacaaagagttcacctctctataccacaacagtctcatctataaagttgggattccatcggacttgcaatagagggtggttgttacaaataaacaaccaaatacatgtagaatatgtattaggcccaaagtaaggattcaatatatgtaaactattattgttgctgttattactgaaatctttaatttagttacttttcagattgtacattcattcttcaggaatgagaatcgaaattcaaaatatgaacaaagacaattatctagttaggagctgaataatcacagtcattttccttcattcaatagctactcaaatcttg

SEQ ID NO: 205989 - DNA, 938 bp, Homo sapiens
caaaaatccttgtggggaaaatgtatgtatttttttgccctgaaagaacaggtttgtcgaacagattaaaattctacatataaaactgttgaaagagtttatggatctacaaattactgctgggatatatggaattcttatttttcaaaaagcctatgcactctgagaaattctagacagcatatgaaactataagagaattccaccttcttgcttaccagtacagactcttcttaacagtgtcaaaactaacccttctcccccaaaaaagtagggtataaacaaagagaaagaaagggaaatcacaaacttttagaacttccccaagctaagagttgaacatggataaactcactgaagtcctcatattgctccatgggccactctaggtacataagctaggatgtcataggtcagagagaagcccagcagagaccacatcaaagttcaaccttgttccagacctttgtaggtagaaaataaggttaagtgaaacatggaaggtaaccatggaatattaccggttcccggtcagtcactcttgattagcaaacatggcccaaagctgtagatcaaggacttcctgaataatactggttctggagacagaagctatgagttcagtgctacataactctctctgtggacagacagctctgccaaagctattacattatatttaagtatatgtattaagtatatatctaaatatatattatacttaaaatattagtttaaatttaatgttttaagtacaatatatataccaaagagcacaaagaaaaaaaaaggtacagcttgatgaatttttacaaagtgaacacacccctgtgaccatgactgagataaagagattagacattaccagtatcccagaagcctccatttgccccttcctaggcactactgacttgatttatcttactgatttgtggact

SEQ ID NO: 205990 - DNA, 309 bp, Homo sapiens
gagacagggtctcactctatctcccaggctggagtgcagtggtgcaatcatggcttactgtagcctcgaattcctgggaccaaagatcctcttgcctcagtctcccaaagtgctgggattataggagcccagcctcaaggcagagaggcagagatttgatttaattatcttccatgtggttaactaattgttccaacaccataaattaaatgacatatcctttctttttttccttgaaatgacaccctatttacatgtatcttcctagatttttagtctgttgttttgatctgcctgttcctgctgcca

SEQ ID NO: 205991 - DNA, 456 bp, Homo sapiens
tagagtcaggttggaatttggtatctcattgccacaaagggtctcttttgtattaagatctctgttttaatgtttagactagtcattatgtctcacgaaaatgtataaaaccaagctgtaacccaaccaccttgggcacatgttctcaggacctcctgaagctgtcatgggtcatggtcttcacatttggctcagaatgtatctctttaaatattaaaaaagaaagaaaataaaaaatgaaagcaggctatagagcaaaaagtacaggatgatctcagcttcgaaaagttctctctatatatacatttttaagagtgtttcaattttctttcatgcttttcaaagtttctacaaggaacatatattactcttgtaatcagatatgaaaatgatggaaggaagaaaggatgaaagggggaggaggaggaggactcaggtggtgtggggtaccgagct

SEQ ID NO: 205992 - DNA, 803 bp, Homo sapiens
acactttgggaggctgaggtgggcggatcacttgaagacaggagttcaagaccagcctggccaacatagtgaaacctcatctctactaaaaatacaaaaaattagctaggcatggtggcacaagcctgtaatcccagccaattgggaggctgaggcacaagaatctcttgaaaccgggaggtggaggttgctgtgagccgagattgcgccattatagttgagcctgggagacagagtgagactctgtctcaaagcactattactgtataagaaagagaggtgggatactggggacaacttgcagtatctatccaagagttaaatgctcaataaatgttagttatcactaccaccaccaccaccatcattataatcatcatgatcatcatcatttctggtcttagcctataaattcctccacgtcctcacttcttatttgatccccttattctccattttagcccatgttagcttgtgctttgttctattgcatgatttgcctctgtccctgtcttgagacctttttatacccagaggctggcaatgtaactagagtcctacaataagctcctgtgtgatgaaaatggatcttaaagctggtgaggacattgacagtttagggagactagagcataaagtcttagcaatctacttggcagcttcattgacatactacaggaaaaggtgacggaaggaagaaaaaagtctagctatcttgaaatgtaggttaagcacttgcttcattttgttgtattctttccactcacttttgtgaacttccactgaagatgtcttgaatctcc

SEQ ID NO: 205993 - DNA, 389 bp, Homo sapiens
tgcctttgggccattggtgctgctatcaacattcatgtacaagtttttgtgtgggtgtatgtttcattcctcttgagtatatccctaggagtggaatggctgggtcatatgataactccgtgtttaaccttctgaagaactaccaaacgacttaccaaagtggctcccctgttttctattttcactggcagtgtgcaggagtggggttttttataatgcccaataatcggatttattcaggaagcaagtagcttccagcttatttactgagcttttaaagatatacttaatgtcgtttcttaagaaaaaccaggtctttatttactatgagactccaagtgctttaatatagttgaaactaaagaaacataaatttttcattctgcctc

SEQ ID NO: 205994 - DNA, 266 bp, Homo sapiens
aattttattattttaaatttattaagatgtgtcttatagctcaggatgtagtctatcttggtgaatgttctgtgggaacttgagatgagtatatattctgttgttggatgaagtagtctgtatatgttaattatatctatttgattgatggtgctgttgagttgaactttttgtttttactgttcttctgcctgtacatttttaatagaagtttttatttttaaaaaataaaaatatgttttgccaaattaggaaagtataattag

SEQ ID NO: 205995 - DNA, 337 bp, Homo sapiens
catgttgaaatttgatccccaatgttggaggtagggcttagttggaggtgtttcggtcatgtgaccagatccctcatgaatacttggtgacatctccctggtaattagtgagttctcactctattagttcccacaagaacgaattgttttaaaaaagcctggcacctccctcctcacctggttccttcctctcttgccaagggatgcctgctctcctttgcctactgccacggtggaagcttcctgagccctcaccagaaacagaagcctgcgtcacacttttcatacagcctgcagaaccatgagccaaataaactgcttttctttataaactact

SEQ ID NO: 205996 - DNA, 287 bp, Homo sapiens
aggcaccatggactggatcatccataggactcaacctaggcacttagggaatgtcatcttagctctttagcaggtggtgtcaggtatcatctactatgaagtagtgaaatgtttttcctggcagacctggaggattttcatcattctcaaaatgtccagtttaaacctagtcccaatgagtctgatggctccaacactgaaaagacagaactgcttatttggggacctgtcctacctctcctaaaagatgtcattgtgcttactaataaattacttattctagtgca

SEQ ID NO: 205997 - DNA, 460 bp, Homo sapiens
ccatgtttagtagaagttttactaagaaattgtacatgctcctgttacagcatgatgaatacagtgtcacattttcttgatgacctcagtccacttcacaagcatgtagtaaaacagctttctttgctaagctgtatacatctgatggctcctatgctcttctagtatgttattttgctttcagatttcagatttgcaggaagcacactgactcccactcttgcatttatgatggcttctgtaccccgttttctaggcactaatgaagattacaaggggaaatttataaccaagcttattaagttgataaatatcattttacagaagtagttgagtttgtgtagacaaactcatgggctgtgtaaccactacttaatgttcagggtctcttattttttctgctttttattattttctgggttgatttagttttcctaataaacctgtatgttgtcagtca

SEQ ID NO: 205998 - DNA, 542 bp, Homo sapiens
agaaatcaggatgatggcagcgtataaggaatctggttatgcttccaaacttacactaaagttactgccaatgggagggtaaaaggtgaggaaacaatcctgggagccacgcagataaacaggtgttaggcacgaggcctgtgacccaaattgaaagatgttaagacataaatgtgaggaattatcagaagcaattcttagagcattaataaattttccctctcagttaaaaacaaccaattaacaacaataacagtgtttctgatttacatcctattatttctaacttggacaaggtactcttctaaatattagcgacaaacatttctcaaatcaactttacctgtcaaagtttgatattcaatttagatctgggtctgacagatttcaaagctccatgactcaagctataggattcaaaatccaccatctattttcttctcttcttaggtaaatggtgagcaaggacaaccacaaattttactagcctcagattagagattcccatatatgggaatcagttcaattttatttgatgtcag

SEQ ID NO: 205999 - DNA, 378 bp, Homo sapiens
ttgtggagtagctgtcatataatgggcacattaatagtcttttagagataaaaagacaactccaaaggtactaaaagtctagtagggtgaatgaaataataaaagattgagaagagcataaaggtggcaaaggaataagaggttgggagtcaaagtttccttaaggaagaatcatctgagctgaatttcaggaattttatagttaatgcatgctgggcttaatacctaggcgatgagttgataggtgcagcagaccaccatggcacacgtttacctatgtaacaaacctgcacatctaccctggaacttaaaaaataaaattaaattaaaaaaaaaaagatttttatttcatgctcaccaggtcaaaggggaagaaga

SEQ ID NO: 206000 - DNA, 355 bp, Homo sapiens
ggattgtgctggatgtggagtaggcgctcagtaaatgttttctattctttggccacttctgactgactttgctgccttccgatcacttctttcctcaccactccactaaaagcatcagtcgtgcaaactttctggggttttgtcacagcactttcagaagctggaggtatactagcagcatttctgtagtagtccagacttccttacatatagaagttgactcttcatgtccctcacctttgtgacccttgagctcagtagtcaaggaggtgaaagcataatggggttccaggtagtgcctgaaactacttttctgaagaagtataattaaaagtaatcttgttttgagaattta

SEQ ID NO: 206001 - DNA, 466 bp, Homo sapiens
gagactccaactccaataaaaataaaaaaaggaaagaaaagaggaaatttggacacaccgagacagcagggtcacttgtgtacagggaaaggccatgtgagaacacagtgggaagacggccatctgcaagccatggagagaggcctcaggagaaactgtcagaagtgtttgaaccagagcaactccatcttgaatagaagctaggtagaatgaggctgagacctactgggctgcatttccagacagttaaggcattctaagtcgcaggatgagacagaggtcagcacaagatacaggtcataaagaccttgctgataaaacagttgcagtaaagaagccggctaaatcccaccaaaaccaagatggccatgagactgacctctggtcatcctcactgctacactcccaccagcaccatgacagtttacaaatgccatggcaacatcaggaagttaccctatatggt

SEQ ID NO: 206002 - DNA, 987 bp, Homo sapiens
tgcacccggcccactctcttaaagtactctcttggcttccatttgctcactcggagaatgtaaaacacagtaggaggagactatcttgatttcttttgtggacatttctctatttgtcccttgaatgctgacagcccttcgaattctgttctagaccaggcttcctagcctgcctgttttcactggacagttgcatcttttcccacatgctgttatttacgtgctaatcacttacgcatttgcagctctagtctgtcctttcttctaagcaccacctctgcctcctggatgtctctactttgatgtccacaggcatttcaaatgtagtatgtcccaacctgaactcattctccccgctctccaatcagctactgaatattcttgtgtatcctgtctcagtaaatggttcaggctgccatctactagttacaaagtcagaaatgtgaacttcagttgtttaccattcctttcactttcatctccaagcattcaccattctcttgtgattatactttgaaaggtgtctcacatctgaccatttccttcattgctactgatgctatcctgattcctggccactctcatttcttgcctcaattattataactgcttcagagttcctgtggtcttacgctttcttgaatacattcatcagttgtgtcatttagcaagctttacatcgggaagtaacagaaatataacaaaattggcataaacatttgggtatctgttaaccaagagtgtgaagataaggtagttccagagtagcttaattcagtggccacaatatcattagtgatgcagcttcattcatctttcctttctgctttaccccatgggtcagtggctccctcaggccagaatatgactgcagtggcttaggcatcaccccgcactgagccacctgtagaggaaaaagcctgaaaggttcctatggtgtgtcccatttgtaagagtgaggagaacactctcagaagccttcctgta

SEQ ID NO: 206003 - DNA, 369 bp, Homo sapiens
tcatctacatcaagtcataaaagggaaaatagaagcaggcctggagcgtgggaaacttttttggtccaagcctggaagttgggtgcatcagctctgatcacattccattagccagaattcagacacctgacctcacctgtttgcaaggaaggctgggaaacagaagaggtgtactcaagaagaggaaataggtttggcaaagagccagccaggctctgcaaataatggacatcctccaaggaacaatgattgggcaaagagaagatgacttaccctccaggactttgttctgaataagcagcttgtcctggcctggatttccgagcaagtcccattgtaaaaccacaattgctctttcttcaagaagaa

SEQ ID NO: 206004 - DNA, 484 bp, Homo sapiens
cacttacagaaagttatccagggtgatagataagctttggatatgctcaaaatgtatattattgtgtgcttaaacaaacaaacaaacaaacatgtatttgaggctggatggggaaattttaaattacaaagtgatgattaggttaaatgcctggcatgtaaagaatgagtcatggaagaaacgtggaattgggagattgggttcatttggctctgtctagagtatctgaactagatagctatttaacttctgtgactcttacttttaaaaatatctgtaaaataagggttttataccagatcaacattgcctaaatagtattacgattacgagttctgatttctagactattattaggcactattgatataaagtgtttgtagttaaatatgtttatgaaattgaagaggtctctcctgctggactttgtggactagatgtcatgatatgtgtctccaaagtgggaagagaacagggagaattt

SEQ ID NO: 206005 - DNA, 376 bp, Homo sapiens
caactttacccttttaattttgattatatcattcataataatcatgtagtataattgactccaatataagcaaagtaagcaaagtataactttttaatttttaattttttggataaatagtaggtatatatatttatgaggtacatgagatgttttcatacaggcatgcaaagataaacaaacacatcatggagaatagggtatccatgccctcaagcatttatcctttgagttacaaacaatacatttatactcattaggttattttgaaatgtacaattaagttattattgactatagtcacactattgtgccatcgaatagcaggtcttatttattctattttttgtaccctttaaccatccccaccttccct

SEQ ID NO: 206006 - DNA, 681 bp, Homo sapiens
cttctctggccaggtctgaaggcgcccggttccgggaggcccagccccagcccagccagcctgctggccccactcaggtgcatgagaggccctcatgcctcctgggctctcagcatctgcattggagtctcaccacccttgggaggcccactcccctctgcccagctgaggacagtggggctcagggacagtgagagaggagacatgcggcgcccccattgtgcagatgaggagcactgggttggttaaggagtttcccttggtcacacgctagcaagaggctgggccagtgtccagacccatgtctgctgagcgaggtgctgcggttggtgacatctccggagtggctttttgtccacattcacagcagcgcaggccaaaggggcctggtcacaccaggctctgcagccccgggccctctcctggggacacacattgccacgggagctgccaaatgcccagcaatgtgtgaaccttggccttgttctggagggtcctggggtgtcccggggcattgatggggtgatgggcacagtcaagtaagagaggcaaggccccaccagggaggggtcgggaggcttgccctctgaaggccctgtgtggcccctggccaacctgtggccttcatcaggcctcagtctccccatttgtccaaccggggggttaggtgagattgtctcc

SEQ ID NO: 206007 - DNA, 621 bp, Homo sapiens
aaaagacaccaaataaaaagttctagagcaaaagcttacagtaactgaaataacagttttactagagagtcaagatatacttgagcagggagaagaaagaagtagtgaaactgaagataagacaagtgaaatgattgagtattaggaacataaaaaataaaagactgaagaaaaataaacagaacctaagggacctatggaataccatcaagtggggcaacataaggattatgggaatgttagaagtagaagagggagatgaaggggtagaaaaaatatttttaaaaattaacagccccaaatttgatgaaaatcattagtataaataaccaagagctcaaaaaatccaaataggatgaactcagagacccacaccaagacaagttacaatcaaactgttgaaagacaaagacaaagagaattttgaaagcaacctgagagaggccctcctcgcttgtcacatacaacatatccttatcagcagatttctcatcagaaacataagaagccacaagacagtgggctgatgtgttcaaaattctaaaagaaaaacaaaacaaatcaaaatctgttaaccaaaaatttcatgtctggaaaaactgtgtttcaaaagcaagggag

SEQ ID NO: 206008 - DNA, 321 bp, Homo sapiens
attgaaactacagatcaaattagaaagaatagacttctgaacattactgagtcctccaatcaatgcacacagtctatctctccatttattcagatcttcctgacttctttcatcagtgttttgtggttttcaacatacagatcctgcacacgttttcttagacttacatccatgtacttcatttatttggtgctgttgtaaatagtattcctttttaaatttcaattgttcattactggtatataggaatataatttacttttttatattgacttgtgtcttgcaaacttgctaaattcacttattagttccagaaccctt

SEQ ID NO: 206009 - DNA, 167 bp, Homo sapiens
ggcttctcgtgcttcctcagtgtgctttaaccacactgggagcattccggggaaggaggtttctctggattatttggtttgaagcccatctttataatttactagtgactttggccaaattgctatatttctcttcgcttcagttttctcattgcaaaatggggata

SEQ ID NO: 206010 - DNA, 215 bp, Homo sapiens
ccttttgtattccctcatctactatacgtactgtctgtactattacagaaatagtactatctgtactattgatatctatctggactatctgtactcctctgccccctgcatcctgcccaggatcatatgttgcatgtagttatcacgttgttttagtttcctttaatctggaatctttaccctttatcatttttgatcttgatctttttgaagag

SEQ ID NO: 206011 - DNA, 483 bp, Homo sapiens
atatagaactaaacctgtcacataacaacaaatgactttgtttttcctgtcatggtgacccatcttctatttgtgtcacttgatgtgggcaggccaaggaaattgaagcctcccctgatgaccataatcacaattgtaaatttataagtctgcataaatgaaattgttggaactgtttaaacataatcccatcatctagagacccgccatttaaactaggactgaggaagaaaatcaccgacatcacaagctgtgcatccccttgcaggagcagctcagatcactcccaggaaaattttaaaactccccgaagaaccacacatgtgctagcttaatccaagctcaatcaacaaatagtattgaggatgatgacttaaaacagcagtttggaactgatgttttagtttatgcttgaatctcatctatgtattaggattggaaataaaagacacaaacccttgaagggcagggacccactcgggt

SEQ ID NO: 206012 - DNA, 362 bp, Homo sapiens
aatgattcaaataatagcagattacccatcagaaatcacagggccaaaggaagtggtacaacatttttaagtgatgaaagaaaagaatcgtcaacccagaattctatatccagtgaaaatatccttcaagaataagaagaatcaatgcatttgaagacttaaaacaacaaaacaacaactaagggtatttatcaccggcagaataaaagaatagctagaagaaatagtttgtacagaaagaaaatgataacagaactaagaacttagttctgttgcaactaagaacatcagatatgaagaaagatgtaaagaataaatataagtttaataaataattttttccttgtgatttaaaaaatgtg

SEQ ID NO: 206013 - DNA, 264 bp, Homo sapiens
gcatcttggatgggaagaatagtgggataaaggcctgcaggcagaaaggcttcattctgtgacccgctgcctgtccctcaataggaaatgcataatttggggaatggggcaagatagacaatcctatacttactgttcatttatcagtcaattggcaaatacatcttgttttttgttttattttgcttttgagaccatgtcttgctctgtcacccaggctggagtacagtggcacgatcatatgggaatggagagggaagcccc

SEQ ID NO: 206014 - DNA, 211 bp, Homo sapiens
tgttttctacataaagcaggctaatctgtatatgacacttgccataacaaagattttctctcttgttcactaagtagcatcttcagtatgtagaaaattcaaactacaaacaaattttaaaaatggggttgctctaattcattttactgcaatcagagaaaggattatgcttccataggttgggttgagtttttatgtgtagaattaggaa

SEQ ID NO: 206015 - DNA, 333 bp, Homo sapiens
agatacatcgtaactacttttctgaagttggaagaatgctgacttccaaaaacatctggccccaaggatttcagacaagaaattgtgaacccataagttgtttttcttaaatttgggagtatttattgatcccctaaggaaacgaatgattcgttcagttccttcttcttcccttacaaagaaaacaaagcggggggagggacaagcaaaacaaatgtaaactgtgactcttattgctaataagctgtggcagaagctgttgggggtctgagtcttcaaaaggagcagatcttttggaggacagaaatctggatctgtacctttcctgcaatt

SEQ ID NO: 206016 - DNA, 268 bp, Homo sapiens
catccataataatacaatttaattttaaaaattctattttggaaggcataattcaacaagtaatataattctaaacaaaatgtgctcacagaatcaaatatgcttaagcaggaatctttattttggttttagctgagcatggtgttgtaaaagatgaaatgcataatgcacatggcaacagacacgtcaagggaaggagaaaggggacaggaatttttgctgggcagggtgggcaaatgtacatattcagtaagctacaggaacagta

SEQ ID NO: 206017 - DNA, 466 bp, Homo sapiens
tgcagtccctgagtagatttgcatttataaggcacaagagcagcattgaggtttatgaggcataagagcatttgaaaaaagtgtgctgtgatagtaatccacatggtagaagttctctcatggcatgaataagtgcatatactatactttctctacatttgtaccttgttgattaaaaagttgtatgtggctgggtgtggtggctcatgcctgtaatcgcagcactttaggaggccaaggcaggtggattacatgagctcaagagttcgagaccagcctagccaacatggcgaaaccctgtctgtaccaaaaaatacaaaaattagctgggcatggtggtgcacgactgcagtcccagctaccatgtggctgagatacaagaattgcttgaacctgggaagtggaggttgcagtgagccaagattgtgccactgccagcctggtcaacggagcgagaccctgtctc

SEQ ID NO: 206018 - DNA, 498 bp, Homo sapiens
cgtttggtttgcttttgcttttctagttcttgaagatgcatcattaggttgttcatttgaagtttttctacttttttgattaggtgcttattgctataaactttcctcagtactgcttttgttatatcccgtagattttggtctgtcgtatttccattttcatttgtttcaaatatttttaaattttttttcttatttgttgatccactggccattaagcatattatttaatttccatgtgttcatatagtttccaaagttcctcctattattgattttattccattgtggtcaaggaagatacttgatatttttcacatatttttgaaatgtttaaggcttgttttatggcctaatatatggtttatcattgaaaataacacgtgttgaggggaagaatataatatgtatccttcagccattggatgaaatgttctgtaaatatctgtaagatccatttactctatagtgcagattaaatctgacatttctttgttg

SEQ ID NO: 206019 - DNA, 118 bp, Homo sapiens
ttaaatttaaaccataatgatttcaaattatttcaacaatggtaataagaacaataaatttttgaaaatcttttgatgctgaatataatacagcctgtgtaaatatccaacagcctga

SEQ ID NO: 206020 - DNA, 364 bp, Homo sapiens
cccccctgcaatgcactgggtgagtgcagcaaggacagtagcagaaattgggggcataaaaggaaatctgactcaggactctgcatttcagaacattggcagcatctcagaggcaatttctaaatttcagccttcatcatttccatttatttcacaggtatgtgtcttaaccatgaacagttgtacctgtgtactaggaagaacctcaagttagagaagaaagcactgagttaacataaggtgcttcagtaatagttgtacagtagcaaacaattaatcatttgctccactctgtatttttaatcttccagagccaaaaagctatgaatcactttaaattgtgaatggctgctccaagaagaaa

SEQ ID NO: 206021 - DNA, 438 bp, Homo sapiens
agaccccggtgaggagctgcatcacactcattgacaacacactgtatcagcagtggtacgagtcctactatgtgctgctcctgggccacaagaaaggggccaaactgattcctgaggaggaagagattttaaacaaaaaatgatctaaaacattcagaagaagtatgatgaaaggaaaaagaatgccaaaatcagtcttctggggaagcagttccaacagggcaagcttcctgcgtgcatcgcatcaaggctgggacagtgcggccgggacattgtggccaagcagatggctacgtgctagagggcgaggagtcagagttctatcttaggaaaatcaaggcccggaagggcaaataaatcctcatcctttcagtctccacccatgtaataaaggtgtttattctgtcaaaaaacaattttttaatgagttcaaagacc

SEQ ID NO: 206022 - DNA, 387 bp, Homo sapiens
ttgttaacagataaatattcaataatcaaggtaccaaaatatgactgccccgatatggctgcgtcattgcatactgcacgtcagagagccttacagtacgaatgagtgacacaggttactctgtgggtggaccttttttctcctgcctggaatccgtactcagaaagctgagaaaatgtgtccatgtgacaatctagtggattgccctgaatcctcagcttaccaacatggtacccagaagatgtctgaaggaagttttattaaagtaacagaaaatttcataactatatcctctaagggagatcacaataacctgccatcccaaaggaggctccgttctggggattaagacagtttgaaggggccaggcgcggtggctcatgcctg

SEQ ID NO: 206023 - DNA, 945 bp, Homo sapiens
aggccagcccaagcaccagaaggatatccagggccaccatcaggcaactatatggcaatacatttccccatccttttccctgcccctaccagcaccctctgcctcggacagctgcagcatggctgccaggaacctggtcctcatttcttcctttccctgtgttatccaaggatgatggaaatatgctctgatacatgcagcattttcgtcctggggccacatatgcccagcctttgcaagagccgtctgctagaaacagggaaggcattctgctcatgactctcggcaagtcatttgaaattccatgagtgtccctgcctgtggagcctgcttctcccaccactcctccaaggagacggctcaaaggcccgagggtcgcctgtgtgtatgttactccctaaccagcacacacctacctcatggtgccttggctctttcatccctaaaagtggtaataaaataacttcttcaaaagtttgttgtaagaactaaatgggatgatatgtctatttggcctagagctaaccaaagaggaggcactcaataagtggcagctgttctgatcataaccctcaggtaaggaggcagaacagcacagtattacacagatgggcttcagcatcaaactgcctgggttctagtgcaaattcaatgagctagctgctgtgtgactttgggaaagtgacttaacctctcctctttatattatttaggggatggaataatctttacttcatagtgcagtcgtgagcatgatatgagccaaaatatattaaaagcttagctcagtgcctggaacataataaatgttcgctaaatgatagctgttaatgtcagcatggttgtggttattgtgatcgggctgtggttgcaggaagacaagagtggaaagaggctggcaagacaggtcaaaaggccttggctctaggccctgttctggaacaa

SEQ ID NO: 206024 - DNA, 380 bp, Homo sapiens
gaagaatgtagacttccttgtgggtgacaaggcatggaagtccctgaaggacacgccagccattctcttttatttgcccatctccttagcccattcttaactctgtcacaagagtctaggccctgaatgccttactccccagtcagacccactctggtcaggtccccaaaactggcactgtctccctgactgccttactgggtcacctatctcccagggtgtttcagaactcctttggttaggtgtgtaattgtcccaccagttcttctgaagatgatttataaaagcaaatctggcaggtctttcctgttgtttttttttccttcctgtgagagggtaggatgggaagagtgggagaaacatggagggaggaggaagaa

SEQ ID NO: 206025 - DNA, 464 bp, Homo sapiens
agggatatttagccaactctctcacatatttgagaagcccttttgacatgctttggtattaatttgtcaaataattgatttattcaatagtcactaatttagtgttcacttcttgccaggcactgtctgggtacagagggtataaagataaacaatactcagtttggaccctggtgtagtaaagatgcagactattttaaataattgtaaacagtatgatgggtgtgacttaagagggggaatactcaattctccagatttggagggaggttggtaagtgatgaggattgatcacaagagaatgcttgatatgggtcttgaaggataagacttgcccaagtggataaggggcgaaaggcatcccaagaggagacagtaacgtgtgtataaatgaacgaaggcgtgaaataggatggagtgttttgaggaaccacaagtagccttctctgagtaagagcataggt

SEQ ID NO: 206026 - DNA, 378 bp, Homo sapiens
cctcccctccccagttttaatggaaatatcagtacatttaattctcctgcatgtgacaaaattctaagaaaaaccttctccgatagatttcagaattatcactatggttctcaattagaaaccagtggtggtatttgaggttcagactgaataagaagtttgggtggatcttttgagtggacaaaatacacgtacacataattattgcctacttctctgcttcatattcgtgttgaaaactctaggcctataaaaattttatgtcatgtatctttccaagtcatcagacaccacctgttatggttattgctctttgggggaagggggcattcagtgacattttgttcaccattccaatgtaatcgcagtgacatgtta

SEQ ID NO: 206027 - DNA, 215 bp, Homo sapiens
atcacttgaacccaggaggcagaggctgcagtgagtggagattgcagcatcgcactacagcctgggcaacaacagcaaaactccgtctcaaaaaaataaagttcttcccttagaactagtcctgttgggctagtctttctgggattttggtttactctcctccacccattggaagggcttaaaaccgaatagccagcaccaagcacagctctgca

SEQ ID NO: 206028 - DNA, 443 bp, Homo sapiens
caaatggtctgtcctggacccaaaagccactctcctcaggcccttcctcctagtcccaccagccaaaaaacttggggaccccaaacctgttcttcactctctggcacctgtgctcatgtgcctgctgcctcaggaaaggacagaaaccctccccgatccaagttattagcaaactgcccatctccacaaaaatttaaatggacagattgttaaatgcacacagctcacagccagctcctttcaaggtagatttgggcccaaacatttcggcacagccaggagatgtccccaaatcccgaaatgtggtttgagtcccagtccctcatctctccagcctccaagccctcacctatgcaatggtgccttgcccggctcacaggttatgaaaaggggtgagacgagacagtgtcccctaaatacatctgacagcacttttgaatgga

SEQ ID NO: 206029 - DNA, 376 bp, Homo sapiens
cacaacagccctcctgccggggacaatgctccttatcccacaagcggggacctgggctctgacaggaggccacacacttacagtccctcccttagtgaccggcagagctgggatttgaacacccctggtgagactccctcgtccagaccccttcgttgtacagcaggtttgcctcacatgccagagtcggggtggcctcagggcacagccaggagatgtccccaaatcccgaaatgtggtttgagtcccagtccctcatctctccagcctccaagccctcacctatgcaatggtgccttgcccggctcacaggttatgaaaaggggtgagacgagacagtgtcccctaaatacatctgacagcacttttgaatgga

SEQ ID NO: 206030 - DNA, 534 bp, Homo sapiens
tcaatagatagcaactatgctaagtggagaggagaaaagagagaggaagcccattcccaaggagtattccctccattcccttggagtattctcaaggagggaaagaatatgtacagtcacatgccacataatgacattttgtttaacttcagaccacatatacaatggtggtcccatgagccgtcacacccagcctgttttttatctttcatagaatatttttactgtattttttctatgtttagatacgtttagacacatgaatacttaccattgtgttatatttacctagagtattcaatatagtaatatactgtacaggtttgtagtctaggagcatcaggttataccatatagcctaggtgtgtaataagttataacatctaggtttgtgtatactatgatgttcacactatgacaaaatcacctaatgatacattttgcagaacatattcccattgttaagcaacatatgactatagctcaatatgtatgtattattgactatgaggtagaaaacgtggagagatgata

SEQ ID NO: 206031 - DNA, 548 bp, Homo sapiens
tcaaacttaatcagcttaaactttaccctataattgtggaaaagtaatttttagaaaaacctgtaattgtgttccatcttttgtcagttcttttctctaatctagtagttttcaagtggattttgcccatcagcagatattgtatgtggcaatgcctacagacatttttgtttatcacaactgaaggtggggcagtgcaactggcatctagtgggtagaaaccaatgatgctgctaaacatcttgcaatgcactggagagtcccttgcaacaatcatctggcccaaaacgtcatagtgctgaggttgagaaactcctttaatgccatcgttctgaatgttaactcattactaagatacagcaatggaaagttgtccattgttgacttaagagcccctcattctccaggtatatgggttcttaaggtgtggcctagggaaccctggggtgacgcaaaaaaaatatgaataaaaacacagatgagaacccaactattctcttaaattagctatgaagagatgtactactcttctcactaaaaagaaaata

SEQ ID NO: 206032 - DNA, 649 bp, Homo sapiens
aaggcaggagaattgcttgaactcaggaggcggaggttgcagtgagcccagatcgcgtcactgcactccagcctgggtgacagaacgaaaatctgtctcaaaaaagaaaaaaaaattatgcctgtgagttagcacccatcattatccccagcccactccagatgggaacactgaggcacaggggatggaggtaacttaccccaggtcacatggctagtagggcagcctgtctccagcactagtgctctggaaaatgagaactttcaggctgcctggagttgggtggccgcatagacttgaaggatgaggggctgtggaggggagcacttggagccggctgatttcttagagcagccagaccttggcgtgtgtctgtatgctgtgtgtgtgtgcctgtgtgtttgtgtgtgtgtctgtatgtatctatgtgtgtgtctgctaggtgtgtgtgtgtgtgtgtgcctgtgtgctgggtgtgtctgtgtgtgtgtgtctgtgtgctaggtgtgtgtctatgtatctgtgtgtctgtgtgctaggtgtatatgtctgtgtgtgtgtgtgtgtctgtatctgtgtgtgtgtgtctatgtatctgtgtggctgtgtgctaggtgtgtgtgtgtgtgtgcctgtgtgctgggtgtgt

SEQ ID NO: 206033 - DNA, 829 bp, Homo sapiens
atttattttctcatagttctgtagctagaagtccaagatcaaggtgttggcaggcttggtttcttctgaggcttctctgtgtggcttgcaagtaaggcagccttcctgctgtgtcctcacatgatttgtcctctgtacaagcacatccctggtgtctttttatgtgtctaaattttgttacaagatccatcagataattaagtcccactctaagggctttaacttaatcaccccctttaaggcccgattttcaaagatagtcacattctgaggtactgaaggttagggaatccacatatgaattttgagggtatatatgcagccaataacgtacggattctgatcaattagtagatgtgatgatttcactactgtgatgaatgaatgaacttgtaatctttaaattactgtggtttcttcctgaatgtgattttgaagtacataaatcttctgtttcaaaaggcacaagaaacaaaagagtaaaagctgtagccattcatgtcatttgaatgtattttggacatctttgaaattatttatctctagggccaggcgctgtggctcacgcctgtaatcccagcactttggaaggcctaggcgggtggatcacttgaggtcatgacttcgtgaccagcctggccaacatggtgaaaccccatctctactaaaagtacaaaaatcagccacgcatggtggtgggcgcctgtaatcccagctactcaggaggctgaggcaggagaatttcttgaacctggaagacagaggtttcagtgagctgagattgtgccactggactccagcctgggtgacagagcgagactccatctca

SEQ ID NO: 206034 - DNA, 156 bp, Homo sapiens
gtgtaattgggatggagaaaggaagggcagcatgcaggaagtcatgtgataggaatagagctgtgtgccaggggtggcaagttgactctgttggttggtaccaagagtttgccttactgtagttagacagagttagtttttgttctgaatgagaca

SEQ ID NO: 206035 - DNA, 197 bp, Homo sapiens
ccaggctctgaggctccggcctcacctttccacggggtagaagtgaacctctcctgatgacagcagtcgcaaagggccgaccatgatgatgaaaccccaggcggagacgggggaagcagcacgggatcccagcctcaggcctgcacggacggtgttggttggggtgagtctcaccaaaagtcgtgccgccgtccgtg

SEQ ID NO: 206036 - DNA, 1492 bp, Homo sapiens
aggtaaaagataaaagatatctgtggtataactggtctttaggaagatgaagtaactgcatctttcccaccattgtgtgtattcttaataccaagatttgggtccttgatctgacatttattttctgtgtgactaacttctctgagctgtagtttgctcatatacaaaatgggaataataatgcctactttatatagtgattgtgttgctagtagatgaagaaaatacctggcctggcttggcgttcaatcactagtgattggaataaattctgataccatgtgttgagtgtcagattgaagtaggagagtgtggcgatccaggctcttaaccttgttctactgactcaaacctgggaaagcattttatacctgggcctctttttcctcagttctacaaacagggaatgaggtagaaagttggtctgtaattgctgatgtttcttcctgttctgtgtctccaaaggcgcattggtctgtggtccaaggagattaaagagtcaacagggacctaagagaagtctcaacttcggtcctgcttaagcctgcagcaggaacagttaaaaacaaaaagccgctatctatagtaaggtgttagaagtggctgggagtatgctgcaggggcagtgacctgcctgtcacccagcatttggaaaataaatgtcaaagagaagatcataatggcctagaaggttggaaactgagtagctagcaagtgtgagagagggaccatgagacataggacccagattgtgctctatcacccactcattgggtgttcccagtcaagctatttctctttgcatcctccatatccccatctgtaaaaatgagttaggcattgtattctccaagtgcctcttcagggctttctgaaatttcattggccccttttttctggctcttgtgtttgtactctagcttttgcctttggtactgaggatttcatttatgagaaggctttttaaccagccaggctttgtctagccctagagtatttagaatgctcctgaaactatgatttcaggccattcaatttgcatctagaaatgccttggttcacctgatcctactccctcatttaacgattgagagataatgcaacagagaagaaagactacaggcttgacaaatgacccccaattcagattcctgccagtactagcttaatctttctgaaccatatcaccatcatttaaaagtgcaataatgggctgggcgcggtggctcatgcctgtaatcccagcactttgggaggccaaggaggaaggatcacgaggtcaagagattgagaccgtcctggccaacgtggtgaaaccccgtctctactaaaaatacaaaaattagttgggcatggtggcgtgtgccagtaatcctagctacttgggaggctgaggcaggagaatcgcttgaacccaggaggcggaggttgcagtgagcagagatcccaccactgcactccagcctgggcgacagagtgagaccccatctca

SEQ ID NO: 206037 - DNA, 422 bp, Homo sapiens
gaggatcgcttggaccttgggaggctgaggctgcggtgagctgagataacaccattgcactccaggacaggtgatgaaatgcgatcgtttcaaaaaaacaaaccaaaagcaaaaaagagactggataggataaaaggatgtaataataaaattgagatttgtaactcaagaactaaaattaggaacaaattaaatgacaatctgtaacactaatgtttggggaagtgttgtactattctctccagcaaagtggttaacagcatgtaatgacatagtatgaaccctctttgagaagagtgaaaattatatagggttagctccctataatacttagtgaatctttaggtcatctcccagttaaagataaaagaaatgctcaattttatgtatattgtgcttaacagtctattactctttccatt

SEQ ID NO: 206038 - DNA, 900 bp, Homo sapiens
tttaagagatggaggcctcactctatcatccaggctggagtgcagtgctaagatcctagctcactgtaaccttaaaatattttttttgtagagactgtgtctcgctttgttgcccaggctggtcttgggctccttgcctcaagtgattctcctgcctcactcttccccaaaatttttgaaatagatttctttgcatatgagattttagtatataatggcactattatttcaatatcgggaaaattatgttttgacaattggttatccaccctctccaagaaaaaagttagaagcacatttacaccttacagagaaatatgactatcatatttgacatatctaatcataaaataacatgttagaggcaaatgtagaaaaaaggaacgtattatcaagtaggacatggagtcctagaagccataaagaaatcgagaacaagttgggctatgcaacgatctaaaacttcagcatggtgaaaggcaccaaaaacttgtaaaagacagttgaagggaaatgtatacaacttatagaaaataacagaatgctgttacatatacagagcagtggggaacaacttgccatgcacactgataggcgaatcaccctgaagaatccaaatggataaagaaaattcgtgaaattcttaacctcattaatcagaagaatatgaatgaaaccacattttcctggctcttggtagattacaatataaaatttggataatatccagtaatggtattagtgtgggaaaacaggtacttgatcactattagcagtgtaacttcgtcccctatctcctcggatggcatgacctatcaacattataaacgtgaatttttttcaaacagtaattccagatctaggaattttatcccattggaataaataggtagatataaa

SEQ ID NO: 206039 - DNA, 960 bp, Homo sapiens
ttgggaggctgaggcaagtggatcacctgaggtcagaagttcgagaccagcctggtcaacatggtgaaaccccatctctactaaaaatacaaaaattagctgggtatggtggcacatgccagctactcgggaggccaaggcaggagaattgcttaaacctgggaagcggaggttgcagtgagctgagattgcgctattgcactccaacctgggtgacaagagcgaaactccatctcaaaaagaaaaagatatttggaagtttaagggactgcaagtccctaacgttatcttctacattatctatttattttgaggcataaatttgtctcgctattactagataacagattttaggctcctatttatgaaatgttggaaatcattttcagtaggggcagcttttaagtgcccattttcagtagacctaccctaaatagctgaatatccctagtttgattttgtctaactagaaagacaagaatctccttttttcctcaggaatctttcagtttagcagaatatcttttaatcaaaatgtaagtaactaatatacctttctcatattgacttaaagttctctaatggcccctttgtttccttccatatttaaattagaattggcaaattaatagacttttcaccaagcagcctgcctctgcctatatttagatatttctccttccatttatatccagtgctttactcagttattgtactaaaattgaagctaccctcaagtcttcctttccctttttctgtaggtgccatcatggtttctgtcttctctgtttgccatttgcagagccctcagggaatcaatcagctgaaccatcttcaaatgtagggacagtagatactgataacgcaaaaataatccaaccctttctgcagtagcccaaactgttttgagttgactctttattaaaataaatactataacttacatagttagctttctgg

SEQ ID NO: 206040 - DNA, 501 bp, Homo sapiens
gaattccacttggaaaatggcaaacaccataggctctgaagattgaagcgtattatcatgactaactcaaagggtcagaggagacactggcttccaccagcaagctcaacgtcttttggcacatctgaggtggggatggaagctgcaagagcctagattttgacaccacttaacaaagaaaagccaatgtctttcattcccctctgtgcctttcagtataccttggccatgtggaatgcaataggttctgtacccaggtcttgacctgggccagctggtcttgagccccgtaggacgtagtctgtggcctgctgcatacttggatagtgtggggtgtataaaaagcaactcatcctgagggagaaaagcatccaactgtcataagcttgagtctccatgcaagtctccactattttataaattcagttctttatgtgaacatgcgaagaagacatattgaaaaattagccccacaaagaaataaatacaaaaatccccact

SEQ ID NO: 206041 - DNA, 377 bp, Homo sapiens
tgatcaagagtctttgaaatgcaacacatttatgaaaatgcaaaggttcatttcatcacagacctttaaaagtggcagaaaccctaaagagcttatgctccaaccttctccctttactgattagatcattagtgatacggttccgcaagtcttcagactcctgactgcctatccaagactcctacctaccacaacacatttcaactaagtggatcaaaatacagtcctttctacatgtaacataggaagtattttgttgttgttaattgagatattattaacccaaatggtactagatctcacaaacaccgtttaagtctcaaagttactgctatttccattttcatgtattgaaaaatacttgttacgcactaata

SEQ ID NO: 206042 - DNA, 562 bp, Homo sapiens
gagactcagaaggctgaactggctgctgctgctcactgatggaaagttcatgctccataggaggaactggaggctcaattggggcctcctgttgggttgcagaaggttccacctcctctggaaactgaattggggtctcctgctgggcttgggaagattctgtctcattggtaggctctgaagttatggtaacctccacatctgcaggtttaactgtaatgttgggcaagtgataataagcttgatcctcacctggaggttgaactgacacctcatgattcggtagagttagactctccatagaggactctggaggcagagctggggcctcctgctgcattgaagaaggttcttcctcaaggagctgtggaagctgtgctggggcttcttgctggagtgaagaggactggatgtcttcaagggtctctggattttgagtttcgggctctagatggaattgagaaggtccaacttgctcagagggccctggaggctcatgctggacttcacccggagttctggaggcaggctaccgggatacggtgtatctgtactggaatat

SEQ ID NO: 206043 - DNA, 307 bp, Homo sapiens
tattcaaaaggaaggaaaataatatagatcagaaattgagatatacataaagaaaggaggattataagtgaaggaaaaaatgtaggtaaaataaaacctcaattgatctaacacataagtttctttaaaataatagctaaaatgtattcagtggtcatagttcatgtataaatgaaatgaatgacagcaatattataagagatacaaggaggaattagaaatattttgttattgtaaagtacttgtgccacccatggagttgcatagtgttatttaaaagtggacttgaattacttttaaatgcaca

SEQ ID NO: 206044 - DNA, 624 bp, Homo sapiens
gtaacatactcttaagggtaaattaatttaaaaaaatcactattactaacatcatgattgtacaaccagttttacaattttgtacaacctttagttactaaatctgatttttgtgtatacttttcaaatctttctttaatgcagtgtcttaaaacaaacataaatgcacaagtccagcttgatcagtttttcagtagttttccagcctttcttgattactaaaaaataaaaggaaagaaaattttgagaagaaaacagtccacttaaagaaatctccctgctggaactggttctttatataccatatacaattaagttattgccataggaagaaagtgggctgtttttgttctttcttcattttttttcctcttagaggaatccccttttgatttaaggcaacaaacatttcccctccattgtgtgtccatttagctgaggcatatgtgttgtaatggttttccagaattagtcctttgaagttacaatcttcattgcattctttctgttaaaacaaacaaacaaacaaacaaacatgttccaaatgatttttagagaggctcaattaaacgaagagtaagcaggtaatatttgttagaattgaaacatacacaacttttttta

SEQ ID NO: 206045 - DNA, 453 bp, Homo sapiens
agatatttgcgctcccttatgctaaatgcagtaagtcagttacagaaagacaaatactgcatgacctcagtttcatataaaatctaaaaaagttgaactcctgtacagaaactgagagtagaagagtggttaccaggggttagagggaggggaaaatgggtagatgttgatcagtgggttcagaccaacatctacccataccagtcagaaaggtagttatataaattatgcagtagccataatgtaaactactatggagcaatttaaaagaatgaactagatctgtttgtcctgattgataagatatcttactaaattgaaaacaagttgcatagcaatgtagacaatatgattctgttaaaacccatggaaataaaagttgagtatgtacacatctaaatgtaaatgcctaaaagggggatgaacttgcagttgaaatggaggtgttttaat

SEQ ID NO: 206046 - DNA, 396 bp, Homo sapiens
tgggctattctggccatcctataaggtcaggggctggggtctcttacatccccatgtttcttacagcccagtgcaggggctgggtccacagagagaggagaagggactcaaccaggactgggtgagggcaggctggagtgaggggtccctatttccctccctgattctccctcctccccaccagctaccaatcgctccctcatggaatggggcaaacctgctctagccggactcggtgtgacggcggggtgggggggcggggtgacaggagttatcagagtcataaaatggcagctgcaaagttcaagttgaaggcccaaggccttatcactcctgtttatggtgtcctgacttcagcctgggaaggagaaatctctgaaaagggaggcaaaaaaa

SEQ ID NO: 206047 - DNA, 468 bp, Homo sapiens
ttatggggctgcatggagcctgcagtggtgctgcaggaagagtgcctggccctggcacacagcacgtgcccactaagggggagccggcgtgagtactggggtactggagtcccgtccctccagaagcccagaggtcacagactacagtggaaggagggagtcttcaaagggcagtgaaggggctgggcacagtggctcacacatgtaaacccagcactttgggaggctgaggcgggtggatcacttgaggccaggagttcaagaccagcctggccaacatggtgaaacctcacctctactaaaaatacaaaaattagctgggcatggttgcgggtgcctatcatcccagatacttaggaggctgaggcaggagaatcacttgaacccgggaggcagaagctgcagtgagcaaagatcacgccactgcactccagcctgggtgacaagaatgagactctgtctcaaaaa

SEQ ID NO: 206048 - DNA, 500 bp, Homo sapiens
tattgccatacaaaggctcatgatccctaaggaggggagaataatgagaacaggcctcccagggagcacacacgacagacgaggtccattcaccacacagggagtgcttcccaaatattaaagtccagttgctcacttaggatggaagcaggcctctgtggaaagtgacatctgattaagtttgaggtgtgccttttatatgagtggttctctccagagatggtgtccaacacagggagggatccacggtgacatataaggcccccggaggctagaggagttcccaggggtgctggtgttggcagggcctttaggctggaaggctaacaggctaggagcacctgagctggggatctttgcagaaggggctggcagagctcagcctgctgtggctaagccctcaacgtatctgtcaaactctagagctgagatgtccactggggtgcagtagctgaggtcagtaactcctatagggtctgacagtgtgtggtgtcgcattc

SEQ ID NO: 206049 - DNA, 406 bp, Homo sapiens
ccttgatttcagtcatgtctggtcgtggcaaacaaggaggcaaggcccgcgccaaggccaagtcgcgctcgtcccgcgctggcctccagttcccggtagggcgagtgcaccgcttgctgcgcaaaggcaactacgcggagcgggtgggggccggcgcgcccgtctacatggcggcggtcctcgagtacctgaccgccgagatcctggagctggcgggcaacgcggctcgggacaacaagaagacgcgcatcatccctcgtcacctccagctggccatccgcaacgacgaggaactgaacaagctgctgggcaaagtcaccatcgcccagggcggcgttttgcctaacatccaggccgttctgttaccaaagaaaaccgaaagccacaaagccaaaagcaaataaat

SEQ ID NO: 206050 - DNA, 365 bp, Homo sapiens
  misc_feature (290)..(290): n is a, c, g, or t
  misc_feature (297)..(297): n is a, c, g, or t
  misc_feature (307)..(307): n is a, c, g, or t
  misc_feature (330)..(330): n is a, c, g, or t
  misc_feature (347)..(347): n is a, c, g, or t
tggcaactcaatggaaaagtgggtaaatgacttagcagacaccacatcaaagatgatattcaaatgaccagaaaatataaacacatgcttaataccattagttatcacaacactgtgataccactgtacacccaccaggatagctaaaatgaaaagacaaataatagcaagtgctggtgagaatgaggagtactactgggagagatgtaccatggcaccaccatcatctggtaacttttgcaggatatactaacagagcatttgtgtacctgagcacccactccaaatcnaatcccnccggccgccntggcggccggtaacatctactcnggcccatccccccatantgattcctattacatccc

SEQ ID NO: 206051 - DNA, 416 bp, Homo sapiens
gctggaaggtcccctcaggagctcagggaaggggcatagcagaaggagcttggctcccgggggcccacccagctgcatggggtcaggtggggcaggctttgctctgatcagccatgtgcctgccaaaaatggggattccagcatcaaaggaaagggagagaaggtcactggggaggctccccagagtctctgccacagcgtatagacagaagggggatatgcgcagaggaaacgagagaggagttggggggcgaggacctccccaagaggcagagggaagcctctagaagatgagaaggggccaagcactgggggcccaggagggcaggttccaaaagtgggagccatgagtgctaaggcacagaaggctctaaggtgttctgagggcagagaaggcacagggggccgagcgaggg

SEQ ID NO: 206052 - DNA, 633 bp, Homo sapiens
ggacatgtgatgagaaatttaacattggtgtatctaactctgacatttttcacgaagtgattttttaaaatgtggtaaaaaagacaaaatataattcaaacatatgcattatatgtcaaagtatgcttcgctggcatcaagtagactcaccttgagatacaatcttggacaacctccatcttcagaatatctactttttcaaaccgaaactctccaaccaaaaatcaataacatcaaaagtttgcaaatacaagccgacggaaaataaatacatgaattctaccacagtgaattggaccgcactgggaaacacagatgaagaaagtcaataccgctttgtccttcagtgcctggctcctttttcagctcgtcttgctactctaggcattatgcctgaaaagtctcccaggtgcctgtgaggctctaattccctgggtcccattgccatgtctctggatttgcgaagatccaccggaccttctgtggaactcccgtgtcggtgaacttttgtgccacgtcccctaattctgcccatggtcatctgcagctgcacgagttagggtcggtgttccttggacgggaagagacaggcaggagtcggaatgctgaaccagcacactggggcgttttctc

SEQ ID NO: 206053 - DNA, 328 bp, Homo sapiens
ggagaaagggaaattctttatcttgatttgaacaatggtaacacatgtatgcatttgtcaaaatagatctaactgcacatttaagatttactgcagggaaaaaagagatttactgcaggtaaattatatttccataaaggaaaaaacacaaaaaccaaatagggaatcagaaaaaaaaaaaatgcttgccaagggctgggcgcatggtggctcatgcctggaatcccagcaatttgggaggccaaggtgcaggaaccacttgatctcaagcgttagaaactagcatgggcaacatggggaaaccccatctctacaaaattacaaaaaa

SEQ ID NO: 206054 - DNA, 200 bp, Homo sapiens
gggaaaagtgaggacatttattggcttgccttcctacttcgatgtcaatgtaaattattaacctagggaggagttttatataactcccaaattctagctgagtaggagatagtgcagtcagccaaccagcaaatgagaagcagatttagaagaaagattgtgaattcagtttctgaatgttgtttagggtgtatatggta

SEQ ID NO: 206055 - DNA, 262 bp, Homo sapiens
tctcaggatagactgcatcctcttagtatctgtcaaagatgtgctctagccagtatcaaggaaagcaagagagtgacttgtagagacaataactctattgctacagtttccaaatcccatgaactttcttagtagccacatcacactgctgactcatcttgtactttgaagaaattaaaattcttcactttgggaggccaaggtgggtagatcacttgagcccaggagttcgagaccagcctggcaacaaggcaaaacccca

SEQ ID NO: 206056 - DNA, 438 bp, Homo sapiens
tatttactattcattaactggaaatggatcaccataaagtctttatactcaacgtcttcacattgagtaggctaaggaggaagagaaagaggagaagttggtcttgttgtctctagggtggcagaaggagaagaaaatccatgtataattggacccatgcagttcaaacccatattgttcaagagccaactgtataatatagagtaaagacggttagaataagggtaagcataggaaactataagagatccttttcatctgacatatatgaaagtgtgggagtcagggaagtctccttggaaggatgacatctagaatatcctcatctagactagctgagcaaacatttcacgcacagaactgtacaaggctattctgacacagagagatttaaatcatacccatgcacaagctctctcacatagagaagtctgaaca

SEQ ID NO: 206057 - DNA, 1257 bp, Homo sapiens
cgtaaccctgctaagaaggctctgcttttttggctccatcataatgactgtaaagtgtcacaagatagtgaaaatatgattctttaaaacaaaaacaaattttttttcatctacacatcgtacccaaagttaacaggagagaattataacattttcaaactaacactaaacaaccagtattaccaaataacaaaatgcaactctgcagacacaagtcaaacctgcttagacagactcccacggccaccaccactggggaaggccacctccacatgcaagggtttaggttctctcaccacacgacgcacagaatgggaacattcactctttgatcacaacttcctacatctccactttgtttcctcaacattttcttcttggatcctgtagttctcttatttctgcttcctgcatatcccctcttcacctcctgccttcatatccatcagtggccatcttagactccacagttgaccatttacatcactccagcgactcatgagcctttgttgctcctctatcagttcactgcgtggactgccgtgactgcctccctgggtgaacacaagtatcccccgccacagaggcaagggcagctgggctcacggaatcaagatcaggaactgaacacagcagagccagcctcagctgggcctcggtgctgcctgccaccctcccatattctctacaaactcaccttgccattctttatgatgactatgtcaaacttctctgcccccaatgtatcctacctcctcatactcaaactgccatagcctcatacttcacagagaaaacagaaccctcagcaggaagctatcctgagtgcccaatgcccagcacacaaacctgccctagcctgcatccattccgagtttctcctcagctacctcgcactctgcactgtctcttctcgccccttctcccccagcctcactgcctttgccaggtttccctccatcccgctgctagcccccatgtcatcttgctcttcccatcacagatgaaattctccacagagccgctgtttctctgttttcattttctaacctcccactcactccttacaacctgtaggcttccatctggtttctgcacacggctccagcatagtggctctaatgtcacatcaatgatttccatgtcattaaacccaacgcaaaactttcagtcctcatctgacttgaccctctcagcagaactctccctccttcttccacactctcttccctcgactctcatgacttcagaatcttg

SEQ ID NO: 206058 - DNA, 434 bp, Homo sapiens
acagtgcagagatgacttgtgccaactcatgagttttgttacttgaactagtcctctgtttttgcaagagtgaatgaatgaaaggttgactggcagctccctgtcatgaagatgttttgaatgttggctgcaaaggcaggtaggactggaagattctcaaggtcatcagaaaggtcacattttcagctgccaataaataactttcaagtggtttcttacagactctgtctcttcctggtgttgtgttcctcttgcctcttctctgcatgcctgccttgggagtgcaccacacagtcatgtcatgcgctggcacctcagatcccaggccatccaaagggaatcaacttggtctctgtttttttcccctagcagtgctagaaatgagctttcagccccacagagagagcgtcgggatcctctagaataccgcacat

SEQ ID NO: 206059 - DNA, 367 bp, Homo sapiens
ataaaaatgatcaaggatactagtataagagatcaggttcgtcctttaagtgttgtgtatggttatcatttgttttgaggttagttgattagtcatgttgggtggtgattagtcggttgttgatgagatatttggaggtggggatcaatagagggggaaatagaatgatcagtactgcggcgggtaggcctaatttctctcggaccaatgcataggtccgagagaaattagagcaatagaaaagggaatcctctggccaaaatcctacatgtttccagcagagctggtagcagaaccacttcccctgattccagccttagcgttcttcacaccatacttaaggcctttatttgtggaaattgtcatt

SEQ ID NO: 206060 - DNA, 368 bp, Homo sapiens
tttaaaggaacatatctattatatgaagtgggcaacacctgtatgtgaggcacattgacgagtaaactctgagctgctgtcacaagcagttaaaagtaaaaggcctttgtcaaagcgagttaacaaagtctattgtgtgacatggaatctttgacacattcatcatgctggtgtggactatctcaaaactcagagctggtggactctagccagcttccttatcatgagtacaaatgagtctgtttccacgaggacccgcatcatcctctctgcgctgttggctttcattggagatgaccccacagacctgttcccaagcatgtgggacctgaaatctagcaaaggtaataaatttgttctggtgcagt

SEQ ID NO: 206061 - DNA, 585 bp, Homo sapiens
atctcccagtttcatccataatgtcaccaatgacaggatttccttctttttatggctaaatagtattctgctgtgtgtgtgtatgccacaatttctttacacattcatccgtcgatggacactaacgttacttccacatctcagctattgtgaataatgctacaattaacatgggggtacagatatctcttcaatctactgatttcacttcctttggatatatacctagaagtgggattgctgaattgtacagtagttctatttttaattttgagaagaacctccatattgtgctccataatggctgttccaatttacattcccaccaatagggtacaagagttctctttcgccatacccatattgatactttgtattaacaaaagcttttgaagaaaaaataaaacgacttgtaaaaatcaacttagatatacagtttaacaattaaaattcattttccaactataatttttgtattttttgtagacatggtatctcactatgttgcgtaggctggttctgaacttctgggctcaagcaatccacctgcctcagcctccctaagcactgggactacaggaatga

SEQ ID NO: 206062 - DNA, 398 bp, Homo sapiens
agaccatctggccaacatggtgaaaccctgtctctactaaaaatacaaaaattagctggatgtggtggcacatgcctgtaatcccagctactgaggaggctgaggcacgagaatcgcttgaacccaggagacgtaggttgcagtgagccgagatcacaccactgcactccagcctggcgacagagcgagactccgtctcaataaataacctttcactttaacaaaatgagaaatgttacaccaaaatcaagtctaactttgtcagcataattcttgctctttaattttcatcttaatgttttaagccacagactgttatgttctgttttcttaaatgatggttgtagaggaaaagagtaatgcatataaatttccaaatctactatcttaggtggtcg

SEQ ID NO: 206063 - DNA, 104 bp, Homo sapiens
aatagaaaccaaaaaaaacctagatgtttgtcaacctgtgaaagttgcattaggcttttgctgtggaggaacaatgagtaaacaattacagtctaatgagaagt

SEQ ID NO: 206064 - DNA, 224 bp, Homo sapiens
gagaagtgtctttcttacctgcttttttgtggaaatgcttgttttgtactcaagtccttgataagctcttctgaatgcattcccaaacaaacatctgacagcaacaactggaagccactaccagatgcacgtatatatccttcctctgacatggaatcgtaatacagccatgttgtgacacaatttcaggtttcgattagaaatagtttacagtccagcagttt

SEQ ID NO: 206065 - DNA, 619 bp, Homo sapiens
ggccaaggtgcaacttccttcggtcgtcccgaatccgggttcatccgacaccagccgcctccaccatgccgccaaagttcgaccccaacgaaatcaaagtcgtatacctgaggtgcaccggaggtgaagtcggtgccacttctgccctggcccccaagatcggccccctgggtctgtctccaaaaaaggttggtgatgacattgccaaggcaacgggtgactggaagggcctgaggattacagtgaaactgaccattcagaacagacaggcccagattgaagtggtgccttctgcctctgccctaatcatcaaagctcttaaggaaccaccaagacacagaaagaaatagaaaaacattaaacaccgtgggaatatcacttttgatgagatcgtcaacattgcttgacagatgcggcactgatccttagccagagaactctctggaaccattaaagagatcctggggactgcccagtctgtgggctgtaacgttgatggccgccaccctcatgacatcatagatcacatcaacattggtgctgtggaatgcccagccagttaagcacaaaggaaaatatttcagtaaagaatcatttgacaactggtgaaaaaaaaaga

SEQ ID NO: 206066 - DNA, 379 bp, Homo sapiens
tgtccccctcaaagccactgccttatcattgcttcatatgtgtaaagtcagtgggtgtgacaaacaggcagagctattcctccaggagctcttcctctgggcagtgctggcctagagtaagcacactgtgaatgcacggttggaaccagcacaggcagtgccttgatttagaaggtgctgtcgttatttccagtgcccaggcctgcccctccgattttgtctgtctttccaggcctagcaccaccacctccacagcactgtactcacacataaggctctgggaacgaagtgtcacaaagtcacagaactttttctacgtggcctagcccttcaaacaaggatgtctggagggtagagagctaaaaactaaaaataaaaa

SEQ ID NO: 206067 - DNA, 234 bp, Homo sapiens
tattaccctagttcaggtctctatctctcacttagattactgcaacacgttatcattggtctgtttcctgtcagtctcacctccctctctttctccactcagcacaacagggacatctttctaatacatgagaattgcttgaacctgggagatgcagagaagtggccagattagagagagatttagggttcagactaaccatcaatttgaatggaagttagacaaagggaaaca

SEQ ID NO: 206068 - DNA, 407 bp, Homo sapiens
aagcttcacttgattcggtagatggcatcttcaaaatgaaggggccctcagatactatttactcccattttttcccaacagttaaaaattttggttttccaactcatagaatattgcaagcaatagacattgaacaccaggaagggtgagagggcaggagaggggtgaggggtgagaaattacttattgggcacaatgtacattatttgggagacggttacaataaaagtccgggcttcacaactacacagtatttctatgtaacaaaactgaactggtaccccttaaatttatacaaaataaataagaaatggaaggccaatgtaagcatgctttctcgaaaaaagaaagaatatcaaagtaatatatttagagtggtgaattgagaacctggagaaagagccaga

SEQ ID NO: 206069 - DNA, 318 bp, Homo sapiens
cccgagctcctttaaggatcgctggtacccgacgcagctctcgcgtctaaacggcacggcgggcgctccacagttggcacccccgtggcctcgggagctcaggaggagctgctgcccaaacaggaggagccctcgccaaagctgggggtcagaaagggaactcacatttatagttccggctgcgagccaggcctgctggccacttactgagcagtgttttatttaagcctcaccacagtcccagattggaattgctgtcttcggtgaagactagggcaccggcgctgggaggtgaagtcacttgcctgcgatgcctca

SEQ ID NO: 206070 - DNA, 655 bp, Homo sapiens
ccctggaagcaaaaaagcaaactaaacgtaaaacaagcagaaagaaaaaaataaaaagaattatagaagaacttaatgaaatagacaataagaaaacaactgtgaaaacacaataaaatcaaaagccagttctttgaaaagatcaacactactaacaagcctgtacctagactgattaacatattaatattattatctcaacagatacacaaaatgtctttgacagaatctaacactttttataagaagcattgaacaaactaggaatagaatggaacttctaactaccaaaaaaaagcatctataaaaaacctacagccaacaacatagtgcaatttgttgcaggatgtcagagcataagaagggtaggaagggtaggtaggagagctgcccagttcgtgaagtcagaattccaaaaaagtgataaggcgtctacctgaaacaacaaggaagaggcaagtgggttgtgctttgacataaagtttctgagtatgtgcaaggtaaggaaggttaggtacactaaaggcttctctgtgtagagattcagagcctgaaaagggtgagaaggcttctgcctggaggagagggcaaacgatcggaggcagctggacctagagtgggggttgaaaatcattcatttggtgtgtggcttgac

SEQ ID NO: 206071 - DNA, 417 bp, Homo sapiens
tctgtctgagatagctttgccactcacaaatgaaaagtttgctcacagattctcttatttgaagtttactgattaatatagttggagactgcacacggggtcccattgtcataaattccttagtctatctgggattcctggtctgtcatagattccttagtctatccagagcaggcaagtctggatacctctgctgttccttcagcacatcaccccccagcgacctacatgcagctcatcgggaccctaggagagcttcccatattcacagaagcaccattatggttacttattgctatgcaaggaatatcctcaaacttagcaacttaaaacagctattttcttttgcttgtaatttgcaggtcagggatttgggaagggtttgactgggaagttctcgcttagaatctctcaagt

SEQ ID NO: 206072 - DNA, 384 bp, Homo sapiens
agtttttagttcacgttcccttttatccagcaagcctactttgataagctctcctacagaaatacaagcatcagaatataacgacatatattgaaagtgtttcacgcctgtaatctcagcactttgggagcctgaggcgggcggatcacctgatgtcgggagttcgagtccagcctgaccaacatggagaaaccccatctctactaaaaatagaaaattagccggacatggtggcacgtgcctgtaatcccagctacttgggaggctgaggcaggagaatcacttgaacccggggggcggaggttgcgacgacgagccgagattgtgccattgcactccagcctgggcaagaagagcgaaactcttaacaacatttttcacttg

SEQ ID NO: 206073 - DNA, 202 bp, Homo sapiens
agaggaggtggccaggtgcaggagatggctttaaaaaggtagttggccgggtatggtggctctcacctgaaatcccaacaactaaggagtctgaggtggaagaatcacttgaggctaggagttctaggctgcagtgagccaccagggtgccactgcattccaaccttgggcaacaaagtaagacccctatctctttaaaaaa

SEQ ID NO: 206074 - DNA, 278 bp, Homo sapiens
aggacccagccaaagaccaattaaaggatgagctgatgggtcttggcctctgagatctgctaaataccagtggctttaagaagttttataatttgtcacgcattcttcttaagtgttttctaagtggtgcccaactgagaaaggggaattgtaaaagcaacgttctacttcaataggaaacgcagaactgggccctgattcacagggacagacctggtctctggcgagctctgggcctgtggagcgacctggctcactggagaatgggaccctcaggc

SEQ ID NO: 206075 - DNA, 294 bp, Homo sapiens
gaagtctagtaggaatttcagacccactactcactgaatggctgtgtgacctccggcaagttgcttcattctctgggaccttatttgctcctctgtagagcagggataataaaatgaccctgtgctgttgcaaggatcgagttagttactacagtatacataaggcacatatgacaacagctggcacttcagaagaatgggatccatgtgcttcatctatctggaagacatgacgcctcgtaccaagaaagtgctgagtaaagattcattaaaagagtatctttaagttattgc

SEQ ID NO: 206076 - DNA, 288 bp, Homo sapiens
actcatttttaattggataggaggaacctacaaagatgactgacaaagaagtaggagggacaatcgtatgtattaggtttacctgactgaggcggcgaatgactcatgagagcattttcatggaatagtgggacaaaggctgaattgcaagaattgctgtgtaaatagaaggaatgaagaaaaagagtacaaaagcatatgatttctgagaacgttttgctataaaagagaaaagatagaagatgtttgaatatatttaatgtcaatgaaaagatgccagtagaaagg

SEQ ID NO: 206077 - DNA, 545 bp, Homo sapiens
tcaaaggaaacctaaataaattgatatatatttcatgtgcaaggatagcaagactcagtattgttaagatgttaatactccccttcttgatctatagattcaactctactccaattaaaattctagcaggttattttgtagatataaacacatttattctaaagcttatatgaagacgcaaaagactcatagtcaaaatgctgaagaataacaactcagaagactgacactacccaactttaagacttactctccagctaaataattgagatagcatggcattagtgaaagaatatgcagattgatcaatggttcagaagagagagcccggaaattgacctatgcaaatatagttagctgagctttgacaaagaagcaaaggcaattaaatgaaagaatgcagtctcttcaacaaatggtgcttaaaaattggatgtccatgtacaaaaaaaaagaatctaagttcagactttacacccttctcaaaaattaaaactcaaaatggatcaaagatctaaatgtagaatgcagaatcacaaaacttc

SEQ ID NO: 206078 - DNA, 190 bp, Homo sapiens
ccaaacatcttagaaatgaggagtctcccctccttgcaaaagcaggctgtttggggccccagtaattttatttgcagatgctctgaaaagcactagtcaactacgttttatgtatttcacaattcttccctccatatacagatgatccttcacttacgatgggggtcacataccaataaacccatcttaa

SEQ ID NO: 206079 - DNA, 214 bp, Homo sapiens
ctagctgatactaggtttccttacaaccaccatatgctaatgtctcccgtcaataaatatctgaagacttgtgtgcaaaacgacagatttgaaagtgaaatagattggttgccattagcaatatttgggaaaaattctggtctctttattgggggagtaaatctgtaactccagaaaggaaatgggaataaatattctgtagtgaagaaatgaa

SEQ ID NO: 206080 - DNA, 747 bp, Homo sapiens
taccatgatccccagctgctccgagagatcaaaggacacaagtgttacagaatcctgaggtgtcacttttctgcctgaaacctctggctggtggcacctttacctgtgttttgctcgggcccactgggttagttctgtccactcagctcatgctagtggtctggatcccacacctgccaagggcgagctgggtacagagcagtgaagggtgtgtgagcaagcgagcatgggatctggccactgcacacagccaagcatgccagccgcagtggggtgggcagctccaggcacaggtgccagctccctgtgaggctgcagctggaccaggccgactgcaaacagcttccactgtgggtatcagggaatgcagtggcacccagaagcttggagatgcaggacctgcagagccccaaagaaggtgtcacagccctggttggaggagctcctaggtctgtgttccctgaagggacacagctcttctctccttctctcttctcttcttcttgcctgcaatttggcaagaaaggatagcgtttcagccctgtttatgttacacctctttcagccctgctagttggcaggtcctgagttcttgtcctgagtccaggaaaaatgaggtatgtggacaagtagaaggtgagcaaggtgaagaggtgctttattgagccacagtacagctcagaggagacctgcagtgggtagctcctttctgcaggcaggtcatcccaacgtctgttcagctctcag

SEQ ID NO: 206081 - DNA, 386 bp, Homo sapiens
accctgatgctgaagggtgaagcacagtcatcactgagaaagagacaagtgccataaacttagaggagtctcatttgcttggcctcctgcattttctcaggcaatttcccatgatgcactacagaagtaccactatgctagaccattcccatgatagaaatgaatcaaaagatttaggaaaagtcataaagaaagtaattagggactcgttctgtatagtgggttagccacccagaagtgggttggagtcagtggattagccaactggaagtaggttggtcttcgctcggagcgcgggtggggccacggatgggtgtcgattagcccaggcagagactatagccatcactgaaacagcaaggcctgcaggaacctgcagtctatgg

SEQ ID NO: 206082 - DNA, 431 bp, Homo sapiens
gaagtcaaataggcttttttatttttaaagataagtatttagtgatgtaggattttgccatttatacttttgggtacaattctcttttactaatatataggaaagatttagagacaaaaataataaaacatattactagtactctataaataggtttataaagtacatgaatctgcaaatatattttccaaattgttttttcaagctttcaacatttccttttcctatacttatctttagtctcattttaatttattctcttcctacctggttctttgctatttaaggtctctataaaacttgtatttaaaattaggtctatccagtctgtccctggatctaaggaaaaaataaaaataaaatgaggcctgcctgtggactgtcctcaggcctgccatggctttaatttttaggcatgacttaaagctatc

SEQ ID NO: 206083 - DNA, 309 bp, Homo sapiens
cagtctctctgttcgaagagctggggtggtttctacttctagctggaccctgagtgatccttcaggcaggggtctctgcgactggagacatgctgtgtgcatgaggtcccatgtacactcagattgcatcccccatccctgcccagccctgagaggcaggcgagacagtccccctctcaccatctctggggtgggcctggatttattggctgaagaattacaccctctttgatggtatgcagtttaattccgtagatcaaagctatgtctagattttaaataaatgatagggatttaaaattgtatata

SEQ ID NO: 206084 - DNA, 480 bp, Homo sapiens
gcttaataggcccttactaaagctattcagcatttcagagacgagaaggcatgaagctacatgtaggatgcctagcagttggttcatctttttgaaagccaaggagtctcctcttcacctgtccatccttgagcagcagagctggggcttttaagagaagcatttgtagaattcagagtaggaatgagggaagagactagttgtctcggaggctcaggggagcattccctggtcttctgagattgacacatcactgccaccttctgctgcctttctctaggcctcagagctcagccaggctgtcacaagcttgctgggtgccaccctaatgtctggtgccagggctgaaggtagccctcactccagggagtttacagtgcatgagagactcatagttaaataatagttatggtgctgtatgataagtgatctaaaagtcaagggggggattccagaggagtcagagaaggcaggaagaga

SEQ ID NO: 206085 - DNA, 400 bp, Homo sapiens
aacaaagcctgttgatgccaatgtagcattaagtttcagtatgtaaaagactacaaatgttgactctacttattcttgtctatggaactggccttttagccagtcacagacatcacatcaggcatcctgaagtagatgctatttcattagcatcactttctgccagcaaatgacattgtcttggagcagagccagactacaggcatgagcaatgtgttagagattctggactggatttctccagggaatgggtaaggttatctagtctagtacatggtgaaggctgctataagtgacaagtggaaaagcttcatataccttatgttgttggaaaaactagatctttaaaatctctttatatcaattctttatagcttgttcatgtacatgtacacattat

SEQ ID NO: 206086 - DNA, 497 bp, Homo sapiens
tcctagtcttctctctttggagctcctgatttaggacaaggagatcccctgccctctgcatccctctcttggagcaccagtgtagtatttttattggaatggaattgatgtagtcctcctgagagctgatgggttgaggcaagtctgttgcagtcctttgtcttcctggtacatcctcagagaaatgcactgtaagtctttgcttgttccctcctgtttcaatttggcttcagggttggtttccggtgccatggatgtaatttcacttaggtgaatttatagacataatgcctttggtcatggaggacaatagcatttccttagagaaatttcttcatatagttctgacctattttgtttttcatttgcaaaggcagcatttccaggcttctaatatcattattgcacaaataaccttcactagagcccatattgtttgctgcctgaacttggatgaaataacttctttgaaaaaatattttcgaaaaagatttttt

SEQ ID NO: 206087 - DNA, 571 bp, Homo sapiens
tatgtggaagccaattcacatcagacacatatctggcagtagagaattaaaatcctcaaggaatccaagtaatggttccaggattgtggaccctaccccactgacagactgccacagggaggacggggtatgtctgtggtacaggcctgagccacctaggaggcccaagcagacatgcaacctgggtatccaaaaagcacgtggaaggaagcacacacacaggcactggctatgaggatggggctcactgattccaagcacattcatggcagccaactgcatgacaggcactgggaaatggtgcggggcagagtgatggtcagtacaaacacgtatgcatatctatgtgtgcatacgtatccacaaatgtgtatatgtagaacatatagacacacactgaaatcaaagtgttatttcccaacactttccttcactacacgcaatgcagtctggtatttttattctttgttttttgttttttgagaccgagtctcactttgttgccaggctggagtacagtgacgcgatctcggctcactgcaacctctgcctcccaggttcaagcgattct

SEQ ID NO: 206088 - DNA, 245 bp, Homo sapiens
gggtgtgaggaacacgcatgctgttgatggggggtgaactggtacaaactttctggcaacatctactgaaactgaaacgctgatgcacattcctctagactctgctagagaccgagcagaaacattcttatcccaccttacaaaggagaactagattcagaacagagcagtaatttgtccaaggccatgtggccagtacatggaagccaggtggtgacaaaaaacaagcaagcagacgcctaaag

SEQ ID NO: 206089 - DNA, 449 bp, Homo sapiens
tagctgggattacaggcgcccaccaccacacccggctaatttttgtatttttagtagagatggggtttcaccatgttggccaggctgttctctagctcctgacctcaaatgatccatcctccttggcctcccaaagtggtgagattacaggcgtgagccaccacgccctgcctcctggaacatttttcatcccctagtccgccaactagtctctacaacaaaatttcctagagttgcttgtacatattgtctctaatctttcccttccgttgtctgaacccactcctgtcaggcttttgtccccaccattctgatcggatagctcttgtaatggtcactaatgacctccatgttgctaaattcaatggtcatttcatcttatttgatctgtcagcagtatttgacacagttgctcattccatctctctttgaaaacctttcaaagactt

SEQ ID NO: 206090 - DNA, 234 bp, Homo sapiens
atttaacaatatttttattttatatatcaaacattgctcatctataaatctgtgactttttgtttctttttggcttttgcagatcttttaagtgaaactttaaagaatgtctatcttttctgtagcaatatgctctaccctggccttgtctccttagtaggaaatctgtcatacctattatcttatatattatacagcctttcaaattaaatcaattaactgaatcagttagtt

SEQ ID NO: 206091 - DNA, 348 bp, Homo sapiens
aaaaggacaatacattgctatgatctgaatttttgtgagcctccccacacacaaccccactccactccaagtttatgtgttgaaacttaatccccagttcactggtgttggcaggtggggcatctggtgggtaattagctcatgagcagagctgtcatgaatgtgattagtgtcattataaaagagacctgagagagagctcattggtgccttctaccatgtgaggacacttagaaggtgccatctataaggagtgggccctacccagacaccaaatctgccaaaacctagatcttggattttccagcctccagaactgtgagcaataaatttctattgtttataaat

SEQ ID NO: 206092 - DNA, 257 bp, Homo sapiens
aataggcaactcattaggactctttactcatctcttccctgccccagctttttaaacagggtatcctgttaaaaggaacccagactgatggcgcatgttattcttagcttccctttgtgggctgaaggaaaaagtaatagttgagagggaattatggctttcagccatgaggacacaggattgcctcagagagagccaatcaatttttttccctgaagataaactctgcagacaggggtagcgtttttcctgtcatg

SEQ ID NO: 206093 - DNA, 436 bp, Homo sapiens
atgtgtgttgctgcgtaaagatgccatacttaatatatgttgttgatttgttggcattgaactcacggctgacagcactattgctcattcatgaacaaagcttatctaacacacaggtttcctccataaggcacatcgcagccttctcacgcttagggaactacacagcgtttcagcacttcactagggaccattttgaacagtgaaagcgtcaacaaaaagcacaaaaattcaaaaaacgtggcactgacatagaccactaagcaggcagctgttttcagcatgagagctgagagagttgtcctgttcagcctccgctggcaacgtgcacattggtcaatgcaaatttttcaccactcagcacatgtctgcaaataaccgcaggagtgctgatttggaggttgcagatcaatcttagcaagaaggtgaatttgca

SEQ ID NO: 206094 - DNA, 245 bp, Homo sapiens
tgcgtgaaagtgagctcagatgtaacctaaacccatggaacttggaaaaagaagcatctgccgagaggagcggggttgatcttgatttgctttcagggagttgccacggagctacttatactttctttgtctaagaaacatttattttacaacccacggagcaatgctggggatgtaactatttcttgattgattcctgtggcacagcatcgtctgcagagacctgcattatgtgaagcagcatc

SEQ ID NO: 206095 - DNA, 629 bp, Homo sapiens
gtttgaggaactgaaagagggcaggatcacgcatactttataggctatgtgaagaattttggtctttatcctaaaagcaatgagaagctattgaagtgtattttcaacaggggaaggacattatcaggtttgaatttttaaaagataatttaatagctatgtgtagacttaggggtccaaggttgggttgagaataagagtggatgcatagtatagtcaattaagaaaacactgtagttgtctaggttaaagtattggtgttttagactaaggtagtggcagtgcctgagatgggaaggcttagacatacatgagagagatttaggagttcaagttcacagttcatgctgatgactgggcagggggtgaggaagagagaggggccaaggacaatgcctcattttctggctggacaatgtaagcattgactggcacaggaccgggtttggaaggaagaacgtgagctcagttttgggcttgttgattttgagatggctttgagaaatctatgtggatgcaaagctgtagggttgggagtataggcctggtctgggaatataaatttgggaatctggaatgtggatagtaatcgaagacaggaaatggaagttattggcatgggggtcctc

SEQ ID NO: 206096 - DNA, 457 bp, Homo sapiens
caagaatttcatgggaggtaacatcattaataagaaagccaggctcacttatagaagagaggtagaaagagcatttgtgaaaaataaatcgaaaatataggaaagttttataaaaacaggggaaaataacagaataaccataggatctggtagcacaaaatggcaaaggctgcctctatgactcattagggttattcacaaatattctggtttacaaagcagatacaaacatggacttgcattagccaattgaacgtaatcaagtgacgtgtcatttccagtggtcgctttgcatgctatgcacagctcaccatgtctcttgacctaaggcaattctagaggcatgtgtcatatggagctttggtcatcagggtccctgagtgatgctgaagagcagaacccccttgccaacccaatatacacatttgcctgagtgaaaaataaaccttttttttgt

SEQ ID NO: 206097 - DNA, 354 bp, Homo sapiens
accataggagagaattttacataagatatatctgaaattagtgaaaatacatgcacaagtacatacaacacaatataccgtgttgtcaaagctagaaaacacacactgccatctgctgcctatcagagtgcaagtgatagacctctccggaaaacagcttaatagtgcctctcaaaattaccagcgtatcaacccttcagcactccctcttcagggatatagctacaaatgtgaggacagtaaaaaagggcaaataaacaaggttattaactacagctttgctatgataataaaaatgtataaacaatgctagtgtccagtagggtagtggctaatattacgcatcagtttaaa

SEQ ID NO: 206098 - DNA, 580 bp, Homo sapiens
agtattagttatttctctgccaggctttggtatcaggatgatgctggctgcataaaatgagttagggaggattccctcttttttttattggaacagtttcagaaggactgtataacagctcctctctgtacctctggtagaattcggctgtgaatccgtctggtccgggacatttttcgattggtaggctattaattatggcctcaatttcagagcctgttattggtctattaagagattcatcttcttcctggtttagtcttgggagagtgtatctgtccaggtatttatccattacttctagattttctagttgatttgtgtagaggtgtttatagtattctctgatgggagcaatatgcgcgatcctcccccatcagcctcctgaatagttgggattacaggccatatgccaccatgctgggcctcaaagatctttgaaaataatttgtgtctgctgaaaatctgtattgagttgtgttaaacaactccataggaattctagcagaggtcagcgtgtgccattgtgctctgagttagtattaccttccttctggtatatttaggtactcttactttt

SEQ ID NO: 206099 - DNA, 484 bp, Homo sapiens
taaaatttggagaaagataggaggagagcaacagcttgtttcacttcctctactccttccacactgcacgtgttttagaaaccgggctaatgaaatttacgttctattttcgaggctgtgctcagttatttctcaggaggtccagtaaataaagaattaatctatttgttttgtctttagtcaagttatgaaactagcgaattatttacattaagtggatttgttgttgctgtcgttgctgaaactagtgaaagaatcgagttttgtgctatgagtcatgggagcaaaacgtgagtatttagaagtggagaggaccacgaagaaggaagccctggtgacttgaagaaatcatggagagttctccggattcccacaaacctatggggtttagattccagctaatacttacacgggtctcagaaggacagagggcaagggttaacatctggctgatattaaagtctctgcacctcttaatatttta

SEQ ID NO: 206100 - DNA, 139 bp, Homo sapiens
aagacatcagcatctaatacagatattttacattgtaaatcttctctgttttagagaagtttgaaatcaacatattctgtatttcctattgtgtggataaaattctgatcgtttcaacatcagtgattatgagtaatga

SEQ ID NO: 206101 - DNA, 1716 bp, Homo sapiens
ttcctatattttatcaatgaatatttattgagcacctcttttattctagccattttgctaggtatcccaaggaaagcctactgtgttctgaaaaattggaattcattaattaaattaaacaggactaacatactatacttttccatccagagaaatgcaaaattataccttgattcaagacaaaatagtttgtccctcccagccatagagaaagctgagttgtttgttacttttagatcttaggtacagaatctgataaagtctaggtggttctgtataccagcccttgaatttataatcgtagagacttgccttaaatatatgatcagtttaggtaagttcgagaaattctgaagtgtcaattatgttgtattagtccgttttcatgctgctgataaagacatacccaagactgggtaatttataaagaaaaagaggtttaatggactcacagttccacgtgactggggaggcctcacaatcatggcagaaggtgaaaggcctgtcttacatggctgcaggcaagggagaatgagagagccaagtgtaaggggaaactccttataaaaccatcagatctcatgagacttattcactaccatgagaacagtatgggagggaaccccccgcccccatgattcaattatctcccaccaggtccctcccacaacccgtgggaattataggagtttcaatcaagatgagatttgggtggggatagagccaaaccacaccatatataaaaatagtatagataatagttatatggagtactacccactgaagggatacatgtttacctgttcccccaagttaggtagccagaagtgttgtgtttgcattgttggcacaacctgtcaacattaataataactaatttattaagtacttctgtgtgccagggattgttcctaagcttcctacaagaataaatttatttaatcttcctaagaatcctgtgaagtgggtacagttgagcatcccaaatcccaaatgctccagaatccaaaactttttgagcactgacatgatgctcaaaggaaatgctcactgaagcattttggatttttggattggggatgctcaaccgtaagtataattaatgcagatattctaaaatctgaaaaatcctgatatctgaaacacttctggtcccaatcattttggataagggatactcaacctgtactacttactctctccatttcacagatgaagaaagtgaggtagggaaaaagataagtaacttgcccaaggttacagagctggtaagtggcagagccccaggcagccttgctgtatagcttactgtctcctaaccattattctatgctacctttcatgggccctcatgttaagagtaactcttcagtttagcaaattattctgcattatatgatgagcttacatataatagcaataatagaccagaagcggtggctcacacatgtaatcccaacactttgggagaccagggtgggcagattgcttgagttcatgtgttcaagaccagcctggacaacttagcaaaactccatctctacaaaaaatacaaaaaaaaaaaaaattagccaggtatggtggtacatgcctgtagtcccggctactcgtgaggctgaggtgggaggattgcttgagcccaggagttggaggttgcagtgagccaagatcgtgacactgcactccagcctgggcaatagaaccagacattgtctc

SEQ ID NO: 206102 - DNA, 477 bp, Homo sapiens
actttatggaatttatatccctgtaaagtcccctcccacactgtaccaaggttagtctatgtgaccaacagaatatggtagaatatggcatgtcacttccaagattaggttacaaagcatactgcagcttcgatcttggtgtctgtctgtctgcttgtcttcctgtctgtctctcttggatcatactctgggacaagtcagctgctatgtcatgaacagccctatgaagaggtccaccttgtgaccaacagctaatgagaaactgagaactgccaaccaccttgtgaaggaggctgttctccaactgcttgggctttctccagccccagtcatgccttcagatgcctacacccctggctgacagtttgactacactctcaagggtgactttgagctaggacaaccctgttaaactgctcctggattcctgacccttggaaactgggtgacataataaatatttgttgttttaaactc

SEQ ID NO: 206103 - DNA, 412 bp, Homo sapiens
ttttagctcatcagctatcattagtgttagtgtattttatgtgtggcccaagacaattcttcttcttctaatgtggccaggggaagccaaaagattggacacccatgttctagaggcttaccacattcccatgacttatggcacctttcttcaatctttaaagtcagtaacattgcatttttctcatccttcttcagtagccatatctacctctctgactcttctgcttccttcttccacttaaggatggttattattaaattggatccacctggataatctaggctagtcttcctttaaggtcagttgattaacaacagtaattccatctgcaagcttattgccccctttactatgtagcctaaaatattcacaggttctggggattaggacatggatctttttgttgggg

SEQ ID NO: 206104 - DNA, 460 bp, Homo sapiens
ggacgctgtctagagcagaatgttcaagctgaggtcacccaggaccaggaaggagcaggcagaggtgctgccaggctgtgtgtgtctgcagtgccccaggggtagagggaggcagatagctgccttcccaccaagcaggcgtcagcgtctgcagcgcggtatggatacagcaatggaggggcacaaggattcctcctctagggtaagtaggatgcttgccaacttggaggattttagagcagatgtttgctgatgggccatgaacatgctgagcagacggcatacggcagcgctacgacatgcacaggtggcacttggttactgacaagctgagggtaggcacaaaacctgcactctcagtggcatgtccaggcaggtgtcctcactggctccgggtctcagttcatctcgacgctctgaccccccacattccagcagaacttggggactgtggagaggg

SEQ ID NO: 206105 - DNA, 884 bp, Homo sapiens
  misc_feature (376)..(376): n is a, c, g, or t
agaaactctccatttgttttccaaagtgtttgtaccgtttcacattcccaccagcaatacacagatgctcctgaactacgatagggttaggtccaaataagcccatggtaaactgaaaataccatgaatcaaatgatttacaatacccaaataaatccgtcaagttgaggagagtactgaatttgtatagcttgtataccatcataattttgaaaaatcataagttgaatcatggacaaggactgtataagagttgtaattcctccatatccttggcaacatgatatggtttattttttgcaattctaataggtgtgtattgggtattgcactgtagttttgatttccctaattactaacaatttaaaccatcctntttcaatataaaaaaaaaaaaaaaagaaaaaaaaaaaaagaaaagaagagagagaaaaaagagaaacaaaagaaaaaacgaaagagagggagacccgcaagagagagagaagagagaacaaagaagaagagagaagacagaggaaagaagaggggaccccgaaggggaagaaaggaagagaagggagggaggggggtcaggcgggacggccagaccacactctgcgacaccctcgcgagcaaacctctagtgctgaaaaacagggaaccagcgcagagcacaccactgtttcggtggccaaaccacaaccatcactagtaaacacacacgcattaccgaataccatcaacgtcttttcaacacgacccacactcaaagctacaacagtagtatcacaatatgagcaccatgcgcacaaaaatgcgtcttaacatccaacaactgcacacaatgccattgctcccagtgacaaactcgtgaatcacacggccactcacacactgaaaga

SEQ ID NO: 206106 - DNA, 711 bp, Homo sapiens
agtaggttcttgggccccatactagacttcctgaatcagaagtttctgaatgtatgcctaggaacatggatttaagcaacctgtattggccattcttatgtatgctgaggtccgaggaccactgccatgatcatggaaatctcatccacatcaatttttgccttctaaaaaagcgtgtacgtttatgggacaagaatgtcatgtcatctgtgtagctccccctgaacctgatctttgttgcagtgtggagtttgctacacatgcttggctgcatggggccctggattatccacaggaacttgattctagaaataccaaagcactgttgtttcacagcagcccgacgagtaggccctgcatggaatgaggcttttgctatgtcttcctgcatggtcacctctagtcatttgagagcttccattgcatgcagatcacacatagtaggagatgccatcaatttatcaattatttcaagcacactttaaattcatcttccttctgtctacctgagaattgctaatgttatattattcactgaccacaaggaaaatgagaaaattggttgctatcatttcactatctatagaagacaaagcactgtctttatttttacagtagaagtgctctaaagaatttctgtgtcaacttgagatacttttcacaaagacaagaagcattttacttttctgagagaaaagagaataatttaaa

SEQ ID NO: 206107 - DNA, 3701 bp, Homo sapiens
agcggtctccctgccgagaaatgggccggcccggctgcgcgcgggcagcagcggtggcggcggtggtccaagatggcggaactgcagctggacccggcgatggcggggctgggagggggcggcgggagtggggtgggcgacgggggtggcccagtccgcgggccccccagcccacgcccggctggccccacgccccgcgggcacggccgcccggctgccgccgtcgcgcagcgattggagccgggtcccggaccacccgagcgggcagggggcggcggcgcggcccgctgggtcaggctgaacgtgggaggcacctacttcgtgaccaccagacagaccttaggccgggagcccaagtcatttctctgccgcctctgctgccaggaggacccggagctggactcagacaaggatgagacaggagcctatctgattgacagggaccccacctactttggtcctatcctcaactacctccgccacgggaaactcatcatcactaaggagttggcagaagaaggtgtgctggaggaagcggagttttacaacatcgcgtcccttgtgcggctggttaaggaaaggatacgggacaatgagaacagaacttcacaaggccccgtgaagcacgtgtacagagtcctgcagtgtcaggaagaagagctcacgcagatggtgtccacgatgtccgacggctggaaattcgaacagctcatcagcatcggatcttcctataactacggcaatgaggatcaggcagaattcctctgtgttgtctccagagaactaaataattctaccaatggcatcgtcatagagccgagcgaaaaggcgaagattcttcaggagagaggatcgcggatgtaaactaagaccccgaaaactccagaccttcaggagagcagtcagcagagcccctctgtgaagtgaaaccttactcctgtccagtgaccgagccactgcaaagcacagctgatcctggccccctgtgaagaagtgttctggtcaaaactaaaggaactccctccccacctgcaggactccgaagacagtgcgacttctggctgcagaataccttttcagaaacctgctttcatttgcttagccagtattagaacagatctttacaacagcagctgggctgggttcccagtcggagcctttcggggatctgggggatgagggcggaaggcctagctccttggaaatggcctgtactttaaggacgctggagccaagaggattgttcccgtgccgtgccatggtttcaccctatgtgtgccacaatggacgttagcagctgcttcggaacaccgtccctcctatgcaccctccaagacctgcagcagatgcaaagggttctagctgcagtttgtcgaattgaggttttaggtaaagcatagagttgccagagtaccccgcattcccatgaatagagcctccaaggaaagggaggatggggtgtcctttgttgtggttggaggttggtgatcattgctctggatttggggctcccggctgccaccacatgcagctttgcctcagctttctccagcagccgggaccctctggagagcttgttttccctccaagaagaggtttgagacaggcggcatcctgcactgagtcagacaagtgggagctgtaggaactgcacctgcagcctcttcttactccccattgaccctgtcttccttccctggctttttcaactggaccaaagatgaaggcacttatggaccctttgatggcttggagtggggaaggctgtttctttgaaagttgccaaatgtgttacgttgtgtctcagagagagttatttctgtgactctcttggaaatgccttgactgaatgtgcaatatttgtgtctcttggtttctaaccttggcggacctgctcccctctgtactgtccccagtggtatgtatgtatgtgctaggcagtctggggaccccctgtgtctctgaccacccccctgacccccgccattactttcttttctggagtgccatgctggcgaggatccggatgcggcagcaccctctttcgggctgcatccacagagtttgtgtccacactttctctccgagcatgtgggtctcgctgagcagtcatggaatgcggtagagccaggggaccctgtctgccccgaataactttcagtagtatggcagatggcacagagaaagggaaggggctctggggacttctccttctatgaaagccgcctcgagccaggtgctcctgggcaccttcagaagtgatgtcctgtgtgctccacagctcacctgcttgccaaggtacgtctgggtagtagtttctggaaatgactgcagactgtgccaaatgtcttttgagcttctgacctgaccatgcccagatggcataacttttccctaggaccctcagtctccttgtttctctgtatctgtagcatagcatagaacccggtatacaggggtttctgctgacacatcaacgtctaaacacctatgcgccacattttacagctgtaaagtgttagatgaactgccgtcctcagtaaaagcagccaccccttcaagagtcacaggcatccatccagtcgtatctttcagagaaaaaaaaagttagatgtagccaaggaaagtagtgatcacgggaaggactgctctgagccgggtaggatggaggactttggaagaggcgctccttggccaggtccaatgagtaacatcagactgacagaggaaaagcagcttggtttgcggccttgtgcccagtctcgttgaggcgcttgtccctgtctgctttcctggggcatgcctgatcagcgtgggctggagctcctagaccaaccccagctttctcaccaggttcagcaaggaggcctgggggtcagacaccaatgttgagcacctcctgagggcgccgtttccttcattcctcttagattccatagttgccgccatgaaaagactgctcttgagccccaaggcacaggcacgtgctctgggaaatagacaggagtggtatttccgccctctcggagggctggtgttcaccaagtttccctcctcgctgcaacccaatgacacctgtattgttccagcgctccaggactctgggttcttaagatttctgggagcgttgttcacccaccccctttaggaaccaggctggtgttcttgcttgaaagcgttgtgccctctgagtgtctggctgatcacatcagagaggtctgcgtggcagtttggggctgtcacgtgaccagtgacccacactctctgctgcccagtactgccaagtggggagggtcctgcctttttctctgccccaggtctgggacgcaggtgatgccagccaggcccaggagtgcccagcatcccccaactgatgacacagtagcactgattctgtcttttcctcagaatctggcctttttccatggcaatgaggtggggcccagcctcctctaaagtgactttgtttctgcacagttgtaactgctcttggggatgtcagtgaggctgggagcagggagccacgggatgctgagagaggaggcccgagaggacaccccaccctccagcgtggcctttgatccagacttagggacgaggctgtcactggtgggcaccctctgttcctgtttgtgtgtttgaatagtctgaaatgctgtgactttttttgtgtgaataaagatatgaaacttctgaatctc

SEQ ID NO: 206108 - DNA, 3582 bp, Homo sapiens
agcggtctccctgccgagaaatgggccggcccggctgcgcgcgggcagcagcggtggcggcggtggtccaagatggcggaactgcagctggacccggcgatggcggggctgggagggggcgccgggtcccggaccacccgagcgggcagggggcggcggcgcggcccgctgggtcaggctgaacgtgggaggcacctacttcgtgaccaccagacagaccttaggccgggagcccaagtcatttctctgccgcctctgctgccaggaggacccggagctggactcagacaaggatgagacaggagcctatctgattgacagggaccccacctactttggtcctatcctcaactacctccgccacgggaaactcatcatcactaaggagttggcagaagaaggtgtgctggaggaagcggagttttacaacatcgcgtcccttgtgcggctggttaaggaaaggatacgggacaatgagaacagaacttcacaaggccccgtgaagcacgtgtacagagtcctgcagtgtcaggaagaagagctcacgcagatggtgtccacgatgtccgacggctggaaattcgaacagctcatcagcatcggatcttcctataactacggcaatgaggatcaggcagaattcctctgtgttgtctccagagaactaaataattctaccaatggcatcgtcatagagccgagcgaaaaggcgaagattcttcaggagagaggatcgcggatgtaaactaagaccccgaaaactccagaccttcaggagagcagtcagcagagcccctctgtgaagtgaaaccttactcctgtccagtgaccgagccactgcaaagcacagctgatcctggccccctgtgaagaagtgttctggtcaaaactaaaggaactccctccccacctgcaggactccgaagacagtgcgacttctggctgcagaataccttttcagaaacctgctttcatttgcttagccagtattagaacagatctttacaacagcagctgggctgggttcccagtcggagcctttcggggatctgggggatgagggcggaaggcctagctccttggaaatggcctgtactttaaggacgctggagccaagaggattgttcccgtgccgtgccatggtttcaccctatgtgtgccacaatggacgttagcagctgcttcggaacaccgtccctcctatgcaccctccaagacctgcagcagatgcaaagggttctagctgcagtttgtcgaattgaggttttaggtaaagcatagagttgccagagtaccccgcattcccatgaatagagcctccaaggaaagggaggatggggtgtcctttgttgtggttggaggttggtgatcattgctctggatttggggctcccggctgccaccacatgcagctttgcctcagctttctccagcagccgggaccctctggagagcttgttttccctccaagaagaggtttgagacaggcggcatcctgcactgagtcagacaagtgggagctgtaggaactgcacctgcagcctcttcttactccccattgaccctgtcttccttccctggctttttcaactggaccaaagatgaaggcacttatggaccctttgatggcttggagtggggaaggctgtttctttgaaagttgccaaatgtgttacgttgtgtctcagagagagttatttctgtgactctcttggaaatgccttgactgaatgtgcaatatttgtgtctcttggtttctaaccttggcggacctgctcccctctgtactgtccccagtggtatgtatgtatgtgctaggcagtctggggaccccctgtgtctctgaccacccccctgacccccgccattactttcttttctggagtgccatgctggcgaggatccggatgcggcagcaccctctttcgggctgcatccacagagtttgtgtccacactttctctccgagcatgtgggtctcgctgagcagtcatggaatgcggtagagccaggggaccctgtctgccccgaataactttcagtagtatggcagatggcacagagaaagggaaggggctctggggacttctccttctatgaaagccgcctcgagccaggtgctcctgggcaccttcagaagtgatgtcctgtgtgctccacagctcacctgcttgccaaggtacgtctgggtagtagtttctggaaatgactgcagactgtgccaaatgtcttttgagcttctgacctgaccatgcccagatggcataacttttccctaggaccctcagtctccttgtttctctgtatctgtagcatagcatagaacccggtatacaggggtttctgctgacacatcaacgtctaaacacctatgcgccacattttacagctgtaaagtgttagatgaactgccgtcctcagtaaaagcagccaccccttcaagagtcacaggcatccatccagtcgtatctttcagagaaaaaaaaagttagatgtagccaaggaaagtagtgatcacgggaaggactgctctgagccgggtaggatggaggactttggaagaggcgctccttggccaggtccaatgagtaacatcagactgacagaggaaaagcagcttggtttgcggccttgtgcccagtctcgttgaggcgcttgtccctgtctgctttcctggggcatgcctgatcagcgtgggctggagctcctagaccaaccccagctttctcaccaggttcagcaaggaggcctgggggtcagacaccaatgttgagcacctcctgagggcgccgtttccttcattcctcttagattccatagttgccgccatgaaaagactgctcttgagccccaaggcacaggcacgtgctctgggaaatagacaggagtggtatttccgccctctcggagggctggtgttcaccaagtttccctcctcgctgcaacccaatgacacctgtattgttccagcgctccaggactctgggttcttaagatttctgggagcgttgttcacccaccccctttaggaaccaggctggtgttcttgcttgaaagcgttgtgccctctgagtgtctggctgatcacatcagagaggtctgcgtggcagtttggggctgtcacgtgaccagtgacccacactctctgctgcccagtactgccaagtggggagggtcctgcctttttctctgccccaggtctgggacgcaggtgatgccagccaggcccaggagtgcccagcatcccccaactgatgacacagtagcactgattctgtcttttcctcagaatctggcctttttccatggcaatgaggtggggcccagcctcctctaaagtgactttgtttctgcacagttgtaactgctcttggggatgtcagtgaggctgggagcagggagccacgggatgctgagagaggaggcccgagaggacaccccaccctccagcgtggcctttgatccagacttagggacgaggctgtcactggtgggcaccctctgttcctgtttgtgtgtttgaatagtctgaaatgctgtgactttttttgtgtgaataaagatatgaaacttctgaatctc

SEQ ID NO: 206109 - DNA, 1130 bp, Homo sapiens
gcccctcctttgtgtgagcttccagggtctgctcggtccagcccagacaggtactccatggaggcagtagatatgaacacagaagacggttttgcatttgaggaggaaagtgacttcaatgggaacgcacacccctcagacacctcggagctatttgaggtgaaggcgcaggccagccggatgcagcgcctgctgggtccttctgagaccagctcactgagaaacagccagtctgaaaacagctccctcaataacatgccactacgtggtgggctgtctgtgcacacatgcagctcagccagtcaatctgaggccagctccatggtcaacttcccagcctactcagtccgctctgagtccagctcggccttccagttctctgacatcatcgaccagttagagcagctcagctacccacccacgacggccgaggactccagcagcacagagtcagactcatgggactctgaaaccgaggcccccctagacataagccttttcttcagcaacccttttgcacacacaagtggagaaagagtcccttttgatttacagaacaatttaaagaatttgactccaggagagcaaatagataaaaacccatcttgaccactctgggttcctttacaaggcaacccactcacccacgctgtgtggtttagagctcagaattgtttggtttaaacacagaaagtgactttcatttcatggatagatattcaatttttttttaatttcctgatttattatacttttttgaatgtcaaaaaatttgacctttcacttggaatgacgtaaaagctatgcctccggtcttagacctgagtactccagccagtcctcctagaggaccgataaattagtctttgtagtttatgttttttgccatatgctttgattcaagtaagaactggtgctatacattctgaatgttacacaattctgttcatgttgatcttcaatagaatatgtgtattacactattgatgctgcttttcaagatgagccctgttgcctataattaactaggacacaggttttgtctcacttgtccagccactgcgctacacaaaaccttgagtatgcctctacagccctaaccctgggaaagatggccataggccatggcc

SEQ ID NO: 206110 - DNA, 172 bp, Homo sapiens
aggagtgacgtgacctgtggatgctgaggaagtgctagtgacaggaagaggcgtggtgtcacctgtggatactgaggaagtgtcggtgacaagaagagaggtggctgacctgtggatgctgaggaagtgtcggtgacaggaagaggggtggtgtgacctgtggatactgagg

SEQ ID NO: 206111 - DNA, 556 bp, Homo sapiens
tgtctaagagtaattttactgttatttccccttcacttggcttgagaaagagatgtcatctcttgcatagggagaagagcttgcaggcttacatcattaacactcatctcctggtgctgctgactctcttgtcaccctccccagcattctcaggtgaatgggggaaggtagggtgaggcgatgctgtggacagtgctatctggttctactgcttcttagaatgccccgggggacatgcttcagttgctagcagctttgtatagaatgtggtacataatacttctttgtcttcagttttggacccaagtcataggacaagttccagtcaacaccttattatgtaatcagtacaaccaacagatgagaagagaaaccacattgttgataggctattgaattatatggcagatgagcaatctaaaaaaagtatcctaaatttgggttaaataattaataaaaaagacatttcatctatagtaatagaaaaaaaggcaagaatagtggtatgggtttatgtctattggtgtcaaaaagtccactttatagaatatatatt

SEQ ID NO: 206112 - DNA, 423 bp, Homo sapiens
cagaaagtccaagcatgtcatgaatggtctgtgtaagtcacaagaataggatttataagaaaaaaactgaaaacttttatatgatcaagttatctaaaattaatgagaaattataatggtctctccagggattgggcttgatgtaaaaaaagaaaacacttatacactaaataattagaacaataatattaattttcttaagggattgatttactcaataaattacaggagattatagttttcttaacagaaagttcaacttttattgcatcttgtttttggttttctctccccttttaaaggacgtgaaataggaacactcttcttcaattcattttcagctcatataagttttgtttccccttgagttctgtttgttgtagcctgatgctaaaatgttttcttaaaggtctaaaggaaatg

SEQ ID NO: 206113 - DNA, 366 bp, Homo sapiens
cctaaaatcctcataagtttctgagcagtaggggcactaggaggctcttttgttccaatatttggtgtctgccccagttcctccgacagagttcctaatacccttgtagataggggtactagaagaatcttttgttctatgatttggtctttgacccccattcttgtcacagagctccaaaatcccttggaatttcctgggtgataggagcatcttttattctgatgaggcgactcttagtgggctcctggatggtgctggtcaccagaaagaccaagccatgaccataaacttggagctttcagtcccagccctatccttcagggagggagaggggctggggattgagttaataattgaccatgc

SEQ ID NO: 206114 - DNA, 206 bp, Homo sapiens
gccgggttgtgtgcggcctcgcgctcccctggctaaatcgggaagcgaaagttggatctcagcccctcggggagcaactttgtcggccctggcggcagctgcttgttctacgcgcccgggcagccgggggcgccgccctctgtccctcctcgctggccgcgccctcgaggggctcccggcccttggaggccgcccttctccccggg

SEQ ID NO: 206115 - DNA, 763 bp, Homo sapiens
tcccgacaggcatcacccagagcacacccagagcagcctgcagcggcgtggaaggggcttgcactggccccaaggtgcaggggagccctgcctgcctgtctcctgctaggcttgcctgggctcccgcctacagaccatgagaattcttctagcatgggaagagagtctgaccaaagtgacaacagccatcccctgactgcccagcactgttcacttcttcccagatactcctaccagaccaggtcagcccttcttttactggggggccagaaacgtccccccaatccagtccaggactccagatgatgcccatttctctgccagtcccagcaatctcccttctcagcatctggcatcctgggatgtaccctaaagttcactggctcagagcaccctaactatggctgcggcgaggggggagggcgggatcaggtcggcgtgctgcacatgggtcctggggcgggaacagtattctggctatgctcctgcagctgggccctcacaaggggcagcgtctgcaccctctcaaggctttgcagataagggtttattgaagagggaggtgacccacaccatccccactgagggatctggttagggggctccccccagaatgtaggcaagagggcagcatcttgatagtgagggttggtcacccgggaaccacagtaacgtctgcagggaccttcccccagtggcacgcacttcccagaatgctcacggtcaccctcagctttcaactgtggggacctaacgcgtctcc

SEQ ID NO: 206116 - DNA, 346 bp, Homo sapiens
aagggcttttaaacaacttcttcaggctaatctaagatactagcctcaacagtatttttgagaagcgagttttatatgcaaattgtattatggtttatattccatgtatatccaacaaggggaattagctgactgaggatgagaatagggaaaggcagggaatcaaaggacagtgggaagagagagggaaggacgaggatcctagaactcagtggtattgaagtccacagtagtgtttgtttctttccatgtatgctttttccactccaagtcacaatattaacaacaggattattttgacatattacatttctctttaggggaaaataaatggacatgcttatgg

SEQ ID NO: 206117 - DNA, 583 bp, Homo sapiens
agcctggggctgtgcccaccaactggccctccttcagccctcccctccacagtgcctactctccccagcagggcagcccttgagggctggctcctggcttcagccttccctctgctgcatatacctcacctgtctgcttacagggcatggctctgtagcaggccctgtgctcgtcctagtaaagcagtgatgaagcagactctattcctgctttcagggaccttctgggcaggtggacagaaccattagctgaatgaccacaaacagcatggtagctgttattttctattaataatagctaacatctatagaatttctgctctgtacctggccccactgtctcaagatgtacaggacactgtgggagccaagaagatgacgtctagaggaggtgacatttttagagctggatttaaaggatgggtttggacttcagctaatatacaaagagacttgagctttctatgaatttttgcccatttgatggatgaaaatgagattatcatttgatttgtgtttctgtgtaaggtcgtacatctttttgaatgtttacaggccatttgtatttctttttcactgaact

SEQ ID NO: 206118 - DNA, 273 bp, Homo sapiens
actcctgtcctccgtggcgcttgggtgacagcagagcagagccgatgtgcctgctcctggtcatgggctgttcgtgctgtcatcgctttcatttgccccatccccccaatttggacttacccagaatccttgggcaagctagatggctgccaaagtttacttagcgagatgtgcctgcgtgacttgagtagagacctgcttctgagaaagtcagaagtgcattccaaagtcaggagcgtgacctccccggaagcccagctaatccaggtttta

SEQ ID NO: 206119 - DNA, 492 bp, Homo sapiens
tcagttatggccatcaggtgacgtgtaaaatgtttgtccctgaaattcaagtggcccctgcaaagcgatactcctaagtttgccttttataggaccagaatgattgttaaaaccagaagccaaattcattaatttcttgctgtgatatataacatagccatacaatactacacatttagtaaatgtcagcagtattaatagaactgtctgtaatataattgagtaagatttctgtgtataaaactaaattatgatggatgagttactcaaaggatgaaggaaaataacctttaagtagtgtcaaaggctgggcggcactgggttgtatacagagaatgaggtactgagactgaagcactagtagctgggctaatgtgcaaagacaggagatatatgggctgatgggccaggcctctaggagaaccaggcaatgaaaggttaacatgtagctggaggtctgcaatgagtttagcagtccagagcagattgctt

SEQ ID NO: 206120 - DNA, 435 bp, Homo sapiens
atggccagaggtgaaatcctgacagcgagagttgctttgtaaattaacttatgagggatatagtggattaaaatgtctttattgcaccaattatgaaaaattataggcaaaatacagttaaaacaagcaaaatatttcagcaagaaataaagcacacagctttgcactcctaaaaaatctatatagtgtatagaagataggctataaagggctataaagtttagtttatgaccagggaggttgttcagaaggatgatagttgagaggaagctaacctttattgaacttctctctgggatcagaaactatactatgggctgggcgtggtggctcacacctgtaatcccagcactttgggaggccaaggtgggcggatcacctgaggtcaggagttcaagaccagcctggccaacatggtgaaaccccatctctact

SEQ ID NO: 206121 - DNA, 455 bp, Homo sapiens
aacaacccagatgtccttcagtgagtaggtagttaaacaaactatggtactttcagcactactcagcaacgaaaaggaacgggctaatgattcattctacaacctggacgaattatgctgagtgaaaaaaagccaatcccaaaagtttcagactgtatgattccatgtatgtaacatttttgaaatgacaaaaatcatagaaatggtgaacagattagtggtttccaggaggtcaggaaggtggggagtggggagtgcaagggagggaagtggatatggctataaaaaggcaacacaagggatttgtttgatggcaatattctgtatcttgtctctatcaatggcaacatcttgtgccatacttttgcaagatagcacccttgggggaaactggataaaggggacatagtatctctcaggattgtgtcttccaactgcatatgaaaatacagtta

SEQ ID NO: 206122 - DNA, 475 bp, Homo sapiens
aacatcatggtctggattcaagttacagcattcatggtaatgctcagaaagataataacatactccaagattccactgaaatagtggttgctatttttttttttagaaaatagcttgggactctggtgataatgcaaaatgggcttgctccttccaagacaatctcctcatgaaaccatttgtcaaaaattagtgttctgggactgggcacagtggctcatgcctttaatcccagcacttagggaggccgagacaggaggattgcttgagcccaggagttcaacaacagcctgggaaacatagtgagactctgtctctacaaaaaattttaaaaattgactgggtgtggtggcatgcacctgaggtcctagctactgaaaagggtgaggtgggaggatcctcgagcccaggaagttgaggctgcagcaagccatgatcatgctgtagcctgggtaatacagccagactctatctc

SEQ ID NO: 206123 - DNA, 321 bp, Homo sapiens
gtctttcttgtcttagggcctgaagggtaccaagcatggacttgtcctgcgacatatacacaggcatggaccacagtgggcctggagggttggggtcacagctggtgtgccaggaatggcccatgggacacagggtaatttattttcctgtttgtttgcataggtgagtgttatcacatgaatgttacctgccatccttagttgtgggtatattttggaactggggttggaggctgcttcagtactgaggagtcaatcgggatgcttcacttctccaaagagatggctgttctaatcaagatattacttaggtggcctgga

SEQ ID NO: 206124 - DNA, 533 bp, Homo sapiens
gaaggagacgttgccttggaatgtaggggatttgagctgcagaggaaagagaagacacattaattgcctagtaaacccttcctcaaggacagcaggaacgcaatagattcttacaaaatgaaataccatgtctcaatagtccccagtgtccattctcttgcttgtctttacgtaacaattagtgattcagctgtttggtggtctcttcacacggacgcgcatgaaatttggtgccttgactcggaacaggggacctcccttgggagatcaatcccccatcctcctgctctttgctctgtgagaaagatccacctacgacctcaggtcctcagaccaaccagcccaaggaacatctcaccaatttcaaatccggtaagcggcctcatcttactctcttctccaacctctctcactgtccctcaaccactttctcctttccactcttcaatctctcccttctcttaatttcaattcctttcattttctgggagagacaaaggagacacgttttattcatagacccaaaactccgg

SEQ ID NO: 206125 - DNA, 449 bp, Homo sapiens
aaagactcacgaggagttagacttaagaaagagacatctcagcaaatactcgcaataaaatgtgccttaaattctatatcagagatctggccaaagtgctgtgggcatcccagcagaaagccagtaattatatctgggttgcctaaaacagaaaactatgaggacgctgatgaagtagttaaattgtggaagagaacaattacaaaacagtatgtacatggccaggtgcagtggcgtgcacctgtagtcccaactacttgggaggctgagctctacagtaatgcttctcaaactttcagcaacacctaaagacatagattctggggtgagaccgagagtctccactggtaacaagtgctaagtgatactgatgctgctggcccacggagcaagcctggaattgcaatctaaatgtaggcattgtgacgggatcaacttgcaaccatcgt

SEQ ID NO: 206126 - DNA, 226 bp, Homo sapiens
taatcagagctgaactatgtggatggtttcggtgaatatttcattcaggcagggtgaatccttgccaattaatctcaccccgtacttggtatctccctggcagataccacacttatgcctgccacattgtctcttcctgggtagattgccagcttctggctcttgagccccgttcttatctttcacatagaacgtcccctttctgttcacataattcagcgtctga

SEQ ID NO: 206127 - DNA, 653 bp, Homo sapiens
ctgaggaagctgagggacctgggtttcagggctcagtgcagagatcaccccaggaggtgggctgctttccccccagggggctaggacctgagatcgtgtcacctgccctccgtacagccctgcacctgcatctgtgccgtggagtgtgttgatgggtgggcaggcgctgctctttcccctgacctgcagccccacagctagccctctttctcatgccagccttccgtgtcctggccctgctgctggagctgcacatgccaggctctgcctaaatgcagatgactccaccaacttttgctccactcctcacccccagaactgttgttgttgttgtttaccaactatgaaggacccaccacaggtagagaaccgagtactttgcacacttggagcccctgctttcaagacctccacagcctacttatctaatagtcattgcatgaattcctacatatgtacatgtataaacatgaaagcaatggcgaaaatgcatttccaatcatacatatgcctaattgtgcacgctcaccgcaggatagacacaaacgcctccaatgggcacacgtatgtcaccaagacctccccgcaggaccctgcttggctactctgagagcggctctcatggcctggaaagaagcccacattgacacagg

SEQ ID NO: 206128 - DNA, 395 bp, Homo sapiens
aagttcggcacgacgtggacacacgaatcccatcctgtgtgccagacactcttctaagctctttacctgtttgaacacacttgatcctcaccctgagcttacaggtaagggatagtattgtcctcattctgcagaggaggacacaagagaacatgcttgattcctgcatgcacagagggctgtgcagcctctggcaaaagggcagcccaggattgggctacttgacataagaacagtgacactgtttgcctcagaccctgggaatgacagaggcccctgtatatacactttcttcacttggatttacttggattttgcctctagcaggatctggttgtttctgaagctgcaaaatctaaaccgttgcaaaacaacaaaagacgaaaaaaaaaaaa

SEQ ID NO: 206129 - DNA, 133 bp, Homo sapiens
taaaagcactgagaagcatagaatgcaaatttagaaaagagcttaagagacatatcagacatggtaaaaggtttaacacacatataatcaaattttcctagctctgttcacggaaagggcctgggagctgcaa

SEQ ID NO: 206130 - DNA, 554 bp, Homo sapiens
attcagtaaatgttttatggtcaagcttcccttactctttttcttaactccatctatcctttccatactattgaaagagaaaacaagagggaaggctgtactggaaacctacctcagcttctaaatgcctcagatgaaatatacaggttatgtggcagtagaacatgggcaaaacttcttgtagtgagtgaggactgggatttggtcaggaggattttgcttgagggtgaagagggatgggacagaaaccgttagttaaacaccttagatctgtcagaagaccctggaggatttacttggggcttgtttcctgacaccgttatcatcagcctctatttttatttcctggttatcttaatctattttctttaattttctgtttctaattactaacattattttagctgaaattttattgactatcaagaacatgtcacttggaatcatgtagctgatgtatgcatattggataaagaaaacccacttataaattaaatgaaagaaatggtgtttcttgctctcaacaaagttcttcaataaatctgtacaacaaa

SEQ ID NO: 206131 - DNA, 465 bp, Homo sapiens
ccaaagacttttgtccgcaagtttccaggacagtttgtttatggtcagagtcttagagaagggaatgaactgcagggtccacttacaaaatttacaatttgagaaaccctagttgcctcagcatcagttatgcctctttgcacctgaactgggaccaaatgaacagaagcaacagtgaatgagtgttgaagagggtgtgggatatgatgaggtttctcttcaaataacctgatcaatcttttatcctttagttcttggtacccccctccctccttttttcccttttctccttttttttcttcctgcctttgttagatgcccaggcacgccgcgataccaggcattatcaataccggctcacattcctttccttattaaaaaaaacaacaactaactttctagctaattaacagacaccccttcccctttcctctctgctttcttttacgtgcccaccttatctta

SEQ ID NO: 206132 - DNA, 395 bp, Homo sapiens
ttcctcagtaaggacagacttaacagaattacaatgtttcctttgcaaaagatgagtgttaaaagggaacatgcagaaaaatgatggcttacatgggatgaataaagacttagcatgagccatcgtgtccagccggcctctcttttagaagactctgtcccattgtcctttaagggcatgtcacttccctggaggtcaaaatcatgtcatactagtttttgcaatccacagctccttgcacaattcctggcccagggagtgggtacatcatcaatgtgtgaggaacagactgccatgaaatagtgtaaaaaatccacatagtacacttgtgagaaaagagataagaaccagaattttccaagcaaagggatagagagctacaaggtggaattcag

SEQ ID NO: 206133 - DNA, 230 bp, Homo sapiens
gtgcagaagagcaggaggctgagctgaacctatgccagcccaagaccaggccagactctgctgtccttgtgagggaataggggttcctgattttgtagcttttcacaaaatggaagagacagaaaacaagttccagatcttgaaccttccccatgtgtttgaaggcagtcaagggtttcctgattttacattcaagatacttacactcagggccgggcatggtggctcac

SEQ ID NO: 206134 - DNA, 453 bp, Homo sapiens
cccagcatcaatcaatactcctcccatttggctcatgtatgaaggctcttaaattgggagtttgcaaaaatggccccaatttgccctccaaatattccttgcagattaaagtactcccaccagaacaccgagccatggtgtggactgcttgtgcaattaaggggatgcagagatgaagttggaagcactttctgtgttatctgtctttatgttttgctggtgaagttgggagaccactttcacccctcaccagattgtatcctcaccccatctgaccttatttctgctcacaatctatgtccccgaatgaaatccaagatgatggacaagatcttcctcatgacatgaagcatctgctcagctggagactgaatttgatgtaaattcaaggggccatgcacacaggtctgtgagtgtcactttctggtttggactcaggtcaataaaacactg

SEQ ID NO: 206135 - DNA, 343 bp, Homo sapiens
agttggaaatagaagaatgagaaaaatctataatcaggccaaacttgagaactttcctgtgcttcagcactgtaattctgctgacctaatgttctcaaaagaggcacttttactttctattgtgcatgtatgattgttgttttttgcttttgagggggcttttgtgtttgtaataatgaagcagaagaaaagtgcagtagtagataaatgatcacaacatgttatgcaattttattttataaaattttaaggggaaaagtttaactctttgtaaatcatttcttagctctggtaaaatgcttatattactcctctaaaacatgctcaattcaggcctttgtct

SEQ ID NO: 206136 - DNA, 499 bp, Homo sapiens
agtgtggtttgaactcctgggttcaaggaatcctcctacctcagcctcacaaagtgctgagcttacacgtgtaactcatagtgaatgaataaacaaaatgtagtctgtatatacaatggaatattattcagccttcaaaaggaatgaggtcctcttacatcctacgatgtggatgaatcttgaaggcattatgctaaatgagagaagcatgacacataaggactaatgctgtatgattccactcatgtgaaatgataatatatttataataggtctatccaaagagacagaaagctgactagtggtgccagacagtgggaggcaagaggaatgaggagttacagtttagtgggtatggagtttcctttggaaattaaaatattttgaagctagatagaggcaatggttgcatagcattgtgactttattaagtaccactgaattgttaactttaaaatgattaatattatgctatgtaaattttaactcaataaaagag

SEQ ID NO: 206137 - DNA, 387 bp, Homo sapiens
aagttgcttcatgtagtgcttgctaaggagtgactatatcaaaggctcacaccactggggaaaaatggttacacatatctccgagggtaaaagtgttaaatactgaggttactgctagttttatgatgaaaagacctcaacagaaagctacttttctattatctctcttgacttttattcaaacacaaaaaacatttgagatggaaaataatgcatgcaaatagtagtatgatttctgtcctattgaaggtcttgaaggtctctaatgatctaattgccaagttcagctgttaccaagttcaacttttgctcagtcttcattctccttgacctctttacagctttacactatttacactgcctcattcctagaactcttctcgaggc

SEQ ID NO: 206138 - DNA, 238 bp, Homo sapiens
taaactaacacttaccaatgtgagaaatcaagatttatggggaaatcaaaccaaaagcaagactgaaaaaatattcactatctattcttactctctcaatatcatagttgtaatcaagagccaataagtcagtctggttactcattcctacagcttctgatttcctttttttcctctggggactttccttggcctgcagccgcgctggcgcccaggccagacaggtgcagcgtagaat

SEQ ID NO: 206139 - DNA, 344 bp, Homo sapiens
ctgctgagaagaaaattaaaaagtatatccagaatttactctgcacagtcttctgatgcggaaatcttaggcatttaacattcttaggttttgtgtttcttagagtacattgtggcagaaatttgttaggaaaggtaaaaacgtgcaattacacgtggaataacttggtgaagcagaggtgagatactaacccactgccatttaacactgcagagattattttatagtggtggtgggagaaggtcctgtggctgagtgctcacaggtaatgtttttgaaggatattttgaaaacagtgtaaatttttgtttgagaacaaacaataaaatctttttcaagtgaaa

SEQ ID NO: 206140 - DNA, 304 bp, Homo sapiens
gtagagacaggatctcactacgttgcctttaagtcaaaaatttgtctaatatgagtatggctacccctactctttattcattattatctgcatggaatatctttttccatcttttggctgtcagcctgtgtgtgtccttaaatctaaggtgtacacatgataaaattggagcttttttttttaattattcattcagccactcagtgtgctttgatttgggagtttagtccatttacatttaaagtaattactaataggaaaggacttatattgccttttttgttgaatattttctctccgtgtt

SEQ ID NO: 206141 - DNA, 992 bp, Homo sapiens
  misc_feature (652)..(652): n is a, c, g, or t
  misc_feature (664)..(664): n is a, c, g, or t
  misc_feature (713)..(713): n is a, c, g, or t
  misc_feature (716)..(716): n is a, c, g, or t
  misc_feature (733)..(733): n is a, c, g, or t
  misc_feature (736)..(736): n is a, c, g, or t
  misc_feature (738)..(738): n is a, c, g, or t
  misc_feature (744)..(744): n is a, c, g, or t
  misc_feature (751)..(751): n is a, c, g, or t
caaaccacaaagacattggaacactatacctattattcggcgcatgagctggagtcctaggcacagctctaagcctccttattcgagccgagctgggccagccaggcaaccttctaggtaacgaccacatctacaacgttatcgtcacagcccatgcatttgtaataatcttcttcatagtaatacccatcataatcggaggctttggcaactgactagttcccctaataatcggtgcccccgatatggcgtttccccgcataaacaacataagcttctgactcttacctccctctctcctactcctgctcgcatctgctatagtggaggccggagcaggaacaggttgaacagtctaccctcccttagcagggaactactcccaccctggagcctccgtagacctaaccatcttctccttacacctagcaggtgtctcctctatcttaggggccatcaatttcatcacaacaattatcaatataaaaccccctgccataacccaataccaaacgcccctcttcgtctgatccgtcctaatcacagcagtcctacttctcctatctctcccagtcctagctgctggcatcactatactactaacagaccgcaacctcaacacaccttcttcgaccccgccggaggaggagancccattctatancaacaactattctgatttttcggtcacctgaagttatattcttatctancangttggaataattccaantgnantactantcggaanaaagaccactggatacaagggacgggccggcgcacgacaaccaggcgcgcacagggataacgagcgagcacaccacacttctccgcaggaaagcacaaccacaacatcatcacccggaacagaaaagcaacaacgcgcaaaataaggacgcccccaggagccaaagagtcgtcgagaaaaagacaaaacacgagagagagatacaaaaaaccacaaacggaccagcacagaaagagcagac

SEQ ID NO: 206142 - DNA, 638 bp, Homo sapiens
  misc_feature (298)..(298): n is a, c, g, or t
  misc_feature (310)..(310): n is a, c, g, or t
  misc_feature (359)..(359): n is a, c, g, or t
  misc_feature (362)..(362): n is a, c, g, or t
  misc_feature (379)..(379): n is a, c, g, or t
  misc_feature (382)..(382): n is a, c, g, or t
  misc_feature (384)..(384): n is a, c, g, or t
  misc_feature (390)..(390): n is a, c, g, or t
  misc_feature (397)..(397): n is a, c, g, or t
ggctctagaggacccccgctcactcggcaaatccgtcctaatcacagcagtcctacttctcctatctctcccagtcctagctgctggcatcactatactactaacagaccgcaacctcaacaccaccttcttcgacccctgccataacccaataccaaacgcccctcttcgtctgatccgtcctaatcacagcagtcctacttctcctatctctcccagtcctagctgctggcatcactatactactaacagaccgcaacctcaacacaccttcttcgaccccgccggaggaggagancccattctatancaacaactattctgatttttcggtcacctgaagttatattcttatctancangttggaataattccaantgnantactantcggaanaaagaccactggatacaagggacgggccggcgcacgacaaccaggcgcgcacagggataacgagcgagcacaccacacttctccgcaggaaagcacaaccacaacatcatcacccggaacagaaaagcaacaacgcgcaaaataaggacgcccccaggagccaaagagtcgtcgagaaaaagacaaaacacgagagagagatacaaaaaaccacaaacggaccagcacagaaagagcagac

SEQ ID NO: 206143 - DNA, 331 bp, Homo sapiens
agctgaaagctgacacgcataattatttcctgttagatactgaagaaaaaaaaaagcccaggagatattgtcgagactgtttctggggtgtgattgggggataggagatgaccatccagacccacaggaaatgggcattcttgctgaaagtcatgaaagcaactgattatctgctaagtggaactccagggagcatgttcatccttacatcttacagaggaggcgactttgccatccaattagtcctattaccttctcactggatcacaaaggcatttatgggaataagtcattttttaaaggaagagagaagtgcatttaacatgaatag

SEQ ID NO: 206144 - DNA, 485 bp, Homo sapiens
gtagtagatagagacaagttgctagcaggctggtaaagaagcattgtaaatatgctggtttttaactgtgttggtaaatactgagtggaagacagttccgaagatacagataccaaatagatgtttctgagcttagtggtcttttttatctggtgtcattttgttgatatggtataacaaatattgtggaattaaaattcaatggagaagctttgggcaaattaccttatttaaacatgttttataagttaagttctatatatacagagatgtttgtcactttctcagtcaggtactgtaaaacaagtactaggctataaataacatcattacagaaaaacacactgtattctggttgtacaaattaagtgaatgtcatcttactttgaaacatggctccacaattacccccttgtgcattttccccatgtatattgtgtaaagaacattaagaaaatttcttgtataattttctttctgccact

SEQ ID NO: 206145 - DNA, 527 bp, Homo sapiens
ctgggcttcacttcttactccaaccactcactagtttccaaaaccttgtaaaagttcttaacctctctcagattcaatatttgatcaataaaatagaggtaatatcagtctctgggttgttatccgaattaaataatgtatgttaaaagctcaaccctttgaaaacatatataataaatgacaaaggagaaaaaggaaaactctgaaagtggtttatatattcaggatatctttacaataatttgctgacttgggagtttaaccattagtagaattagctcagtggagttaagtggtacaaacataggctttaggatcataaatgtgccactcataagttgactaactctaggcaagttacttatcttctcgcagtttacttcctcatagaaaattagctaatatctttttcctctagcaaaaagaaaacaaaatctagataatatttaccttatgacagtggtttttcacgctatgttcctaatccttagagttcaaaaaaatgaagcaaaagtccatgaagacat

SEQ ID NO: 206146 - DNA, 220 bp, Homo sapiens
tgacttactcatcaaacacttataaacttatgtttacaaagtataatgctaaatactgtagaatttacaaacatgtcttatcttgaagggacttataattcacatggtaaataaaacaatctgaggtagtcttttttaaagtccctgttgtaaatattaaaatacttatttttactttggatagtttatatgttatctctaagtctaataaaactgcgta

SEQ ID NO: 206147 - DNA, 287 bp, Homo sapiens
gacagccctaactatgtgcaatgacctgtgagcatgcttcttggtcagaccagaatgcaaaagggatctaagtttaagccagagaggaatagggtaatacaggagagagatttttccaggagcaggaacctgaagaacatcagacaaaggagaaaagaaacagcctttagattagtgtcccatgaccagaagcccagctaggaaagagtttcccctcttggtggaccagggaccaggcaggaccttcagggtagagctatctagtcagtcacatatcagagatctgg

SEQ ID NO: 206148 - DNA, 429 bp, Homo sapiens
ttctacctttgcttcctttactttatccagataatcttgcctcatggttctcatactgaaaatgtgggggccatccagagtgagcttactgtctcttctgttcatctcagaatttctcaggattgaattttgtttacttttgataagataaagagttacatgtattcttaaacttagcaccatttgcccctgttgttgatcctacctttttttttttaaatttcctgaccttctttagtacataattgttacagcgtcttttatcttctcatgctagaccttttcctttgtttctcaaccataattaggtctcccttattcttaatgtagctgcatagttttctaaatcactataactatatattgtttgagtgtgtgtgtatgtgtatgtgtgttgcactgggctatacaccttacaaatgtttcatt

SEQ ID NO: 206149 - DNA, 403 bp, Homo sapiens
ctacagggctcacagctcagacctgcctctgcctgggagtgacacggtcccctctgctcacgtgccatggatcagagctgccatgtggcccagcttagggagaccaagaagcatgggagactccccggctatttgacgagcaggacctgtccatgccatctcccatctgtgccctgcatctgcgacttccaaagagcattggcctgcactgtcctatgaaatgctaccacaagccctttctggcaagtgcagttaatcctgttcggtgggttaggaaaccaaggctctgagggaggctttcagtgccacagctgggaggtgagagttgtgagttgcagatgtctcagccatcccgagcgtgaccattctgagtggcgggaagcttttcactcagcactgagta

SEQ ID NO: 206150 - DNA, 557 bp, Homo sapiens
gtctctgcacacgtgatgcggggctcggtcacgttgccccctggaagcttgaggatgcgccaggtttgactctgcagggcgtacgcgctttagggatggaaggaagaggaacgcggcaggaaggcgagccccaaggtggagaatcgcctgggcgcgcaggctgcggcggcttcgcacagccgccctgggcgctgcacgggtccgcgcgcaccctgctgcgcacccactcgcggccagctccctacagaggagtggagtgactgctcgactaccacccctcttttagtgtgagcgtctggagtcctgaccgccccagccagcccagctacgatgaactgtctaagaggatgtggcaagacccagaagtatgggtgaccttatgtcagaggaagtggctttcttattgcagcaaaaattcccgtaccaatgtcagtgctagggtaatgtaactaaacttttatttatttttattctgccctcccctttctgtttgttatgaaccataaaatattcaacacaattatcttgaaatctaaatataaaatttaaaacataaa

SEQ ID NO: 206151 - DNA, 751 bp, Homo sapiens
gtctctgcacacgtgatgcggggctcggtcacgttgccccctggaagcttgaggatgcgccaggtttgactctgcagggcgtacgcgctttagggatggaaggaagaggaacgcggcaggaaggcgagccccaaggtggagaatcgcctgggcgcgcaggctgcggcggcttcgcacagccgccctgggcgctgcacgggtccgcgcgcaccctgctgcgcacccactcgcggccagctccctacagaggagtggagtgactgctcgactaccacccctcttttagtgtgagcgtctggagtcctgaccgccccagccagcccagctacgatgaactgtctaagaggatgtggcaagacccagaagtatgggtgaccttatgtcagaggaagtggctttcttattgcagcaaaaattcccgtaccaatgtcagtgctaggatggagtttcactgtgtcacccaggctggagtgcagtggcacgatctcagctcaatgcaacctctgtctcctgggttcaagcaaatctcctgcctcagcctcttgagtagcctgagtagctgggactaaagatgctgcagttagctgggggtccactctacaccctggttgcctcagtttttcctgtacttggaggtatcagcagtgaatgctatgaaacagcaaagatggcagcctgccccttcccctggaagctccatcccagggcggtactgtcctgttgccagcatgagcacacagtatgtaggggg

SEQ ID NO: 206152 - DNA, 370 bp, Homo sapiens
gaaacgggctttagtggtatctgtgacattttattcccccccaaaaaaagcatgcacagtctgatgaaaatggggcaaaatgttaacatctgtttaatctcatagtgtgtgactttcttgtatttctaaaatacttcctaatttaaaataaaattttaaagagattacaagtgaccaaataaaccaagaaccacatacttgtatggtgttcaaaacaaaatcactaaaatctagagaactaatctcagttaacaacaaaagccatccgaaggctcagttatttcccactgactcacatacagattagagtaagatttacttcacaacaagagcaggctcatttatgtggcaaagttccgttgaagcttca

SEQ ID NO: 206153 - DNA, 747 bp, Homo sapiens
tgtcacttgctggcaggccttcacttcagatctgacctgaaacaacacacagaacctctcctttggcttagatcccatgtgaggcttcctggcatgttcggataaatggatggcttggatcgaggctgctcctgacttcaagttgtagaccagcctcctggcctggtctcctcagctctggaggctggcctggaagctccagatgattccaggagcacagcctgctccatgaccgtcctcaggcgccagctcctgctcctcctgtctcatccgggggcggtgaattccccatattcatgggttatgactgggctcagactgttccttctgctcagagggcctgtcccggtctcccacttttccatgttgtgaaccatggtgaaaatgttgagaattccttcccatacttcccaggagcttcattcctccttcatctgggttctggaagtaatttattctcaaccatggttcctcctgtttgttgggtgccctttatgtacaaggcatttgacaagcacagtctcaacccacccaacaaccctattcaaccctatttattacagactctaatcggtgaggaaactcaactaccttgctctgggcttagccagtaaatagtggaatttggattgaaacacttttcctcttttacctcttacagcacgtcgcacattgtgtcagtctgccgacttcatttctgtcttccacactagactaggaactcttacgtgtcttatctgttgatga

SEQ ID NO: 206154 - DNA, 372 bp, Homo sapiens
cacaggcatttatgtgtgcacatcaaacccactaactcataccatgccaacaactgactagactttcattaatccaggatagactaggcctgtgctaagcattttagatggtttctttcaattaattctctcaacaaccctatcaaataggatcccttgtacatgaggaaacaggacagcagaaattctgaaatctgtcccaaatcacagttagtaagaggcagagtcttcaagtgaatgtaggttcactaagcttcagaagttaagcccccaaatactatactatcacctttcatgacaaaaaccgcaatcacttttgcaccaacctaatacaatggcagtcaagctaataacatctctcctcagtgacca

SEQ ID NO: 206155 - DNA, 347 bp, Homo sapiens
tgtcacctcgggccttcgtggtatataactagccaaagctggagtacaatggcgtgatcttggcacactgcaacctccacctcctgggttcaagtgattttcatgccttagcctccccagtagctgggattataggcacgtaccaccacacctggctaaatttctatatttttagtagagacagggtttcaacatgacctcaattgatctgcctgacttggcctaccaaagtgctgggattacaggcgtaagccactgcactcagcctcataaagaatgattaaacctctgtcctctaaaacaaatttttaaaaaggaatgcatcatatgtagaatactttagttat

SEQ ID NO: 206156 - DNA, 299 bp, Homo sapiens
gctgtgttctctccattcttcagtagaactacgaagcacacacgtttcattgagtcacaggagaagcacccaccatcatgagtaaagccctgtgcggacacagtgggttaaaaacagatatgacatggcctcttcccatggaggccacatctgggagttggaggagagacatacacttataaccacaggtagcatttacaaaagcgacatgaactagatgctgtgagaacagaaggcctgagatggtaaaatttggccaagggagctgagaaatgcttctatgttgaaatgacacttgg

SEQ ID NO: 206157 - DNA, 587 bp, Homo sapiens
catgaaatttgagcctaatgcaataaaggatgcccataaaattcttatctaaagaatgtttcgaaaattgttgtacaaggacatcatcatttaaagtgatatgaagaaaccttctcagctaagcatatgggctagattagagagaaaaataaaggacccatctctgccctggaaaaactgctggtagcatctttcaaaaagctctctgtgtttgagtacgcaccttgatccataggctcacatttgatcccaactggcagctgcttcttggcattaacattggattcccaacaagtaaatcttaccaagatctgactttctgcagatataatattattttgtttgaccatccttatcttcaagggctaccaagaaggaaccaagaatttatttacctccccaagggaaaaggttttaccaatgagacactttctcaccatgaccccaggaccccatatgccctgttcacttgagtgccctgtgtggcctgacagaagctcatgctggtcacaggattccttatatgactagcctccttcctgaatcccaatttcatggtggtggtcatgacaggtgtcctgtatccc

SEQ ID NO: 206158 - DNA, 475 bp, Homo sapiens
agagttcatagtcttcacttgacttccaaagggactcagaaaaggttaggaacaactgatttaggcagagggtaaagatacaaaagaaagtgggtcataatattaggatttggaaaactccaacagttagaggtctagcagaagacaggttagcaaataagactgacagacagcagccgtgggtgagaggggaagcagaacactattgcagtacagaaattaagagaagaacgcatctgaagatgtagaatcatcacttgttatcaatgcttttgggaggttgaagagggtgataatctctcttgacctagacatagattccatggaatggtgatttccatgaggccaaattgagggagttgagtgggaggtgaaggagtagagacaatccaattaaaaacttttgcttataatgggagcagaggaatggggctgttcctagagggagatacgtgatcaagacatggtttttata

SEQ ID NO: 206159 - DNA, 218 bp, Homo sapiens
gtccatgggaaacccactccccggacccaaccacctcccaccaggccccacctccaacactggggattacaattccacatgagattttggtggcgaaacagatccaaatcatattacatgataatgtgatagaagataaataggtagtacaattagaaaagatggtcagaaaaggcctctccaaagagcctacatttgggctaagacttgaatccccc

SEQ ID NO: 206160 - DNA, 412 bp, Homo sapiens
cagctggcccgcaagcgctgcaggcagccccggttcccgctcccgcctctccctccacacctccctgcaagctgagggagtgggctctggccttggccagcccagaaaggggctcccacagtgcagcggtgggctgaagggctcctcaagtgccaccaaagtgggagcccaggcagaggaggcggtgagagcgagccagggctgtgaggactgccagcacgctgtcacctctcattatgatttcatcccctccctgcttcatagatgccttgagatagaggttaggcaccccaaatctgaaaatctgaaatcctccaaaatctaaaactttttgagcactgacatgacactcaaaagtagtgcacgttgtgcacatgtaccctagaacttaaaagtataattaaaaaaaaaa

SEQ ID NO: 206161 - DNA, 621 bp, Homo sapiens
aagaattctaggttggaaattcttttcccttagaattctgaagccctggctccgctgtcttccagctcctcgtattattagcaagtaagctgccattctgagagttatccctttgtgtaggacctgttttatttttttttcccccaggagcttttaggatgttttatccttactgttatgaaatgtaataattaggtttcttggtatgtggatcaattaattgttctggacacctggtaggttcttctaatccaatacccacgtccttcagttctggggggaaattcttttactcttatttttcatttctttgtctttttactatgctttctgggagagtttgtcttttttatctttgaatcctctattgagtttttcatttttgacatttccagagttcttttttttcgtgaatcttcttttttacagcattctctttatgtttcattatacagaaactcttctctttctttttttattttattttattttattattattatactttaagttttagggtacatgtgcacaatgtgcaggttagttacatatgtatacatgtgccatgctggtgtgctgcacccattaactcgtcatttagcgttaggtatatctcctaat

SEQ ID NO: 206162 - DNA, 295 bp, Homo sapiens
gaacttttgtttggaactttatttttgataactacagagaattaagaaataaaaaatatctttttcttctgtatatggaaatcttttggaaacacaacagtctgattaatagcttaaagttttgatagtattaaaatttgttttacagaacataaagcctacattttttttaaacacacccacctttaagtatacagttatttgaaaaatggcaactgcacatggtcttgtaaccaacatcacaaacaaaatataaaacagttccatcaccataaagttttcttatgcccatctg

SEQ ID NO: 206163 - DNA, 422 bp, Homo sapiens
agggaataagagaacaaagaactaaataaaggaaaaatcttgacagtattttagttataaattagggtgaccatataatttatcatcgaaactggaacatatcaagatagagaatggccattaataattatgttgtaggcctggcgcagtggctcacgcctgtaatcccagcactttgggaggccgaggcgggcggatcatgaggtcaggagattgagaccatcctggcttacacattgaaacctgtctctactaaaaatacaaaaaattagccaggcgtggtggcgggtgcctgtagtcccagctcctcgggaggctgaggcaggagaatggcgtgaacctgggaggtggagcttgctgtgagccgagatcgcgccactgcactccagcctgggcgacagagcgagactccgtctcaaaaa

SEQ ID NO: 206164 - DNA, 408 bp, Homo sapiens
actctctcatcgctgtgcgggccggttcattttccctgcaaaaccaggacagtcattgaattggcctcttgtacaaagtactgatatttatacaactttttatgcatgtgaaaatgaagtttccgaatgaaagtgactatcaaattcatggaaacagtgaatagcagaccccggatttgaaactacatgtactaacatgaaacccaatgttgtttctaccgcagtacagttgactcgcaaatcatcctccctccatcacagatgccaaggacagaaatctgctaccaaaacattttctccgaaatcccttatatgtgtattaatggtttatcgctcccacttgaataccaatatacaaattgacattttttgtttgttttttaaagttaacatatgtttctctccttg

SEQ ID NO: 206165 - DNA, 675 bp, Homo sapiens
cagacaagacactctgagccccggtcaacacacctactccttccttgttcctcttctcgattagatgtacctataatagcctctttgttgtgatcaactttcccaagccactccttcctctctattccagggactctcaaggggtggagaggttgaaaaaacattcaacggtatattttatatttagaggaaaaaagaacaaactccaagtagggaagaggaactggatttttatttttatcgaaagaggggatacaccagttcaaagctgaggaaaaccttggagactggttcccttatcatgtcctcatgatagaagaaaaaacagacattcagaaaagctagacaatttgcccaaggtcacaaaacagatataggcttcaaatgcaggcctgtctgactccagaacaatctttcatcatggaatgaaaagttctaaggcagaggtacccaatacaagtttttgcagtgatagcaacattgtctgtctgcattgtctaaatatggtgagtacaactgagggacaaatatctaattttaatgaatttctacttaaattgccacatgtggctgtggctggcagagctaccttagtggacagcgtcattctagaatttcactaagttggttctatatcactaccaaaagcaggacccagacaggtgcagcgtagat

SEQ ID NO: 206166 - DNA, 470 bp, Homo sapiens
gatgctccatagtaagacataaatattcctgttgaagttagtttgtaacttcaagtcagaaatggaatatatcaatggtgaaacagtaacattgatttttcatgtggagaggacattttttttccaggctgcgaagctgaattctgccgaatttaaagagaaatgctggttattttctaattatattcagttttgtttgtcttatgtgtattccaacaatgtgtgcatcacagctcttctttttctgtgttatggctacagttttcttgctgttgtctttatgccatgtcatttcacatggtaatttagtaagttttgatgagaaatttgatatttttagtgcactgaaaaattggttttaattggtgagtttgcttaccaatataactgtcagattgttaagataaaaggcatacgctgtccacaggtgagaggattaaatcacttagcattgtttttaactgtttgta

SEQ ID NO: 206167 - DNA, 422 bp, Homo sapiens
ttacctcctttagagaagccccttccctttccaggtctttttctgatcctgaagagtttagctgagagtctggtaccttttaaaggtatgaataggaagcatttgccatctattgcctctaaggatggccacctataagacttcatctacataataagaccgttggtctccaacaacaccccttatctttgcccagacactcctttctattgattccaggttttttagataataacttaaacccttcaaccaattgccaatcagaaaaatctttgaatccacctatgacctgtaagtctcctgcttcgcttatggtgctgctatctggagtaatagctttcatggtgaacttatcaatttattggatcattgggaacacttcacctgtcactcaagaaatgacgtcattggccgggtgccat

SEQ ID NO: 206168 - DNA, 399 bp, Homo sapiens
aatagcttgtgtttacagagtaagtcagctgtggacccgtcaactacttcttttatttacttagcaaactggtattgagcgcaacctagatgcacacagttcatatataaataaaagatctagctgggcacggtagctcatgcctgtagtcccagcactttgggaggccgaggcaggcggatcacaaggtcaggagttcgagaccaaccaggccaatgtggtgaaaccctgtctctactaaaaatacaaaaattagcagacgtggtggtgggcacttgtagtcccagctcctcgggaggctgaggcaggagaatcgctttaacccaggaggtggaggttgcattgagccaagatcgcaccactgcactcctgcctgggcgatagaacaagactgtctca

SEQ ID NO: 206169 - DNA, 558 bp, Homo sapiens
gcaatggaatttaataaatgttgtggatgattacagacatacgagatcaatgccctgttctctctgcctgcgtttgtcaagggagtaaggtgaagttgatgatccctggcacgtatgccttgtggagcaatgccattgtggataccctcatctaaatagtgatttcctcctggggctctactcactcaccaataggatttggggtgctcaggaaaccctgtttgaaacatagttcttcctcatctattaccttgtaatgtgtgaaaagtattagtctatttctgtcttcttttcctggtaaagagggatacttttatccttttgaatcagatactaactaaattgaaaagagcacattgtattcagaaaactagactgttagcaggaccgtatttttaatcgtgataaactgcatcacgatgaaaaggattaaacaggatcagatcatcagaaactaaaaatgtcaactaattgagttttcattttaggcttctgagtcaaagatttcttggaatatttagcaacatataattaaaggagatactatctaaactttta

SEQ ID NO: 206170 - DNA, 336 bp, Homo sapiens
agattctagatattagcctttgtcagatgtatagattatgaagattttctcccactttgtgggttgtctgttcactctgctgattgttgaataagatgtcctttccccactttatgtttttgctttgagaaattgttgacagttttaaaatcataatgagaaactaaaattggagttaagagttcaccaatgtgctttttccaaattatgaattgttcaaaaagtttccattttccacctgttgagatcttcattttgaggtttttattttctactgtgtctaatctacatcccacttttccaggtgagtatagagggctttttaaaatcaattag

SEQ ID NO: 206171 - DNA, 360 bp, Homo sapiens
tagacgatccccttcgcggtatcataatcaacagagaacaccttaaaacttctccactaagatcagctacaaggcagggatgtccactctcaccagttctatttgttcaacacagtactagaagtactatcaaggacaatcaaacaaatttggattgcaaccaaatcagaaagaaaaatactctgtttgaagacaacatgatcttatatataggaaaccctaaagactacattacttaagtgctaactttgcaggatacaaaatcaacatacaaaaatcagatacatttctataaacaaataatgacctaactgaaaaagaaactttaaaagaaataatttcatttatgataccgcgaaa

SEQ ID NO: 206172 - DNA, 157 bp, Homo sapiens
aaaaaaagggtccctaaggtgctcttctcagtgtcaaagtatatgtgaaactctgccttgtactgatatttagaaatggtaagatcattttactttttatgtaagattgttaaaaatttctgctgaaagtagataaattgtaaaaataaaaaaaaat

SEQ ID NO: 206173 - DNA, 360 bp, Homo sapiens
caccattcactcactgactcaccagagcaacttctagtcctgcaagttccatgcatgataagtgccctgtacaggtgtatcctttttttttatcttttacatcatatatgtttagatacatgaatacttaccattgtgttacaactgcctatgatattcagtacaggaacatgctgtacaggtttgtagtccaggagggatacactgtaccatatagcccaggtgtgtagtaggctatgccatctaggtttgtgtaagcaccccctatgatgtttgcacgaggatgaaacagcctaacaatgcatgtctcagaacacatcctagttgttcagtgacgcatgagactgtataacattctag

SEQ ID NO: 206174 - DNA, 481 bp, Homo sapiens
ggatgcagttggatcagaaggagtttttgctagaagaaaaataaatcccaaagcacaaactgtactaatgttgggttctgtggtatcatctccatatccataaatcacatttgatttggatgccactggaaatttaatggcttaggaagggatgggtttcatatgcagagtgaaactttaaaaatactacttattggcctggcgcagtggctcatgcctgtaatcccagcagtttgggaggctgaggtgggcagatcatgaggacgggagattgagaccatcttggctaacatggtgaaaccccatctctactaaaaatataaaaaattagccgggtgttgtggcaggcacctgtagtcccagctattcaggaggctgaggcagaagaatggcatgaacccgggaggcggagctagcagtgagccgagatcgcgccactgcactccagcctgggcgagagagcgagactccgtctcaaaaa

SEQ ID NO: 206175 - DNA, 715 bp, Homo sapiens
agctactcgggagaccgaggcagagaattgcttgaacctgggaggtggaagttgtggtgagccgagattgagccactgcactccagcctgagcgacagagtaagactccgtctcaaaaaaaaaaaagtattttacccatccacaggcagcagacaaggaagtaccttctgtgactgtctggcaaggtcagaggcatcagggaaggtaaaatactgaaactatatttttaaaaataaaagtattcccttttgagtgtgaattaggaatcaatgccccttctcactacttttgtgaaaaaaatcacagctcctgcagcaagtctatgcctgggtaacaaccaacccacaaaatccaagaggaggtccccctctcccgcctctgtgaggcttgaggagcagtatgtatctgggccagcctggtcctcagagtgtggaattaacacctttcctctagcaactgtttgtgctgctgagaacagcacagactctctggcagcctggttctctccagagggaagcctgtgaagcagaagaaacatatggcatctgcactcagggcgcccagttccatccggccttgctataaaatgactttgcctttccttttttaaaattacaaaaataattcaaccaatacataaacatatgaagtgaatcacggagggccttcctgcgatatctttttttgcctaccatttgtcatggaatgggtaaag

SEQ ID NO: 206176 - DNA, 511 bp, Homo sapiens
caggaggtggctttctctttccttctactggtggtaaattaagtgactgtcctactttgtagacatgcaatcgttttgtacctctagaccttgggcagtcactggtgatgacactaattgaactaacacagaaactgctgtcacctgatgtgcttggtttcattcctgcctgccttctctacaacgtgacttcatttcatgaatgtggttgccattatgacagtgctaggatgctgatctgtacaccatgagtgactgcgaactttcagactctcaccgcaattcatggggagactttggtgtatcctgtttccagagttgtcctcttctgtgatcctcaaaagaagagaaaaaaacgcatgtggcataaatcaacaggaaagaaatgtttaccactggaagatggtgagtgcatgagtcaaataatctagaggcactgccctaatgagaaaaaaaaaacaatgattctagaaaataaaactttaaaaccaataaacgtctttacacggaa

SEQ ID NO: 206177 - DNA, 183 bp, Homo sapiens
ctccctgtccctgcataacatttcctctgacttcatttaaccttaattacctcctaaaagccctatctccaaataggtatcatatggaggctggggtttcaacacacaaaatttgggaggacttaattcagttcagagcagagtttttagcttaacaatattttaggacaaacataagtttaa

SEQ ID NO: 206178 - DNA, 382 bp, Homo sapiens
gtgtttggaattagggtgaagggaagctttccagcgcctaccacatcgcacatcaaaccatctgcaaagatctgaaagcatttttgtagtattttgatttttatagctttcattgtaacgggatttaacctgtaacatcttttcatcagagaactgcagattacacaaatgaaaatatcataaatccccatttgtactttctgtactttgtaccaaatgtacttaactgtatgctaaatatagtattgaatatgtatcagtgcaaacgttaagagccttttgcaaatagatttatgaacatggatacttattttgtttacttttatattacatgtactgtttatacaaaacatgcattaaaacgtctgtaatgttatttcag

SEQ ID NO: 206179 - DNA, 344 bp, Homo sapiens
aatatacaatggatatgtcttcataacagattagactgccaaaatggagatgaaattgttcaacaaaatctgtgtcttcaacaaaatttcatcccatgttgtattaataattcccaggtatcccagggaaggaactggtgggaggtgactggatcatggaggcggttttccccatgctcttcttgtgacagcgagggagttctcatgagagctgatggttttaagtgtggcatttcttcactctttctcacgcactcttgcctgctgtcatgtaagacatgcctttgcttctcctctgccttctgccatgattgtgtcttgaggcctccccagtcacttggaac

SEQ ID NO: 206180 - DNA, 370 bp, Homo sapiens
caactgttttcctacaaaaacttagtctcctattaaccccaacccactttgtccactctaaaatccactgcatcctagcgtttatatttcatgtgtattttgttgttgttgttgttgagccagctcgggctctgtcgcccaggctggagtgcagtggctcgatctcggctcactgcaatctctgcctcctgggctcaagccatcctctcacctcagcatcccaagtagctgggactacaggtgcacatcaccatgcttagctaatttttgtattttctgtagagacagggttttgccatgttgcccatgctgatttcaaactcctgagctcaaacgatccgcctgctcagcctcccaaagtgctgggatt

SEQ ID NO: 206181 - DNA, 368 bp, Homo sapiens
ccacaacctctgcctcctgggttcaagtgattctcgtgtctcagcctcccgagtagctgggattacaggcacctacaaccatacccagctaatttttgtattttagtagagatgggatttccccatgttggccaggctggtttagaactcctgacctcagatgatctgcccgcctcggcctcccaaagtgatgggattgcaggtgtaagccaccgcacccagcctcacttttccatacttctgctaagcagagaaactattggacttctgacttgagaagcccttgggaaatgagcccttgtggtatccaaggagacagtaaaatttttccaaaagcttcttaccatagctattaccacattcgtgct

SEQ ID NO: 206182 - DNA, 557 bp, Homo sapiens
ttagatttttctgcatactttgtaatttctctccacttttttcttcttctttaattttccatctatactgtttttctcctgcctgaaaatccccttaatatttttaaaaatgtgtctttgttggttacaaattatctatttttgtatgtctgaaaatgtctttatttctcctttatttttgaaaagtctttttgctaggtgttttctttcagcactttaaaaatagtattccattgcaatttggtttatattatttctcctgaagttggatggaagtctaattgtggttcattttatttttccttcgtctgcttttcagagagtctttttgttttcatctggcacaggttttacatgtgcatggagatgtttatctttcttggggttggtagggcttctggggcatgatatctgttgtctgttttggaaaattctgtctttcagtatttcttcacattttgcctctgctctattctcttttctatctttttggggggactcttctttcacttgtgttaggcctaacctctgtcctgcagatcttttaccttcttgtt

SEQ ID NO: 206183 - DNA, 490 bp, Homo sapiens
tctaaaagttgaattgtaactaaactttaataatgcaaacaaataatagttaagcaatataaatattgccagaaatatatcagaaatcgttgttggtgttttttgatttcctgatggagaaagaaaaatttaggtgttttcttgttatcccaatcagtaggaagtacttgagaatgatgagtctaagaatttagtcacctgtgaagtagaagacttttccaaaaatattttattgttattttcccatactttaaaaacttatttttatgagatgattaaaaacagttaatttggcttatgtgtgctagaatattttctgtgaagtaaaagacatttccaggtattgtttctacagtttaagaagacgttcactttgaatgaaatgattgtaaagagttatatggaatgtgtatgctagactaatgttctcccgtatgtttgatgaagacatttgctaagctaattcattaaacaaaaaatcttatgaaac

SEQ ID NO: 206184 - DNA, 381 bp, Homo sapiens
ccttgctttggctgtctgaaattataaaactaaagtaagttctactgtagaagtgtatgcagaaaaaacaaagtcctcaaaaaatgaaaagacaataaagtatcattctgaaaatcatctagcataaaatttagttatacttcctgcctatcatgcttctcttaaactgcaaaattttagtatgtagtcataacagaaagggtattttataatcaccccagtttctccttctaaatgttttactacaaaataatacagggaacaaaaagattaagctttgccaattttgaaaaacttttataggaagaactgtttcatcatttacttatatatctaagtgctggccaggcacggtggctcatgtctgtaatcccagcactt

SEQ ID NO: 206185 - DNA, 551 bp, Homo sapiens
cagagatttaagaacagcttatctgggtagctctgacttggtgtctctaataagatggccataaagattttggctagggctgcaatcctctgaaggcttgactagaaatgtaggattttttttttttttaattatactttaagtactgggatacatgtgcagaacatgtaggtttcttacataggtatacacatgccgtggtggtttgctgcacccgtcaacctgtcatctacattaggtatttctcctaatgctatccctcccccagcccaccactccccaacaggccccagtgtgtgacgttcccctccctgtgttcatatgttctcattgttcaactcccacttataagtgggaacatgtggtgtttggttttctgttcctgtgttagtttgctgagaatgatgatttccagcttcatccatgtccctgcaaaggacatgacctcattcttttttatggctgcatagtattccatggtgtgtatgtgccacagtttctttatccagtctgtcattgatgggcatttgggttggttccaagtctttgct

SEQ ID NO: 206186 - DNA, 494 bp, Homo sapiens
ggcagaaagactgtggccctaaaggagttcatctctcagaatttagaatatagaccctacaccaggaacccataaagagttgccctctggtattcacagacatagtatatgcaccttggaccatttccaaactcaaagatccagacctgctagggattttgggttttgccaaggcattataccgtattaagaggctaacatagtacatcatggtgactatagttaataatgatatgttgcatacgtgaaaattgctgagagagtagattttgtgttctcactacaaaaagaaaggtaagtagctgaggtaatgcatatgttaaataatttgatttagccgttccacaatgtatacatatattaaaacatgctatacaccataaatatatacaatttttacatgtcaactaaatttttactttgtattaaaaaaggctaatggggggtaactgcagctaatgaataaacatccaataggtccagcattcccatgt

SEQ ID NO: 206187 - DNA, 230 bp, Homo sapiens
cctgaggccaaattagccagtataacaaagtctaactgttacgagaaaatgagaacagagtcagagacaaaccttgaagggaaaaagagccaggaccgggaggatacttcaggagagagatgaacaaaaggagttattaggtagagttggaaactactctacggttcctttggaactattatggagatggacggcacacagatattttagaaaagtattgtgctgactgt

SEQ ID NO: 206188 - DNA, 108 bp, Homo sapiens
aaacctagaagcctgcacggtggctcacacctgtaaccccagtgctttgggaggccaagccaggaggactgcgtgaggctgggcaacatagcaaaactgcatctctac

SEQ ID NO: 206189 - DNA, 537 bp, Homo sapiens
caagtagtatgggttttatcactttcttccaaaacataaaaaagtgaaacttactaagtttcatatgctgttttaatgggcaggttctctggaaaggatgtaagtacatatggtggaaataattatagatgactcacggccatcagtggaaatttacacgtcctttggaacttcaatactgagcatctgagaaattgcaaatttctactatagaaaagacgatcagaaaaaataccgttttcttttttttgccattatcattttttaactatctccttttttgtgtgttaagcatggtatctcctttttcctatttcttttccttttcttctggttcttatcttttgttagatcaatttctgattttctatggcagatagagagctggttttatttttctagactattcagtgaaaaagaattcatattcctctttatttgtgaatattgtatgaatgaggtttgaacaggtatattttgaaaatttctttttaaattaaaacacattttatacttttccacattgagatcctaaat

SEQ ID NO: 206190 - DNA, 463 bp, Homo sapiens
agaggcatgctggctttggtggtggcctccaggatccagtcacgtagcctggtgactcgggcatagacccctggacgccgggcttccgcacacccgattccccagctcacgatgccagccagaaagaaccggccagagggctcctcgcagaccaggggtcctcctgagtcaccctaggaaaccaacacacaccctcaggatgggtcggcagcagccagtccagacaccagtgctacgaggcccaagaaggagctctgagctgggacagccaggacctctctccacacaagctcacagagcacctggggctgatcattgacatctcagaacctgtttcctcttctgtggaggaaaaaaaacaaaacccaagacagttggactataggatctctaagatgtctttcagtcctacctctggcaggccaaaacgtgacccaaataaataacatcccctcctcttctt

SEQ ID NO: 206191 - DNA, 683 bp, Homo sapiens
gaaaaggaggtattgggagataatgtcaggagctcaatctgacttgtgaggttgacacatccgtttgatagtgagatggagagcaagtaagcagttagatatagaagttgagagttaggggagaagtacaaggtgaagatttgaatttgagactcatcagtatatggctagcatttaaagctgtgagactagattaactcaccaaggcagtgaaggttgaaagaaaagagaagaggtctgaggaaggaactcttggggactcctaatgttaagaggttggggaatgaggggaaagtaccctactgaagagggaaatctccttggcctggtgacttggacacccggtgaagaaaacacttcaaggagaagtgactgactgtgttgtatgctggtgataagttacgtaagatgaggactgatgattcacccggtttggcagtgtgacagccattggtgaaatggtggagtgaagcctgagtgattcaaaagagaatagaggagaatcagaggcagtatatctaggtgagtcttgagttttgccacaaagtgaaggaaggaaatggggtcatagctggaaaaaagaatgggatcaagagataagtttttacttgttatattttacattgggagaattaacagcatgtatatgctgatgggaatgattcagcagggaggaagaaact

SEQ ID NO: 206192 - DNA, 397 bp, Homo sapiens
aggtgatctagaggatcccgtatatgggtgagcccctgaggcggagctgaggcaggagaatggtttgaacctgggaggtgtcaacagagcaagactctgtccaaaaaaaatagaatgcatgagttatatttctggctctgttacttacgtgaccttggttactttcttaaatgctaagccttagtatactcatctttatgatcataataatagtatacatttcataagactgtttaaatgagacaatgtacatgaagtccactttaatgataggttttattttattatgggagcataaaatttgagtgaatttttttttttttaaagacagagttgggctctggtcacccaggcgggagtgcaagggcacgatctcggctcaccacaacctctgcct

SEQ ID NO: 206193 - DNA, 376 bp, Homo sapiens
tgatgtagtgtccagtttcatgcacgctttaacagacttcatgcaagtaccaattagaaggtgttttgtcccagcctatctttaatacctctcacttctgccttagagctttctgaccccacaactggtgcccagaggaatgttctctgcactcatacttgttcatcctgaaagtgtcaaagagtgaaggcctgtggaccaccttggaccaggggggtacaaagacctagggacaactgcctttgtcttgccagtcaacagttctgggtcttatttcataagactcctcaaaagtgcctgggaagactaagcaccagtatgggtggacatctggatagctcatccctctactgcctttcctttcttccctgcttcc

SEQ ID NO: 206194 - DNA, 506 bp, Homo sapiens
ccttccttccttccttccttcctttctttctttcttgtctttctctctttctctctctctctctttctctctccttccttccttccctttctctttcttttttctttatttctttccacggagtctcgcccagcctggagtgcaatggtgcgatctcagctcactgcaacctctgcctcctgggttcaagtgattctcctgcctcagcctcccaagtagctgggattacaggtgcatgccaccacacccggctaattttttatatctttagtagagacagggtttcaccacattggtcaggctggtcttgaactcctgaccttgtgatccgcccgcctcagccttccaaagtgctgagattacagacatgagccactgtgcccacccgaataatatcttaatatcatgccattgacatttattctctaattatttcagaggtggccttcagaagaaggcctccttggtaaaattgctattaaggatatttcactgaaaaacaaatt

SEQ ID NO: 206195 - DNA, 721 bp, Homo sapiens
gccagcagatagagtggacggcaagccttgattgacttaagggttggtggccggtgggtttcaggctttaggggttctgctgttcctctcgctttcccttgttctaagggagttgtccttcaagggtgtgtcttcacaggccctgagctttagtttcatctgccagtcctctccgtgttagctcttagaggctgctttctgcttggtgtccgccctcatgcccagtttaggtgctgtcagtgcctgggggaggcgagcagctggcccgctccttcctggctgcctcttctgagggatccagcctcagttcctgtcacggccgctcacgtctggactgcaccctcgctccggctggtctctgtgccttgagggagtgcgtcagctagtggggcttccagtgcttccctctggggcctctgggcctgggggcctcagggcttccatgatgacttcaagccttgtgtttattttttgctgtttatctgcagcttttataattaattccactagggggtctgagtggatccacagaggctgccttgtcccagcaggaagaagtctcttcctgttcttgtgcctggcttgtgtttttaattggctttccgttcttcacgcaggttaattcagccttcccgtgctcacccacaattcaaccttcccatgctcacccacaattcagccttcccgtgctcacccgcagttcggccttcccgtgctcacc

SEQ ID NO: 206196 - DNA, 210 bp, Homo sapiens
tcgcttgaacccggtggtggaggttgcagtgagctgagatcacgccactgcactctagcctgggtaacagagcgagactccatctcaaaataaaaaaaaaaactaggtggatgaatgaaatttccttcattacctcataaacacctgaaggaagccacatctccatctcatctcagcacccagcacagggtgtgcacatagtcggtgtaa

SEQ ID NO: 206197 - DNA, 455 bp, Homo sapiens
ttgagatttggaatttaatacactttaggggttttataataaattaatgaaactgaaatcaccttgatacaaaacaatactgacattttatatcataaagcaacttttccacatgcttgctattgtaagaaatatgttaaccatcttgtaaaatgcctaattcctagggcaagaaaaattcttagccagaggtatttagaatgtctatttcattacttgaacattttctctttttttgaaaactggaaaatttgggacatattccccattacttgagataatacttattgagtacttagtgtaggttagcaactgttctaagagttttatgtaaattataactatttaattctcataagtttatatatgtttaatcctccttataatcatgagagtggtgttaattatcctccctccaagtttgcaaataaagaggttgatacaaataaagatta

SEQ ID NO: 206198 - DNA, 532 bp, Homo sapiens
ccaacccctacagttgagaattattttgggatgatatgcaccatggaaaatgcttccgatacaatattgagtgaaataagccaaatgcaaactcgctacatgagaataacagccacagagaaatatgcaaatttcctcatgcaaatagcctcttcccggaaaagaatatggaaaaatagaaacagcgatgtgtaacaggtggagttgcaggagacccttttaccaataaacttaatcaggagataatgtgcccagaggtggagagggatggaagcaagtgggcagaggtgcacgtgtcctctgagagaaggtattcactggacattaccccatgtactggaaaggagccctccttcctatccgggtgccccagcatcagtcacagggcacaactatgtcatgtttgtcgtggctgtctctgatttttttttttttttcttaacatttttctttggatgtcatctgatccttctttttacttttcacatcacaaataccagtacaattaataaaataaaaatattttcatcag

SEQ ID NO: 206199 - DNA, 584 bp, Homo sapiens
agccaccgtgcccggccgtatattgccttttcataggaacgttgacatagttaaaccctaccttatcgtatgatcattcttgtttcagccacttttagagacaccacgtttcgaggagggcttttgttgttttctcggtgtactttaatccaaatggcaaatttttagccaggtggttattttttaagaatatttactttttttccagagtataaaagtaatatgtaaaaaggatctcacatatactgagcacttactatatttcaggcaccaagacacatgctaaaactgcatgacctcattccctcctcatgacaatcctaataaggaaggagtcattcctatcttccctttcaaaaaaagaaactaaggctcaaagagataaaatacttttatccaagttcccacagctaccaagtggtggttgtggaattcaaaccatggctctcaaacttcagagtccaagggtgcagtggcacgtgtctgtagtccagcactttgagaggttgaggcagaagaattgcttgagtccaggagtttgaatccatcttgggcgatataatgagaacccatctctaaaaaat

SEQ ID NO: 206200 - DNA, 377 bp, Homo sapiens
gctgagttgtgaattaaacattttctgtaagagagagagtctataagatctgtttttattttataagatagaagaaagttttatagtatgtgtagtatatggagtgatagtcttggaatactatatgggttaaatttatactgattcatagaattaatctgcctaattggaaccccctcaggagctgatgagcacaagcaacacagcagagcccattaactcccattttaatctaattttaatgtaaaagccaatgagcaaataatgtttactgtattaaattttgctctctgcatcctgtatgactgaagtgaactgcctcaggtgacagagatagcttggggtcagtgaagtttcccttcgtggtttactcttat

SEQ ID NO: 206201 - DNA, 285 bp, Homo sapiens
gtctcatttccgtggtctgcaaaacgccaataaaaaaatattgttacttctaggttagaatgcaaagagcttggaataccagtgagatggcctggcttaaaagaatttggtcaaatccatcataattccagacgtagccaccataatttgacaagacatagagcattaaaaagcataattttcctaaaggaaaaaaaaagctcctttttcttaccaaatattgtgactcaagcttaaggtaaacctcgggctcaatttatgggaattggatgacttgttttatgg

SEQ ID NO: 206202 - DNA, 800 bp, Homo sapiens
tagattcaccaatgattaacattcttgttttattgctttgccttgacatttgtttttttctttcccttcttgcctcctcacccatttccattgcctctcctcctccctcctgctcctcttccctccctccatcctttccttcctttcttcccatcttccttcctttaccctttcttcttctctttcccatttgaaagttgcagacttcttgacactttacccctaagtatttcagcaaggaactcctaaaaataagaacatcctacgtaaccacaatattatctaatatatagtacattttcaaacctccccaattgtcccaaaagtaacttttgtagcttaaaaaaaggtgatccaatcaaggttcccatatttcatttcatttggtttacacaagtaacataatacactctcattgtgaaaactttcacaccaaacagataaagtgaaagcccctcttgacaatacccacctgcaattccactcccctttccaaaggtcacttccttattagtttgatgtatgtccatcagggcctttgccttgcccatctaattttgggaggttttctttttcccaaatgaaatcatactatatttttcatgttctaaaaaatatgtcttgaaaacttttccttcttagttcatgtaaaaccaccttgtattaaaaaatgaaaacagcccggcaggaggtggctcactcctgtaatcccagcactttgggaggccaaggagggcagatagcttgagctcaggagttcgagaccagcctgggcaacctggtgagatcccgtctttcca

SEQ ID NO: 206203 - DNA, 356 bp, Homo sapiens
tgctgagattacaggcatgagccaccatgctgggcctatatttacgtgaataacagtggtagaaatggttctagcaagggcagaaataccagtcagtaaaagtaacaaaataattattctctctacagtatttacatctgcaaattctgaatatcctgggatactgtgattaagttgaatatggggataaaatcaaatattgggagaattatggtcctgagaaagctcatttcagtttggctcaagcgatcctcccacctcagcctcccaagtagctgtgattacaggcgcccgccaccatacccagctaatttttgtatttttagtacagatggggtttcgccatgttggccagg

SEQ ID NO: 206204 - DNA, 566 bp, Homo sapiens
tgctcatccctccttgcccctcatattttaaaccaactgttgttcacagtacagtttgcacgacatctttgttcaaacatagctcagtttttctggcaccaaagcaaatttgggttaggttcgtgtatgcagaggcaacctatgaggagggcccataaggcaccctccacttttgcctgaggagatacgaaagcagaagtaatgggatctgtacttggggcacagagagggtttcagaggatccttgtgaaacactagttaaaagatgacgagtggggagaagtgcgaggaaagaaggaaattagtctgactggctttctgtcctgcaccattgattcaatggagactggcgggaggaaaaagaaagaaagaaagaaagaaagaagaaacagacaaaataaaagctttggaattgctatagaaaggattagattagatgactagctaagaccttttctcgtgtctgtatttggggaagagaaggcatgaatttccccttttagttaggtaaacgtatttttatattgagaacctcttgcataaggacaggtgaattaatatactca

SEQ ID NO: 206205 - DNA, 322 bp, Homo sapiens
tctgggcaacaagagcgagactctgtctccaaaaaaaaaaaatccataaagcagctgggcgcggtggctcacgtctgtaatcccagcactttgggaggccgaggcggtagaatcgcttgagcccaggagttcgagaccaggctgggcaacaaagcaagacactatctctacaaaaaataaaatagccgaatatcgtggtgtgctcctgtagttccggctactcaggagcctgaagcagaaggattgcttgagtccaggagttggaggctgaggtatggcaccactacactgaaatctgggtgacagaacaagtccctgtctt

SEQ ID NO: 206206 - DNA, 826 bp, Homo sapiens
caggctggcgtttcccagtggggctggaatatccaggggtcagacaggaaagtggatgagtgggaatgtggaactgtggagttttttctcttaaaaagaccaaaggcggctgggcgtggtggctcatgctggtgatcccagcactttgggaggccgaggcaggcagatcatgaggtcaggatatcgagaccatcctggccaacatggtgaaaccccgtctctactaaaaatacgaaaattaggccgggcgcatggctcatgtatgtaatcccagcactgtgggaggccaaggcaggcagatcacctgaggtcaggagttcgagaccagcctggcaaacatggtgaaaccccatctctactaaaaatatgaaaaaatagccaggtgtggtggcacacgcctgtaatcccagctacttgggaggctgaggtaggagaattgcttggacccgggaggtggaagttgcagtgagctgagatcgtaccactgcactccagcctggtgacagagtgaggctccgtctcaaaaaaaacccaaaaattagctggccgtggttgcgcatgcctgtagtcccagctacttgggaggctgaggcaggagaatcgcttgaaccggggagttggaggttgcagtgagccaagatcgcgccactgcactccagcctgggtgacagagtgagactccgtctcaaaaaaagaccgaaggcctcactcccgcaggaagacattgatctgtcctgtggctgctctgccgtgcggtggttttgcctaaagacccgcttcctcaggggctccagcctcttttaagggctagtcgtcgcgccctttg

SEQ ID NO: 206207 - DNA, 528 bp, Homo sapiens
acccacccgcctcggcctctgaaagtgctgggaatacaggcgtgagccaccgtgcccagccgatttacctttaaggcttaaaaaaggataaaaagaatacttttacataagttaggtactcatttttaaggataacaaattcttagttggtgtttactgcaggccaggcactcttctaggtggtgaaaatgagcataaatcagagtctactcatgtctttaagaaactcagcatccaatgggggcagcatatatgtttaaaaaaaaaaaagtacctcaatgtgatcatcacagtgtttgagatcccaggcttaatggtctcatataaaggatgagtgatcaaggcatcgttgatgtttcaggggagccaggagatgatgaggcatggcttattaaggagctatgagacagctcgtgtacattaaggaaattgaggcaatttgttatgactggtacgtagggtctgtgataggcaagatacgacatgtccttggtctcatgaagcttatgttctatagcttacttactt

SEQ ID NO: 206208 - DNA, 308 bp, Homo sapiens
gggactggatatagaagaatgaaacttccattaattgatacactggaagaaaggccacatacaaataggcaaatataccgtagaccctgcatagaaggctaattagctaaatgtaaggtgcaaatgctcaagcaacaaccctgaaagtgtgtattcctcctttctgctctggcgactatgcctatttattctcctcaatgaaatgggcatattaactccagcctatttaatatgtactacaactactcttcaatgccccataacattttacacaagtaaaagctgcctaaaaatgagcagcatagtca

SEQ ID NO: 206209 - DNA, 301 bp, Homo sapiens
atgcggtagtagttaggattatataaatagttaaattaagaatggtttgttagggttgtacggtagaactgctattattcatcctattgtgctaattagctaaatgtaaggtgcaaatgctcaagcaacaaccctgaaagtgtgtattcctcctttctgctctggcgactatgcctatttattctcctcaatgaaatgggcatattaactccagcctatttaatatgtactacaactactcttcaatgccccataacattttacacaagtaaaagctgcctaaaaatgagcagcatagtca

SEQ ID NO: 206210 - DNA, 1528 bp, Homo sapiens
cctgctccacctcattcaagggggagcagtggaagtctgtttcccacttccttacgcccaagaaaagggctcaacaaaattaccaagagaactcactatgggtccatgaagttgggtgggtaccatgtctgtgtaacacctgaaaaatataaagtgctggctggctaattgctctgaggacaagagagaagttgtcactccgctggaatcagcccaccctcccctagtctgagcaaaggacgtgggccacatacaacaaagaaccagcagaaggtcaccctgggcctactcactgggcaaaagaggctgaaatgagaagctcccattattatcagattcttaggatctatggaaggaataagcaaccaaacggaatgaagaggcatttggtctcatcaggggaaaagcaggtgaccactcctgagcacggcggtggctgtggtctctgaaggatgccccttgaaaacactcaagaaagaataagctctggccgggcgcggtggctcacgcctgtaatcccagcactttgggaggccgaggcgggcggatcacgaggtcaggagatcaagaccatcctggctaacacggtgaaaccccgtctctactaaaaatacaaaaaattagccgggtgaggtggcgggagcctgtagtcccagctactcgggaggctgaggcaggagaatggcgtgaaccccggggggcggagcctgcagtgagccgagatcgcgccactgcactccaacctgggcgacagcgagactccgtctcaaaaaaaagaaagaaagaaagaaagaataagctctaacacctgcacaacatcccagagagctcctgcactcattcaggaagaagtttcctgtcctcatttccttcctttctttcatgtgctccaacacaggagggatcagaaacaggttacagagcagaaagagaatcatcaagtgatgaaaagtgagaagatgcccactgtggccaccctcccttcctccactgcaggctttctccctgcagcaggcctgtactgggagaaggaacttaggctttaagttctgttatgctttaggactgaagactctaattgctgaattcacattctgttctgtagtgtgaagtgaccacagaaatatcaggcccacctgaattttcatccaggggcaggggtgcaagacaatacaaagagccagtggaagataaagaataaagggattggctacacatcccacaaggtgtgcttattcaacatgacaattacagccagctgcctacccagcatcacttatctattcttcttccataaaggaacctacccctacataacaaatatttgggagaccagtcccgagattcagaggtaggtcagattggtctaaaagtaacccctttctcctttcaagagatttgcttaagaatggctctataagcataactgggaccaatgccaggaaaggactgctgaggtcctgggtcaagttcttcctccatcttctgacagtcctctcaaaagttggaggaacaccaaactgttaga

SEQ ID NO: 206211 - DNA, 886 bp, Homo sapiens
ctcctcctctccccagccaagcccaagaaccaagctgaggcccagaaggtcacgttcagccaggaccctacgacagtggccctctgcatctccaaagagggccgcccacctgcccggatctcctggctctcatccctggactgggaagccaaagagactcaggtgtcagggaccctggccggaactgtcactgtcaccagccgcttcaccttggtgccctcgggccgagcagatggtgtcacggtcacctgcaaagtggagcatgagagcttcgaggaaccagccctgatacctgtgaccctctctgtacgctaccctcctgaagtgtccatctccggctatgatgacaactggtacctcggccgtactgatgccaccctgagctgtgacgtccgcagcaacccagagcccacgggctatgactggagcacgacctcaggcaccttcccgacctccgcagtggcccagggctcccagctggtcatccacgcagtggacagtctgttcaataccaccttcgtctgcacagtcaccaatgccgtgggcatgggccgcgctgagcaggtcatctttgtccgagaaacccccagggctcgcccgagatgtgggccccgctgtgtggggggccgtggggggggacacatgtggtgctgttggtacatggctggggggtcttggccttatcctgctgaggtgacgaaggaggaagaacagccttggggacagaagaagacccagtggccacggggaatttaacaaccgaaagcccagggtgggaatgggacccgtttggaaccattcctggtcctgacaattaggttagagagcggaacaaagacaacggcttggtcacccaaaaatgatgaaccaggagggccaaaggggt

SEQ ID NO: 206212 - DNA, 593 bp, Homo sapiens
gctgaagatattgtgaacattgttgaaatggcaacaaatgatttagaatattacataaacttagttgatatagaaacagcagggtttaagaggactgactccaattttgaaagttattctgtggatcaaatgctataaaacaagatttcatgctcttttgtgataggaaaagccaatcgatatggcaaacttcaatgctgtcttattttaagaaattgccactgccaccttggccttcagcaaccacaaccataatcagtcagcagtcatcaacacagaggcaagacactcaaccaggaaaaagattatggcttgttgaaggctgagatgattgttagcatttttagcagtaaagtattttttaattaaggtatgcacattgattttttaaacataatgctattgtacatttaatatactattgtatagggtaaacataacttttatatgaactgagaagctaaaaacttcagtgatttgctatattgtgatacttgctttattgtggtaatgtgaactgagcccacaacatctctgagtcgtgcctgtagttgattactagttgatgtagaataaaagtacacaaaatttca

SEQ ID NO: 206213 - DNA, 664 bp, Homo sapiens
ggaggggcaaggggtgagggagcggggagggtccttttctctcctccctggccatgctggccttggcagaagggtcctgctcagtgctgctggcctgggaacctggccaggaccggagccgagctctgaggctgggtggccttttggggagcagtggttgaggtgtccccccaggcattctgacaggcatctccaatccctgttctctgcccttcccaaggccagctctgtgtccagggacactgtgctggggtacagggacagggcaccctgtggcattgtcctctctggtgtgtgtgcatctcatcctgtgtgggactgttgaggagggagtcctcacggagcttgaaacaataggaacattgatatggtttgtctctgtgtctccacctgaatctcatcttgtagctcccataattcccatgtgttatgggagggacccagtgagagatgattgaatcatgggggtgggtctttcccatgctgttctcatgatggtgagtgggtctcacgagatctgagggttttaaaaacgggagttgccctgcacaagctctctctctctcggctgctgccatgtgagacgtgcctttcatcttctgccatgatgtgaggcctccccagccacgtggaactgtaagtccaataaacctctttcttttgt

SEQ ID NO: 206214 - DNA, 570 bp, Homo sapiens
tgtttagtttgagtggatgctaatcctgcgttttcattctagaaggctacttaatacattattttcttagccaaacttaagtcaagccaagctttggttatggctagttataatctgtttttaataggaatcctcaaagtcaaagtttaaacaaacaaaagaagccatccttttcaaaatagttattgtaatgataatcccttttatagctttgttttatagttttaggccctcctctgaaaagtacagagcatttttattaatatttatataggcaaaaatcatgcatattgataaactaatatattttcaataaagttgaagtctatgctatgaaaagctgcttaaaaagtgaagatatatgatatggtctgggtctgggtccccaccgaaatctcatcttgtattgtaatttccatgtgttgagggaaggacctcgtggaaggtgattagatcatggggggactagatcattagatctggggattagatcattagatcattagaccttcttgctgttctcatgatactgagtgagttctcatgagatctgatggttttataaggggc

SEQ ID NO: 206215 - DNA, 224 bp, Homo sapiens
tgaagtccaacttatagtaatcaaaaaaacaatacagggtgtgaatgagaaaatatctagtgaaatagataacataagagaaaaacaatcaaaacttctgaaaacgaaggacagagagaattgcaaaatgcattggaaagtctcagcaatagagtcaaacaagtagaaaaaagaacttctaaaaaacaaggcttttaaattaacacaattaaacaaatacaaag

SEQ ID NO: 206216 - DNA, 3215 bp, Homo sapiens
ttgtatatttggattgctgctctaggttgaccctcagctaaagaaaaatgcttccttatttagttttattctgcctgcctgttagtttgaaaggtaccacttgtttgcttcatgcagttttttttttttttttggttaaactcagcctctatatgtgtttatatgctttcatattttcttcaagtcacttctggattggtaattcacgtaccagagtggccgatgccatatttcttgtttattcttttttttcaatttcatggccttccagcagttttctgggaatactttctgccagttcttgtttacttctctgtttatatgcgtcggtattggaatgctagaacgttaaagtacaaaatatagaaaatataaaatttctgttcatacttttacatcttaaactggaaagacatatctcacattttttaaccatttatgtgttaggtgatatgctaagttcattattcatgttacttaatcatttacaacaactctttggcgtatagatgccattttactggtgaggaaactaaggcttacaaggcgatgtagttcttttttaagggtcatacacttagtgaaagtgaggctggaattttaaccctgacagggtgaccctagagtgcagttacccgggtatactctctgaggagtcctgtatgaatcacgtcctgggaatttttccaaagtgaaatgaatgcttctggaagaactcagcacaattggcttgaattcctgtggaaattttgggcaaatattggaaccagctggaaatatagtaatggggtatcacatgccaaatctggacctgaccattttagcctgatagtcgacgggtattagtaagatgtgtcttcaaacccttatttattctcattggttacaataggtactatgcaggatgcactgtggaaagtaagactggatatgagattgataatgctcagtaaattgtgatgatatgtaattaacaaatgtaagagatatgattttcagtattgtagcattgtgtccaagtggcaatttttttttttttttagatggagtcttgcactccagcctggcaacagagcaagaccccgtctcaaaaaaaaaaaaaaaaaaaaaaaagtccgagtgtcttcctacctccaaatgacagcattagtgtcttagcaatggtttttaaccaagctaaaatggctggaatgccagatgtagaattcacaatatggataggaatgaagaacattgagattcagggaaaagccataacccaatccaaagaatctaaggaatacaataaaatgatacaagaactgaaagaagaaatggccattttaataaggaaccaaactgatatgataatgctgaaaaacttactgcaataatttcacaatagaattgcaagtattaacaggcaaagtgaacaagcttaggaatggatctcagagctggaagactagttctctgaattaactcaatccaataaaaataaagaaaaaaatgaagaaaacccaggagaaatatgggatcaagtaatgagaaaaaatttatgacccattgacattcctgaaagagagggagagaaagcaagcaacttggaaaacatatgtgaggatgttgtccatgaaaatttcccaaacctcactagagaagccaacattaaaattcaggtaaggcagagagcccttgtgacatactatacaagatgacatccccaagacacataatcttcagatttcccaaggtcaaaataaaagaaaaaaacgttaatggcaaccagaaggaaggggcagatcacctacaaaggtaaccccatcaggctaactgcagacttttcagcagaaactctctgagccagaagagagaaataatagtgggaggctttgccattccactgaccttattaaacagatcactgatacagaaaactaatcaaaatattcaggacctgaactagacacttgaccaaatggacctaacagatatctatagaactctccactaaaaaacaagagtatacgttcttctcatctgtacatggcatgtactctaaaatcggccgtaaaacaattctcagtaaataaaaaaaatactgacatcataccaagtgcactattagatcacacagcaaaataaaaatagaaatcaacactaagttcgctgaagaccatacaattacatggaaattttacaatgtgctcctgaatgacttctggataaacaataaaattaggccagaaaacaagaaattcttcgaaactaatgaaaacaaagacacaacatagccgaatgtctgtgacacagccaaagcagtgttgaaaggaatgttcatagcacaaaatgcccacttcaaaaagttagaaagaattcaaatgaacaacctaacatcaaacacagagaaactagaaaaacatgagaaaatgaaccccaaagctattaaaggacaagaagtaaccaaaatcagaactaactgactgcaattgagatgtgaaaaaccatacaaaaaatcaatgagtctagaagttggttttttgaaagtataaataagattgatagactgctatctagataattaaaaagagaagttccaaataaacacaatcagaaatgacaaatgcttctagacttgataaacaacttcagcaaagtttcaggatacaaaatcgacataaaaaaatcactagcatccctgtataaaaagaacatacaagctgagagccaaataaggaacaccatcccattcacaatatgtacaaaaaaaaataaaatacctagaaatacagctaaccagggaggtgaaagctctctataatgaggattacaaaacactgctgaaagagatcagagattatacaaacaaatgaaaaagtattatgcagccataaaaatgatgagtttatgtcctttgtagggacatggatgaagctggaaaccatcattctcagcaaactatcacaagaacagaaaaccaaacactgcatgttctcactcataggtgggaattgaacaatgagaacacatggacacaggaaggggaacatcacacaccggggcctgttgtggggttggggtcgggggagggatagcattaggagatatacctaatgttaaatgacaagttaatgggtgcagcacaccaacatggcagatgtatacatatgtaacaaacctgcacgctgtgcacatgtaccctaaaacttagagtacaataaaaaaaaagacaaaag

SEQ ID NO: 206217 - DNA, 1363 bp, Homo sapiens
gaaagaagataccaacagcctcctgaaactcacgagagtggacactccagtgttgaccacctaagataccactcctgctccaaagattacagctcccttgtcattctgactcctgggcttaccctacaccccagagatggagcaactactaggaataaaacttggctgcctgtttgccctgttggctctcactctgggctgtggccttactcccatctgcttcaaatggttccagattgatgcagccagaggtcatcaccggcgagtcctcagactcctgggctgtatttctgctggtgttttcctgggagcagggttcatgcatatgactgctgaagccctggaggaaattgaatcacagattcagaagttcatggtgcagaacagatcagcaagtgagagaaattcttctggtgatgctgattcagctcatatggagtatccctatggagagctcatcatctccctgggcttctttcttgtcttctttttggagtcgctggcattgcagtgctgtcctggggctgctggaggatcgacagtgcaggacgaagaatggggtggggctcatatcttcgaactccacagccatggacatttaccctcaccctcaaagggtcccctccgagcccttgtcctcttgctgtcactctcctttcactcagtgtttgaagggctagctgtggggctgcagccgacagtagcagctaccgtgcagctctgccttgctgtcctggctcataaggggcttgtggtgtttggtgtaggaatgcggctagtgcatttaggtaccagctcacgatgggcagtgttctccatactattattagctctcatgtcccccctgggcctagccgtagggctggctgtgactggaggggactctgaaggagggcggggcttagcccaggctgtgttagagggtgtggcagctggtaccttcctgtatgtcaccttcctagaaattcttccacgggagctagctagtcctgaggcccctctagctaagtggagctgtgtagccgctggttttgccttcatggcctttattgccttgtgggcctgagagattcctggcttttctgatggacctatttaggacaacctctctatccccagggagacctcccaaatggctttgaccctcagacatttctttactcagactaaatagcattcagtaggactggactggaccccaggtttcctttacatgagatcccatttctcaccctggactaagacaaagatatttaggttgagcagctattaattggagaattggtacagagacgctccagattttattcttatcccatttatgctactgtgtgtaataaaatgcccattttaccctcaaaaa

SEQ ID NO: 206218 - DNA, 379 bp, Homo sapiens
ctcccacctcagcttcctgactagccgggactacaggtgtgcaccaccacacccagctaatttttaaattttttgtaagaaacaaggtttcattatgttgtccaggctgatctcaagctcctgggctcaagtgatactccaaagttcttggattacaagcatgagagatcgtgcctggtctgttttgtttttaagagtagctctattttggtatcacccttagtcctggggaaaatcatttagtcctgtaatatggtctttatttctaagatgtgaggcctcagtgggaaggccgaggtgttcatccaatcactctcatttggcaggaattaaaatcaaaactccaaatctactgaagtgggcacccaccaaaatctct

SEQ ID NO: 206219 - DNA, 294 bp, Homo sapiens
aggaacatgctacgttgacttcagtctggcccttaacttgcttccataaaatgccatgggataggataaaacagctcatttagtttgataactaaaggataaaatttgaactctcgtttggtgtgctcagtatggcctttttaattctgtaaagagttggtagtgtcagtagattgaatgtaagtggaaaatgggctatttcagtagattataaaaattgccattgggcgaatggtagcagtgcccacagaatgttgaatggggactgcgaaggtcctggtgaattgtatgagc

SEQ ID NO: 206220 - DNA, 605 bp, Homo sapiens
ctggggtggtcccggctctgccctctcggtgccccggggccagcgaggtgtgctggaggctgaggcccggtccggcgcggggagcgttgagtgctgagcttgccaccctctcacccacttcgctctgccggggccgggggcccggcctcctccagctcccctggattaggtggaaagatgtggaaaacggtggttcgagcatctcgcccagcacccacccccacctcctgggccacccacctccacccaagtccatcatcgcctctgggcccttggacttactgtttcattccttgccagatatggagtgtcctagactttgaacccaattgactacgtcaccgtaattcagccttggaagttaaaggggttaaaggggaaaagagcttggtaaagataatgccttgggttttgattacaaagagttcagttttccagcaggaccagccctatctcactgggctttctttctacggtaggtagtgtttcccgatttggtggtaaaggtactgcctgaggaaggtcatagtaaatctacatcaatcactgaagtggggatgtggaattctcgttttcacttgaactccctcaacctctaccgtcca

SEQ ID NO: 206221 - DNA, 281 bp, Homo sapiens
tgcttctccatatattcatcagcaaaatgtctcccttaagaaaagggttgctatggggtgatttatgcctccccaaaattcctacattgaagatctagcccccagtacatctgaacatgaccttatttgggaacagggccattgaaaatgtaattagttaaataggatgaattattacgggagaaagatgggcctctaagccaatacgaccagtgtgtccttacaagaagggaaaatttggacatagacaccacatggagaaaacgaatgccaagtgaagg

SEQ ID NO: 206222 - DNA, 320 bp, Homo sapiens
attaaataatcctttcatacttgttttcctctaatgttttgctactattaactctgggcaggaccccagagtgatcccagtggaatagctatattacactgccagaagcagaatgggtgaaatacagtctcactgcaaactgctcactcaatacacatttatgtggcatctcctaagggcaagatgatgtagaaagattaaaaaaaaaaaaaaaagatatggctgggcgcagtggctcacacctgtaatcccaacactttgggaggccaaggcgggcggatcacgaggtcaggagatcgagaccatcctggctaacaacg

SEQ ID NO: 206223 - DNA, 427 bp, Homo sapiens
caatctttatgccttttatttcttttcttgcctaattgctctggctagaccctccaatacaagattgagtagaagtagtgacagtagatattattgtattattcctactcttaggggaaaaccgtcaacctttcaccattaagtgtgatattagcattagtttttcataaatacctcttatccggttgaggacattcccttctattctaagtttgttgaatgtttttattgtgaaggggttggattttatctacatatactttttttttgtattttgttttttttcacttaacagtatatcttggttatcactccaaatcagttcatagaggttttcccttttttgcaactgtataattctcttttgtgtatatactagtgaatgtaacttacatgtaaaattaaatatggttttaagaaatcaact

SEQ ID NO: 206224 - DNA, 277 bp, Homo sapiens
gttaagtaaacagttttgggtgaacaagagatttttggaagggagaatagtaaaacaagtatggctaaagcaaacacagcatacatatataaaacagcagaacaaggctaaagagtttttttcaagcaaagctaattatagttcattaccaaaatataagaaattatctcaccaagtcaatcaaatcacctagacacaaataatcacactaaaaattactgctaaaagctttttttttaaagctaaaaatcacaacagaattgtacaatctgaaatt

SEQ ID NO: 206225 - DNA, 155 bp, Homo sapiens
cacttaggttaagtgttttgtcttttctcttaaatagctatgattggctctaatgcagtgtctaggcagtgtcttgccacaggcagctcaaatggacacatgtgccacagatatataagacacttgtagaacacacttgaattccagggtgtatg

SEQ ID NO: 206226 - DNA, 352 bp, Homo sapiens
tgagagacacgtgtgtcgcaataaaactttgccgtctttaagtctgaggtgctctgtgtcaggcataaagaacaatacacaacaattgtttgcagttatcttaatctaaagctgtagtttcattgaaaatgaacaggccatgacttttaccaaatacttccagccttcccttatctgatagaccatcttttggaaacaaccaggtggatgttaatgggagaagtaattcactaaaaacagttaattcaaaagcattgttttggcatccaaatccaaaagccttgttactgtttctaatgttgaatcacactacagatctttgagaaagttggtaacattgcagttcatttaa

SEQ ID NO: 206227 - DNA, 344 bp, Homo sapiens
ctcctgtttaacctatgtacccataacgctttgagcacttcctacctttccagcatacacaaaaagttttctctgcaccagctttggaatcagctttttctccaatgagacctagctctttttagtggacaatggtatttagacaccaaaatctgggcactaaatgtgttcactgttacttacgtcatcgcttacagtctctctcagaggacagagctggaacacacatcacacacacacacaaaaacatttctatctacctctatctttaatatgtatatttttaaaaactatgatttcatattgacatctccaatgccaagtcaagaaatttgaaattcctc

SEQ ID NO: 206228 - DNA, 369 bp, Homo sapiens
gcagacaggaaaaaacagagagagaaagagagaagtagaaattttaagagcattcaggaaaatgttaattctaggtatttctgggtgatgcgatttttattttctactacattaaatgtccttatttttgaactgcctgaacagcatgcataaaatacttatttttcagtagactgaaagattaattaatgtttttcaaaatgccattaactgtacttatatgataatttaagattgaatttaaaatgtggggctagaactaggaaaatggcaaagtgggacaaatatatgctaggaccatgaaaaagaaaccttatggaataaagtttgatgactttccacactccttaagagggtacctgtgagctt

SEQ ID NO: 206229 - DNA, 460 bp, Homo sapiens
gcattcttgcccagttcatggaaagccttcttatttggattacttgggataattttacttattttactttgctgttgtagaatatattgctgctatactctttgtgtaagaatgcaagataagcttactcagtgcttccttaaattgaacacattaatcttcccaggaggtcaggcatttgtagtcacaggaagggataggaagttggcaggactggtatcacaagatacaggtcatcaagaccctgctgagaaacagtatgcggtaaacaaaccagccaaaacctgccaaatctaagattgcaatgaaagtgacatctggtcatccttattgctcattgtatgttaattaaaatgtgttagcttgctaaaacacacttctaccagcaccaagacagcctacaaataccatggcaatgtccggaaattaccctatattgtctaaaagggggaggaagcct

SEQ ID NO: 206230 - DNA, 515 bp, Homo sapiens
aacccaagagactctaatagttaggcaggaatatcatcgcctctattcagcctgaagaagttacagaagatggatcttcatgcctctacaacccttaagattaaacgttccctcgtaaaagagagtagggaaatatgtcagaggtgttcaaaatagggcaactccatcttgaataggggctgggtaaaatgaggctaagacctgccaggctgcattcccaggaggtcaggcatttgtagtcacaggaagggataggaagttggcaggactggtatcacaagatacaggtcatcaagaccctgctgagaaacagtatgcggtaaacaaaccagccaaaacctgccaaatctaagattgcaatgaaagtgacatctggtcatccttattgctcattgtatgttaattaaaatgtgttagcttgctaaaacacacttctaccagcaccaagacagcctacaaataccatggcaatgtccggaaattaccctatattgtctaaaagggggaggaagcct

SEQ ID NO: 206231 - DNA, 640 bp, Homo sapiens
gggcagggagcacccacaccccacgagtccagggatccgcggcgcagggtgggaggcacacacagaatgcccacaacgcggggaagagagacctagggtcccaggacgctgatggcaccaagccacggccacccctttcccccaagtgtgggttccaaatggtgattcaagggtcttcctggttccgggccctcttcactggcctacctgggcaacttcagggcagaggggtggttcccgtgggagaaaggccatgggaatgagcctgccccgcagactggttaggttaaggcctctggggaccgttagctcccaaggtgttccctcatactcagggctaccctgtgccttcctaaaggcgtggagggacagctagatggggaatcaggcaggggacagcctctggattcctatccaggaggaatcgggggaggacagggcccaaggtgccagttggcctcctgagtcaggctgggacaggcaatgctccttgtcagagctggggagggggttcaggggaaaaccagcagtcacaccagaggacatgcaggaaacacaagcaaaagcatgcgagggctgggggacatgcaaggcgggggccagcagcatgagcagtaccccgcggggcctggctgggccc

SEQ ID NO: 206232 - DNA, 482 bp, Homo sapiens
gtataacaccatttgtctttcataagtgttgcaaatatttttctccatttttcctttgccttttcatttatgtttttctttaatatagaaatttatatgtagtctcaattatttttgtgctttcacttctgggattatgtagaaaagttctttcttaactctgagattaaatatttatgtatcctttttttttttagtatatttagaggttatacttaaattcgtttgaaatttattttaaaataagatgagagttggtgactaactttgttttttctttttaccaaagaattagcaagttttattgactttgttattgagtaattcatctttttaagtcatattgctcatgtgttagtccctgtgtgtgagaggccgtttctggactgtctactctgttcccttgatctgcctattgtcttggcccaaggccatacaatataaattcctgttgatttataatatacttctttatctggcat

SEQ ID NO: 206233 - DNA, 732 bp, Homo sapiens
gcctgctgcctcctgggtctgcgcaccccacggcacctccaagtgagcctcccaggcttccactgactctgccccttcagtgcacagcccagagccgtgatttgccagctgggctcctgcgttcagagtctcccaacagaacaggttcttgtccagagaagttcaggaaatgctacatactttcccctgccttttagagacttgatgtccattagactgtgaaagacctcgagaattgcatgaagaaactggtttccaaaatgtccttttgtaaagggatacctgctacacatgtgattctgggaatattctgggaagcgcaggcctgttgagtaaatgcagcacctgtattcaccatggcatccagggcccttcaaatctcagtgttgcttgacctcccagacagctgctcccatccctgccatgtgcgccacaagcccctgctccagccgccacagcttctccgatcctggaacagtctgaccttgtactgtgcttactgcttgaggtataccttcccacctccaaagattctcttgctccttcgtggcccacccgagattcctgtcttgtgtgaagccttcttcaggcccctcaccaggtagggtcacgtgctgtcttccctggctcctgtagcatttcgttctgatcactcgaaggagccatcagtatctgacgtcagtactctgctgtctgataatccctccaggcaagttcagagtctctcctgtc

SEQ ID NO: 206234 - DNA, 485 bp, Homo sapiens
gttatttgaagatgaaaaagattctgaattttgtttaccacgattctacttttttgtcaaaaatgtctcaattgttttagaaattaatttttaaattaaaaagttttaagaattttgtatgctaactgtatttccattattaacttacttccatttccattatttcaatttttttttaaacaaaaaagcattattggctgggtgctgtggctcatgcctgtgatcccagcgctttgggaggctgatgccagaggatcacttcggcccaggagtttgagaccagccggggcaacatggtgaaactccatctctacaaaaaatacaaagtaaacttagttaggcatggtgaccagtgcctgtggtcccagctacttgggaggctaaggtgggagaatctcctgagctcaggaggtcaaggctgcagtgagtggtgatttcactactgcactccaacctggacagcagagtgagaccctgtctcaaaa

SEQ ID NO: 206235 - DNA, 370 bp, Homo sapiens
gctggccgtgagcgagcacgtagggctcctggcctgccgagggctggtggggtaccagagctccatagctagaaagccacctccagggatatagtcgtactactgtatacatatgtagtactctccagtgctttgtctcaagccagagaggggcttttgaatacctgagcagtgcttttcagtctttagtacactaggcatggtctggactgattgttaatataatacagatttctggtgcaaaatgtcaacagtgctgaggttgaaaaaccctgctgtcaagtaacaaactaaatgaaagtttcttggtaaaaggagatatgaaataacagattcaagagagaaggctggaagccaacaaggtctttaa

SEQ ID NO: 206236 - DNA, 577 bp, Homo sapiens
cactgcatcaagggatgcacaaaagactccactgggatacagaaagacaatctcagatcttctcttgatctggacctcaccatttcaaaatgcctcatttatatatttatatatgtttcttatttcttttcaagacagagtcttgctctgttgcccaggctggagtacaatggcgcaatcttggctaactgtaaccttcacctcccaggctcaagcaattctcttgcctcagcctcctgagtagctgagactacaggtgtgggctactgcacccagctagtttttgttttcttttttgagacagagtctcactctgttgcctaggctggagtgcagtggtgcagtctcagttcactgcaacctctgccttctggcttcaagcaattctcatgcctcaacttccccagtagctgggattacaggcatggccccatgccaaactaatttttgtagttttggtagagacagggttttgccatgttggccagggtgatcttgaactcctggcctcaagtgatctccccacctcagcctcccgaagtgctgggattataggcttgagccaccacaccctgcc

SEQ ID NO: 206237 - DNA, 212 bp, Homo sapiens
tggagtggaaacacatcctgtttggggctttattacataactatgtttattatatgattattgtttagatatgaaagaaaagatttagatgaaaatctaagttaagctctagtgtttgaaactgagaacttgatcatatgaacttggttaagttagaatagagaagtctgagaatagaaaagattgatttcagccaaagaaatttaatctta

SEQ ID NO: 206238 - DNA, 371 bp, Homo sapiens
ctcgtgaggccctggctaggcagctgccctctgcccccaaaatgaactctcctgaaaggactcctggattcctgagtatgaagaaactgagatgcccacgatgtacctcactgatgactgtgactggctcctggcccactctggacctcagctgactcagctgcaaagcaaggggtttgtttcttcagctctcagccttaattttctcgctagcccttccccagacccctgcctctcagacctaccaccctacctttgcatgtactcttccatcttcttgcaatattcttccgcactgttcttctccctctagcactccctgcatcacctcctcaaagaaagcttcctgaccttcccaggcactattggtt

SEQ ID NO: 206239 - DNA, 572 bp, Homo sapiens
tacattatccatttaagaatagatggatttgcttttagaattgtgctttttaaaaaaattgagtgtgttcatttgaacatctgtttcatcacttacaaaccaggcaaaaagatctgaaatcgtcaagagtaattaaaatttcattgtttacatttctggtgttaggatgttgactgttctcttgggggggtaaaaagcataatccctcagtgtctcaacctgtgattggttcctgaaacttgtgtgtttttttgttttgttttctggaaatgtttacttttgttacattgttcaaggtatgttttaggtgaatgttgttggtatgtgtgaatggtggaccagttaattgctgttggttattctggaaatacttttgcccctaccttagtgttcagaaattaggcttatttttcatatctagagattgtaaatttcttccataacactgtaacatggtggtttggttaaagcagtattatgttgaggaggacaagggatttgctgaggtaattctctgcctgtcaggctatatctttcacattgaacaaaaaggcacttatgagatacttagg

SEQ ID NO: 206240 - DNA, 466 bp, Homo sapiens
tgaaagaaaacatatttcttttttcaatttatgtgtattttttttttttagcagttactaagtgttaggaaatatatccttattaaattgtttggacatagctacttattaaacagaatcattaggtatttcttttggcttaagagttactgtgaaaaaaatcagagacactaaaggcattgaccaagaaaggttgggaacctctgctattgtgacatcttaagttttagctcctttttttttcttttggtaaagtctgaaagtaacgtctctcgtctagaatgtttcagaagaccaagttcgccctctagaggcaaaacggtggtcttgctactgaaggtttatacaggtatttttgatttttatggtagtttaaatatgcatgcacatacatttttatatctttatataaactaatgttctatgatattttcttaccataagtctctgaataaattactggttg

SEQ ID NO: 206241 - DNA, 200 bp, Homo sapiens
ttcaatctataggtcaattttgggggaagtggatatcataataacattaaagtcttccaatgcatgaacatggtgtagctgtccatttaaattaggtctttaatttcttcagtgacttttcatagttttcagtgtacaggttttttgacctcttttgtcaaatatttcatgttttggatgccactggaaatccattttga

SEQ ID NO: 206242 - DNA, 375 bp, Homo sapiens
tgatactcgtcgtactagcaccgtgagcaagcgtagttgttgatcctgagtagagaagaatcttcaccatgtcggccaggctggtctcaaacccctgacctccaatgatccacccgcctcgagcctccccaagtgttgggattacaggtgtaagccaccgcgcccggccagtgtatagcttcttgagtataggttaggcagtggctccagtagccctgttttacaatgtacttttcttaggtgttccaaaaagctcaacctagagtgtgtaaccttatccttcaacttagagagcatttggttggccttcctgacccaacaatcctgtaaccctttatattttatatctttgctgctgagtagattctattctct

SEQ ID NO: 206243 - DNA, 502 bp, Homo sapiens
atttatatataatattaaataatatatgtatatatatttatatataatatatatattaaataatgaaatatattaaataataaataaataaataatttatttattgttttgtagagatgggagtctcactatattgcccaggctcatctcaaactcctggcctcaagcattccttccacctcagcctcccaaacggctaggattacaggtgtgagccaccacacccagccctccctcatacattcaaatggccaactcccttggcttcctcaagtctttgcttaaatgccatcttctcaggaagtcattttctgaacactctattaaaaattgcaacctgcccccaaacacgtcttgcactccagcctgggcaacggagtgagactctgtctcaaaaataacataaaagaaaatagatattattttctgtaatcacagcagtgttactaaaaaatttaccttgattaccatccgtacgccaattttgtcagttgtggtaaaa

SEQ ID NO: 206244 - DNA, 280 bp, Homo sapiens
tattttttttctagtatgctcaaatacttaatcaaacttaggaaagaacaaataagcaatatcacaaataatattgcataaggagtaaaaacattctaatgcaaaaactcaaaaccataattcctaatttttttggctaaccattattttttaaggtgggataaacatatagttatatattttttcttttaaaaaaattttcatcacaggaattagtcggaagtaaccaaacgcactgctcaagaatattgtagaatttatttaagggcaatgttgatag

SEQ ID NO: 206245 - DNA, 461 bp, Homo sapiens
aatgttatacagatataaacatggattcctccaggtcaggaatccacagaatttgacagatttgtttttttggcctctcaaagcttaaagtttcttagaatatatcatttggatgatatcttttaggagaaacaataagagcataaagtgcaactggaatctttgtcctgaaagccacatgagaagcttgtgcctttagatttgccttattcttaaatactttgtggtttatagtgagaagaaagctcacagttgctcatcaggaagcaattttttatgcccctgaaaatactttttgtaggttaaagcagtcactttatgatgtgggaaccatgcttctactgtagctggaaggcaattcactgattcccattatacctgcatgaaggtttccttccctttctgtggatttataactaaaaaatgactgtattctcttctgatagtttcgcaaagtgaaa

SEQ ID NO: 206246 - DNA, 201 bp, Homo sapiens
cttgaaggatgaagaccagttaaattgtagaggaaagagaagtgagtgtgttgggcaggagaacagaacaggcagtggtcagacaggaggcggcatgacttgaaacagagtgcagtgccctctgactgggctgatgtgtttatttgagtctactgaaaaataacacagatgattcaaatgtttgagctgtataagaacaaa

SEQ ID NO: 206247 - DNA, 526 bp, Homo sapiens
cccagtttgggggtggaactgttagttcctctttttctggataaggaagttgaaaggctccagaaggcaccaaggtcagctgatctgccagtaggtacagtgtccacctgtcactcacagccctcccttgaccgcttcgcctgtctccccagttgagattctgtgtgtacttgaacactttgccaatggttgaacctgcaccagggtcactgtgtcagctgggcctgccaggccaccgtccccgagctctgtccaaggcagggccagtgttcataccttgcttccttgccagtgtcccacccaaggccctggaaaggccctggagtcagagatccggctaaatcctggcaatgccccatacctgctgtgtgactatgggccagcgactcagcctctctgtgcctcccgggttgctgtgagggttacaggagatgcacagagggccctgagcttggtggctggcatgctgcaaaggctagttacgtggtgcaaggatggcactgatgacaataaatgaatcgaacga

SEQ ID NO: 206248 - DNA, 440 bp, Homo sapiens
gtaatctcagctcactgcaagctctgactcccgggttcacaccattctcctgcctcagcctcccaagtagctgggactacaggcgcccgccagcatgcctggctaattttttgtatttttagtagagacggggtttcactgtgttagacaggatggtctcgatgttctgatcttgtgatccacctgcctcggcctcccaaagtgctggaattacaggcatgagccaccgtgcctggccgattgttaatattttgatgtatttctttgagtcttttttcttttgcttacatgtatgtatatttgtgtatatgtatatgtactttacataaatgagatcatattgtatcagctatgttataatgggaagatattttaaagcagattcaggcagtactgtagggaccacaaaaaatgctgctttttcatatgatagataaaat

SEQ ID NO: 206249 - DNA, 464 bp, Homo sapiens
aatttcacttctaggtatatacccagaagtattgagagtaggcttaaacagatatttccacattcatattcacaatagccaaaaggtagaaacaacccaattttccatccatagatgcaaagatttttttaaaatgtgctttgtatatacaatgggatattattcagccttaaaagagaagggggccggggcacggtggctcatgcctgtaatcccaacactttgggaggccaaggcaggcggatcacaaggtcaggagattgagactatcctggctaacacggtaaaaccctgtctcaaaatacaaaagattagccgggcatggtggcgggtgcttgtagaaccagctacttgggaggctgaggcaggagattggcatgaacccgggaggcggagcttgcagtgagctgagatcacgccactgcacttcagcctgggtacagagcaagactccgtctcaaaaa

SEQ ID NO: 206250 - DNA, 550 bp, Homo sapiens
ttcgactatacacgatccccatgccaataacctccagactagctggctactggaacctcttacaacttcttattgcatcaaggaaaaccaaaatgacccccaaaaacggctgaaataacagactagacttttaaggtagacctgggctgaatgtcttataacccaaagtaaccactttgtgaaactcacagattaaaatagctgcaaattctccatctgaccatgaccgaggagagagcagagaagacagagccaagaactcaaaacttctaagcagagatataccattcacaaaaatgtaccacccgtggcagtggcaccaggaaagagaaacttcataattttatttaaataaaagtccaactgaggaaagctccagttccaatccaaggaaatagaaagaagtgaccaggcggcaaccctaaggagctaaatttagtactcaacagtgccaagggccagcaagaataagaacagagagggttgggccaggagctgccaaaaaggtgtccatcagagaggagaagtcttgaccactactcattttatc

SEQ ID NO: 206251 - DNA, 398 bp, Homo sapiens
tcaatacctccctctactacccattattctgttctggatctcgaacatgctttctttactattcctttgcacccttcatcccagcctctctttgccttcacttagactgaccctgacacccattaggctcagcaaattacctgggctgtactgccgcaaggcttcacagacagcccccattacttcaatcaagcccaaatttcatcctcatctgttagtcatactcctattcaccattctcaactactcatacatgccctgctcttgtttacactgccggtttacactgtttctccaagccatcacagctgatatctcctggtgctatccccaaactgccactctaaactcttgaagtaaataaataatctttgctggcaggactatgctgaatctcc

SEQ ID NO: 206252 - DNA, 327 bp, Homo sapiens
tggccaggctggtctcaaactcctgacctcaagggatgcacctgcctcagcctcccaaagtgctgagattacaggcctgagccaccatgccctgctactgcacccagctactcaaggcacatatggagccaacatacttgaccatctgcaggggtccacccagggtaggggagctatgagcactggcgtcggagggagcccagcttattggcccaaccccgagatagacccatttcccagtgggcatagcactccaaggcttgtcactcacagcctctgcaactccaagtcttggtatgcctgaaacccatactccacatgagcaca

SEQ ID NO: 206253 - DNA, 432 bp, Homo sapiens
tgaagtctgaaaggaggactgaggagggagagagaaaagaggaaagtttcttagaggtgattagcacctgcttgatgccaggccctgtgccaggctctctcatgcatactcatttatactcaccatgatcctgatacgtagatcttaatgttttcattttgtaagtgaaggaactttgagaatatgagaaattacccaggttccatagttggtctcagagcttcctagttcaagcctggatttgaaatagggtggtagcagtgggaatcaaaacatttaatggtgatggaatttagaaaaatagagacttctcaagcacatttaagcctaaaagtaggaattgggaaatctgaatcttactggaaaagtgataaaaagtaaagtggacagagaactttagagaatcccttcatgaatttggtatttgttctt

SEQ ID NO: 206254 - DNA, 326 bp, Homo sapiens
attttagttaaaccttcacattagtggaggaaacgatgaactcatggcaaattaagctaccctccctaagttatttttcctcaacaaatcaaactcaaagacaagcttacaaaactggaaacacagaataaaagaataaaagaggacactgtctcctatgccatattatagtccagaattagttaatctaattcaaagtattggcaaggatgttccatcaactagaccaggtatttatcattcattaccatgtactgcttaagcatgtaaagtagctgaaacacaaatattttggagttatctccagacaaagagtaaaaacacaa

SEQ ID NO: 206255 - DNA, 398 bp, Homo sapiens
tttttgtatttttagtggagacagggtttcaccattttggccaggctagtcttgaactcctgaccttgtgatctgcccgcctcggcctcccaaagtgctgggattacaggcgtgagccaccacacctggcccaatttttttgtatttttagtagagatgaggtttcaccatgttagccaggatggtctcaatctcctgacctcgtgatccacccaccttggcctcgcaaagtgctgggattacaggcgtgagccactgcgtctgtcctataatgccactcttattttaataaaagtatattctttaggagggctttcaaattcttttatttctccttatgaggtggatgaagcaagaatcattgtgtcttatagatcaaggaggtctaaacagtgctg

SEQ ID NO: 206256 - DNA, 404 bp, Homo sapiens
gaaatgcataatctttttcttttttgagacggagtctcactgtcacccaggctggagtgcaatggtgcaatctcggctcactgcagcctccacctccctcccagtttcaagtgattctcctgcctcagcctccagagtaactgggattacaggtgcctaccatcatgcctggctaatttttgtatttttagtagagacggggtttctccatgttggccaggctggtctcgaactcctgacctcaagtgatccgcctgcctcagcctcccaaagtgctgggattacaggcgtgagccactgcacctggtctgaaatgcataatcttttaaaactgaaagccatttctaatagtgttcttaatttgtcaagaatcgtatgagaagtgccagtgccctttgcctgtc

SEQ ID NO: 206257 - DNA, 453 bp, Homo sapiens
gagatttagaagggccaattagccccacagtatcacctagcagggagctgtgtaatgtggctctttgagtagagaacaaaagagtacgtagttctcagtactctatttgatctccataatgcccaaataaagagtgtatgggcccgggatggtggctcatgcctgtaatcccagcactgggaggcaaaggtgggcggatcacttgaggccaggagtttgagaccagcctggccaacattgttagctgtcttttagtagagacagcaaaaccctgtctctactaaaattacaaaaaattaattagctgggtgtggtggcatgcacctgtagtgtagtctcagctactcaggaggctaaggcatgagaatcacttaaacccaggaggtggaggttgtagtgagccaagattataccactgcaatccaacctgggtgacagaacaaaactgtctca

SEQ ID NO: 206258 - DNA, 540 bp, Homo sapiens
agagaagataagaatatgaatgaaaccagtttactaagtatacatgactgtcccctttctttttttttaaaaaaataataaaacaataatgaggataataacaacagctcatgtttgttgagtgctctagtgtgccaggcattttacatttaatccttaccttctaaggtaggttttgttatccccattataagaagatactgagtctgagatgaaatagattgcccaaggtcatgtagctagggagtgttagaaccagaattcagacacaggtatgacacagatatttcagacactgaattcttaacttggtattatgctgtcaggtaatataataagtaagacttagttcctgccttagaggagttcttaatttgggtggtctcctgatcacagtatgtactgtgattatgttatagaggaatgaccaattgattttgctctagagtgtaaagacgtttatcttggaaggatctgcagaggtggtgtttgaaatgggtactagagattgagtatgatgttaacacatagtgaagaggg

SEQ ID NO: 206259 - DNA, 422 bp, Homo sapiens
gccattcgaagcacacccaagaataggaaaagacacaatttcaaaactaagagatcaaccattgaaattggataaatttagccttatgaaatactcaaacaatttttttttccccgtttctctgaggacctacagatgcaggtattgttttgcaaaccagctttgagaatcactgatttgtggtattatgcatgtatcctttgatgttgatactattaacaaatgagcatcatatccttaatcttgcaataagattgcgattagagtctaaacatgataaacgaaaaattaaagtaggccgtgtgtcatttctggcctagagatacttcatttgtttcttttttttttttttttgagatggagtcacgctctgttgcccacgctggagtgcagtggccatcttggctcactggaatctctgc

SEQ ID NO: 206260 - DNA, 722 bp, Homo sapiens
cgtgcctcaaggcagaatgaatatcaagtaccagatgatgatggaaagaattctgctggagttcagtggacacagctgtcttatggcctgaggtgtaaggatgacactatgagaaagggagccttgacttcacttttgaagaagtgtgcagggagcacgctgggaaaaggagggctggaaaagagatgagatcttgctggatcaactgaagcacctgccacctgcttggcaggacaggaaatcttaaagtcaatgctcctcacccttagcaccctgcaaccaaaaagaaaattcgaagggttcctcactctatttgattggagttttgaagaatctgtggcatcgattcctggtgctttgctgcccaggcacccctaatcttagcccccaccactagggggcctccctctagtctccttccttctaagcattgatcacagcccactcaggtttaataagcatgactatccatgtctaaaaaaaaaatgatactttatgacatcaatttgttgtgaacttttcaagcttttcttcccaaatagcatatggatattcaatttggaaaattttgatataggtttaaacaaaatcaaattcaaataatctgtaattatgccaaccccagaaagctaatgcttttgcttatttttagatatacttccaaatttataatattatgaatagtagtacacgtcagtaagtacacatcttatttcacaaaa

SEQ ID NO: 206261 - DNA, 245 bp, Homo sapiens
gagttcactgtcaaacagagattcccaagaaaccaaacagaaaaggaataaaaatgagaagcatgttttattaaatgtcttctacacctgcttcctttatcttttagacctgcttaccaaagcccattggatattttgattttttaagtcacaggcatatgaactagcttgaacatttatagtatcaaattattaaaggtaatgacctggtatttaaaaaatgatgttccacatctaggggatct

SEQ ID NO: 206262 - DNA, 627 bp, Homo sapiens
tttgatgcatgatagaaataaaaacaaaaagaaaatatgatttgcaatattcaagtaaatgatgtgtaatcttctccccacccccaagccttttggttcccttcctgtcaggtttggtatatgaaatttttgatcacttaaaacagttgcagtttataattagaacaattacctgctggaggggtaagcacatacaaacaaagtacagggactcgtctcacctcatgtattctaaaaacaagaattctgaacaatgcaagaatttttaatcactaccacttgggatgttttgaactaattagtcatttaggtaatacttttagagtgttattctactttgtgttaaaagaagaattaagcctggtgtggtggtgcatgcctgtagtcccagctactcggaaggctgaggtaggaggatcacttgagcccaggagtttgagtccagcctgggcaacatactgagatcctgtcccttaaaaaaaaaaagtgcaattaaccataattaaaatgttctacacaagaaatcttactattgcagaatgttataccacaacatcctcaaacataatagttcggactaaaaccaaataccttataattcttccctctcctttctctcttccctct

SEQ ID NO: 206263 - DNA, 901 bp, Homo sapiens
cccaggctggaaggaactcaccggctcatggctcaccaacccctaactacagctgggcaggcaaggagggaggctgcaatttcattcacttctttagattgatgttttgacatctttagaagcctctgttaaaatggaaatgtggaatctgagtagtgtggtcaaactggtatacgaggacattttggtggtgactcaagtctgatgaagcttttctagtaatttgtgccttccatttcctaggaacaagagtgagtgaggactaaggacacaaaacagcagcagtttcagccccactcctataatattctaaaagcttgtccttagatcttgatattcttctctcaggcagagagcttaagaatattagagaaatatcctgatacttttgcattttaaggtaagccacagccagaaagaacaatgggaggcccagaagcccacctccaaccactccaaccagatacaccaaggactctggctcagaccagatacagccaccttggtgatccagagaggcctcctgctgggtgcagtggctcaagcctgtaatcccaccactttgagaagctgaggtgggaggattgcttgaagccaggagttcaagaccagcctgggcaacatagcaagaccccatctctacaaaagaaaaaaagagagagagagtgagagaggcctcctatcaggaatcatgctcaagttccaattcaatttcaatgagagataagggagtaaacagcaggaaggagggagattccagaagaccccaagactgcattgttgggctgtcattgttcatgggaattactcacccatgggtctccatcgggtttcacccacaggtctgtgcaccatgtcttgctctctaggaaccagaacatctctatggttctttggatag

SEQ ID NO: 206264 - DNA, 281 bp, Homo sapiens
gtgattttcttgttcctgttgaaactgggtattttaatattataatttagtaactttagaaatcactttctcattcttctctagactttgctgttcttaattactgaagtcttcagtatccatttgtttttatgaatttttcaaacttttttttgcagtcttatgtgtggtcactgaattctctctctttagcttgtgtttaggtagtgttttaacaggcatttttcctggaaggccaggtttcaaacaaccaccaccaaacaaaaaagaaaaaggaaaag

SEQ ID NO: 206265 - DNA, 503 bp, Homo sapiens
ggagaaatacaggtgtgctatagggagaatgaaaagagccctttccaatttggaacagtttgcgtggaaggtggggccttgcccctatggcatccagatctgttcggtaactgcaactaacttttcttttcttttcttttcttttcttttcttttcttttcttttcttttctttctctctctctctctctctttctttctctttctttctttctttctttctttctctctctctctctctctctctcatggttcttgtatgaattctaattaagagacattacattcagaattatagcactcatggtgataattttcagaagactgtaacagcttctttgccacttaaggggtacaaagggtgcagctgtttccctgaaggaattcttaagttagtgactactaccactcaaattttcctagttgtcgctctgttacaggttactgaccgcaagtccatgttccagacattctttgccaacacaattaattacaagagagcca

SEQ ID NO: 206266 - DNA, 416 bp, Homo sapiens
gccttttgaaaaaaagttttattcagggttttcactgtggacagaattatatagttgcttacttaattctgatagtttgtatttaatccttgtataaataggtgaaaaagattcaggttttctttagtagtcaatagcataaagcgttgtgggaaaacgagtaattgtcaagtgaaacatttttattggtgaaagaccattccagccattcagttgaaccatcttataatggaaatatgatattcatagtttataaacattctatacaacagacttaacacttgttgtatgtatgtcaagcaaccaatcaaagtttaaatagctatctccatactaagaaaaattaatatatacagtattagtacacgacagtgcattctatgaaatacaaaatgcactcaagtgcatccaccagg

SEQ ID NO: 206267 - DNA, 191 bp, Homo sapiens
ctgaggatcccgagtactgtccgatatcgtaatctgcgttgtagcctatacctgtgtaactgtttctagaagtcctcgtgggctgtcagtcctgcccaggtgtgttgttctctcaggattctctgggaacattgctctgtactaggatgctcttaggtctgtagaccctgctttgaagggttcctcctgat

SEQ ID NO: 206268 - DNA, 669 bp, Homo sapiens
tcaaaatttaaagaatgatacagcttattaattttgaaaataccacaaactaacttacaaggaaaatagggacactgaagtgttatagaaactctacagtcatcttataaatttccagaaaacacattagaatcaatattgatataaaatatgattattaaatgctaaaaggtaacatttttacatttttattaatatcagttaaaaaacaaaattctactcaattcttaagctaaagtgttcttgctgtaatttcattgccattctcttgttgttcttcccataaaaataaatggctgggtcagaagtgaaatgacatgtgttccagtgttttctgtcattcagtaattatgcattaccattatgtccaaagattgccttctagttactttcttctagagttgctcaaaatgggccttgtgactctacaatgagagtttcaagggatgatgtcagaggccgatactccttggaggcagcagggtgagattagtcacgcctcacttttttccccatgtcttggtcctatggacattctgttcatttccagtatcagccagctcatcagacaggccctccttttcctttctccatttgactatttaggtttcgtatttattttgagagctttttcccatgagaatgaattgcccaagcagaccctatgta

SEQ ID NO: 206269 - DNA, 479 bp, Homo sapiens
atggaaacaaactagagaagtttgaaatcagagaggagtgatgcagctagcaaatgcctggtcagggatgtggagacttactactcaaaatgtaaagaggaataaaggaaaaataggagaaaaataaaaaggagaaacagtgatgcttcccttttgatttacttactcagcatacaatttatcccttggcttctgtgtaatgaataataggtaatctttatggaattgtctatacatgtgtatgcataataaaaccattcactcacagttgggaaaaattactgatgtgcatctctttctattcatttttgtaaccctagtgcctggtacataatatgcccttttaagtgtttctagaatgaataaattctatttaaagctgaaaaactttttattttattgttttattttattttaagacagagtctcttattttgagatggagtctcactctttcacccaggctggagtgcagtggc

SEQ ID NO: 206270 - DNA, 442 bp, Homo sapiens
ctgcctcataactcccgcctcttgcagcccaactgggccaccagattaacctttctaaaacactgctgctttctttaacttctcatttcaaaaagctcattgataccctaaagccaagaaagagtccaaacccattactcacaaagtcttctataatcttgaccagacttatttttctagattattttccatctgctttcctataaccaccacactgggccaactacttttcgccaaacatactttgcacttctacctcttctgttcccgtttcttcatttacccagagggcctacccgtctttcaaggcatagctcacatgtcacatgttctatgaagattggtggcatttcctcctccctcctccgagtgaaggaatttttataatagttttaaggggtagtagtgcagttttgttacatggaggtattggcatgttatg

SEQ ID NO: 206271 - DNA, 306 bp, Homo sapiens
tcatgaggtccttgcaatgaagtggtgcgaagcaggcattcagaatgaaacatcatgtatgaaacaagacagatgaaaagaagcaattaagagattgatataatttcactcttaaaagaagccaaatgcccactcttaaacagctcctgtatttgaagggggaaaaaacaactacaaacaaaagaaaggacagacagagactcttgagatcaccatacaattattgatccatgcatgggctttatcagagtaacctttaaatattcacagccttaatggataccataatcccttttcctatagtca

SEQ ID NO: 206272 - DNA, 456 bp, Homo sapiens
cagcattaagtagtggccatgacccaacccctctctgaggcagtttctcccaccaccatggggacatgtcctggatgggtgtgacactccgagggaatttgactctagctccccaaagaggtaaggagctggacttcttagttcccttctctctactcatcccctccaacctcccccttggccgctgtggttaatctccctccacacacacatgcacacacaggtactaatgaagtcctagtttgtgagtgagcagggaccttggaataagtcctttcctaaggtagggtcttaagttgctatccccctaggagcctgagtgcctagagggagggcgaggagacagccacaggcaagttgcaatattttctctacatattctgcctggaatcaagatgctcaggaaacggccgggccgccgggggctcacgcctgtaatcctggcactttgggagg

SEQ ID NO: 206273 - DNA, 415 bp, Homo sapiens
caaagactagaattcttaaattcgctatcaggttttttcccattaaacttgcctgagtttatttcccagtttattcttgaaatgtttatataatttttttgaacttcagagttattttagaagctattttgtagtagcaaaataaaacttgtgttaaacttatttttaataatacaaaacattttttttaacacatcacaaattatttataaggtatttagagcattctgttgtttggcccttaaaacaatcctgagagatgagcccagtattttttttttctaatttatgtagaaagaaactaaagagttcatatataagattggctggttttcttcctactgaatttaaaaggccattgattttagtgaacacataatcatatttctccttataaatttcacttactaaggtt

SEQ ID NO: 206274 - DNA, 509 bp, Homo sapiens
cctccctaaaaattatagtatacctagatatgagtaccaaaatatttgttttaaaatctgggtgtgttgattttcacagagagctaaaattagtccataacccacttaatattaactgacatccaccagagataaacatggtaaaattatatggctcaagcaactccacagtgcaaatggagatccacagaaatagagagttggacctttagaattctttttctaactttgtttagtatttacctcctttttaagataaaataactgaaccaatgaaaacaggtactttgaagctgaaactgagccttacctcctccaagattgagaatgtggttgaaaatgtcccttgaatttcccagttacacaattatttaacaaactttgaatgttatttgttcggctgctatgtgtaggtgaagaaaatgtgagccagagagactccatccaatgttagataaaaggaacacgcaaggagcattggaaaacatcaacctttaaggagtaggtca

SEQ ID NO: 206275 - DNA, 373 bp, Homo sapiens
tgtaggtcaggtctactcctgtaaaaggagaagtgtgcaggacagggtggttctggtagaagcaaagacaatttggtagtgaagagtggaagggattgtctacaggacatggaggctgccatctgacctcgacacactgcatttaaatcccctggggcccatcagacaagtcaccacactgatttaacagccatcaacagttcaaactaatccagtgatcctcaaagggtggtccccatgaacatcagcatcacctgagaatttatttatttatttatttatttatttatttatttatttatttatttattttgagaaagagtctcactctgtcgcccaggctggagtgcagtggcgcaatctcagctcactg

SEQ ID NO: 206276 - DNA, 297 bp, Homo sapiens
  misc_feature (286)..(286): n is a, c, g, or t
ccatttcctccccacactggttatgccctagaatgacgaattgttctaggtctctacccataactgatggcttcatagctcattcctctcctgtctggatcaccccctcctgtagcctacctcttcctgcttaactagctgctcatccttccaaactcagctcagaagcctggctcccttacacacttgagctgggattcatgtctgtgggctgtgtttccatagtaccctttgctgaagtttatcactttacttagcaccagtgtggagagagccagtgtggagngagcgtaccgg

SEQ ID NO: 206277 - DNA, 384 bp, Homo sapiens
tatcccctcatgcaactgcttctaattctccattagcatacctacgaagtcacagtaaaaaatgaaaatgaatattaccattgaaatcacagatgactgataaccttttgctaggatcttagaggcatgtgcactgacaatagaatcaatgaaggtgcctgtaaccccagcactttgggaggccggggcgggcggatcatctgaggttgggagctcgagatcagcctgatcaacatggggaaacccagtctctactaaaaatacaatattagctgggcatggtggcacatgcctataatcccagctactcaggaaggctgaggcaggagaattgcttgaactttggaggcagaggttgcagtgagccgagattgcgccagcctg

SEQ ID NO: 206278 - DNA, 505 bp, Homo sapiens
agtcctttattccaagaactcgccttcctatctcataatgccacaaggcccgcaggccaactccctttccctttccatgggcagcgagtaacaatttattagatcagaattgatccagaggaaacaccacagatgccaatccacgcccgtgacagaaataccaggcagtcctaattctccaaaccaaggagacagggctgaagatgctaagaataaactgcggggcctgcggggcgccagaaacaaaacaaaatgaccatcgatggacacggacagggcatgcaaatacttatcgatcagtgtgggcacagtgccagggggcttttccattctcggaagtattcactgccaggtgtcctgcttagagatgctggcaagggtcaccctgggcgggcagtctcctgttggggtgtcagagcaccccaacgtgcatcacaggcaccctggcacgaagcctctgccgcgaaggcttttgtcccagtaaaatccaaagaagacacatgca

SEQ ID NO: 206279 - DNA, 274 bp, Homo sapiens
tcagcctgctcaatgtgaaaacagtgaagatgaaggcctgtatgatgatccacttccatttaatcaatagtaaatatattttctttagcttactttaatatggtatatgatatgcataacatacagaatatgttattgactttatgttattggtaaggcttctggtcaacagtaggctatctgtagttgagttttagggaagccaaaagttatacatagattttcaactgcatggggattggcgcctctaatcctcacattgttcaagggtcaa

SEQ ID NO: 206280 - DNA, 513 bp, Homo sapiens
accaagaaagtttgacattttaggtagcttgataaatgctctcaattcatcttttagaaattgaaagtccctcaaaattcccttagaatctgacacttgagttttggatccactgctgaaatatacattgaaggacttcaaggaacctctgtagttgtgcaatgtagggaatgaggtggactaacctcacattcacctatttggcatttagcaccttatttctctttaatagtaagcatgtatccacctgctctgcaacacagtagtgtttatatattatgctagatactttgcatacagtgtttcttatttactttttgtaacaacactgtcaattggctatagttgctgttttcctaaggaggaaactgaagggcagaaatgttaaaacttatctaagctgttaaattgcaaccaagatatcagaacttatctacctgtttgcaaagtccaccccgtctccactataccatagtatttcagagtatgttttgaccaggaaattcgaaaaaa

SEQ ID NO: 206281 - DNA, 437 bp, Homo sapiens
agatctcccagacaattcaggcagccctccctctctgttcaaccttgcatcttccagtagaaatggaagccaacgcacaccccgtagaatattctagtgcaagccatgctatttgccaaggcctgaatctctgccacctcatgctccacgctcaagccacaactgagagttgagagaggttatacttcgacccttccctctcagacattctaactgatgattgagctcaaattcaagaattcgccctggctcggtttgaggactgccttagaactaaataccaagtggttgctggcttggtggctggagctggagaggaagaggcaaagaaagaagtctgctggtcaggcccctaggccagctaccggctgaagaacactttaatctgtgctcgaaaaagcatctcggaactccaggatgtgtccacaacctgtctg

SEQ ID NO: 206282 - DNA, 401 bp, Homo sapiens
aacagaaagttaaattactgttctgaggttcttaaattcagagtggagtttgtgcttgaaccaagtataatattacttgatgtacaattgggcagaatagttagaagtttggatgaaattttgtcctcttcctgtttctttttggcttttgttgctctggattttttttttttcttttttcttggacagggtcttgctctgtttcctaggctggagtgcagtagcataatcatagctcactgtaaccttgaactcctgggctcaggtgatcctcccacttcagtgtcctgcggatttatgctgaggtttgtcaatgttggatactattgtccttgtagcctgtgatgtgaggaatagcccaggggcattgtataactttgggaaatggaggtggggagatg

SEQ ID NO: 206283 - DNA, 524 bp, Homo sapiens
tagctggtgctcaaagcgtgcacctgagcctcatgttggttttctgctgtcagtcacttaaaacttacaccatggttttttcctcttgtgaactccagtatttaaggagattggaagctctgaatctctgggtttgcctggaagaagtatgtactttgctttgccagacctgagatgctttacaaatcatcttgtctgcccagttcagtggagtgagattagaataggtctaacatcctttgaaaacataggcccatggtgaggtttgcaggtaactgagatcacagctggctctgaagaaaaaatgcagcctcttgggagtggccagtccaggtacctataattgaggaagtgacctgattggggaggtgacttatttaccctgggcaattaagaagcatttattgaacacctactatgtgccctaggctctgtgctgtggggatgacaagatgcataaggctcaacttctcctcctaaagtatttacagtgggcttgggaaagcaaggcttatgtgtgtaaa

SEQ ID NO: 206284 - DNA, 469 bp, Homo sapiens
gtagcatactcacagttgtgcaactatcactacaatcagttttagcacatttttattgtctccaaaagaaagcctgtatccattaacagaccttccccatctttccctccctactcttaggtgaccattagtcagctttgtgtctctgtggtttgcatattatggtcagttgctataaatggaatcatagaatatgtggctctttgtgactggttcctttcacttagcatagtattttcaaggtttctttatgttgcagcatgtatcaatacttcatttctgtttatagccaaataatattccactgtacagatagaccacattttgcttatccatttgtcaattaatagctactactaattttttaacatgtttgtcctttctcctcccctccatagtagcattcttgatgacagggacccactcgtgacttttttaatatttcccactgggcctactattgtctctt

SEQ ID NO: 206285 - DNA, 367 bp, Homo sapiens
ttgaggggtttcatcagtttgtctttttttcacctactttctcttcagagtgggcctaatctcactgtttttacttgcttatatattttttaaaacctgtattatatttttcacttctagaatttctattatggttgttattgttgttgttatttaaataggtcttttttcctggttctctgttcgggatggggcagccctcttccctgctatcctcattcctgcagccttgacttctgcccttgacctgagtgttaaaccctagccctaagccctgtatgcagtactgctactcctgggactttcttgaaggcgctggtccctgggtgtaactgttatgaatttgttggctaacttccttccagtc

SEQ ID NO: 206286 - DNA, 560 bp, Homo sapiens
tatacaaaggatctagaatcatacaagtgtgtggtttgaccttgggtctgggttgggaatatgggcaaattatttaatctctccaagcctcagtttgcttatctgtaaagtatgagtaataacatctcagatattagtggtggtatgagaattgaaggagaccacacagtggcaggtggttttaaaacatgatttttacaaatgttacccatgactttccaaagcgctctgagattcttaggcttagcagcgtctgaattataaaagctgtatatttatgagcattagcctttcatgcactaatttccttgaccctttgcttgggctgatgcttatacatactgttcctggacttggtcagtgattaaggcccgaggtgaagaagaggtcagccccaactcttccccccttggcttctcagctctgccccatcctgcggctgctactctgaactgttcacacttagtttgcaaatgtgtgtcagaaagccaggtttccaacattatagagaaaaacccgctcatggcatctgctcagcttgctggggcatttgtaagggc

SEQ ID NO: 206287 - DNA, 97 bp, Homo sapiens
aatacaggctactgctgtcctcagattatctttacttggagaatgtttttgtagttgatcattgctgttttcaggaacttctagtaccagtacattc

SEQ ID NO: 206288 - DNA, 274 bp, Homo sapiens
ggagagaacacagcctaactataactaatatgcatatgataaatgtaaacaacacacaaatattaggaaaatatctgaggcaaggtatgtgcactattgaatgtcatctgagaactgaccaatgagattgttccagtgcacttattttaagaacataccaattatgaaaacttaatgagagttctatgaaaatcataacttataaaacatttaagatatgtgaaatgtgtgtataaaataattccatcactgtttcatctttaaccaccaaacc

SEQ ID NO: 206289 - DNA, 256 bp, Homo sapiens
agaaatgttcaaggatcaatggaaagagatgctttcttccgcagcgccctgcaacggtgggaggccacactcaggtgctgccgcccatctttttgccactgcataggaacagacaatgagcagcacctagacaggtggagctgagggttggggagaccagggggccgtcctgacggtgtcggtgaagctgctgtagccagtcatgtgctataactgtttaattacatattaaactccttttctctccattggatta

SEQ ID NO: 206290 - DNA, 303 bp, Homo sapiens
gggctaacatggtgaaaccccatctccactaaaaaatacaaaaaaattagccgggcgtggtggcgggggcctgtagtcccagctccttccgaggctgaggcaggagaatggcgtgaacccgggaggcggagcttgcagtgagcggagatcgcgccactgcacttcagcctcggcgacagagcgagactctgtctcaaaaaaaagaaaatataataactaattcaaggctctgtattctcaaagcatctgtgtcaaaattctcccatttttcaagattcctcaataaactaattggtaactgta

SEQ ID NO: 206291 - DNA, 693 bp, Homo sapiens
tggcaccactacactccaacctggacaacagagtgagaccctatctcaaaaacaaaaacaaaaaacgctatagtttatagacttacattacaaactaataaacacatccgtttatgagactgagttgctagactcagcctctgagggcaggtcttattttcctgaacacatactttggaaaagctactaaagctaatcagactcttattcatgaataagatcctcacaattcagagggaattcaatttaaaccactgaaagtcttatatacgctgtgtaattagctctaacttaacaaggatttatcctatttgctaaaggctttcccctcttctttctgagttatggtattaagctatgtctacataccctaaactcaggactgacaagtgatagtttcagcctgggtgtttcatcctccagagacttgggaacatgctgatactatttagaaaaggccagataatgcttggtgcacggtaggccataaggtccagattctagattgaatctttttacttttcattctgaacacccagtatcagtccatatgccttcacagtaataataaatcaccaaaggaagaatcaattactaagatgtactgaatctggttctataaatgtcttggtgatatggtctttttattaactcagtgcctgctgacagattttacataaagtgtaccgttat

SEQ ID NO: 206292 - DNA, 161 bp, Homo sapiens
aattaaagtttttttgcagtctttttccttgtatcgtcttgcttttttctggttcttctattctgtttgttttcatattggtcatgtaagagtttttccttgagtgtctcttcacccgggggtggaggggtcactttttaaaagtaaggcaccaagggcca

SEQ ID NO: 206293 - DNA, 272 bp, Homo sapiens
aacaaggagcagagagtctaagaaattgggtataattctggggcctgggacttgctatgcactgcagggatgacacacgaaggtgggaacatggccatagtggctgcatccagcccatcttagaggcaaatgggaaaaatggcaaatgaaaatcaggctgggtacagaggaagagtactaataccaccacaggcctcaccttaggtccctgggccactggggatcctcagagatgctatttgccttattttgaaaagctttatgaaaataaa

SEQ ID NO: 206294 - DNA, 271 bp, Homo sapiens
gcagttttcatcagggaaacaagactaagcaaaagcaacttactctaagcaacctctaatttcctattctcttacttgagaagaatctactcaaggataccctcgtagctcaggaacttctttgggtcattgctgaagacaacaaaatatgtgacctattccagtttggagatattcaactatatgccatttcagattccacccttaattctactgcaagtcacttgtggggctaaaatgctatatattcacttgaattaagtctcattaa

SEQ ID NO: 206295 - DNA, 375 bp, Homo sapiens
gcgcaaggaagagagcatgagcttcagcgttcagacctggattcaaagaccagtttctgggccaggcacaatggctcatgcctgtaatcccagcacttttggaagctgaggtgggaggatcacttgaacctagaagtttgagaccagcctgggcaacatagtgagaccccatctctacaaaaaaatagaaaaattagccaggtgtggtggtgcgggcctgtagtcccagctactcctgaggcaggattgcttgagcccaggaggtggaggctatagtgagccaagattgcaccactgcactccagcctgggtgacagagcaagacccccccatctcaaaaacaaattaaaaaataaataaataaataaataaatg

SEQ ID NO: 206296 - DNA, 375 bp, Homo sapiens
tcagatgtttcagattgcatttatacgtttaatatatttgattttttttttaaagaacttcagttgtcctacttaaaaaaaaaactttataaagctcttcaatgaaaaaaagtcttgtgaaaaactactacaagtaaacacagggggaagcactttaggacattggtctggacaaagattttataggtaagacctcaaaagcacaggtaacaaaagcaaatttagacagattggattgtatcaaactaaaaaccttccgcacagcaaaggaaacaatcaacagtgaagagacagtctacagaatgggagaaaatatatgcaaaatactcattcaacaagggattactattcagtatatacaaagaattcaacagc

SEQ ID NO: 206297 - DNA, 793 bp, Homo sapiens
tacaagtgggaggttgggtgacgattgctcctgggccagaaaatctaagccagtctcagcaagacctacaaggccagggccagtgctcctcagaggatattcatgctccaggaaagccaaggatgggcctccgtcatgctgagatgccgcagcagggacacctgtgtcccacgtggagctcggcttctagctgcagtcagtgcagaagctggcaggaggggtttatttctgtcctcggaagcttttggtaaggacacttcattcctgtgtcttggacacctccccctaggtctgctgccccctctgtggagacaggcagggcagctggatgtgccgtttgttcccagactatatccatgccaaagcatcccaagggcaggaaatgtgtccccgggggccagtgggggtctgggggcacagagggctgcagagtgagagctggctctcctctctgcaacttggacaaggctctgggaccctgtcctccccagcttcctcacctgcatggcaggatactggccaagtgtggctttcgaaccacaggagagggtgcagtcaaggcctcactcagggaccgcaggttctcttcccttcccagtccttccctggcactgcctaggtggctccctggccaggggccagtggtctagccagcaggccttataacctccccaccagagaggcagctgcagttgaacctgttgatctgatgctgagggccctgccagctcactgcagagtggccagttctggccagttttgctaggccaggcccatttggggtgaggagagg

SEQ ID NO: 206298 - DNA, 561 bp, Homo sapiens
aaatagaatatggtccttttcctcaagaattttatactttagtggcaaagagaaatatatgaagacatgattataattcactgtaatatgaattttactagaggcatatgtccggtgcaagcatgggaatgaagaaggagtgtcaactacatgtgaggcatcaaagaagtttccccaggagacagcacttgggcccatcttgatagatgagtacaaattagcaagtgagcaaggctaggggatataatagcctgtgcaaaggtttagggcatgatcaagcgacatgcagaaagtccaaatatgtttaaatggttaaagcaagtagtgcaagcagaaggcatagagtaaagggaatatggacagaacaaagaggcaagagatggaacccatcacattgcctgtggagggctttttatgacatacaatgaactatgaattgcaacctgtaggcaaaggagagtcattgaagattcccatgtaaggaaatgatacactcagattttagaacctaccagctttttagaattattctggcagcagtattaagggagtactgaaggg

SEQ ID NO: 206299 - DNA, 427 bp, Homo sapiens
aaggattcttcctgggcattttgactccatcctattaacgcaggcatccctgagacccacatagtgctaatttgcttactaccagcagacctacactatttctgaacaacagaaaaagcaagaccagcaactgaagtagtcagtgaccaaactttaaagttcttagagaaagagggagacaatgcactacttttccctactgattgaaaattagtaagagttaatagggagaggtggttgagtgagcatctcctgatttttaaaacatggtacaaaggatcctgcatccaagatagctaggcaggtgagcgtacctcatgtaggtgtgtttagagctcaggcaggatgaagcaggatgaggaggacttatctcatgaaattacaaggtgacttagactgggctggggtgggcagggataggagctca

SEQ ID NO: 206300 - DNA, 728 bp, Homo sapiens
tttggctttgcaagatacaagttagtttttcaaagtaggcacataagaaaacattcccaacagactctggtggaaaaaaaatatatatatacacatatatttgcttaaaaaatgaattatttgtattcaaaaggagaagaaactttcttctggcatttttggaggtgatctctgcacacgctggctccattttgccttccatcatgagtagaagcagcccaaggccttcaccacatttcctatcttgaaccttccagcaagaagaatcatgaaccaaataaactgcttttctttataaactattcagcttcatgtattcctttacagcaacactaaatggactaagacaaattgataaagaaaatgtgatatctatacatctctctgtctataaagataagataccaattacaatggaacattgttcagccataaaaagaagaaaattctggaatttcagatgtcatggatgaatctggaggaaattatgcaaagaaaaataagctagacacagaaagacaaatactatataatctcacttatacgtggaatctgaaaagttgaactcggaagcagagactgaatggtagttgccaggggctgggagcagggagaagagaattgaaagaaggaaacgggagatattggtcaaagagacaaacattcagttataaggtgaataagttctggagatctaatatatatagcatggtaacgatcattaatta

SEQ ID NO: 206301 - DNA, 406 bp, Homo sapiens
tgagatatgtagaatgtgaacacagcccacgctggtgtgagctgtagggtatggcagggcctcaggtggcagccaaatttgtaatgggcaaggcagtgaagagaaaaatcaaaagaaaaggctaagatgtagccaagtatggcctaggaagggatcagtgactggggcgtgactagaacataatacagaatggagataagtgaaggcaaaaatggatgacaagggaggtttgtacttttatttaaaagactgcagaaaaaccaggaatgagcctcatggatgcttcatttctgaaatcccatgcttaacattcatcactgtctcccatacatgattcgtcttcactctaaactgcctcctgtctctgtagatagtgccattaacatccaagttacccaggcttgaa

SEQ ID NO: 206302 - DNA, 729 bp, Homo sapiens
gtgaaccgctgcacctgtctggcatgtgtgatacatgcgtgaaattatactgtgtatattacacacatatgaatgaaattatactatgtgtattataattgtggcttacattttttcacttaacagtttgttttggagatcttttcatgtcaatatatataaatctacctcattctttataactgttttcatagtaaggacaggccatagtttatttgattgacctaataatgaaattagaaatggagatttctaggttttttttttctgtagcaaacaatgctgcaaggaataccctgcacatgtttgtgtacatctctttgtacatgtttcaataaatacccagaggtagaattttaattctgtatgttatcatggggccttcagtataatggaatttcccttgtctacactgctctctctgacctgggaaaatgcagtaaatatcttctagataatttagatttctgtagttgtctaaaatgagtcttatgttcttattttggagatttgtgattattcagtttggtgcagaatgaaacgtagaagtacatggtggtatcatcaacttggcatgtagctagctgcctttgcctagatggtaagaaataatagaaccataaaggctttggggtaatccattcaggtaggaaacgcaaatttatattactaaaattttatctcttggcccctctgtgagttttgagtgttttttcttaagggaatatt

SEQ ID NO: 206303 - DNA, 205 bp, Homo sapiens
ccatgattcaatcacctcccatcaggctccacccctgaaatgtggggattacaattctagatgagatttgcatggggacacagggccaaagcatattggtcttccaggtttattcattttgttgcagatgacagaatttccctctcttaatgctgaataatattccattgtatatatataccaccttttctttattcattcatct

SEQ ID NO: 206304 - DNA, 632 bp, Homo sapiens
aataacaacagcaaaacaaatgaataaaactcattatattcatttgcttttatttatttatatttaactttattattattattattattttgagacagagtctcattctatcacccaggctggagtgcaatgaggcaatctcgcctcatgcaacctccatctcccgggttcaagcaattctcctgtctcctccaggtagctggggttacaggtgtgcagcaccacacctggctaatttttttatttttagtggagattgggtttcatcatgttggccaggctgatctcgaaagcctgacctcaagtgatccgcccaccttaggctcccaaagtgtggggagccaccgtcccggcgtattattacttttagagacgaggtcttgctttgttttccaggctggagtacagtggctcaatcatagctcactgcagcctcaaactcctggccttaagcaatcctcctacttcagcctcccaaagtgctgagattataggtgtgagccactgcacctggcctctctattctctacttcctctttctagaatttctattaggcggatgttgaatctcctgaattaatctctaattttcttcccttccctttcccttctccttcccttcccttcccctt

SEQ ID NO: 206305 - DNA, 368 bp, Homo sapiens
  misc_feature (264)..(264): n is a, c, g, or t
taccttcagaggagcaataaagctggcagctgactctctaaaacaaatagttggaatggtggagtggctttttttaaatgctgaaaggaaataattaccaatctagatttatatacccagtgagaagattcctcaaaagtgaggatgaacttaagtttttggacaaaacaaaaaattgcagaaatttgtcaccagccaaccagccctaaaatatatcctggagggaattctccaggtggacacttgatgtggaaggacaaggantactcctgaaaggagcagaaacggaaagctaaataaataatagactgcctaaaactatctcttagagttcaaaatacaggtagacttaagatacatggacagta

SEQ ID NO: 206306 - DNA, 481 bp, Homo sapiens
cagaatatttgtatatcaaatcatattcatgttacatgatacttgaataggaaaatccctgacattcccaatattcattatgaaaagcattctgcttttgttcctggtacctaagttgtttacataatgcataagaatttgaccaaatggagagccaagggcagggccttagcacccttgctgagtgtgacatgtctcagaggttgttcatataatgtgtctttgaaactcccattttttctttttttctggaccaaagtatattcctaactaggtgtttccccagtcatcctactcacagggctcaaaaagaaaaggaatttgtttcctgagttggcatgatggtttctgaagctgtttctgaaattctgaccatagcaacaggaaattgaaggcaagatactagaaataagcacaaattagatacaactgtttagggcagatgttgacttaaaagaatatcttttttgggtcaaatgca

SEQ ID NO: 206307 - DNA, 362 bp, Homo sapiens
tctgaaggctgcatctgtcggttagaggggtgcttggtgaggggcttgtcctggagggaggctgtaaggatcaagccctgggagggattgtggctctgggggtagttaggggcgtgacctcagagcacagcgtgagaagctcagggctgagaactgggagccagcccggaggtggctcaggggttttgggaggttatagtatatacagtcttagaaacattgagttcatttatggggtcagagaaactcccaaggaatagatctttctgggggtgccaagaatctgggggcttcttccatggagatgatttgagagctattcagggtttctgagaggggctcagggagttgcagcggagaaa

SEQ ID NO: 206308 - DNA, 606 bp, Homo sapiens
tgcaggtccacaccaaggcccagccatcccagttagcctgtcttaactaacataaaacaccaagttaaaaacccctggtttgtaagaagatagtaaaaagcttagtggttgccaggggttggaggaagggaggaatagataggtggagcttagagaatttttagggcagtgaaactaccatttttaatactataatggtagatacacatctttatacatttgtcaaaacccataaagtgtacagaaccaagactgaatcctaatgtagactatggactttgggtggtaatgatgagtcaatgtaggtttgtaggttcaagaattctaacaaatgttccactgtggtactggatgttgataatggggtggctgtgtgtctgtgtggagagggggtacataggaactctctgtactttctgcttaattttgctgtgaactaaaaccgctttagaaaatgaaatctactgaaaacaaaaacaaaaacaaaaaacacaacaaaaccctggtttacacatttataattaatttttttttttttgtagagatgggggtctcactatgttgcccagactagtctcaaactcgtgggctcaagtgatgctccca

SEQ ID NO: 206309 - DNA, 616 bp, Homo sapiens
atgaccactcagagtagataccagctgcagccaggggaaataaccaacacccgcctcattcctctcccagttcctttcccagcagcagtgtggaggggagaaacacagcctcccctactccaggtttcaagcaatacagagtacactttttaaagctctcccctaaaactgaccactgcaccagatcaccacatctgcatcagatgtgatacaggtcactgcttaaaatgctcagctctcctaaaaccactgcatgaacagccaaagccaaagcaatgaggacctaagggaagctaaaatcattatgcaaaagcctgaacactatatattcaattgaatgctttctttgcaaaaacataagctcaggacctggaatggagtggcagccatagctgcttcctggaagttaaaggagatttttcaaagatgctccccagtgttaggcagattcatttaacacataagcgtatttaccaaacacctgccataggcaaaacattacgttgtacctattgaggaagaagatggatattttaacttgttttttgaatcaaaaaattccctgttcccaaaaatgacctgaggccatttccaaggatgaagaagaaaaccctgt

SEQ ID NO: 206310 - DNA, 606 bp, Homo sapiens
tgaggatcgcttgaggtcaggagttcgagacaagcctggctaacatggtgaaaccccctctcaactaaaaatacaaaaattagctgggtgtggtggcaggcacctgtaatcccacctacccgggaggttgaggcaggataatcgcttgaacccaggaggtagatgttgcgtgagccaccctgcctggccagccgtagcaatctttactggttaccttgctgtgcagtttgtcaagatgttccaggctcttacacatttcatgccaaaggactggagtcaaccagttcttttaaatccttaggctactttatggggaaatggtattttgtggaccactgcctagacacaagtagtatttgtgtctactggttttgtcattgtttctaagcttttttagacagagctgtttagtttttatgttttaagacaaaaatgtaggtttgtactgatgcttacaatttaaattcaggctgtatggttttcctttcttctgcctcatgtctgtttctcctttttcccatatgaaaatctcggaagttgcagtgagccaagatcgcgccactgaactccagcctaggcaacaagagcaaaactccatctacaaaa

SEQ ID NO: 206311 - DNA, 558 bp, Homo sapiens
cacataagctaggcacttggcccagtgatatgtcatagtcacccatttgagaagggaacagcgaagagaagagagtcacatcacctctctggtggacacagagatatctcacaatgctctctgtaggcagggccagggcacaagagttatataactcgggtgttagaccaagcaacatgtcacaatggctgatatgggccagacacagacaagggagtcacatatttgggtgtagggctcagttatatgttgaaatgccccctgtgggcagcgacaaagcaggagagaagattcacatcacctggatataaggcccggtgatacgttacaattcccctgtgagcagcgctaaagcagaagaatagggtaatatcacctaggggctgagtccagtgatatgtcacaattccatctgggctgggcccaggcagatgtgtcaaatcatgaaggttctgtgaaggtgcatatatcacaatcacacctgcaggaaggtccaataatgagattaacaatctcacacaggtccgggttctaggtatgagagtcaacacctgtgtg

SEQ ID NO: 206312 - DNA, 269 bp, Homo sapiens
aggccaactggttgggatgttaagttgaacaacaattccctgagttcttttgtttggtgccacggttcatgcagtctgggttgtaaatgctataatgtgcactccccccaacacacacttaggagtcttacaatctagtcacagaaaaatgacaataacaatgcatagaatatgatcaatatgtagactctagatgatatggtatataaggtattactattattaataatgatagtagcagctgctatttatctagtgcccactagatt

SEQ ID NO: 206313 - DNA, 706 bp, Homo sapiens
taaggtaataatcttgctcctatagatcagtctaattacatttagtcaggtggatttatttgatcacctcttaaaaatggcatcttcctggcaaactagaattctgttctgtgcatctgctgagttgacattcagtgtctgctggtaatggaaatagagtaattcttagttactgtagtcttcagctaatcatttccttcataaagtttaaactgactggaatttttcagcaacgtggatggatttggactggaagcagaagcccgcatgaccacatggcacattatgatcccctcggacattgaaccagatggtagttacagccaagatattagtgaagggcgtcagcttctcataaaagctgtcaacagagtttggactgaactgatacatagtaagaaacaagtcttagaggaacttttcaaagtaactctacctgtgaatgaaaggggccacgtggacatagctacagcaaggccactcattgaagaagctgccctgaagtgctggcagaatcatttggcccatgaaaagaaatgcataagtcgaggagaagctttagcgcccaccacacagtccaaattatcccgtgtcagcagtggctttggtctttccaagttaacaggatcaagaaggaatcgaaaagaaagtggtcttaataaacacagtctttccacccaggtacttttttagtttcattgctgat

SEQ ID NO: 206314 - DNA, 407 bp, Homo sapiens
ggctgccagagagaatgggtgagaaggtaaggattcaagagtctacgaacgacagatacacttatttttaaaccagaaacccacttctgggaatctttcctaaatacacactgataacatggacaagattattctttgcagcatcattcatgataggaaaagattggaaacaagcaagtatccatcaataggaaactagtacatacacacagtgggatatatggagttttaaaaagaacatgaggaatctctatatccttctagggaaagatctctttagggaaaagagaatgcacaatgcagtatggtgtttataatacgcctctttttgtgtaagagggagtaagaaatgagaatgtaggcttatttttatataaaaaacaccaaagggtacacaagaatgaaac

SEQ ID NO: 206315 - DNA, 820 bp, Homo sapiens
ggggatttgtgatgttttggtttccatggagctgccctctgggagcacgaggggtacaattggaacgaaggcggcgcacagttaactggaactctgcagccgtccaagcccaaagaaggtggggagcttgggaaagaagttcctcataatcggagcaggaggagcccgcccagcctcgctcaaaggaggagacgagactctgagggacaatttagaagtgtgtcctcaatttaagacacctaaatagggaactgtggggctgtgggccttaggagagaaaaggagagccccagagagagcacccctatgctgcggaagagggactaaagaagatggcagtccttccaggagggattggacagatattcaggcgtccggtggcctgcaggcccccatcagagtgggctgcaattggcccagacctgcttcctactttgttttctccggtttcacccccagcttctctcgcaagcaaccacctggtgattcctgacgaggcctgacttccggaaggcaagccacgccctccgggctcccctgcctctctttggctccagcttggcatgtataggagctgcccaaggaatgacagacttcttgttcttgaggtgttggcaaagcttcctgcactgctgacctatccaagtcctgccttgtagctgctcttgggcataggttactcttggctctgccaaccacccgtacaggactaattgcagttttacctcaacgtgcgctttttacaattaaaaactgacttaatggcttctatttccctgcctcaacaaaaaaaatttactctctctgaacccaaatctgg

SEQ ID NO: 206316 - DNA, 461 bp, Homo sapiens
ggttctgctccctgctgcattttcttattttctgtaccttcttgaacctcaggtccctctctgtaaaaagaggaattagaataatagctaaaatttctcacttgtttcttaaggaagttaggaatacatcttaataaatcaagaagttcaaacacatcatccatagcaacttgaagtagactcctattctgtttaaccatgccttttgagagtcaaaatccagggatgctccctacagccagtcttgaagaacagaaggggaactacatgccaccaggctatgggagctgtttcagcagcagatcattacctaatctcttcctgtctccccggtagagctgaacagagcctgtgagagaaaattccggatgttaagggaaggagaaagaggtataggtgtagggactaaaagttgatgtggtatcattcctatgaaaaaaataatcagattcatttttata

SEQ ID NO: 206317 - DNA, 180 bp, Homo sapiens
ttccctaacttttggtgcatggttaagctgaagcctaattgttcattgttcttctaagcacagcctttggttgaccctcctggaaataataagcaggtgttccacaaacacgcacttgggcaattatgtgatgtgtatctactaaccagcacatttcaatgttctcatacagaggcataa

SEQ ID NO: 206318 - DNA, 442 bp, Homo sapiens
ttcattcccccaaaaagaaacccattactcattaggagtcactccctacttcctacctgagcccctccccacaactcctggccctaggtaaccactactttactttctgtccctacagatttgctcattctggacatttcatataaatggtatcatatgatgtatcagaccatcaattttaataatatgtgaactgtctccaaatagaattctagtaatcctcacattctgtgagatgttctgtaagaccttgcaaccttcagtgagggcctgggatagtctgatttagtagtctaggtggtggcccaggaatctgcatttgaagttcctgatattgttctgatgatcacacagcgttagaaactactgctgtaccacctaagttttttttttttttttttttttttggaaaaaaagtcgggcccggtggccagggtttgat

SEQ ID NO: 206319 - DNA, 199 bp, Homo sapiens
tcgtccattctacgctgcactgtctgatttagtagtctaggtggtggcccaggaatctgcatttgaagttcctgatattgttctgatgatcacacagcgttagaaactactgctgtaccacctaagttttttttttttttttttttttttgagacagagtcttgctctgttgcccaggcttgagtgcagtggtgtcatc

SEQ ID NO: 206320 - DNA, 273 bp, Homo sapiens
gctgtgactacccatttggaatttcaccctgaacactctagccttgagaaatgtgtgtccatgaccgaatatacaaattgattcttttttccatgttcataatttgtcaaaaagcataaagatacataacctaatatccctttgaccgcctataaacaggagaaaacaaaacccatggtcttaagaatctcttccacgtcataattggtctaatcgtggcatcttacactattgcctgactgggtagtcacagcagcaagtgggaagcaggtg

SEQ ID NO: 206321 - DNA, 1158 bp, Homo sapiens
tggtcacaggtaccaggggcagcagtgaaggggtggctctaatgccaagtccagtgaccagtgccagggtgcccagtggtggcaacagtggtgttttcagtgtgatcttggacattgctcctgtctactcagctgctagtctgtgagctccctgatatcctttaagacagcgttttccagcagcggcactattaacgtttggggctaggtaatcgttgggtgtgtgagtgtgaagagggctgtcctgtgtgttgtaggctattttagcagcatcccggcctctccctgccaggtgcctgtagcagtcccccagttacgacaaccaaaaatgtgtccagacattgccagatgtccactgggagggaaaacctctctggtccacagcccttctccttattccagtcccacatcttcctccccttccccatcactgtcctcagagagatgctgttgacagctccttgaggtgattctctcaggcttgtgttgtagttctctgctgtcaagtctgagctgactctctcttccggattcttctttcctcacctgcgaccgacctggattcgcgactgaagttttttatggagctgtttctattttctttttgggcagccatactctctaagacctaaaagctgaatactcgcccggttactacctgataattctcatcgcttatgtttccaaaaccaaactggttatttccctctctaaccccatctctgtgtcaaacagtggagtacatgcttttggttaatccaattggaaggcttcctagaggaagtaatatctgaactgaatcctgaaagattaggggaagaggaagaaaaggacaggtgctgtgggaaaaaggggaaagtgtcagaggaagtaaatgaaaaaccatatacaaaattatcttctgtgacccgtagcacatgcccaatccatggtagatatcgaaacatagtggttacccagtctaatccatcccttttctttctttctttcttttttttctttttttttgagacaagtctcactttgttgcctgcctggagtgcagtggtgcgatctcggctcactgcaacccccgcctcccgggttcaagtgattcttctgcctcagcctcctgagtagctaggactacaggtgcttgccaccatgaccagctaattt

SEQ ID NO: 206322 - DNA, 215 bp, Homo sapiens
agatgtgggggtatcccaaaatggaatacaaactatcaaatgttactagtctaacgtatgagtgacattaccacactgacacagatggagaacagaactaacctaagtaacttttagaagtcagtattttgattggattctactaaaatgaaagaaaaaaactattgtacctagttgctatgtgctatttaataaatgtgtttctcacaggggta

SEQ ID NO: 206323 - DNA, 560 bp, Homo sapiens
ataggagctgtcattcattgccggtagagatgcaacatggtacagccactgtggaagacaggtcagtggtttcttataaaactaaacatactatacaattcagcaatcgcactcattggcatcaatacaaaggagcagctttattcacaattacaaaaacatggaagtaaccagtatttccttcagtaggtgaatgtataaacagcagtacatccagacaatggaagattattcagtgctaaaaagaaatgagctatcaaacaatgaaaaaacatggagacaacttaaatgcatataaatatgtgaaagaagctaatctgaaaagactgcatactgtatggttctaactatatgacattctagaaaaggcaaaaacagacagtaaaaagatcagtggttactaggagttaatgaggagggagggattaactggtgaagcacagaggatttttaagtcagtgaaactactctgtccatactccagtggtggatacatgccactatacatttgttcaaatctgcagaatgtacatcaaaaataaatcctaatctcaactatg

SEQ ID NO: 206324 - DNA, 383 bp, Homo sapiens
tcaaactgtgtcttactgctctctgtattcatcacaggacatggtaaatgcctagtgaataaatagtttctgaatgaagtcttaggaactgtagtatcagagacagaggtctagatgttggggcctgaaaactggctggcatgatacaccactagtttaactgaagtggttttgttaccataaactcatgtcactcccatatgcggttgatggaatgtagtatctttcatactgatgggaaagatccatcagtatcttttccaacttgccaatgggagttacaatatgattgtaactagatacagactggaatctgtgtagtagttacacattgagttagaggccaaattattcaaaatattacgctaagagaaaaatttaaa

SEQ ID NO: 206325 - DNA, 419 bp, Homo sapiens
gctggcaaggcaacatcgtaactttttccctaattacagaagcatactcctggtataaaattcggaaaatataaaccagacaaaattaatgaaataaatatctatttaatattttggaatatttccttccaaacattacaaaacttgaaattaaactctatattcagttgtgcatcccatttttttcacttaatattaaaagcactttttcatgttgttaaatcgttttttaaaacatgacttctaaagcttacacagtatttcatagtatgatgttccattaatttattcccccattgtcagatattttcactatttttgttttgttttgagacagtcttgctctgtcgcccaggctggagtgcagggcaccatgtctgggtaattttttgtaattttagtagagatggggtttcacc

SEQ ID NO: 206326 - DNA, 449 bp, Homo sapiens
attacccttgtttattgtatacaataaagagaaagagttacatattgatatagataaaggttagatacagacatctccctatttaaacctatcctttatgcactgaaatcttcctcccgcactgaaggttaactactccactgattatggcacccttaataaatatcggactctgtacttctagaaagaccattgaaaaatactagatctcctctaaggacccagtttccctatgactgacatctaatggcagaatgcttagggaaggggtggatcataatgggttttctatgccatgaaaagtcgttttgattttgtcttgacagtagtgagaaacactgaagaattattacagttgaaagtcttggtggagagaaaggtagaattgtgagattaagtgtagagaaaccaagttgtatgaattcaagaaaaaaaaaaattagatcacc

SEQ ID NO: 206327 - DNA, 477 bp, Homo sapiens
tgaagaaatccagagttcagcagcccagggctggtatggtcagtcttaagcatcagtatggtcagccttagtgcatggcatgatcccccactgctccacaccaagatggctgctggagtgccaggcgtcacatctgtgtttccaggcagagaaaaagaggaaagggtaaggacaaaaaggcagacctcttgtcaagtcaacccccttatgcccttatgcctagtgtttcattattggaacgctaagcatgtgggagttatagcctactgctcaaggacattgccagggtctgaatttttacttgtggaaaaattcaaaaaattgcagcctccggcataaatgcgttaaagagctttctcagaagcccggtccaactacttgcacttagtggccacacctgtgtgcaaaagaggctgggaaacgcaggtttttagctagacaaagtttttcttttccaagaatagagggcttttctta

SEQ ID NO: 206328 - DNA, 766 bp, Homo sapiens
gtccacccagccttgacaatgagccatatctaaaatattacattattagaacacctaccaaaatctcgaaagcacaggttgatgtccttagtattgctatgtatgaagttactaaaactggagaaaattctacttcagaaataagtactgtttaggttttatattaaaagttcagaccagcatatcaaagggtgctccttagtgaaatgatttagaattgttgcattccaaaagcaggttttctctttaatttttacatctctctctcaaaatattatacttcatgaaaaagacaattgatgtggatgacaacaacaaagtcttgaaattaagggcacactaattgtccttactggggttaggggaagagagatattattttcaaggaacaaaatattttcctttacaatctttcattcatgagaaaattggaatataaatttattacattgtgaaagtatcataaaccatatacctttgtatctaaatgcagcttcaaaaaagtaaataattgaagttttatttctcctctaaataacttgaatttttttctttaaaaatttatgtatttatatgtccccatttagttaagtggtagtgtaaatgtatgttgttaaaaacagtttctcagaattatagtaagcaatgaaagacaatatctaattaggttgttatcaaaaatactgtgtgtaaattagtccgtaatatagggtttggtgcgtatctatattcatgcttctatttcactcttcctcaaaacagtttt

SEQ ID NO: 206329 - DNA, 351 bp, Homo sapiens
taaacgttgagaatattatgtcaactgaaataagatagtaataaagtgacagatactatatgattccatgatatgagtcatcataagtagtcaaatagaaacagaaaggagaatggtgttactcaaggtctaaagagagggtaaaatgggcagttgttacttaatgggtattgttttaattttagaagacgtaaaagttctagagatctttacataacaatgtaaatactcttaacgactacaatgtacaacttttttgaggtaggttctcactctgtcctgcaggctagaatgaagtcacataatcatagctcactgcagcctcaacctcccatgcacaagtgattctcc

SEQ ID NO: 206330 - DNA, 343 bp, Homo sapiens
gctacaaatgtcgatctcacagaagtagagagctgaatggtggttatcaggggctggggcaaaggagtgaagggggaagtattggtccacggacacaaagctcctgctagacaggagaaatgagttcaagagatctattgtgcatcatggtgactaccgttaataatatttcatattcttaaaaattgctaagatagtgaatgaagtgttctcattacaaaaattaaaactaggtgatgtaatgcacgttaattagctagatatagtcatttcacaatgtgtatatgctccaaaatattatgttgtacataacaaatacatacaattttatccgtcaatgtaa

SEQ ID NO: 206331 - DNA, 969 bp, Homo sapiens
gagatggtcaccagggagtgtccaggtcagaccgccacagaagagtgcagcctcctggccttcagacccaactgggacaaaccctgagaacagccttggcagacctccaggggcagctggactccctgaggctggatgttgcagcctctcccaggcatccactctgcagctgaggccaaagtttccaacgggaagggagggagagtctccgagtctgggccttgccactcctcactcagcatctgaccatccccacctcctggatctacagggttcatagaggaggacccagaagagggaaagtcaggctgaggaacttggcctccctgctgcaagggaaatgacatcggttaccaaggaggtgaccagctatccttttccaagactgaaaagcagaaatacggccctgaggctagagggtctaagagaacaataggaagaatttcctgacaaaggacaatgttgcctaaaggactcaggaagctctgtgaaaacaggagactcccgagcagagcaccagacccttctccaccaggcagtgtttttcccatatgacaggtgagaaaactgaggctgagagacatgtaataacttgctgaagcagcaaccagcacaccatatagctgaaatctgtagatcagcagttaaaagtggtagggcaagtcctctctgactttcagcgctaagagcctaggattctgtgtttttctgcttaagcctgggaatcagagtcctacaaaagccgcgcctaatcctgggggtgtgggctttaaacccagagagaaagcatgttattggaatactcctgcacttttctccctttgaatcccaccacggaaagaaaattctgtgacgtgtacccagtatttattggagggtatttcctagcaagaaaatgagggcgattgaccaggcacggtggctcacgcctgtaatcccagcactttgggaggtcaaggtgagtggatc

SEQ ID NO: 206332 - DNA, 828 bp, Homo sapiens
tcacccagctgttatgccgcttctgcctgcaagatgagaaagacacctccccttcccaggagagtctccgagtctgggccttgccactcctcactcagcatctgaccatccccacctcctggatctacagggttcatagaggaggacccagaagagggaaagtcaggctgaggaacttggcctccctgctgcaagggaaatgacatcggttaccaaggaggtgaccagctatccttttccaagactgaaaagcagaaatacggccctgaggctagagggtctaagagaacaataggaagaatttcctgacaaaggacaatgttgcctaaaggactcaggaagctctgtgaaaacaggagactcccgagcagagcaccagacccttctccaccaggcagtgtttttcccatatgacaggtgagaaaactgaggctgagagacatgtaataacttgctgaagcagcaaccagcacaccatatagctgaaatctgtagatcagcagttaaaagtggtagggcaagtcctctctgactttcagcgctaagagcctaggattctgtgtttttctgcttaagcctgggaatcagagtcctacaaaagccgcgcctaatcctgggggtgtgggctttaaacccagagagaaagcatgttattggaatactcctgcacttttctccctttgaatcccaccacggaaagaaaattctgtgacgtgtacccagtatttattggagggtatttcctagcaagaaaatgagggcgattgaccaggcacggtggctcacgcctgtaatcccagcactttgggaggtcaaggtgagtggatc

SEQ ID NO: 206333 - DNA, 693 bp, Homo sapiens
aagaaactgaaagctaaccagacgcccattgccatggattgctgtgcctctcgcagctgcagtgtccccactgggcctgccaccaccatctgctcctccgacaaatcctgccgctgtggagtctgcctgcccagcacctgcccacacacagtttggttactggagcccatctgctgtgacaactgtcccccaccctgccacattcctcagccctgcgtgcccacctgcttcctgctcaactcctgccagccaactccgggcctggagaccctcaacctcaccaccttcactcagccctgctgtgagccctgcctcccaagaggctgctgatggatggctactttgctcagtgcccgacaacgaagaatccagaagctgtcccttcagtattcacttgcctcagtagtttgccagatgttaaggtagaccagatgacccagatatgaagaacttacctttggttttaatgggggaaaaaaaagaaaagtattttttatggttatttagctgaaaaaccatttggttcctgtgggcaggtgaatgagttttattagcaaaatactgtttcaatctttaagacctcagattacatgttcttgatcatattgcttcctggctcttgtttcttgtactgggtattttcatagaagaaaatttcttggtgggttttccaataaactatatttctctggc

SEQ ID NO: 206334 - DNA, 573 bp, Homo sapiens
atgtgcagggagccctgtggcagcaggggacagttaacccagggagcttagagtctacgccctcctggcttggaatggtgggcctggagctgtggtggagatgggctgaagaggaagtgatatttacaaagaaagaaggtgaacctaaatctgggctgtcccaagcttgtgctatccagtgaaaacatgaaaaccaaaggaggaagcgaatgaggagtggtaacgggaccaagcatccggggatgttcaaccccacgtgctcgagtctggttgaggcctggaccacacccgtccactgacactatcccccacccccactcccactcccaccgtggaagatttctgagaatcacaacattgtcaataacggctccccagaaaatctccttgaatagaacggaattcctctctgatggttcacaaggcacaggaaggtcttttctgcacttggagaaggggagcaggagctcatctgacagtatgctgggtgactgagggctgactgcctgatggcaaatcctccctgcctgggaccccagttccacagccccacagcactggggctcctgccta

SEQ ID NO: 206335 - DNA, 691 bp, Homo sapiens
aggtgccctagaggattcctaaatgagttggaattcaggccaaaaggcattaaataagaccaagaagaacactttataatgataaaagatgtatgtaattcacaattaagttttatctatacaacaaataacacaacagtaatatacagaaagctggaatcctagtagctattaggagaaatgcaacacatcgggagtcacacctttaatccacctgtcaggccatgacatctgggcaagaggccaaaaatgtaagaaaatagatctgaatcattatttaatcatgtaaacctgatcaatacatttactgactatataattagagacaaagtaaacttcaaaaattccaaaaaaaaaaccagacagtattctctaatcaaaatgcaataaaaatataaattattgacaaagccacaaaacaaaacaaaaagcccctctacctggaaattttgaaattccttgggtcacaaaggaaataaaactaaaattaccacatgtcagaactaacagatggctgggcacagcggctcatgcctgtaatccctgcactttcggaggccaaagcaggaggagctgcttgagcccaggagttcaagactagcctggtcaatataacaagacctcgaccctaccaaaaaaaaaaaattaattaatgtaaaaattagccagacatggtggttcatgcctgtgg

SEQ ID NO: 206336 - DNA, 882 bp, Homo sapiens
aacagaaaaataattctttttacatgatggaaacaatgtaatagaaacattgaagtctgaaaatcaaatgggttcatagagttccaatctatattgaggaaaatacacctacacacacacacaatttatacacatacatatttacacacacacacacacagacaacatgggatcttcctgagtatacaacaactagtctacattttccagtcttctttgtaagtagatgtagccacagatgaataatttttgctaataaattctgaaaggtatgccacttgcatacctgggccatggaaaattatgaaagctcttcatgttctctttttacacgcacggtagatggaatggaagccactcctaaggcaactttgtaaagcacacttgagctggtagaagaatcgtcagatgtgatgacaagctacagggaaaactgcctgctgccttgttcacctgccgcaaagatagagcatatttgtcatatgcttcaactggctggctagaagtgaaatggggagttggactggaaaactcgcagcacaaacctcacaaatgcagtgagtgcagtcttctttcatccagcgctcctcggccttccttggaacccctctaacatctgtacaccctgcctgcctcaggcgtgcctccagcttgtttatctgaaaggggaggcaaaggaaagaagagtggaaattgaagcggatagcaacaaagccaatcaataacatggtttgatgaaatgctctattctgtaagcacacacctagaaggcaaaagaaacttcaaagcctacataatttttcattttcccccaggacttaatgagcttgaatcatccagtatccaaacaaataaacagttctgtaggtgttaaaaaataaa

SEQ ID NO: 206337 - DNA, 513 bp, Homo sapiens
aacagaaaaataattctttttacatgatggaaacaatgtaatagaaacattgaagtctgaaaatcaaatgggttcatagagttccaatctatattgaggaaaatacacctacacacacacacaatttatacacatacatatttacacacacacacacacagacaacatgggatcttcctgagtatacaacaactagtctacattttccagtcttctttgtaagtagatgtagccacagatgaataatttttgctaataaattctgaaaggtatgccacttgcatacctgggccatggaaaattatgaaagctcttcatgttctctttttacacgcacggtagatggaatggaagccactcctaaggcaactttgtaaagcacacttgagctggtagaagaatcgtcagatgtgatgacaagctacagggaaaactgcctgctgccttgttcacctaaaatccctccccccgtctccctataacggagctaaaggcgtaggctgcgctccttct

SEQ ID NO: 206338 - DNA, 534 bp, Homo sapiens
aaggcaaattaaaaacttaagataatagagactggggtaaggaggagaaaagaggacaccaagtacttcctatacactaagcactaggacaagagttggttatgtgtaacagcacatgccagcctcccaataactctcttactgttaattctcatgacctatccccttctctgacactcagcggtgaaataaccagatcaaggtcagacagctagcaaaagacagagccaggtctaaaaaagcaaactaaataaaacccaaggccgggtgtggtggctcacacctgtaatcccagaactttgggaggccaagacaggcagatcacgaggtcaggagtttaagaccagcctgaccaacatggtgaaaccggtctctactaaaaatacaaaaattagccgggcatggtggtgtgcacctgtaatcccagctactcaggaggctgaggcaggagaatcgcttgaacccgggaggcagaggttgcagtgagccaagatcatgccactgcactccagcctgggctacagggcaagactg

SEQ ID NO: 206339 - DNA, 447 bp, Homo sapiens
cctgcctcgacctcccaaagtgttgggattataggcgtgagctactgcgcccagccgcctgtgttcttttaaaaggtcgtcttccttcctgcccttcatcacttgccctccatggcccttcatggcccctctgcttccctggacaaagcagagatgtgactggtgttcccagcatttgtccacagacaccattttcctctcaggccctgaggtgctggactacagagccggcctcccagccacctgccatgaaaacctcaccaggaccagtgggactctgttaaatctgttaacacccccacttcggcctgccctagacaacagctacatcttggaaaaaggaaatgaaactggtttaaaacctctcccaactgttcagaaggctcaggccccatttccaagacagaaggagccagactcttctgcgcatgtccctttatttatagt

SEQ ID NO: 206340 - DNA, 582 bp, Homo sapiens
ctgggtgacaaaacgagaccctgtctcaaaaaatgttaataattaatcttagcttattgtaactttttaacttaaaaaaatttcaactgactcctttgtaataacactaagtttaaaacacaaacacattgtataaccacataaaatattttgttttttatattcatattctataagctttttctatttaaaatttattatttttttactttttaaacattgttgttaaaaaggaagagacatacacattagcctaggcctgcagagggtcaggatcatcagtttcctagtcttccacctccgcatcttgtcccactggaaggccttcaggggcggtaacacacatgaagctgtcatctcccatgagaacagtgcctccttctaggataccttctgaaggacctgaggctgttttccaggtaactttttttcctatgagcagaaggagtatactctaaaagaacaataaaaagcatagtatagtaaatacataaaccagtaacagttgattgtcattatcaagtgtgtactgtacataattgtatgtgctagactgttacatgactggcagtgcagtaggtt

SEQ ID NO: 206341 - DNA, 214 bp, Homo sapiens
tttctacttgaactcttaaagtgggtggagtagatgtaggaacctgtatttcagagagatcctgcaatatgggtctccaagtgcccagtattttcaatgcatactcattagggacaaatcttagacatgagattaagccgaggggtaccaaatacatttctttcagatctaggagggatgaggtaccatccaaggtcacctctgatccttctga

SEQ ID NO: 206342 - DNA, 305 bp, Homo sapiens
cctttatactcaacatttccttcttttatgtccatgatgataattggatattgaaggatctagttggcttgaggggaggaggtgcgatttgacgtttgttatgaatgtggtctaaaataagactgactttgtgtctctcgattttttcatctatgaaagcccccattccatccccatcagtctgcacattcaattactgcaaactctagcagaataggacagtgcccaagaagcaattgtcgtctgcccactgcacctccaaggtaaacagatgcagatccaggctttgcaaggcctgaggcttg

SEQ ID NO: 206343 - DNA, 296 bp, Homo sapiens
tgattaaaatatggcttatagcattgctaagcatcataaaattgtccagaaagaaggactgatatgaaggggtggtgagacagcttgctgagcatctcctctttttatcaagtagattaacattttccatcgttaaaactgcattctatttcttttccaggtgtggacttttgaacatccctaaactgatcattagtaaaattaatgagttcattctctagaggttattgtctaatatctgaacaaactccacaataaactccacaattcttttattcagaaagcaaagatagacc

SEQ ID NO: 206344 - DNA, 341 bp, Homo sapiens
cttctttccatgaagacaagtggtttagtgacttgtacattccacaattttgccaagtgcaatacacagtgcttcttgtcccaattatatcatgttttttatttttgtttttttgagacagagtctcactctctcacccaggctggagtgcagtggcaccatctcagcttactgcaacctccgcctcctgggttcaagtgattctcctgcctcagcctcctgaacagctgggattacaggaatacaccaccacgcccgtgtgtatttttagtagagacagggttttaccttgttgacaaagctggtctcaaactcctgacctcaagtgacccacctcatcc

SEQ ID NO: 206345 - DNA, 476 bp, Homo sapiens
gagaggcccggaacagagataggaaaactgccaggtggacatacccacatcaaagacaaaaatgagaaaggaagtctatgtaccacctggtcaaccagtcgagggagtggagaaaggtggcagggaggcaaaatggatgtccgttcccttttctccccagcactgacccacagcagctagggaacctggcaggaagatgacatgggtccctggacgagaggaagaggactgccacaaggctggcccaggaaacggtaaggtgtcagcggaccatgcggaggaaggaacaaaggagacctctcgcagggaaggaggcagtaacctggcgggggacgaaccgggcgagcagggcaggtctgggggcccaggccgcggagagggaaagaagctcgggatgagggccaagaggaaaaggcaagggagcgggaggcaaaaatggagctgagaaacatgaaggtggtgggcgtgggatgcgc

SEQ ID NO: 206346 - DNA, 392 bp, Homo sapiens
tggattgcctgaggtcaggatttcgagaccagcctgaccaacatggtgaaaccccgtctctaccaaaaatacaagaattagctgggtgtggtggcacgcgcctgtagtcccagctacttgggaagctgaggcaggagaatcacttgaacctcggagacagaggttacagtgagccgagatcatgccaaggcactccagcctgggagacagagtgagactctgtctcaattaaaaaaaaaaaagtgttaaagtaacacatgctcattgcttaaaaagaaagaaaagtgaaggctgaggcaggaggatcacttcagcctgggaagtcgaggctgcagtgagctgagattgcattactgcactccagcctgggcaacagcgagaccctgtctata

SEQ ID NO: 206347 - DNA, 308 bp, Homo sapiens
ggtcttgctctgtcactcaggttgtgctatcatagcttactgtaaccttgaactcctggccttaagcgatcctcctgcttcaacctcccaagtagctgggactacaggcctgtgacagtgcctggcccaggcactgactttcttatgtcatatagcaatgaccactaagggaaagtctatacaaactatagaatagttgtcattctttacccaacccgggacacaagttaaaaacctagtattcattttttttttcctgtaccaaaacaatcatcttcctttatttttcctggagcgggaagaggaga

SEQ ID NO: 206348 - DNA, 699 bp, Homo sapiens
cttgaacttctgacctcaagcgatctgctttgcttcccaaagtgttgggattacaggcatgaaccgctccacctggccactttccagtgtttttggcagtattttcttagtctattattgtcctctctacttaatagaaactaatatgcttactacactttaaccaatcagaggattgcatacattctattttcttacttttttttttgagacagaatttctcccttgttgcccaggctggagtgcagtggcacaatctcgactcactgcaaccttcacctcctgggttcaagcgattctcctgccttagcctcctgagtagctgggattgcaggcatgcgccaccacgcccagctaattttttgtatttttagtagagatggggtttcaccatgttgaccaagctggtcttgaactcctgacctaagttgattcacctgcctcggcctcccaaagtgctgggattacaggcatgagccaccatgcccgaccacgttctgttttctaattaaattgtttgtttttgagatggagtcttgctctattgccctggctggagtgcaatggcaccatcttggctgactgcaaactccacctcccaggttcaagcaattctcatgcctcaacctgccaagtagctgggattacaggtgtgcaccaccacgctcagctaatttttgtgtttttagtagagacagg

SEQ ID NO: 206349 - DNA, 274 bp, Homo sapiens
aagagtgaagactcaactaaaatcagtaatgaaagacagacaccttacagaccttatagaaatcaatggattggccagacgcggtggctcacgcctgtagtcccagcactttgggaggccgaggtgggtggatcacctgaggtcgggagttcgacaccagcctgaccaacatggaaaaaccccgtctctactaaaaatacaaaattagccaggcgtggaggtgcatgtctgtaaatcccagctactcgggaggctgaggcaggagaattgcttg

SEQ ID NO: 206350 - DNA, 344 bp, Homo sapiens
caaagtgctgagactacaggtgggagccactgggccttcccctgggtgtttcattatctgagtctttctaggctggtttcccttccaggcatccgttaacccaggttaccagtaattttttctcagaaagccatgaccttgcagaaataccaacatattttctctataataaaaaatccttggtgcagagtttctttcaccaatgtttggaaaatgttgctccactttgccctgctttgctattacttttgagaaatctgatgccaggcgggctcctttgctcttgtaagctatttttaatttgtttttgaaacataataatttcattagatattttctcagag

SEQ ID NO: 206351 - DNA, 1054 bp, Homo sapiens
ggcttttacccagggagtatctgtagttgagccactggctctataacattgttagttctttgtattttcccaatggaggttttacctcatggccataaaaataaaagagggttgaatgtgaaaataactgcattttgaacatctcagaccctccactcataaaaattacttaatgttcctcttccttgaattacatattttccattgtaataaattcctgttttgaaaaccaaggaaaggaacattttttgaagaaagcagttcagtggcctctttaacaggtttatcaagaggttgatatgtagggataggttgtgggggagaagagggtgctatgaaatgtaaaattaaggatgtaaaaataacattagggatgccacaaaaggtgaaatataaaccatgatcatttgagacaagggaaaaacagggctttgaaaatgcctgtcatgtgataggaggcatctgtaagggagagactgaaatggctcccaggggtagtatatccatcctcttcccgatatacctgtgccatacaaataatgaccctcaacacgttaaaatgtggtttacattaagggtcatcagagtttaggcctaatttctgcaattcaggtattcatcattaccttgcaaacttactgtaccaacataaaaagcattttgctggtgtggcggggagaatcaggttaaattaagtagaagcattttggaaactttgcctagtacttcatgacttttgaaaattataagtgaaaacagagataagtcctattcttcgctcacattatttcccacaggcctttccagatccttatagctaaaaatttcccttttgccattaactgtcattaaaaaaaaaaaaaaagattacagtctttatgtataaaaccgctgccctttataacattttatgtgacttgtttgcttcactagattgtaagcctttggaggtcagaaaaaaatgcatctaaatgtatctgccaccacatctagcacagtgccttacacttatttgctattcaataaatatattcattaaaataatggacatatt

SEQ ID NO: 206352 - DNA, 213 bp, Homo sapiens
ttcagcagccacgtgtgcactctgtgtgtttgtgtgtgtatgtgtgcgtgcacttcttgcagttttgtcacatgtacagccttgcatcactgtcactgcagtcagaatcctccgctgtgccatcaccaacgattcctgtgttcgcctttatagccacgtcgatccttttttcatccctagcgctggcaaccactcacatagttcagcgtctga

SEQ ID NO: 206353 - DNA, 172 bp, Homo sapiens
ctcctgacctcaagtgatctgccctcctcaccctcccaaagtgctgggattatgggtgtgagccaccgcacctgtccctcttttcttttcctttttttttaaatgaaggtactattgaattgccctctggaaaaattaccagtttgatctaccaacagcttatgaaaaggct

SEQ ID NO: 206354 - DNA, 275 bp, Homo sapiens
agggttgtgtatgggaagagaaaggagcaggattctgaaatggtgctgtacgagcagcatgctaatggagccagcgcttggttctgtttaattgtaagcatccttccattgttcctccctgcacattaagtggggaggggatgccagactgccacagcctcctcatatcccatccacactggctttcatcccacagactatttttgactatgaacacagagcatttgaatgcctttgaaatgaaatgaatgaataaataaacaaataatctctca

SEQ ID NO: 206355 - DNA, 287 bp, Homo sapiens
tagagcccatgcctctatcttaatgagcctttgttctagctactctgttctatataggctacacttgcaaatcaaattcctctgtcaatgaccttcaatgctatctctaagaaattcctccaggagtctgtctgtcccatgctagaagcctcagaactgtgcctctgtgtttttatcctggacacaatctgcctagaaggtcttccccaaactcgtgtcagctgaattcatacctggtatctctctcccccagcttagtgtaaacttagtgcagggactttatcttg

SEQ ID NO: 206356 - DNA, 273 bp, Homo sapiens
ggttgagtttgctgactaaagctaccgagtaagaaatagtgccttgtctttcagtggtcactgaggtaataatggtctgttaccttctgaaggattccaggcaaatctaggggctgaggagtaagacagcaagatcatgagctggaaaaggaaactgtaaacaatagacctaatttcacagagacctaggcccagagcaagttcctgaaaccagggtattcggatttagatttgccagccaaaatatgcccacaggggctgcacgagtctctc

SEQ ID NO: 206357 - DNA, 741 bp, Homo sapiens
cagatttcacacggagcaggcacctcacagatgccaacccggtgggtacggccctttgagtgtcacctaaagcctcataacatcatcaccaagcccatccccaaaagctgtagttagtaagccaccaggatttgatatttagaaacttttcccactaacaaaaaacaagcaagaataaattttaaacaaaggctgactgtaccaaggaaatggagataataaacagaaaaagactcatggacactggtgttgggagtgatggtcttagccctcagaccagactaagacaccctgcagagctgaggctgtcaggaaccacgcagagccacggaagggaaacacctgcccccgggctacaaaggccaccctctgccctctgcttactgctctggttctgccctccagacacaagcaggtccctaaagcagttgctatcctgctgacgtgctgacaccatcagatatgaacaagaatcccagttttatttttcctaataaataaatcatccatttagcaaaacgtcaacgataccaaaagctatgaaagcatccttggatttacaaagaaccctcgcttctcatttcccttattttcccatgcccaggcagagagccctctaagcccatgggaagcttaacagaagggggtggggagtggccaactgtggccagggcaagacagaaaccacatgtgcgtgaacacgtgttctacacagagccttatgtactgggccacagaata

SEQ ID NO: 206358 - DNA, 504 bp, Homo sapiens
catgtttccaaacagcctcatttataaattaaattcattaaccacttcaaaaagtgtttaaaactttaatatagctgattttctctgatacttcaaatgcctgacaaatctggcaagcaacaactttctgagcatttagtctgttcctgcaattttaataaatcttgtttatagtgatttggctactatgtacgttgtttttatatatgtatggtaacacattacattgctttgtgtgtgcttcaactattaggatgcataatatgcctagaaaaccacatttattactatccagtagttgaatgatgcaccaaatagggaatgtaatctgcataggaatctatttctaattgcaagtgttctacacaaagtaaggaatttcttagagttactcaagggcaaataatttgactacataattaggtaggtatattcaaatgatggcccactaaagtcaactgcaatattgtctgattgttaacctagaagttttattgttactgg

SEQ ID NO: 206359 - DNA, 647 bp, Homo sapiens
gagcagtttaacctctaggttccctcatccacccccatacagccagacaattatccctccacccttctgttctcctcccctcttcccttagaaaacttgaagtttattctctagagaagttccaggctcagtgacaccaggccaaggtgctggactgaaaacaattagattaagttaaaatctgcttgataagtgtacaagtaatctattttcaaaacctaagagatgttgtcagctatctctaactatatgccagcagtaggccttctaggaaactgtactatgattccaggaaactcgattgtgggctggggaaggacaataaagtggattgtatgatcatctgcttctgttactggaaagggatcctgatccagaccccaagagagggttcttggatcttgtgcaagaaagaattcaggagtccataaagtgaaagcaagtttatcagagaagtaaagaaacaaaaggatggctaccccatagacagagagccctgagggctgctggttggacatttttatggttatttcttgatcatatgctaaacaaggggtagattattcataagttttctgggaaaggggaggttcccaaaactgagggttcctcccctttttagaccatataaggtaacttgggtgttg

SEQ ID NO: 206360 - DNA, 396 bp, Homo sapiens
taatacatgtgtgctgagcgcttcctggggctcctagacactgccaaaggtagctcagtggggaaattcaaggcaattttccccttaacttttgctacttctgaccattttccacttatgttattatgcttctgtatccatctgtctgcctatgtctagctatccatcatctatcaatcaatcactgtatcttgcaatggaggaattaactgtgatgttttcaagcgtgtcgcttctctcatattcctattaacatattggaaacgctcagctaaatagaataaagtttttagcctaaacctacagtgaatgtctaatgctttgggcaagatattgaaggggtgggggagagataatatgaatgctttcatagacacagctggacttctttccccc

SEQ ID NO: 206361 - DNA, 462 bp, Homo sapiens
gtagaattatctttcttagtatctacttggattgggtccctatatccaggtagagacagtgagaaaagctagtgattactcttttcttagacatgaacacctggacattccccagttggtggtttaacttctccctctttgttcctccatttattttttaaaatatttaaggaagtcaatgacttacagaacctttcatgggcacttggattaaagagatacaagaggcatagtccttatactccaggaaagaagacctggaatgtcttacctgatggcctggcattaaacatgccaggacagagggatgtgcaggaggctgtgaaaatacacaaaagcattgtgagtttggaagagagggaatggagaggactctgattttacccctacctatccttccaggatgattcctggcacacagctctctgtctcagacccgttaaatacaattattagtgtggt

SEQ ID NO: 206362 - DNA, 197 bp, Homo sapiens
gtggcaggatatcagcacccagttgcctcttcagtcaaaggtccttgggcattgcacatcctacacaactgtgtatgactattctcgcctgaatcaacatcttacgtctctggggttgggggtttctgtaacagtccttggccccggtgggctttcttatcagtcgctatccacttggtccattcgtcatcatgttg

SEQ ID NO: 206363 - DNA, 722 bp, Homo sapiens
agattccctgacctggagagatcagaagaggaaaaaagggattttttccctagtgagtatatagcaggaaaaaaaaaaaagatgagttagctttttcagtaattctcctgttatacacataaagtgactagcactatgcattccatacacacacacacacacacacagatctcatggtagtgatattggtagtgaaggaggaaaaggaaaaggtgagcaatggatgtgatattatgagaacaacacatatgaatgacactttattagaacttatctggttttcctcttatctctctggctgttccttctcaattcccttcactggtaactcttcaactccccaaccactaaatgctaagtgcccttaggctcagtctttcgaccccatttctacactcacttgatttcctgcagtttcatagctttaaaatccaatcttcttaatgatcactcccagacctttctctcctctgcctgcgaacttctatattcaactgcctacataacatccccatttggatgtctataggcatctcaaaagtaacatataaaaaatgaatcctgatattgcccccaaatctgaaacttcccccacacccaagtttttccattcaaaaatggctgctccattcttccatttgctcaggccaaaaaccttggattcatctttaatgcgtcactttctttcacaccccatatacaatctatcagcaaaacctgtg

SEQ ID NO: 206364 - DNA, 232 bp, Homo sapiens
catcacgagaatataatatgattctgtgcatgagactattttacatgattgtttatcacgtggtatgtctcaacagagagtcatatatattaactctccactaaattaagaaatcatcgaaaacaacactagtgagtctcaatgggaggtgggtaatagagattctcacttcccaagaagaattatcgcagtttcttggtgtggaagtgagagtttaggtgctaattgttta

SEQ ID NO: 206365 - DNA, 436 bp, Homo sapiens
atatatacttatctgttataatttcaggttttacttcaaatgctcacttgtctacaaccttacttttttcatttgaatctgttgggagacatagctgttcatgggcttctcatactccttgctgagatttcaaggccctggttgctcctttacctgggccagttcccaaggctgtgttctcataagtttctttgagggatgaaataaaacttccatctgaggcagagattaggcttgcttactgcttactacagaagtgatggatttcctcaaactcagagttcttcagactgtgacataaaccctatgcatgcacagcatctatctggaccctctctgtcacccctgtgggacttaggtacaagagaaactaaatgcaactatattcatttgtgttgcttgctgtgatgtaagtaataaagtcctctgtctctga

SEQ ID NO: 206366 - DNA, 461 bp, Homo sapiens
atcttctcttgggttgacaactatgctccaaaaatagtcatggaaattgaaagttataaattagaatttggaagttataaactctgataaaaaatgaatcaagctatttaaattatatttaatgtattctacatgaagaaaaaacaactatgttagccttaatcataatgtaatatggtagatgcctaaaataatgctaggagaagcttccttccatacaagcagcataattttcacacataaattaataccaggctgtcatctagtcacttagcagattagaacactaggagttggaagataaaacattgattttatatcagagaatgagggaaagttcaagcagaaagtgatatcaaatggaatatatttaaataaaaaagaatgagtaaaaacacaaactaaaaagaaaatagaaatgttatcactttttttaagatttggtattcaacaacctcgac

SEQ ID NO: 206367 - DNA, 2377 bp, Homo sapiens
cggatgagggtcagggctgcgcggacccctatcccgcctgcgtcctcccggcaagcccagcgggagcgcccgctcggctgggtccccgcctccagcgcgccggggccgcccagaccctgggctcagcctcgcgccccggtgcccacctgaggaggcggcggtcccggcctcgcgtcccggatgggacggcgcgggagcaatgccagtggccccgagcgccccgggccacgcgcggggccggccagccgctctcgcgccctccccgccccctccgcgccttgcctcgccgcccgcgcgccccacccaccggccgctcctcccctctccccaccctcctcctccgccccctcccctcccccgccgcctcgcagatagctcggccgcgcgtctcagccgccggggccccgagcgcaggcggcgaggccaccacacctgcagagcgctcgggctgcctaggcggcacctcgcctcccgccgcgcaaaccccttctccccacgcgccgagtctcccatgacgcccgagccccccggccggcgacaatgaccacttccctgcaagatgggcagagcgccgcgagcagggcggctgcccgggattcgccgctggccgcccaggtgtgtggcgctgcccaggggaggggcgacgcccacgacctggcgccggccccctggctgcacgcgcgagcgctcctgccccttccggacgggacccgcggctgtgctgcagacaggagaaaaaagaaagatcttgatgttccggaaatgccatctattccaaacccttttcctgagctatgctgttctccaattacatctgtgttgtcagcagacctatttcccaaagcaaattcaaggaaaaaacaggtgattaaagtatacagtgaagatgaaaccagcagggctttagatgtacccagtgacataacggctcgagatgtttgtcagctgttgatcctgaagaatcattacattgatgaccacagctggaccctttttgagcacctgcctcacataggtgtagaaagaacaatagaagaccacgaactggtgattgaagtgctatccaactgggggatagaagaagaaaacaaactatactttagaaaaaattatgccaaatatgagttctttaaaaacccaatgtatttttttccagagcatatggtatcttttgcaactgaaaccaatggtgaaatatcccccacacagattttgcagatgtttctgagttcaagcacatatcctgaaattcatggtttcttacatgcgaaagaacagggaaagaagtcttggaaaaaaatttacttttttctaagaagatctggtttatatttttctactaaaggaacatcaaaggaaccgcggcatttgcagtttttcagcgaatttggcaatagtgatatttatgtgtcactggcaggcaaaaaaaaacatggagcaccgactaactatggattctgctttaagcctaacaaagcgggagggccccgagacctgaaaatgctctgtgcagaagaagagcagagtaggacgtgctgggtgaccgcgattagattgcttaagtatggcatgcagctgtaccagaattatatgcatccatatcaaggtagaagtggctgcagttcacagagcatatcacctatgagaagtatatcagagaattccctggtagcaatggacttctcaggccagaaaagcagagttatagaaaatcccactgaagccctttcagttgcggttgaagaaggactcgcttggaggaaaaaaggatgtttacgcctgggcactcacggtagccccactgcctcttcacagagctctgccacaaacatggctatccaccggtcccagccatggtttcaccacaaaatttctagagatgaggctcagcgattgattattcagcaaggacttgtggatggagttttcttggtacgggatagtcagagtaaccccaaaactttcgtactgtcaatgagtcatggacaaaaaataaagcactttcaaattataccagtagaagatgacggtgaaatgttccacacactggatgatggccacacaagatttacagatctaatacagctggtggagttctatcaactcaataagggcgttcttccttgcaagttgaaacattattgtgctaggattgctctctagacaagccagaagtgacttattaaactattgaaggaaaaggactcaagaaaaataataaaagaccataaataagggcgaaaacattatcatgtgaaaagaatgtatttcacctgcaagttacaaaaaaatagtttgtgcattgcaaataagcaaagacttggattgactttacattcatcatttaaaattcattagttaaaattaaaccttagga

SEQ ID NO: 206368 - DNA, 915 bp, Homo sapiens
ggctttgggtagattggaatcacataagcagggtgacatttattactttcctagttgtttcattgcactgagccctgagattcccaaggagtaaccataaaagatttcttttattttgtccatgacctacgagacaggatcattctaagaagagcaggcatgagtttgagtgcaagaagagtcactctgcctgcaataacgccaataattctacagaaaagggtgattaaagtatacagtgaagatgaaaccagcagggctttagatgtacccagtgacataacggctcgagatgtttgtcagctgttgatcctgaagaatcattacattgatgaccacagctggaccctttttgagcacctgcctcacataggtgtagaaagaacaatagaagaccacgaactggtgattgaagtgctatccaactgggggatagaagaagaaaacaaactatactttagaaaaaattatgccaaatatgagttctttaaaaacccaatgtatttttttccagagcatatggtatcttttgcaactgaaaccaatggtgaaatatcccccacacagattttgcagatgtttctgagttcaagcacatatcctgaaattcatggtttcttacatgcgaaagaacagggaaagaagtcttggaaaaaaatttacttttttctaagaagatctggtttatatttttctactaaaggaacatcaaaggaaccgcggcatttgcagtttttcagcgaatttggcaatagtgatatttatgtgtcactggcaggcaaaaaaaaacatggagcaccgactaactatggattctgctttaaggtacaggcttaatattttgatagatgaataaagcaagcctcagccttttaggtaagcttgagtttcctttaattgcttttgaaaagagac

SEQ ID NO: 206369 - DNA, 787 bp, Homo sapiens
gtaaatattcatttttgtggctaagtagacaacatttagaaaaggaaattaatttctcaagtgggagcattaaaatcttcatttacttttactctgaatattgtagatttctttcattgattcaaaatattcatactgtctttactaacagaatgctgggagaattagaactagatgaagtagagtagcagtgcttctcagggatcagctgatatttcttttaaatgcaagtgatgttaaaaaaaacaagtagatatgccgtaacattcttttcactgtcttttagttttataaacttggcagttttggcatgtggagatagtttgcaatcgaatatgattgtccttctgtgtaatttatcctctttacttatttgttgcttttctttttgcaggtgtagaagatgacggtgaaatgttccacacactggatgatggccacacaagatttacagatctaatacagctggtggagttctatcaactcaataagggcgttcttccttgcaagttgaaacattattgtgctaggattgctctctagacaagccagaagtgacttattaaactattgaaggaaaaggactcaagaaaaataataaaagaccataaataagggcgaaaacattatcatgtgaaaagaatgtatttcacctgcaagttacaaaaaaatagtttgtgcattgcaaataagcaaagacttggattgactttacattcatcatttaaaattcattagttaaaattaaaccttaggaaaaaaatgaacttggcctcgttggcctcag

SEQ ID NO: 206370 - DNA, 757 bp, Homo sapiens
gtaaatattcatttttgtggctaagtagacaacatttagaaaaggaaattaatttctcaagtgggagcattaaaatcttcatttacttttactctgaatattgtagatttctttcattgattcaaaatattcatactgtctttactaacagaatgctgggagaattagaactagatgaagtagagtagcagtgcttctcagggatcagctgatatttcttttaaatgcaagtgatgttaaaaaaaacaagtagatatgccgtaacattcttttcactgtcttttagttttataaacttggcagttttggcatgtggagatagtttgcaatcgaatatgattgtccttctgtgtaatttatcctctttacttatttgttgcttttctttttgcaggtgtagaagatgacggtgaaatgttccacacactggatgatggccacacaagatttacagatctaatacagctggtggagttctatcaactcaataagggcgttcttccttgcaagttgaaacattattgtgctaggattgctctctagacaagccagaagtgacttattaaactattgaaggaaaaggactcaagaaaaataataaaagaccataaataagggcgaaaacattatcatgtgaaaagaatgtatttcacctgcaagttacaaaaaaatagtttgtgcattgcaaataagcaaagacttggattgactttacattcatcatttaaaattcattagttaaaattaaaccttagga

SEQ ID NO: 206371 - DNA, 533 bp, Homo sapiens
aaggtagttggaaaatagttgaataatggacagagcaaaaaacccttgagagttactggcacgggcttttcagagtaaccccaaaactttcgtactgtcaatgagtcatggacaaaaaataaagcactttcaaattataccagtagaagatgacggtgaaatgttccacacactggatgatggccacacaagatttacagatctaatacagctggtggagttctatcaactcaataagggcgttcttccttgcaagttgaaacattattgtgctaggattgctctctagacaagccagaagtgacttattaaactattgaaggaaaaggactcaagaaaaataataaaagaccataaataagggcgaaaacattatcatgtgaaaagaatgtatttcacctgcaagttacaaaaaaatagtttgtgcattgcaaataagcaaagacttggattgactttacattcatcatttaaaattcattagttaaaattaaaccttaggaaaaaaatgaacttggcctcgttggcctcag

SEQ ID NO: 206372 - DNA, 448 bp, Homo sapiens
acgttacactatgcaggtctaatcatagtcgtaaagagaactcacttagaggataacgtagaagatgacggtgaaatgttccacacactggatgatggccacacaagatttacagatctaatacagctggtggagttctatcaactcaataagggcgttcttccttgcaagttgaaacattattgtgctaggattgctctctagacaagccagaagtgacttattaaactattgaaggaaaaggactcaagaaaaataataaaagaccataaataagggcgaaaacattatcatgtgaaaagaatgtatttcacctgcaagttacaaaaaaatagtttgtgcattgcaaataagcaaagacttggattgactttacattcatcatttaaaattcattagttaaaattaaaccttaggaaaaaaatgaacttggcctcgttggcctcag

SEQ ID NO: 206373 - DNA, 445 bp, Homo sapiens
  misc_feature (37)..(37): n is a, c, g, or t
cacatgtcaggacctaccggccaccaacagccccccnattacgtcagtcacactgtagaagatgacggtgaaatgttccacacactggatgatggccacacaagatttacagatctaatacagctggtggagttctatcaactcaataagggcgttcttccttgcaagttgaaacattattgtgctaggattgctctctagacaagccagaagtgacttattaaactattgaaggaaaaggactcaagaaaaataataaaagaccataaataagggcgaaaacattatcatgtgaaaagaatgtatttcacctgcaagttacaaaaaaatagtttgtgcattgcaaataagcaaagacttggattgactttacattcatcatttaaaattcattagttaaaattaaaccttaggaaaaaaatgaacttggcctcgttggcctcag

SEQ ID NO: 206374 - DNA, 349 bp, Homo sapiens
  misc_feature (1)..(1): n is a, c, g, or t
naaaacccccaaccgggaaatttttccttttaaaaaattaaaaccccaaaggggcgtgtgtgtgagttctatcaactcaataagggcgttcttccttgcaagttgaaacattattgtgctaggattgctctctagacaagccagaagtgacttattaaactattgaaggaaaaggactcaagaaaaataataaaagaccataaataagggcgaaaacattatcatgtgaaaagaatgtatttcacctgcaagttacaaaaaaatagtttgtgcattgcaaataagcaaagacttggattgactttacattcatcatttaaaattcattagttaaaattaaaccttagga

SEQ ID NO: 206375 - DNA, 1735 bp, Homo sapiens
ggctttgggtagattggaatcacataagcagggtgacatttattactttcctagttgtttcattgcactgagccctgagattcccaaggagtaaccataaaagatttcttttattttgtccatgacctacgagacaggatcattctaagaagagcaggcatgagtttgagtgcaagaagagtcactctgcctgcaataacgccaataattctacagaaaagggtgattaaagtatacagtgaagatgaaaccagcagggctttagatgtacccagtgacataacggctcgagatgtttgtcagctgttgatcctgaagaatcattacattgatgaccacagctggaccctttttgagcacctgcctcacataggtgtagaaagaacaatagaagaccacgaactggtgattgaagtgctatccaactgggggatagaagaagaaaacaaactatactttagaaaaaattatgccaaatatgagttctttaaaaacccaatgtatttttttccagagcatatggtatcttttgcaactgaaaccaatggtgaaatatcccccacacagattttgcagatgtttctgagttcaagcacatatcctgaaattcatggtttcttacatgcgaaagaacagggaaagaagtcttggaaaaaaatttacttttttctaagaagatctggtttatatttttctactaaaggaacatcaaaggaaccgcggcatttgcagtttttcagcgaatttggcaatagtgatatttatgtgtcactggcaggcaaaaaaaaacatggagcaccgactaactatggattctgctttaagcctaacaaagcgggagggccccgagacctgaaaatgctctgtgcagaagaagagcagagtaggacgtgctgggtgaccgcgattagattgcttaagtatggcatgcagctgtaccagaattatatgcatccatatcaaggtagaagtggctgcagttcacagagcatatcacctatgagaagtatatcagagaattccctggtagcaatggacttctcaggccagaaaagcagagttatagaaaatcccactgaagccctttcagttgcggttgaagaaggactcgcttggaggaaaaaaggatgtttacgcctgggcactcacggtagccccactgcctcttcacagagctctgccacaaacatggctatccaccggtcccagccatggtttcaccacaaaatttctagagatgaggctcagcgattgattattcagcaaggacttgtggatggagttttcttggtacgggatagtcagagtaaccccaaaactttcgtactgtcaatgagtcatggacaaaaaataaagcactttcaaattataccagtagaagatgacggtgaaatgttccacacactggatgatggccacacaagatttacagatctaatacagctggtggagttctatcaactcaataagggcgttcttccttgcaagttgaaacattattgtgctaggattgctctctagacaagccagaagtgacttattaaactattgaaggaaaaggactcaagaaaaataataaaagaccataaataagggcgaaaacattatcatgtgaaaagaatgtatttcacctgcaagttacaaaaaaatagtttgtgcattgcaaataagcaaagacttggattgactttacattcatcatttaaaattcattagttaaaattaaaccttagga

SEQ ID NO: 206376 - DNA, 1539 bp, Homo sapiens
  misc_feature (24)..(24): n is a, c, g, or t
tgatggagttaaggaaaggtttcnaggtgattaaagtatacagtgaagatgaaaccagcagggctttagatgtacccagtgacataacggctcgagatgtttgtcagctgttgatcctgaagaatcattacattgatgaccacagctggaccctttttgagcacctgcctcacataggtgtagaaagaacaatagaagaccacgaactggtgattgaagtgctatccaactgggggatagaagaagaaaacaaactatactttagaaaaaattatgccaaatatgagttctttaaaaacccaatgtatttttttccagagcatatggtatcttttgcaactgaaaccaatggtgaaatatcccccacacagattttgcagatgtttctgagttcaagcacatatcctgaaattcatggtttcttacatgcgaaagaacagggaaagaagtcttggaaaaaaatttacttttttctaagaagatctggtttatatttttctactaaaggaacatcaaaggaaccgcggcatttgcagtttttcagcgaatttggcaatagtgatatttatgtgtcactggcaggcaaaaaaaaacatggagcaccgactaactatggattctgctttaagcctaacaaagcgggagggccccgagacctgaaaatgctctgtgcagaagaagagcagagtaggacgtgctgggtgaccgcgattagattgcttaagtatggcatgcagctgtaccagaattatatgcatccatatcaaggtagaagtggctgcagttcacagagcatatcacctatgagaagtatatcagagaattccctggtagcaatggacttctcaggccagaaaagcagagttatagaaaatcccactgaagccctttcagttgcggttgaagaaggactcgcttggaggaaaaaaggatgtttacgcctgggcactcacggtagccccactgcctcttcacagagctctgccacaaacatggctatccaccggtcccagccatggtttcaccacaaaatttctagagatgaggctcagcgattgattattcagcaaggacttgtggatggagttttcttggtacgggatagtcagagtaaccccaaaactttcgtactgtcaatgagtcatggacaaaaaataaagcactttcaaattataccagtagaagatgacggtgaaatgttccacacactggatgatggccacacaagatttacagatctaatacagctggtggagttctatcaactcaataagggcgttcttccttgcaagttgaaacattattgtgctaggattgctctctagacaagccagaagtgacttattaaactattgaaggaaaaggactcaagaaaaataataaaagaccataaataagggcgaaaacattatcatgtgaaaagaatgtatttcacctgcaagttacaaaaaaatagtttgtgcattgcaaataagcaaagacttggattgactttacattcatcatttaaaattcattagttaaaattaaaccttagga

SEQ ID NO: 206377 - DNA, 1765 bp, Homo sapiens
ggctttgggtagattggaatcacataagcagggtgacatttattactttcctagttgtttcattgcactgagccctgagattcccaaggagtaaccataaaagatttcttttattttgtccatgacctacgagacaggatcattctaagaagagcaggcatgagtttgagtgcaagaagagtcactctgcctgcaataacgccaataattctacagaaaagggtgattaaagtatacagtgaagatgaaaccagcagggctttagatgtacccagtgacataacggctcgagatgtttgtcagctgttgatcctgaagaatcattacattgatgaccacagctggaccctttttgagcacctgcctcacataggtgtagaaagaacaatagaagaccacgaactggtgattgaagtgctatccaactgggggatagaagaagaaaacaaactatactttagaaaaaattatgccaaatatgagttctttaaaaacccaatgtatttttttccagagcatatggtatcttttgcaactgaaaccaatggtgaaatatcccccacacagattttgcagatgtttctgagttcaagcacatatcctgaaattcatggtttcttacatgcgaaagaacagggaaagaagtcttggaaaaaaatttacttttttctaagaagatctggtttatatttttctactaaaggaacatcaaaggaaccgcggcatttgcagtttttcagcgaatttggcaatagtgatatttatgtgtcactggcaggcaaaaaaaaacatggagcaccgactaactatggattctgctttaagcctaacaaagcgggagggccccgagacctgaaaatgctctgtgcagaagaagagcagagtaggacgtgctgggtgaccgcgattagattgcttaagtatggcatgcagctgtaccagaattatatgcatccatatcaaggtagaagtggctgcagttcacagagcatatcacctatgagaagtatatcagagaattccctggtagcaatggacttctcaggccagaaaagcagagttatagaaaatcccactgaagccctttcagttgcggttgaagaaggactcgcttggaggaaaaaaggatgtttacgcctgggcactcacggtagccccactgcctcttcacagagctctgccacaaacatggctatccaccggtcccagccatggtttcaccacaaaatttctagagatgaggctcagcgattgattattcagcaaggacttgtggatggagttttcttggtacgggatagtcagagtaaccccaaaactttcgtactgtcaatgagtcatggacaaaaaataaagcactttcaaattataccagtagaagatgacggtgaaatgttccacacactggatgatggccacacaagatttacagatctaatacagctggtggagttctatcaactcaataagggcgttcttccttgcaagttgaaacattattgtgctaggattgctctctagacaagccagaagtgacttattaaactattgaaggaaaaggactcaagaaaaataataaaagaccataaataagggcgaaaacattatcatgtgaaaagaatgtatttcacctgcaagttacaaaaaaatagtttgtgcattgcaaataagcaaagacttggattgactttacattcatcatttaaaattcattagttaaaattaaaccttaggaaaaaaatgaacttggcctcgttggcctcag

SEQ ID NO: 206378 - DNA, 343 bp, Homo sapiens
tatgcatacacttcttggatttattaatgctatagttctatgaaatccatgagtaaatatagaaacattgaaattccttctctctctttagagttttcttggtacgggatagtcagagtaaccccaaaactttcgtactgtcaatgagtcatggacaaaaaataaagcactttcaaattataccagtaagtaattcgtgatttcacatttgtgtattagaaatgaccttaatgcataagcttttgatcttaatgcataagcttttggaaactttggttttcttttggtctttttattaaatataatttggcagcttgtgctttgactagagttaactttggca

SEQ ID NO: 206379 - DNA, 2220 bp, Homo sapiens
cggatgagggtcagggctgcgcggacccctatcccgcctgcgtcctcccggcaagcccagcgggagcgcccgctcggctgggtccccgcctccagcgcgccggggccgcccagaccctgggctcagcctcgcgccccggtgcccacctgaggaggcggcggtcccggcctcgcgtcccggatgggacggcgcgggagcaatgccagtggccccgagcgccccgggccacgcgcggggccggccagccgctctcgcgccctccccgccccctccgcgccttgcctcgccgcccgcgcgccccacccaccggccgctcctcccctctccccaccctcctcctccgccccctcccctcccccgccgcctcgcagatagctcggccgcgcgtctcagccgccggggccccgagcgcaggcggcgaggccaccacacctgcagagcgctcgggctgcctaggcggcacctcgcctcccgccgcgcaaaccccttctccccacgcgccgagtctcccatgacgcccgagccccccggccggcgacaatgaccacttccctgcaagatgggcagagcgccgcgagcagggcggctgcccgggattcgccgctggccgcccaggtgtgtggcgctgcccaggggaggggcgacgcccacgacctggcgccggccccctggctgcacgcgcgagcgctcctgccccttccggacgggacccgcggctgtgctgcagacaggagaaaaaagaaagatcttgatgttccggaaatgccatctattccaaacccttttcctgagctatgctgttctccaattacatctgtgttgtcagcagacctatttcccaaagcaaattcaaggaaaaaacagaaagaacaatagaagaccacgaactggtgattgaagtgctatccaactgggggatagaagaagaaaacaaactatactttagaaaaaattatgccaaatatgagttctttaaaaacccaatgtatttttttccagagcatatggtatcttttgcaactgaaaccaatggtgaaatatcccccacacagattttgcagatgtttctgagttcaagcacatatcctgaaattcatggtttcttacatgcgaaagaacagggaaagaagtcttggaaaaaaatttacttttttctaagaagatctggtttatatttttctactaaaggaacatcaaaggaaccgcggcatttgcagtttttcagcgaatttggcaatagtgatatttatgtgtcactggcaggcaaaaaaaaacatggagcaccgactaactatggattctgctttaagcctaacaaagcgggagggccccgagacctgaaaatgctctgtgcagaagaagagcagagtaggacgtgctgggtgaccgcgattagattgcttaagtatggcatgcagctgtaccagaattatatgcatccatatcaaggtagaagtggctgcagttcacagagcatatcacctatgagaagtatatcagagaattccctggtagcaatggacttctcaggccagaaaagcagagttatagaaaatcccactgaagccctttcagttgcggttgaagaaggactcgcttggaggaaaaaaggatgtttacgcctgggcactcacggtagccccactgcctcttcacagagctctgccacaaacatggctatccaccggtcccagccatggtttcaccacaaaatttctagagatgaggctcagcgattgattattcagcaaggacttgtggatggagttttcttggtacgggatagtcagagtaaccccaaaactttcgtactgtcaatgagtcatggacaaaaaataaagcactttcaaattataccagtagaagatgacggtgaaatgttccacacactggatgatggccacacaagatttacagatctaatacagctggtggagttctatcaactcaataagggcgttcttccttgcaagttgaaacattattgtgctaggattgctctctagacaagccagaagtgacttattaaactattgaaggaaaaggactcaagaaaaataataaaagaccataaataagggcgaaaacattatcatgtgaaaagaatgtatttcacctgcaagttacaaaaaaatagtttgtgcattgcaaataagcaaagacttggattgactttacattcatcatttaaaattcattagttaaaattaaaccttagga

SEQ ID NO: 206380 - DNA, 1641 bp, Homo sapiens
ggctttgggtagattggaatcacataagcagggtgacatttattactttcctagttgtttcattgcactgagccctgagattcccaaggagtaaccataaaagatttcttttattttgtccatgacctacgagacaggatcattctaagaagagcaggcatgagtttgagtgcaagaagagtcactctgcctgcaataacgccaataattctacagaaaagggtgattaaagtatacagtgaagatgaaaccagcagggctttagatgtacccagtgacataacggctcgagatgtttgtcagctgttgatcctgaagaatcattacattgatgaccacagctggaccctttttgagcacctgcctcacataggtgtagaaagaacaatagaagaccacgaactggtgattgaagtgctatccaactgggggatagaagaagaaaacaaactatactttagaaaaaattatgccaaatatgagttctttaaaaacccaatgtatttttttccagagcatatggtatcttttgcaactgaaaccaatggtgaaatatcccccacacagattttgcagatgtttctgagttcaagcacatatcctgaaattcatggtttcttacatgcgaaagaacagggaaagaagtcttggaaaaaaatttacttttttctaagaagatctggtttatatttttctactaaaggaacatcaaaggaaccgcggcatttgcagtttttcagcgaatttggcaatagtgatatttatgtgtcactggcaggcaaaaaaaaacatggagcaccgactaactatggattctgctttaagcctaacaaagcgggagggccccgagacctgaaaatgctctgtgcagaagaagagcagagtaggacgtgctgggtgaccgcgattagattgcttaagtatggcatgcagctgtaccagaattatatgcatccatatcaaggtagaagtggctgcagttcacagagcatatcacctatgagaagtatatcagagaattccctggtagcaatggacttctcaggccagaaaagcagagttatagaaaatcccactgaagccctttcagttgcggttgaagaaggactcgcttggaggaaaaaaggatgtttacgcctgggcactcacggtagccccactgcctcttcacagagctctgccacaaacatggctatccaccggtcccagccatggtttcaccacaaaatttctagagatgaggctcagcgattgattattcagcaaggacttgtggatgggtagaagatgacggtgaaatgttccacacactggatgatggccacacaagatttacagatctaatacagctggtggagttctatcaactcaataagggcgttcttccttgcaagttgaaacattattgtgctaggattgctctctagacaagccagaagtgacttattaaactattgaaggaaaaggactcaagaaaaataataaaagaccataaataagggcgaaaacattatcatgtgaaaagaatgtatttcacctgcaagttacaaaaaaatagtttgtgcattgcaaataagcaaagacttggattgactttacattcatcatttaaaattcattagttaaaattaaaccttagga

SEQ ID NO: 206381 - DNA, 348 bp, Homo sapiens
aatgactagaaaataatttttcaaaatgcataaacatggcttagaatatattgatatgatttttggttttagaaatgatggggctattttatttccgatttccaaatttatataagcaattgtgatttgatgaaaagtcagaaaagttggcaagtatttttttcttagtttaacaaagcatgtattgtttgaatatgtttgttttctctacaaacctgtgtgcattattattgaatatcctcagtacttgtgatagtattttgtgctcatgtttggctaatttgactcaacagcgcatcatggaatggcctctcttactcattttttccgttgtcttatgtgtctaat

SEQ ID NO: 206382 - DNA, 642 bp, Homo sapiens
ggcctaactataaccgggcaagccacttttctgagactgtttcgtcttcttaaagggtgaagatgaagccctatgccttttagggtagttgagaggatagaatgagttaatgtgtgtaattatgttgtatacgtatattaaggttcaattagaggagacatgtacagggatcttaataacccattccagagttttagcacgaatacatggcagcatattttttatttgtaattgtctttgttacttgatagtgaacctctctaacttctccattgcttatggtacccaaaataggagatgatcttcacaaaagagaatctcagactgaaattctggggaaagggccaggcgcagtggctcactcctgtaatcccagcattttgggagggtgaggtgggtagatcacctgaggtcaggaattcgagaccagcctggccaacatggtgaaacccccatctctactaaaaatacaaaaattagctggacgtggtggcaggggcttgtaatcccagctacttgggaggctgaggcaggagaatcacttgaatccaggaggcggaggttgcagtgaccccaggtcgtgtcattgcactccatccagcctgggcaacagagtgagactctgtctccaaaaaaaaaaaa

SEQ ID NO: 206383 - DNA, 268 bp, Homo sapiens
ggctaagagtttatgcataaccttgaaaacaacgtggagccacttacagttttgaggaagagaatgtcactggggctatattttaagaagattaatatgacaactggttgtaggatggattggaaggagaaggatctagtgataaggatggatgccagttcttttggttgtcagcaaggaaggcatccctggttatcttaggcaaaaaggaaatttattgctggggcaatggagagggaagagttaaaaactgcttgggttcaaagag

SEQ ID NO: 206384 - DNA, 380 bp, Homo sapiens
gctccaaagtaggcaaaaataaaaaaattaaaaagcaaagaaaaactaacaaggcaccatttgcacttacaaaacacagattaattgcaaccatcacattctagtgaacttgaggagaaactgatatattcaaactaactggtggtaccagtatcaactattcacaaccttaggaaagaaaagtaaataaagtggtctcattcatcaatgtagcaaccccactcctagaaatctgaggccaggaaataaccccaaagaaaatatacacaaatatgtcccctgtagcattatttaaaaccatgacaaaaataatgaaaatcaccttaatatccaacaaaactaatttccttgcaaaagacacagcccttcaccttaacctt

SEQ ID NO: 206385 - DNA, 3388 bp, Homo sapiens
  misc_feature (1079)..(1079): n is a, c, g, or t
  misc_feature (2422)..(2422): n is a, c, g, or t
  misc_feature (3134)..(3134): n is a, c, g, or t
  misc_feature (3306)..(3306): n is a, c, g, or t
  misc_feature (3368)..(3368): n is a, c, g, or t
  misc_feature (3377)..(3377): n is a, c, g, or t
  misc_feature (3384)..(3384): n is a, c, g, or t
tctatgctacattttaaattacattcttcaagtcatattttgggtgtcggttccacttgctctgatacacgctatttcacttcaatgaagtaaatgatgccaaccctgagggaagacctcttcttattctgcccagcatctgggactttgaaaccagcccagaactccaacaggaaaccccagtccagaaaacaaataataaagagaatccaagctcccattttactcctaacaaggcattttgttaattttaactattctagtccataagagaagtagattagaataatggaaacgctagttggtttttcccccaaagtgagaacagagaaaactagtctacatattaaccccacttattcaaactccccaagatatgtctagctctgcagctgccatttatggtgtgctccaaccacatgcaggcattgcactccagggcaccttcaattagttagtccttatgatgacacagtaagagggatttttttaaatttcaacttctcagatggggaaccaaggctcagtatggcaaaataacttatgaaagggccagacagctaaaaaataactgaactaagatttgaacacatagcctagcactagagcctgtgtctgtaaccactacactccattagacaaacactggtctccattttaggtaacagaataacatcacgtgcatagctcatttaatctcacaggagctctctgtggagtatactattatttaacagaggaagataaaaagagatgcaactggatggaataatttacctaggtacatacagctaggaaatggcagaactaggattttaagtgagaccctaaattgtgggtcagcaaacattctccagtactatggcccaatatgctcccctgaaatacactccacctttgggctggtagataggatcgatgtgaaaaaaaatgaaggaactgagaggaagaaacaaaaatttccaacattagatcttattcagaagtggctcccctcatgtcatatgtccttcctctaagcattgtcaaaatattgtcccaaaattttgtgtatagccttctcacaagtaacaaagtgncaggaaaaaccacctataacccaaggacctgttctacaatgaaatggcagagtcatagatacaactgatgtataactgcccgccacctccccgccaccacccgcaaatgaaagaaagagaacaaaaggaaaccaaatcaaatgtccaacagaaggaacatagttaaccaaattatggtttaaactggtgatcctcaattgggagttagaagggggttgatattaggagctgtgtgggagcatttttggttgtcacaacgacctgggaggcatcctgcaaaataaataccctgcagctatgacacacacaaaaagaactgttacatctctaatagtgatgacgtcctcatggagaaagacagtaattaattatgaagccctacatgggtgggacatgtcacctgaaagatactgaacatgccctggcacagagtaggcacctaataatatctgtgtaatgactggatgatctattacaccgttcataaaagataatatggcaatatgaaaatagttacgttaggaaaagaaagtaggataaaaagttataagcacaagataattgcaactatatatttatttaaattccaaaaaagactagaaggaaatacacttagatgttttattgtttcacaatagcacgagaattagtggcttttctctctgtggcttaagcatagtataattgatcatgaaacagtaaaaaacctaaaccacatttaactggccaaaagaggactagaaaagaagagtagagtgcaaccactcctgaataaatgtgatcaagagaaaagaacaagaaggtttttgaagaaagataaattatgactgtcacctgggtatttctagacagatttctgaccctcatctccaaattctgagtaccctagttcaggggtccccagtccccgggccacagactggtttccgtggcctgttagaagccaggctgcacagcaggaggtcagcgtcaggcaagcaagtgaagcttcatctgtgtttacagccgctgcccacagctcacatcaccacctgagctctgcctcctgtcacataagcagtggcattagcttctcatagaagcgtaaaccctattgtgaactgcacatgtgagggatcaaagttgtgcactccttatgagaatctaatgcctgatgatctgtcactgtctcccatcaaccccagatgggaccatctagttgcaggaaaacaagctcagggctcccactgattctatattatggtgagttgtataattacttcattatataatacaaggtaataataatgaaaataaagtgcagaataaatgttatgtgcttgaatcatcctgaaaccatcccntcctctggtccatggaaaaaccgtctcccatgattctggtccctggtgccaacaaggctggagaactgctgtagtttacaggccctgcccactgaagccttcctcatggagtttcccatctctgttatgcacactgccatccgctgtgtcaggcaagctcaagtctgaagtcatgattttctcttctccatcctatggctcccacctgcaggcagccctcacatcctctcagccctcactacaattcctattccatctcaccttcccccctgcttctatttccaatgccatcccccaacccaagaccctccctctctcctggatgctaaccccatgccgtcctataatttcctatcatgtgcaaggaacacccaagcatttttattaagcaggctaagatgctcaaactccacgattaaaatgctcagtggaagaaggagcaactataattttttaagaagtaatgattagcacagaaaatacgtttggtctcaaatattcccaccaaaatatacctccatggcaatcggggaaagggagagggtggtaaatgtcaacccatgagaaaggaagggtctggaggcacaaatcaaaggggacctaagtaggcaggaagtatcactgaaaaccttcaaaatcttgcattatacaacagcattaatttggccatttaaaatgtaaaaatgggccaggcgcagtgactcacgcctgnaatcccagcactttgggagggtgaggtgggcagatcacttgaggtcaggagttcgagaccagcctggccaacatggtgaaactccatctctactaataatacaaaaattagctggtgtggtgctgtgcacctgtaatcccagctactcaggaggctgaagtaggagaatcgnttgaacccgggaggtggaggttgcagtgagctgagatcgtgccactgcactctagcctgggngacagaacnagacttngtct

SEQ ID NO: 206386 - DNA, 3254 bp, Homo sapiens
  misc_feature (1079)..(1079): n is a, c, g, or t
  misc_feature (2422)..(2422): n is a, c, g, or t
  misc_feature (3172)..(3172): n is a, c, g, or t
  misc_feature (3234)..(3234): n is a, c, g, or t
  misc_feature (3243)..(3243): n is a, c, g, or t
  misc_feature (3250)..(3250): n is a, c, g, or t
tctatgctacattttaaattacattcttcaagtcatattttgggtgtcggttccacttgctctgatacacgctatttcacttcaatgaagtaaatgatgccaaccctgagggaagacctcttcttattctgcccagcatctgggactttgaaaccagcccagaactccaacaggaaaccccagtccagaaaacaaataataaagagaatccaagctcccattttactcctaacaaggcattttgttaattttaactattctagtccataagagaagtagattagaataatggaaacgctagttggtttttcccccaaagtgagaacagagaaaactagtctacatattaaccccacttattcaaactccccaagatatgtctagctctgcagctgccatttatggtgtgctccaaccacatgcaggcattgcactccagggcaccttcaattagttagtccttatgatgacacagtaagagggatttttttaaatttcaacttctcagatggggaaccaaggctcagtatggcaaaataacttatgaaagggccagacagctaaaaaataactgaactaagatttgaacacatagcctagcactagagcctgtgtctgtaaccactacactccattagacaaacactggtctccattttaggtaacagaataacatcacgtgcatagctcatttaatctcacaggagctctctgtggagtatactattatttaacagaggaagataaaaagagatgcaactggatggaataatttacctaggtacatacagctaggaaatggcagaactaggattttaagtgagaccctaaattgtgggtcagcaaacattctccagtactatggcccaatatgctcccctgaaatacactccacctttgggctggtagataggatcgatgtgaaaaaaaatgaaggaactgagaggaagaaacaaaaatttccaacattagatcttattcagaagtggctcccctcatgtcatatgtccttcctctaagcattgtcaaaatattgtcccaaaattttgtgtatagccttctcacaagtaacaaagtgncaggaaaaaccacctataacccaaggacctgttctacaatgaaatggcagagtcatagatacaactgatgtataactgcccgccacctccccgccaccacccgcaaatgaaagaaagagaacaaaaggaaaccaaatcaaatgtccaacagaaggaacatagttaaccaaattatggtttaaactggtgatcctcaattgggagttagaagggggttgatattaggagctgtgtgggagcatttttggttgtcacaacgacctgggaggcatcctgcaaaataaataccctgcagctatgacacacacaaaaagaactgttacatctctaatagtgatgacgtcctcatggagaaagacagtaattaattatgaagccctacatgggtgggacatgtcacctgaaagatactgaacatgccctggcacagagtaggcacctaataatatctgtgtaatgactggatgatctattacaccgttcataaaagataatatggcaatatgaaaatagttacgttaggaaaagaaagtaggataaaaagttataagcacaagataattgcaactatatatttatttaaattccaaaaaagactagaaggaaatacacttagatgttttattgtttcacaatagcacgagaattagtggcttttctctctgtggcttaagcatagtataattgatcatgaaacagtaaaaaacctaaaccacatttaactggccaaaagaggactagaaaagaagagtagagtgcaaccactcctgaataaatgtgatcaagagaaaagaacaagaaggtttttgaagaaagataaattatgactgtcacctgggtatttctagacagatttctgaccctcatctccaaattctgagtaccctagttcaggggtccccagtccccgggccacagactggtttccgtggcctgttagaagccaggctgcacagcaggaggtcagcgtcaggcaagcaagtgaagcttcatctgtgtttacagccgctgcccacagctcacatcaccacctgagctctgcctcctgtcacataagcagtggcattagcttctcatagaagcgtaaaccctattgtgaactgcacatgtgagggatcaaagttgtgcactccttatgagaatctaatgcctgatgatctgtcactgtctcccatcaaccccagatgggaccatctagttgcaggaaaacaagctcagggctcccactgattctatattatggtgagttgtataattacttcattatataatacaaggtaataataatgaaaataaagtgcagaataaatgttatgtgcttgaatcatcctgaaaccatcccntcctctggtccatggaaaaaccgtctcccatgattctggtccctggtgccaacaaggctggagaactgctgtagtttacaggccctgcccactgaagccttcctcatggagtttcccatctctgttatgcacactgccatccgctgtgtcaggcaagctcaagtctgaagtcatgattttctcttctccatcctatggctcccacctgcaggcagccctcacatcctctcagccctcactacaattcctattccatctcaccttcccccctgcttctatttccaatgccatcccccaacccaagaccctccctctctcctggatgctaaccccatgccgtcctataatttcctatcatgtgcaaggaacacccaagcatttttattaagcaggctaagatgctcaaactccacgattaaaatgctcagtggaagaaggagcaactataattttttaagaagtaatgattagcacagaaaatacgtttggtctcaaatattcccaccaaaatatacctccatggcaatcggggaaagggagagggtggtaaatgtcaacccatgagaaaggaagggtctggaggcacaaatcaaaggggacctaagtaggcaggaagtatcactgaaaaccttcaaaatcttgcattatacaacagcattaatttggccatttaaaatgtaaaaatgggccaggcgcagtgactcacgcctgtaatcccagctactcaggaggctgaagtaggagaatcgnttgaacccgggaggtggaggttgcagtgagctgagatcgtgccactgcactctagcctgggngacagaacnagacttngtct

SEQ ID NO: 206387 - DNA, 433 bp, Homo sapiens
ccgcccatcttgcttagcatccccaggaagatccctgtgtggccctttcacacctatgtctctaacgccatcttatccctaatccctggcaaccatagcccatcttccgtttctagaattttgtcatctcagaaatatcatatccagctgggcatggtggctcacacttgtaatcccagcactttgggagactgaggtgggcagatcacttgaggtcaggagttcgagaccagcctggccaacatggtgaaattccgtctgtactaaatatacaaaaattagtcgggcgtggtggcgcacgcctgtaatccagctactcaggaggctgaggcaggagaattgcttgaacccgggagacagaggttgcagtgagccaagatcgtgccactgtactccagcctgggtgacagagtgagtgagactctgtctccaa

SEQ ID NO: 206388 - DNA, 156 bp, Homo sapiens
acagtgaatttaattacctggtgaaaatacctgaagtgattaaaatcagagtatgctctccatatacctgggctctcctgaatgtctttacggtattactgttttgtaggatacttccctcagaagagtgaacagtacaagagcctttttcttggg

SEQ ID NO: 206389 - DNA, 494 bp, Homo sapiens
tcagttccttgtagattctgggtatcggccctttgtcaggtggatagattgcaataaaatacctagggattgctagaacaacattcttgctgttcctcttgtcaatggactgaaggcagatctggctgttcacacactatggctatagcacatgcttttttggagcgctggtcctctgttctttgagtggattcagattgcacattgaaaagcaattggattttcctgattcttcctcttagtttccatcctattcctttctttttcagcatttctataaatttgtgatttcatttttgtccattaacccacttattgtctgtattctgtcaggataccgtaagctccataaagacagagatcaccgagtatctatagcatggtatagtccacggcatattgtcaaaagtcaatacatttttgatgatgaaacatgtaaatcatttatttcatcaaaaatagctagggagtcattattctaatctaacaggccc

SEQ ID NO: 206390 - DNA, 736 bp, Homo sapiens
caggttccatccactttctgtcacccagcccctctcatctgggaaaatcccattcaatagatgggcctctcctcctcactcgactttccaatagtggacggtccttttaggagagatatcctagattcagcctctaagtccaagtgcaagcctataggaaagtggggcaaagacataaggtggaaaggaggacaggtggaaaaactgcttaatacctgccctctgccacgtcacacgcccaccccaccagcaattcatgttctgagtacacagaacatcccactgcttttgctgggaccgtccccagagcaaccctctcctgaccctgctttagaaataccaaacccccagcactaagcttcagagaagcagagggggaggagctcaactctgtagaaagcccctggcttccatccctccagggcctgcatcccacatcaaaaaccctgcctgaccctgaccccagtgctgaccttgccttagcaagaaatgagaagataacacgtttccttccagtcactgaagccacaaccattgcctctcctacacgtctgcctgtcagcccacaccacaggcggccccatcttgcggcagcttctgttaaatgggcatccccggggccatctcgcctacggcagtcttgcagggtggcaattgccaggtgtcctgggcagagccctgggaggacaaaaatcaaagtccctcatggctcagtttaactccacattgactggac

SEQ ID NO: 206391 - DNA, 498 bp, Homo sapiens
gagctattcgcaagattcccttaaagagtgtgctgtgttctgagacttccccagaccacatcaatgtggtttatccacccactaaagatttgttgtagttattgaactgctttttatttgcttcagttatcttaatgaatcattgtgtcttctctacataaccagttttccctaggagagttataattcctacggggatgctgctttgctagccaggcatggtttttgagaactgggagttgccagaatctgctgtcctaatccatgaggctgaaattggatttttcatctccctgggagaaagattacattttaaaatcaactataggtgtgtctccccaacattagaagtagactattttccaccctggaaacgctggggattcttatccaaaggctaaaagatcattaatagtacggcatttgattccatttgaagtcagagcaacatcctctttagcactgtggttaaatttcagactcacctttatcttggtg

SEQ ID NO: 206392 - DNA, 781 bp, Homo sapiens
attttaaagggacaaatacttcattttaacaaggtatatgtaaggcctctcctaattctcattctaaccaatagggatagaaattttagcccctgcagcaggtaagtttcctgtatatggcagttactgaaagtaattcatttcatcagagggtattaaaaacccaaaactaattttgtgtttgttttttatttggcaaagaaatgcaataaaaccatgaagtaggaagttattactggtatctcttaaatgacataattttgagcccagactttaaatgatatctaacctttgtgttttacagtgttatgggttgaactgtgttcccctaagataggttggagtcctaacccccagtacctcagaatgtgacctcatttggagataagatctttacagaggtaatccaattaaaatgaggtcattagggtgggccctaattcagtatggctagtgtccatattttttgaaaagttgggagagatttgaacacagacgcacacccagggagaacaccatgggtagatgaaggcaaagattggggtgatgcttctacaaatcaagaaatattgaagattaccaacaaactaccagaagcaagaagaaaggcatagaccaaattctccctcacacttagaaggaaccaagtctcctgacactttgatcttggacttaacagcctccagaactgtgaaacaattaactttcacttaagccacccagtttgtggtactttgttatgccagcctagaaaattaatatgtgagagaatccacctttc

SEQ ID NO: 206393 - DNA, 587 bp, Homo sapiens
acattcctgagccaaaatgcacacataagctgctttccctggtagcaaagctcttcactcctgagtgactcttatcaggggcagttgggcattctcaattggattacgctgacaaggaaaaaggcctgcggtatgttatttcaacaccatttggcttcagaaatgcctgtctcgacctttttgccctcagagtctacttctctcttcttgctttctagagggtcaccagcctgctcccatgcatgttctttaccctgcaaatattggcccatgttcctggagacagaatgccatcattcacaagatggatcatgtataacagactaataaatcatagcatgataaaaaaagaaattagttcatttacccctctaacatttctgtatccagagacagacgacaaaagctttttggttttaggcttttctgtctgtatctgtacattccattttaggagaaagtgttaggtctcatatgctacttttctgactatgctgtacaccccaggaatatatttcttgcaaaagtcaagattgatagtgatctacaaaaatgtctgatgtatggtaagctccgtaggaagaagc

SEQ ID NO: 206394 - DNA, 289 bp, Homo sapiens
ccccacggctcctcattcacaaacctcaccttgtcgctcctgcctcaagccctccagggattcctcgtcctacagagtcaagtccccgttcccatggctgacctttacgttctcatccctggcctttctctgccaagcaatctcacagttacggttgcagcacgttcacacctctgagctttagctattcccactgcctggaattttgtggtttttttgtttttgtttttgtttttgagacagagttttgttctgtcacccaggctggagtgcagtggagcaatctcag

SEQ ID NO: 206395 - DNA, 1114 bp, Homo sapiens
gaaatgagttggaatgtctcagaatctatttagacttcccactcatatttgaggtgaatagaaaataatcgatggcaagtactgagagagatgcactctcacactgagtgcattttatactcaaaatgtatcagatttatggatctgagaattcacagccttagtcatgactgacaaatacaaagaaataaagtgatgtatgaagtggtttagactttcttctaagtatttgtagataatttgttttacacattaaaattttctgaatcagttagcatactattacacaactgtcccctaaaaatcaataaaaatactattgcataaaagctatcagattaagattggatataaatgtaataaaattgtgctattataagtaaaatttagaagttagataaaggaatgaaaacatataattagtaaagcttactttacaaatgaggactacgaggtaagagacagttaaaggactaccccaggtcacacagatagtggtggggttagaggttgaactcaaggcttctaatgtcacagcttatttttatctataaatcataaacaaaaaatagaaaattttcattctaataaagcaaaaaaaggattttggcttatattcttactttctaaaactgtgtctggaagaatcactttaaaggccatgtaaggaatattcaactctttgcagtgtttagtccaacaagagtcttccacataattgtattccaccacaaatgagaaattactccaggggaaatctgctccaatatattgattatgtacaactacacaggaacttgtactaaagacaaaagagagccaagaaaatggcattatacttgtgttattattttgttgaactattaaaagatgactgttttctggctgttccatccttctctaatctatgcctcatcttagaaaggcactggtgcgttttctgttgatttgctcttcaatagtgttaatttctttatatttttcttcttaatgatcatacatttttataccaggatataaaaacctgtaacctatttcatatcctcaaatgggagacagcctgattttattacctgagtactatcaataagaggaatcagcatgaaaaatcagt

SEQ ID NO: 206396 - DNA, 1169 bp, Homo sapiens
cctgttccaagctatagacagacaggacaacaatttgatttcctgtactcttggtctggaacccatggggttctgagataaaagctgaggtcttagagcactggcaaatcaaattgttgtcctgctctgtctatagcttgcgaacagggacgctttgattactgactccggattccaacacactgcctaagcactcaaaacaaccatcctccaccatcttgcaaacgacgactgtacagcgtgctacttcatagcggcatgcgctggcctcaaccacaatcacagcccaacactgcgacactcaacggtgcgcagcgcgcgcgcacgggacatgacaactgcgcaacacgcggccgctgcattcccctctcccctagacttaccgactaattctactacggctaccttactcttcatgaagtaaccctctacacacgcctagcccacgcaacactgacccacacatcccgtactgcctcctatgccccatacctctctatactcctagcccacctggcagttgcacacgcggcaactacatctcctacacaaactcaacacttgcagccacacgcttgctacctaaacggcctacctgcctcaactcccacaaagcactctggcacccatcttcccgacatcatcatccaaaaaatcacattgcatagcaacatgggcgcactccacgtcgaagcagacaaccttgctgcattgataatttaatagctctcaaaagaatgaagcgattgcccgtgtgccctcataccccgtgaccccaacaactgccattgccccattcgtgcatcacggcagcgccccccttaaaacattccaatctacccacactaatgcgttccacaacaactactggcgtaatccccccccctgaatctggtgtgcgaccaacctcctacacccagcaacatgcaacttcacacttccttaaacgcgccctaagcatacctgatatctctcgaccccctctcgtccacacttctcccttggcgaccacctcgagtgaccctcggcaatacgcgttaagacaaccaatactacccaccattgattcccagtgtgcactcgacatgttagcataacaccctatgattgatgtagactcaccgagcacaagagtgtcactacacaacgttaatattgagttcgcccgc

SEQ ID NO: 206397 - DNA, 312 bp, Homo sapiens
tgccggtacccgggggacgaaaggctaacatgaaactagtctttgatatgctttactacctaatacactgccttcacagtagtgagtaaatatttactgatttgattaggtaccttttcaacaataaaacttacatataagcttgttttaagtaatttcctaaacaatctattcctggtttatatggatagtctatgacccacaggacttcaaaatattatatgggtgccagtttttaataatgagactgtcaatgaggacactgtcagataaaatgcctggagaggaaattttagaactctaaattgagag

SEQ ID NO: 206398 - DNA, 170 bp, Homo sapiens
caggttttcaaataagtaggtttaaaaaggcattttattaatcactggtctaatcattataataacctaaacagctagcatgtattcctatgctctttgtatatttattcttgaaattcacagtgcttacagcccggtagattatactctttacttggcttctggttttt

SEQ ID NO: 206399 - DNA, 508 bp, Homo sapiens
attccctaagatggggtgggctaccagctttccctttccagcgtctgtcccatctccctccccggagtttgcactgctggtggcttcagccaccgccccaggcagatgtttgcccagtctgcgtcctggacaataactctggccctgcttcaggcatatgcgtgcctggcaagcctgctgctgccacactgtggcctcacactcaaaataggccgcaaacagagcatgtcacaggcagccccaggccagtgccctttcagacatctctgttaatgctacttagccctagacattaaaatcatttttggatctagtggacaaggaggagaggagtgaatcagtcaccaagctacattcgttctcctttcagaatctctcccattcatccgtcttccttttcccctcccacttgagacagagtggattgaagctttcagggctgaggaaacacagtggttttctcattgctccctttacagttaggctcctctgccctccagtattgtgc

SEQ ID NO: 206400 - DNA, 332 bp, Homo sapiens
agatgctcggaaggacatggatagttcggggcatgaccacaccaccccttccaatccctggggcaccaaggctttgttaccaggccacagctgaaaaaaaatcagaagacctggtaatgatgggccagcattcctgcatgaccacaatcagctggagctggggaagaggatgctgttgccagtttaccaccgaataacacgtatgcttcttatatgacctgcctggccagtgttggcatctgaattttcaaccccagatgaggaatttctctttggaagcttttacaataaagatttaattcatctgatgaaatgagtttaagatgaaaaca

SEQ ID NO: 206401 - DNA, 740 bp, Homo sapiens
ggcattagggaaggggtatgtaatttcccctttctacaccctaggcctttcctctatatttaaatatattggctttctctcttatgaattcagtctgaaattatttttcactgcctttattacatccctgcttttgatggcaaaatagcttcctgtgttttgaaaacatctgctttccaggtttcacacgagaaaattgattttacttttctcttaagtccagaaaggtagaaagttggacttgtttccaagtgcaacttttccttttcttgtctttcctgaagttatcccctttcagttctgattcactttctcccttttatttcttctaatcacccctcctctcttcctctctccttctaaagaaccagagaagaccgattgcgtcttatttcagaacacaaaattaacatatattttttgtctagtctatggtatgtgttaaagttttctccatattttcttcattcgtcctctgatttggggggaggtaattttccttcagttaaaaaatctcagatttgcaatttaaagtggtctctattcgaagtctctgctctttcacttaaacctttactctaagctgtccccctccactaatgcccccattctttggagatgctcttttcctagttaatttaaacattgctgcgtttgcttagagagagagagagagagagagagagagagagagagaaaggggaaaataataagaaagaaaagagaagggggggaagaag

SEQ ID NO: 206402 - DNA, 681 bp, Homo sapiens
tcttggggctgagctaaaccatccaactttctttcccactcttctctggcccttgtgagcttcagggcttggggtaggcatgggactggcctaggcacacggatcccagggcatcaggagaaaggctggggcttggggtcttgtcttccccagttggcctactgttaggcattaaagcaatttgcccagcaaaaacagaaataagtactgatttatttcctcatttgtgatgccaaattgtaaagattaaggtaattgttctgttaaggtatgaaaataaatgacttataagagacagaggcagataggatattggcaaccttcacaccctagtttgaaaggtactggcctttcttggctgtgctgaggcatgaataaatactatagcaatagtaaccacacctttgttgtattttatttcttcaattaccatctgttgttgcagcttttagctaaagcagagcttcccgaacttccaacttgaatcatagcactgcgtcttggtgaattgattctagaggtggaagttagtgccttaaatttgatgcagtcacatatgccttttgggtgacttcactttgaatcctcaaaggatgacttagagaatgccaaataaacaccctggcaactggtaatgaccttctgggagattctgacagattaaggtttcacaacaaacac

SEQ ID NO: 206403 - DNA, 545 bp, Homo sapiens
caatcttaataaataaaacatttaaaataaaatatatttcacatttataataagagcatttagaaaagagaagatattgagggaaaaaaagaagtgaaaagatggcccagagtggccaagaaggaaagaaaatggtgcccaacgttcacctgaactgcctgtgaatttaggttgtagaactgagttgtttaggctacccaggatccaggttattatggccattgaagtgctatttgcttcctaactgttgttcaagctcacaaactattttattttaaatttgtaaatacttagggcctttcctagtgacaaggagaagtgcccttgacttagtggtggtgaccagaaaaatcttttgagcctttgatcatcttataacaggatcaaagctgccttcaaaccaagcggtctgctttgtattgcaccatcaaaattcaggaactgagacatttgacccttaacatgttatcgcctgcttgatttcacaaccttcactttatcttcacccttcctaaaatgtaccgtggccaaggggaaaaaaaaaa

SEQ ID NO: 206404 - DNA, 388 bp, Homo sapiens
atacagtaactcaggtctctgagtgtctaggacagaatcctacccctgctccatattagctgcttttccttaggtgatttatgtcactaccagaagcgttggttcccttgcttataaatgaggatacaggtccacaatcccttatctagaacagaggtcagacatgttttgaaattcaaagttttttgataatttagagaatggtgttaagttgtatataccatatatatcctaataagcaagatctgaaaccatatcccataataagcagtaatagttaaatgaattgtcaaagtgagaataagataataaataacttcatgttagctcaggtctggttttgccaccaaatgaagtatgaaaatgattctaattttctgagctctct

SEQ ID NO: 206405 - DNA, 421 bp, Homo sapiens
tatgctgcctttgagggacagtgtcccagaggagatacctgtgctcaggaacaggattgtacaaggagtggagaggaggtggatccaggcaggagtggagggaacaaggttaccaccttgttgtgaaagttcatggaataggctgggtgcagtgtctcatgcctgtaatcccagcattttgggaggccacggcagatggaacacctgaggtcaggagttcgagaccagcctggccaactggtgaaacctcatctctactaaaaatacaaaaattagctgggtgtggtggcgtgtgcctgtagtcccagctactccagaggctgaagcaggagaatcgcttgaacccgggaggaggaggttgcagtgagccaagatcgcgccactgcactccagcctgggtgacagagccagactcattgaa

SEQ ID NO: 206406 - DNA, 367 bp, Homo sapiens
caccaggagacttgaccatgaagtccctcctgcctcagctgagctaatttaacagggatacaaagagccgcagaacgattggtttgctgttggtttttttctttttctctccctccctgaaatggaatgcctttcagaatgttttggagtggggtgcattttagatatctctagtccttggcctagccctgacagtgaggtcttggctaagatacttaatgagttctgaatgcccctgtcctcacccttaagcagctgatttttcaaagttttgtttcgcttcatggtataaaaagcctagtcatgtgatctttgtaatgtttcttggttattttaatttttaatggtaaaaaatgcctgacagaaa

SEQ ID NO: 206407 - DNA, 423 bp, Homo sapiens
ttctaattatataatataaaactacttataattctgatgccatgaatttggaattcatgattaagatgggttaggcttttgctaagcaagtgttttcttcatagatactgcaaaccatattttaaaaataagatggcaagaataatgctgaaaatatgtgaaaaacaaactatttccaaatccctgaaagaatctagaagccacaattagcatgaaaatatttgtggtgcttttaatggttattttatatctctgtctctggcttctctggagagtggtgctctcagctgccaggagaacaactaagaccacctggatattccagaccccataaatgcatatgctccagactggatttgatttttgtactcctgctaattgttcctgctgttttcccattttcccatcttcactgccatctac

SEQ ID NO: 206408 - DNA, 508 bp, Homo sapiens
tagctaattatctggtttcttcattttctaactaggaaattgaatttcagaggagtggagggccttgcccaaggtttcatattcagtcagtgctttttccataaaggaccagagtgcctcagttaacatatcccagaagaacttgaaactgaactaaactaaaagattacatgacacagtcactcttaaaaatgtggatgagggaaagagtggtctgatgaactattctgccaagctagtataaagctaaagtgtgcctgtggctcaactttctgactttgcagatgtcaagatgccctgctagattggtgcattagggttacccagagcctcagagtaggctgcggcagggactgctcgggggtgcaagatgggcgacaggtgtgcctccagaggtgttgaatcccggcccacaggtggcagcagccttctattgtgtctgccctcacaggcagtagattctagaaacaagtgttctgtttgttctggagtgcttttatatttggtg

SEQ ID NO: 206409 - DNA, 182 bp, Homo sapiens
ggattcaccctattggccaggctgggtctcggactcctggcctcaagtgatctgctcaccttggcctcccagcatgctgggattacaggcgtgagccaccacgcccagcccagaatgatcttttgaaagcacgtttgattttgttgactcctcgcttctagaagcacatcttcagaataaag

SEQ ID NO: 206410 - DNA, 302 bp, Homo sapiens
aaaaaaaaaaaaaaagggtactacaaagaggatgaaaaggaagacaaattggaggagatgtttgcaatatatatatatattcaactcatatctagaatgtataaagagctctataaatcaatgtgagaaagacagacaacttaattgaaaaagggggaaaacttgagtaggcacttctcaaaagatggtgttcaaatacccaatgaacatacaaaatatcgaacttcattagtcaccaagtaacttaaaataaatcaacaatgagataaaaggatacatccatcaagaatggctaaaataaa

SEQ ID NO: 206411 - DNA, 672 bp, Homo sapiens
gttaaagatgtaccatatgccatgatctaggtacctacagccatttctctgttctttctccatatccttgtctctcattcttccacaatccttccctgcctataagcaattacagtgaaaaatgctggagtagaatgacataagatcttttaaggtcaagggccaggtgatttcagatactatgacttttcagaaagcccaaataagttatttccttacttacatcgctgttgatatatgcaaattatgatgcatgcaggaagaaaaaaaaattttcttaatttccacactctagcaagctaaatggtttgaaatatacttgacaatgttctgcaatattgaaagtagtatctatttctgatgtttcaattcctgtatgtcaaacattatcaaagagggcaatatcgcccccaaggggataaaacttcattattggaaggtggaaagttcttatctttttaatgtacaatattaagcacagacatacatacagtaattacagatacagcatatctgcggtattataatttcatagtgggggattagggaaaaaatatctaaaaaggctccttggaagcagggtggaggggataaccaaaaaagcttaagaaacactattgtacattgtgctttccatttattaaaaatcttattctccccaggttcaggcta

SEQ ID NO: 206412 - DNA, 243 bp, Homo sapiens
ctgttaagacaggatagtgaaagtaaagaaggaaggaaaagggagaaattaaggatcctgtggaaatgaaaaagaaacaagacaacccaaacccttcttctttcgtctcccagtgccagctgtaaaaagtacatagaagagggcaaaggtgacagaaaaaaagactctcagattaggaaccagttcgttcattaaataaataggaatagaataaagtagcccacatctacccaaaacgactct

SEQ ID NO: 206413 - DNA, 814 bp, Homo sapiens
agcgtggaacatgtcttatctaaactcttaaaacgtgtttgttgctgtcaaatatgacttgagttcctgatcgggttatcattgcctaaagacacaggactattttttttattaagataactttgtttttatcttaataaaagagatgatagtcatttcctgacagttttgtctgacggaatgccttctgtataatagtttaaaataattatttttagtgtttggaaaacagcatttaaaagtttgaacagcagaagtctgttttaagaagcttctgttaacccttgaaaagaatcttcctgtgggatattaaaattttggattgaacttgtgcaaacagtactggatttggaaggtctggattctcatcctggctgttccactaagcagctgtctgtccttggacatatcacctaccctctctgaatctgttcagttgtgtgtaaggtggaatacctacccgaaggtttttctgtaaggtacattaaataatacatgtacaattctttttgaattgtaaagggctttatgaacatcaattataatcatttcgcttattaggttctgcagaaagtattctctcaaaagttatactttcatcaagaatgaaaaagactttgtaatggaactctaaaaaactgaaacacgtatcatatgacattattcctttcctatatgtatttcatgcatggaattaaaacagaatgtagccttttcagccatgaaggatgctgagtgtttagatttgcaaaccatttttgttcatatatttatatgaatctctacatatttttaagatttttttttcatatct

SEQ ID NO: 206414 - DNA, 501 bp, Homo sapiens
aacatctatccccctcctctcctcacctcacttctgctttccctggctcgtgtgaggccatatgttggctgtttcagtgctaagcacagggcatggagttcttccataatgttcctgactggctagccaggctgcggggcagggtcttcatagcgctgtcccagcaggcatggagtcactctgaggccaacagctggggcagtaactccctgattcctggattgcagctaaggtgacaccttcctgatgctgataccccaccttcccaatggtgtcctaggcagccgctctcctggcaggcccaggctaagtggccatgcttttgaggcaccattcctagaggcccagcccagagtcccctcctcatgctagcccaaggacttcgtaagcacccgactccctgcactgcatttgtttctgcttaaaatagcctgagtggtctctgctgttaggcactgactgacccctgactgatacagtgtagaaggacaattacagccc

SEQ ID NO: 206415 - DNA, 285 bp, Homo sapiens
aagtctaatctataggatcccctgatcttccgtcccaacatcacatttaggtttttgggtttttactttgcgtattttttagacggagtgtcgctctgtcacccatgctgggattacaggtgtgagccaccgcacctggccagacctgctaaatgtttaacctctcctctgcctcctcctgacatcttcaaaaaatgttgctgcatgctgtcttatgtacatggtaggtgtgttggagggagttggtgaagaattcaggaagcatcaaggaagggctgaatttca

SEQ ID NO: 206416 - DNA, 594 bp, Homo sapiens
ttgtgggtcacatatggttggcagtctgctgacttatgacctcttccatagcgtctctgtcacagaatctttcagattacatgttattacatgttattgtttctgtgtattcttcccactgggctaagagctcctaagggctaggttatgtcttatttttcaaaaatcagagacacagtagatgctcaaaagaaaaaaaataacaaaaacctatccttttgcacattttctttttcttaaagtatgaccctctatttaccctccagaacaatcttttcgtatcttagtcttctcagctatacaacgtttatttgtaaagttctagtcgtcagaagtcacagtgcttaagcagatattccagtctgggacagaacctccaatttaggattcagcaaataatagcattgagataggcactctgagggccacaaaatgaaaagaatgacatgaccccttaaacacttgataatcaaatgggctgtattttagaaacaattacataacaatacaatttagtacaagatcaatacaatataatacaatacagtttagtatgcaaatgggaattcaggaagggcgtgttcttatagtgtg

SEQ ID NO: 206417 - DNA, 529 bp, Homo sapiens
aaatgatgccacagagatctcttaaacagatttttactactttagaaggtggtaactgatttctggagttgtattaagtacaaaagagtaacttattgtcatttttttccctattgatgcgtatatttgagttagagggaagcagtcgtctttgtgttatatgcttatcatgtatatttcatcttagcaaatttattaattttagtgacagttttattgagatgaaatttatataccaggagatttcatctctaagtgtacaattcagtgatattttaatatattcaccaagttatgcaactaccagtactttgtaatcttaggttactttcatcatccttcttctggacgccctctatcacccagccctaggcaaccactaatacactttctgtttgtataggtttgcctattctgggcattttataaaaacagaatcataaaatatttgtccttttgtgtctggcttctttaatttagcatgatatttaaagcttcactcatgttgtagcatgtatcagtggccatt

SEQ ID NO: 206418 - DNA, 602 bp, Homo sapiens
cacaccccccttcacctcccagcaagcctgccagccggctacctcaattttcagtctgaatgattgattgcttcaacgggctacaacacaacagaattaagataacacacgctgtaactttaaggactgcaacatgaccctcgccccattccagcagaaggccactgccaggacgtggtctttattttgtgagtcgagcccagactgaaagctctgagcttcaactgccctgtgttacatgccccctccaactggcatcacagcaggcctgagaatctggaaggcagaagggagagtgcggcagagaagggagagggtatctcacagaaatgcacttttacgcagtgggcctcccagaagctccccccagcaccatccttcctgctgccagtcagtgaatcccagcttcatgctctgtgctagttccacggaatgaccacggctattatttagttaatattttcctttaaactgacccatttagaaaacaaacccagttcttcataaagaaaccttatgtctctaccatacatggaaaactagtatcatttgtcattttcaatcaaaataaataaattgaatctctgtaaagacaaaaggtg

SEQ ID NO: 206419 - DNA, 334 bp, Homo sapiens
cacaccccccttcacctcccagcaagcctgccagccggctacctcaattttcagtctgaatgattgattgcttcaacgggctacaacacaacagaattaagataacacacgctgtaactttaaggactgcaacatgaccctcgccccattccagcagaaggccactgccaggacgtggtctttattttgtgagtcgagcccagactgaaagctctgagcttcaactgccctgtgttacatgccccctccaactggcatcacagcaggtgaaatgggaactacaggtgaaatgggaactgcaggtgaaatgggaactgcaggtgaaatgggaact

SEQ ID NO: 206420 - DNA, 407 bp, Homo sapiens
caattttattatgatactgctggttgtagagtggaaacaaaggtcaaccaaagagaccaatggaggtttttttatgaccttgctactcaaagtgtgatccctgaaccatgggcagcacctggagcttgttagaaatgcagggtctcaggctcctctccagatccacttaatcaaaatctgcattttgaaaagatccccaggtgattcaaatgcacattagttttttggaagaattgttccaatatttttgtgcttatttcctaggagaatcaaacttggcaacctgatcaaatggcaaaatgaagttgctctatctttattaatttcagtggagtaattttaaccttttattagtaaactaaacctaggtccatggtataaatcataaactctaacatatgccttca

SEQ ID NO: 206421 - DNA, 100 bp, Homo sapiens
tataaaataaatattccacgaaatgttggtaaaaagagaaagatgaaatattactgtattttagtagatattttagaactgctgcaagattttgttaggg

SEQ ID NO: 206422 - DNA, 141 bp, Homo sapiens
tcacaggcctggaggcctaggaagaaaagatggttttgtgggccgggcctagggcctgcctactctgtgcagcctaggaacttagtactctgccttccagccactccagctatggtgagcaggggccaaggtacagctcag

SEQ ID NO: 206423 - DNA, 602 bp, Homo sapiens
cttattttagaagtcttccctcgctgtggtatatgttctaggttgttttaagaactctgtaatttgaattttgtccagaagctttaaagagctttgatttcctcctggttatatacttttccagtcattggatgatgtgacaatgaagggacagtggatacaaattacagagttggatgtaatttttcagatgcactcaaggcatactaatttttttctacttcaaagtcatattggtcatcaggttcttctaatacaattttcccactatctttagtctactctcctgggccatatcttttgtttcttccagagacacttgcttcttctggctcatattccttagcatgcttgtggaaccaatagaaagtattcttgatgccagacatcacctttgcccctccatgctgtggttcacacacccatctctgcttggccttctgggtgctcagagatgtgtaggcatttctctttttacccttgaagatcctctggaggtgccctttgttagtgtcagctgaagaatcatgaagtacataaatttggaaagaagagctttatttctcacaaagggttgcagcttgcagggtggccattctgac

SEQ ID NO: 206424 - DNA, 348 bp, Homo sapiens
tgtagaaatctatcctcaaggaaataacttctcagtgttccatctgctattctactactcctcaatgattattcaggcccactaccttctctacacatcaatctggaggatttgcccccacccaggactggcaaattagctttactcaacatgccccgagtcacaaaaactaaaatacctcttattctaagtagacactttcactagttaggtagaggcctttcctacagggtctgagaaggccaccgcaatcctttcttcccttctgtcagtataccaatgatggcgcgatgtaacacgagaaagcacataccaaggccaccacacaccacctgtccaaaaaggcct

SEQ ID NO: 206425 - DNA, 1041 bp, Homo sapiens
tgtagaaatctatcctcaaggaaataacttctcagtgttccatctgctattctactactcctcaatgattattcaggcccactaccttctctacacatcaatctggaggatttgcccccacccaggactggcaaattagctttactcaacatgccccgagtcacaaaaactaaaatacctcttattctaagtagacactttcactagttaggtagaggcctttcctacagggtctgagaaggccaccgcaatcctttcttcccttctgtcagacataattcctcagtttagccttcccacctctacacagtctgataacagaccagtctttattaatcaaatcagccaagcattttctcaggctcttagtattcagtgacagactaatggtctattaaaaacacacctcaccaagctcagccaccaacttaaaaaggactggacaatacttttaccactttcccttctcagaattcagcctgtccttggaatgctgcaggctacagcccatttaagctcctgtatagatgctcctttttattaggccccagtctcattccagacaccagaccaacttagactgtgcccccaaataacttgtcatccgtactatcttctatctagtcatactcctattcactgttctcaactactcatacatgccctgctcttgtttacactgccggtttacactgtttctccaagccatcacagctgatatctcctcctgctatccccaaactgccactcttaactcttgaagtaaataaataatctttgctggcaggactatgctgaacctccttaggcactctctaattagatgtcctaggtcctcccaattcttagtctttttatacctgtttttctccttctcttattccatttagtttttcaattcatacaaaaccgtatccaggccatcacccatcactctatatgacaaatgtttcttctaacaacccacaatatcaacccttaccacaagacctcccttcagcttaatctctcccactctaggttcccacgctgcccctaatc

SEQ ID NO: 206426 - DNA, 435 bp, Homo sapiens
ttgtatataatttttgattctcccaaaatttaactgctaatagccttatggcttactgttgatcagaagccttatcaacaacatagcttcctaacacatattttatatgtttatatgtcttatatattgtgttcttaaaataaactaggaaaaagtgttactaagaaaatcataagagaaaatatatttactgtttattaaatggaagtggattatcatagaggtccttattctcatggtctttttgttaagtggagggggaagtgttattgtctgtgggatgacagaggcagaagaaaatgcacgtgtaagtagacccgtgcagttcaagcttgtgttgttaaaggtcaactgtaaataggaaataaggaaaattaaaaatctataaaattgatatttgtacatatatttgttttaaaataaaatttaaaatat

SEQ ID NO: 206427 - DNA, 372 bp, Homo sapiens
aatataaaaaggatcatactgagaggtcttatattcattccagctccatccctcctgactgtgggatcagctgtgctgcctgtttctccatctttaaaatgaggatattcatgcttgttttatctgatcttacagcagtcttatgaaattcaggttaggtatcaaatatgacataagtttgaaatctatggcatgttccagatagcacttggcggcagctacctagaaaggtatgtatggaaggatgatgaggtctcaatatctgtgtcagtatgttgtgatagattagtcatgtctgccttgggctcagaagaggcaaatgggagtatgtatgttgtgcattttctaaacatagtgctatgaaaatgtaag

SEQ ID NO: 206428 - DNA, 453 bp, Homo sapiens
taaactttgtttttcactccggctaaaaacaagatcataagtgatactagatgcaatccctgtccctgtactttgtctgaacaattccctgggaaggaactagagccgcggtatagcctgtggtgccaatattcaccactagatgatgctcctgccttggtaagtcatctgctgactaccttagagcagaataggcagaaacagcaaactgggccgatcctgtgccacagagtgaaatactgtcagccctctgtctccatgggttctgcattcgtggattcaaccaaatgggaatggaaaatgtttggaaaaaacaggatggttttgtctgtgttgaacatgtaccgaccttttttttcttgtcattattccctaaacaatacagtaccacaaatatttacatagtatttacatcatgttagggattataagcaatctagagataatttaaag

SEQ ID NO: 206429 - DNA, 408 bp, Homo sapiens
ggttggaattctctagataatgtctggccactcccaagaatgactgtttgtcttatatacaggttcgagcacaacagcagggatcctacaatagcagagagctgccattccgttctggccatggacccctccccaacatgcagggcagaaggtggggatctgaaaacaggaaatgacaggggctgggtgtgggagtgggggcttcaatgctgcaggaacacaagcaacaaacatctcaagctgtgcaatgctagaaggcagctggaaccaaaacgttgactggaggatgatgcagctttgttgtattttaaaatgttcatccttccattttttttcctttagttcttctgagcacgctggatgcaaaataaaaataaaaataaacatgtagccagaacgacccaccga

SEQ ID NO: 206430 - DNA, 343 bp, Homo sapiens
ttaataaattacatgagctattcaacactttattataaaacacgctttatattgggtgatttttgcctaactataggctaatataggtgttctgagcacatttaaggtaggctaggctaagtaatgatgtaaattatagtgaatcaacgtgaatgtacttaacactactgaactatacactcagtggttaagatagtaaattttggccaggctcagtggctcatttccataatcccaacactttggaaggccaaggccagaggattgcttgagcccagcaatgctaaatgaaatgttgaatacatttcaacttacggtattttcaacttaggatgagtttgtg

SEQ ID NO: 206431 - DNA, 185 bp, Homo sapiens
ttagcaacccagggttgccatcatttctcttaaattatcaacacaaccagtagctggcatgctgctatgatagtcaacccctccaagaaagctgtgattcaaaaatcagttgatgagattactgcttaacagaaatatttgaggcaagcggttaggatggttagtaaggttttaataagcggaaa

SEQ ID NO: 206432 - DNA, 357 bp, Homo sapiens
ccaaaatgctaggattacaggcatgagccaccatgcctatgctaggattacaggcatgagccaccatgcctatgctaggattacaggcgtgagccaccatgcctagccccatctcatggctttaagactaaagtgttgaagcagaaaaggagcgagggtagaccaaagaaggaattatttagatataaatattttattagcctagaattaattttagaatatggtaagatacgtgcccaactttcccctcccacctggttagtcaactttttcaacactattgctgaataatctatgttttccattgtgatttgaaatcttgtttgaatcattactaaattcttgaatacttgagta

SEQ ID NO: 206433 - DNA, 231 bp, Homo sapiens
tggcaaaagctgcgtttgttcagcgatcagcctcccgggaaaagctcgtgttttgtgactagccgggtgtcttcgggctccgtgaggggttgacagataaccatgctgccttctggaggtcggcgcttccccagccttgaggcgtatgttccaagggaagtaagcctgcaaatgagccttctaccatgtgatacctatttttctttttaaaaaatcgtttcatgaaaatcc

SEQ ID NO: 206434 - DNA, 656 bp, Homo sapiens
ttttatcataacaatatgaggagtaattcatcatataatgtcttccaatccatgaagacaggatatctttccatttatttatgtcttctttaatttcactcagcaatgttttgtagttttcattgctagcgtatggaaattcaattaatttttgtgtgctgattttgtatactacagctttgctcaattcacttattagctataatcattttttttgtgtaacctttagggttttgtacatatataccatcatgtcatctgtaaaaagagacaatcttacttctccctttccaatctaagttaacttttatttctttttcttgcttaattactggctaaaacttctgctactatatttaataggagtggtgaaggtagccggacacggtggttcacgtctgtaatcccagcactttgggaggctgaggcgggcagatcacctgaggtcaggagttcaagaccagcctgaccaacatggagaaaccccgtctctattaaaaatacgaaattagctggacatggtggtgcatgcctgtaatcccagctactcaggaggctgaggcaggagaattgcttgaacctgggaggcggaggttgcagtgagccgagattgcaacatggcactccagcctggcaacaagagcgaaactccatcg

SEQ ID NO: 206435 - DNA, 218 bp, Homo sapiens
agtttgtagagatggtaagcaaacttaccaaggtcagcaaacttcttctgtaaaggactaactagtaacatttcaggctttgcaggccacatatggcccctattaaatattcttcttcttctttgtttttctttataatcttttaaaaatttaaaagccattattggccgagcacagtggctcatgcctgtaatcccagcactttgggaggccaagga

SEQ ID NO: 206436 - DNA, 674 bp, Homo sapiens
tctacctgcactgtatggaatttgttatagcctatgttgtagggtagctgaaatcacctcaccatcctctgggtttccagagcacctccattcttatagcccatgtgagtcgtatggtggggtgtggttctatgtcctttctcgccctctgtctgggactgccgagagagcaggtctcatgtcatttatttgtagagtctcagggcctattgcaggatctgacagagtcaatgactgctacctttgcggaatgaatgaataaaatcattaatggctgaatgtggctggcttttccacgtcttcccacagctggggtacttaatattggctgaggccatcctagaccagccagcctccagttgttctgccgatagatacaaaacagagttgagattagccaagcctgtccggatcagcagaaccagctggttgacccacaggacaataatacacagttgtttcaagccactgccttgggggtggtttattacacagcaatagcttactgatacattggagaaggagagagggaactcttcacagagaaggggatgcctcagcagggtcaggaagaatgaatggtagtttgctagatgattgagcagagaaagcagcatttacagcagcaagatggcaagaagcagcattgcatcaacaggaccataacaatccta

SEQ ID NO: 206437 - DNA, 390 bp, Homo sapiens
ccctcatccactgaattgagagctagccaatgccaaacacataaatgaggccatcctagaccagccagcctccagttgttctgccgatagatacaaaacagagttgagattagccaagcctgtccggatcagcagaaccagctggttgacccacaggacaataatacacagttgtttcaagccactgccttgggggtggtttattacacagcaatagcttactgatacattggagaaggagagagggaactcttcacagagaaggggatgcctcagcagggtcaggaagaatgaatggtagtttgctagatgattgagcagagaaagcagcatttacagcagcaagatggcaagaagcagcattgcatcaacaggaccataacaatccta

SEQ ID NO: 206438 - DNA, 380 bp, Homo sapiens
agtttttcatttgtctttctttaatggtgacaaataagtgaagctgcctgggaatagtgcctagtggtgtggttgagaagagatggtgaggggccaggtgcggtggctcaggcctgtaatctcagcactttgagaggccagagccagtggatcacttgaggtctggagttcaagaccagcctgggcaacatagtgagaccccatctctacaaaaaaattaaaaaataaaattagccaggcatcatagcaagcctctgtagtaccagctacacaggtggctgaggcaggaggattgcgtgagccagggagttcaaggctgcagtaagctatgatcataccactgtactccagcctgagtgacagagtgagacattgtctct

SEQ ID NO: 206439 - DNA, 350 bp, Homo sapiens
ctgtgagccattcatacttcagactgttcctctttgtgttttacgctgtctgtctctgtagtaacactgtagacatgttcacagatattgcagctgggcccctcacagcatggggcaggaggtgggccccctggtgggtggggctagaaggtggccttggagtgtccgaagatgcagatggggaagatgcttcagtgagagagagtccacagggtagagatcagcacctaggacagagcctcgagaacttcctctaggatagggaagggctggagaacaggaggaggagccaaggagaggaggaaggggccaagagggcaggatcaggactgaggcaggccgacttctgc

SEQ ID NO: 206440 - DNA, 385 bp, Homo sapiens
aatttcaagaagtgagtagttaacatcaaatgcttcggagaggtccaaaaagattttgaaaatcatagttggatttgatcataggggcatgtttggtaatcttgcagaaccatgtgctgcacaacacgttgcacagtggaacaacagatgactgacagtgactcccaatccagagctctttccagtataccacattgtcaaaactttgtcttaaactcttccctctctactctctcccaactacctgaagtccattggcagattattatatctttttgtttaaatacaatagagaattattgaatgtaacttcagagctttatgttcagtacttttttggatctaaatttgtaggttctacagtatccattacctgaaaaaaaaa

SEQ ID NO: 206441 - DNA, 345 bp, Homo sapiens
tgggatgtcagagtctccttggaagagtcctaattaaggactcagaatgattgacaggtggtggaagctcaagaaagcacacttgatatgcagcagaagacagtctgtgagttgcaaaaaacctggcaattggagaccttgaaaaacttttgtgtaattggtattgatgttatccatatggtggacaaatgtgatgtctgcagaatgtcaagacaatcaaagtctctgcagactctactgtgagagagaaccctcagataagacataatgaatgcatactgctttcctttccatgaaaaatgtgaacctcttttgatcttccttactgataaaggttgagaagta

SEQ ID NO: 206442 - DNA, 1621 bp, Homo sapiens
ctcccccagcacccagagaatctctctgcaccacgtattccagctggaggtggcgtcagcaattctggactgctttttctatcttttcagtgcctcattcagtgatgtcaagttaaaaccagaaacgatgggtgttcaccagatttttggttcttatgaagggacatggatggagctggaaacacttatgctcagcaaactaatgcaggaacagaaaaccaagaaccacatattctcacttataagtgggagctaaacaatgagaaaacatggacacatgtgggggaacaaaacataccggggcctgttgcagaagcaggcagggtgagggagagcatcgggaagaacagctaatggatgctgggcttaatacctaggtgatgggttgatctgtgcagcacatcaccgtggcacatgtttacctatgtcacaaacctgcacatcctgcacctgtacccctgaacttaaaagttgaagaagaaaaaataaatttgcatatagtaatttttaggatacactgttagggtcaatacatttcatacggttttaacgtatggctcatcttaccctacaaggaatattggaaaattgtctgggggcaaaagagcctgacctttgtgctgtcatgttgacaagtcttgtgaggaaagcggccctggaaaggcacgtgcctctgtgcaaattactttccagcagaggtaattcccatagaggctaatagttaaaggctttgtgccaagcctcactccacacagctagaggaaaaaagtgcctcattatttaggaaaatctgggtgaatcatcaaggcattcaccacagttttcacatttgcttatggttgttttgccctcagtgttttcatgttcatgtattggcctcaggattcctgcaccagatgaatgatataaaattgaatccatatgcccatttggtgcataccttgaacattgctttaacttttacacagaatatgtttttgtttgtttgcttgtttctagaagttccaggaaaagaaacaaatttcatgtagcttctttacaccaaggagaaaaatctttcccatttttttcaattgaagggtcagcttgttcagggtcccagatttgtgctatttcaaagataaatccctgatttaccttgatgaaagccagatatcttatctccacataggtattagcccctatcacctaagtctataccatattcagtagaatttcccttgatcgcttagagatttttttttctgtcatctgaggatttgcctttctttccagcagatatatttttaagcattttgatcacatagaagaaacatttgtaaatattttagcatgcagtgttgtccacattgactctgtccacagttttttgaaacaaaattctccaaaatgtttccaattctctatagcatggtaaaatgttacattaacttttcttccttctttttgtcaataaagccatgctgacaatttaactatgtgcctggagctagaatataaaatttataacatcaggtctttatcttaggtttttaatcaattttggatccttttgtagagaagctcgatattctcaactaaatatcgtaatagtatatttgaatctaatcgtgtaaactat

SEQ ID NO: 206443 - DNA, 748 bp, Homo sapiens
tagcctattatacacatagactcaatgatacagcttatcgctcttaggctacaaacctggacagcatgttaccgtactgaagactgtaggcagttgtaacacaatggtaagtatatgtgtatctaaatatatctaaacatagaagaggtaatgcattgcactataacattaccttatgacagccacgacatctctaggtgacaggaattttttagctctattataagtttctgggatcaccattctatatgtgatccatcattgactgaaatgtcattatgcagcaaatttgtatataactatttccattgcgtctgcctaaaaatcttagtagtgtgggcagaacttgattagggattgtttaaggcatatatggtcaagcatatgaatttcagatatttatgtttatggaagactcctttgtaaaaaaaaactgaagaagaatcagaggtgatacattttagttcctgtttattttgaaagccaaaagtctgcacaaattgcagaccaaagtatcacaaactactaacaaggcagtggtttctaataaatgttgctatctttgtcctgagcaaccttgcaaaactgtacattcccactcataaaaaatggagaactttttccctatagtctagggcagagtgataagtttttctcataattccacatagcttatagttaaactcagtgtagaagagtgatgaacacaaaacaatacatactgtattcaagaaatcagaacaggtgc

SEQ ID NO: 206444 - DNA, 231 bp, Homo sapiens
tagtgcgatgagcttttttctttttgtttcactcttatagtgccaagaaagattttctgaagtggcaacaattagcgtgagccctgactctaggatcctcgtttactgtccatggtgcaatgtactgatacccaaatcttgtatgcaatcaaacacaaggcagacagatgccagcgaggtgccaggggatggggagccagcctgctctgcaaccctcccacaccctcatct

SEQ ID NO: 206445 - DNA, 197 bp, Homo sapiens
gactaagacaggcattatgtaattaattctgtttctctcagaagactaataaatgctactgactgttgagtcaagacttggaaattcttgtctccaaaattttatcataatttcagattggacttcaaatggttttatcctatgaataatgggcacatactatgtccctaaatacatgagcctgactttattgctta

SEQ ID NO: 206446 - DNA, 845 bp, Homo sapiens
ggccttgacatcactggctcccaagtcccatcctgttttttcattgacctgcttgtgccaggtactgcgttaggaagtggagctaccagatgaataaggcgtggtcccgccctccatgtgggagacggcacgtcagtgtacttaggatgctgcatgtggtgacagatgagggccctgcaagggagcacaccacagggccgggagggtgggatgggcgggaggagtagccaactttgcccgaaagcatcaggacaagcttccaggaaatggcacatccaagctgagtcttggacagcgggttaaagaggcagagaggggagagaggaatgttccacatgggaaaagaggtctggaggtgacaacaagtaacatagagtatgtgggctgtgccggaagcttgatattacagaggcacgaagtctgaggcagggagtgtgaaggaagatgaaggtaggggaaggaagtttacacaagggtggccttgacttttatattaaggcactttagggaagcaggaaccactgaagacaggagaacatggtgactacacgggcgcattgaaggggggaggagctaggtttttgaagggaatttgagcttgcaatttttcaagggcattcaatggttataaatgaaacttttcattaatatatttgtgtccaagtgtttttagatgtgcttttctgctactctctttttatttggtttggagatagatggtgactttccttcagtgccttctatgtgtcttgacatgttaatgtctcaaacacatggtccgtatcatcatggagcttgcaatctaacagggtagtttaacacataaatatgcatccagttggaaa

SEQ ID NO: 206447 - DNA, 294 bp, Homo sapiens
gagttctggggcctcaggctgaggtctctgaagcttggtttgcatttcaacagcgattcctcctgctccaaactgtctcccttagggatcgttaccagcttggtcgctgctgtgttgccagtgtcacctttctggagccaggtggctctcttaagggcagcgtttggtcagctgggaaaaggaaactcggaagcaggctttgccctggtttcttcatgtctcttcctcctcctgacttgggacccgaggggaagagctgcagagctcatgtgttgctttgcattgacgccaggc

SEQ ID NO: 206448 - DNA, 329 bp, Homo sapiens
cagggttaactccaaatattttcactaaggtattgtttttttgggcaaaaatgcatagtgaacattgtggagctgaagtgagggaacttcgatttctgagaaaccactagttttaagggttttgaaggaagagttggaggaggagaggaagagaataaattcacagttaatgagtttccagtattttctgtcgcattttacgttgtaatggaaaagactgggaactgaactcacatgcagtttgtcaaatcactttttccctagcattcaggattgatgagattaacggggtgttaaaggtaaactgaggcacataattaacatggaca

SEQ ID NO: 206449 - DNA, 437 bp, Homo sapiens
ttcactctagaggaccccaaccagtaataagactcattgagttgaaaatcaaaaactactgggctttggattgttctggtttgatctgtaaagaatcccgatgcaatgattcaagagtcacctcatatcatgatttgtttcacctgtctcctatgactgcacactcaggccatctgcaatttttccaaagcaaataattagagtgtaattttaatcagtttaatatttatagtaatctttatacttttgcacaatttgggccaggtatctattaaggagatctttggtcctctgattgagattagtgaagatacacaaatacgtgactctcacatctggctctccataactaagtacaacacgattatagttttgaatcactggagaactgccatgagatgacactagaccaccttgaggctgtttgtgactgtata

SEQ ID NO: 206450 - DNA, 403 bp, Homo sapiens
ggcatggtggtgcatgcctgtaatcccagctactcgggaggctaaggcaggagaattgcttgagcccaggaggcagaggttgcagtgagccgagatcgtgccattgcactccaacctgggcgacagagcgagaagactctgtccccccacaaaaaaaagaatgctagctgtcctgggcctggcactacagactagcactttgctccttgctgttttcatctagaataggggccagtaaactacagttcctgggctactcacttggcctaccgccttgttttgtaaataaacttttattggagcagtgccaccaagctcatttatgtgctatctatggctgccttcataccataacagcgaagctgagtaattgcaacaaccaccctatggtccacaaagccta

SEQ ID NO: 206451 - DNA, 352 bp, Homo sapiens
gacagggcaggagtcaggcaaaggtcagcttgcccagattgttctggtccaaggatctggaccgcaagctttgagatgacaatgtagcaacatgcttctgtgtggggaggggtgggagagaagcctggtcttgagccctttttgcctgaggtgttctcagcagatggaggctgcctgctcacccctgctgcttctgcctctttctggtgacaggcgggatgaatgggtggcagagcacgcagatgtgggcagatgtgctcaggccctacattctgtgcaaataaagttctcagcaaagggtttagtgttgcctcttgccacccttctcctatgggcatcagggcacgtatgg

SEQ ID NO: 206452 - DNA, 612 bp, Homo sapiens
atcatcgaaaccgcaaacatatcatacacaaacgcctgagccctatctattactctcatcgctacctccctgacaagcgcctatagcactcgaataattcttctcaccctaacagggatctctctgtggggatgatgtggcagacaggcttggagaccttggggaagtgggcgaggctcagatacagccacagagacagacactgaggatgagagtggggaaagaggcctgggagcccacatggagatgcagaaggagaagaaagtgacgcagtcacacacacagaagagggccggtggtcagccccatgggacgtgcagctcatgagccaatggtacccaaatgtcctgcccagccaatgaaggagacaacgctgacctgcatgaaccctggctctccctggcttccagaggttgagagatcccttccccaacatgcactcaaactagcatccacctttaacgagaaatcaaaagaacaagaaacgtcatgccaatctcctgtggggtgaccatctgatgagttttgtccgctcaggctgcccagtgcagggcaccgtcgaagatggggtggactcagggtgggaagcaccccgcaccttcctgctccact

SEQ ID NO: 206453 - DNA, 598 bp, Homo sapiens
atcatcgaaaccgcaaacatatcatacacaaacgcctgagccctatctattactctcatcgctacctccctgacaagcgcctatagcactcgaataattcttctcaccctaacagggatctctctgtggggatgatgtggcagacaggcttggagaccttggggaagtgggcgaggctcagatacagccacagagacagacactgaggatgagagtggggaaagaggcctgggagcccacatggagatgcagaaggagaagaaagtgacgcagtcacacacacagaagagggccggtggtcagccccatgggacgtgcagctcatgagccaatggtacccaaatgtcctgcccagccaatgaaggagacaacgctgacctgcatgaaccctggctctccctggcttccagaggttgagagatcccttccccaacatgcactcaaactagcatccacctttaacgagaaatcaaaagaacaagaaacgtcatgccaatctcctgtggggtgtcttttaggatggcaagggacttcctgtaacaatgcatctcatatttggaatgactattaaaaaaacaacaatccagtgtggagagag

SEQ ID NO: 206454 - DNA, 1340 bp, Homo sapiens
  misc_feature (22)..(22): n is a, c, g, or t
  misc_feature (36)..(36): n is a, c, g, or t
  misc_feature (49)..(49): n is a, c, g, or t
  misc_feature (68)..(68): n is a, c, g, or t
  misc_feature (73)..(73): n is a, c, g, or t
  misc_feature (77)..(77): n is a, c, g, or t
  misc_feature (108)..(108): n is a, c, g, or t
  misc_feature (123)..(123): n is a, c, g, or t
  misc_feature (133)..(133): n is a, c, g, or t
  misc_feature (143)..(143): n is a, c, g, or t
  misc_feature (148)..(148): n is a, c, g, or t
  misc_feature (164)..(164): n is a, c, g, or t
  misc_feature (169)..(169): n is a, c, g, or t
  misc_feature (179)..(179): n is a, c, g, or t
  misc_feature (188)..(188): n is a, c, g, or t
  misc_feature (265)..(266): n is a, c, g, or t
  misc_feature (281)..(282): n is a, c, g, or t
  misc_feature (293)..(293): n is a, c, g, or t
  misc_feature (296)..(296): n is a, c, g, or t
  misc_feature (299)..(299): n is a, c, g, or t
  misc_feature (310)..(310): n is a, c, g, or t
  misc_feature (312)..(312): n is a, c, g, or t
  misc_feature (317)..(317): n is a, c, g, or t
  misc_feature (333)..(334): n is a, c, g, or t
  misc_feature (338)..(338): n is a, c, g, or t
  misc_feature (347)..(347): n is a, c, g, or t
  misc_feature (354)..(354): n is a, c, g, or t
  misc_feature (359)..(359): n is a, c, g, or t
  misc_feature (363)..(363): n is a, c, g, or t
  misc_feature (372)..(372): n is a, c, g, or t
  misc_feature (378)..(380): n is a, c, g, or t
  misc_feature (1082)..(1083): n is a, c, g, or t
cgccggctggtccggtccggtnttcccgggatgtgnctcagcctgccgngccgcagtttccgtggtgngagtnagtncgggcccgtgtcccctctcccgccgccgccntgggctgcacgttgngcgccgaagncaaggcggcngtggngcgaagagatgatcgnccgcnacttacgggnggacggggnaaaagcggccaaagaagtgaagctgctgctactcggtgctggagaatctggtaaaagcaccattgtgaaacagatgnnaatcattcatgaggnnggctattcagnggntgnatgtaaacaananaaagnagttgtctacagcaannctanacagtccancattgcnatcanaagngccatgggncggctnnngattgactttggggaagctgccagggcagatgatgcccggcaattatttgttttagctggcagtgctgaagaaggagtcatgactccagaactagcaggagtgattaaacggttatggcgagatggtggggtacaagcttgcttcagcagatccagggaatatcagctcaatgattctgcttcatattatctaaatgatctggatagaatatcccagtctaactacattccaactcagcaagatgttcttcggacgagagtgaagaccacaggcattgtagaaacacatttcaccttcaaagacctatacttcaagatgtttgatgtaggtggccaaagatcagaacgaaaaaagtggattcactgttttgagggagtgacagcaattatcttctgtgtggccctcagtgattatgaccttgttctggctgaggacgaggagatgaaccgaatgcatgaaagcatgaaactgtttgacagcatttgtaataacaaatggtttacagaaacttcaatcattctcttccttaacaagaaagacctttttgaggaaaaaataaagaggagtccgttaactatctgttatccagaatacacaggtaccaatacatatgaagaggcagctgcctatattcaatgccagtttgaagatctgaacagaagaaaagataccaaggagatctatactcacttcacctgtgnnacagacacgaagcatgcggccagaatgcgaaaaagactgcctggtacaagaacgaacagtccacttaacaaaacgaacgttacaaaagggaaccggtggcgactccacacttgcagcagcacgggacggctagggaagagcgaccacaagaagagcacagagacgaagacccaaacgcacgaccgcgtgggccgcaggagggcacaaacaagaccgaacgcaggaccaggaaacgcggaagcaggccgcaacaacgc

SEQ ID NO: 206455 - DNA, 357 bp, Homo sapiens
tggccagtatttgtcacgttacttatgactctctcagtagctgtgatgggatgctgttctgtacgagtaagtctctttttcaggcattgataccagagggccatgtggcttcctatagcactaggaataaaactcaagtgtgtccgcaaggtcgcctgtcacctggtgattggccacctctcagctcctccccctctcttctgtctggcctgctgtccagccttctggccccttccttcttggtgctcagagattttccattttgaattccacctctctggaacatcttcctccctgggtaacccatggggcttcctctctgtgcattcgggtccctgcttgatgttgccttatcag

SEQ ID NO: 206456 - DNA, 201 bp, Homo sapiens
taaatttttatcatcacaacatcccccggttctagctcatggcctaacaaagcagatacttaataactttccacttaatgactaaacacaaaatgtccagagactttaaattaacgacatcttacacacacacgttttaaatatataatgaagaaaaattataagcaggaaaccaagagaccacattatgtaaaaaaatag

SEQ ID NO: 206457 - DNA, 167 bp, Homo sapiens
cagcccgcctgcacccaggtgaaataaacagccatgttgctcacacaaagcctgtttggtggtctcttcccacggacgcgcatgaaaaattcctttctattttgcattataattatttatacacaaattttatttgccttaccagtgtataagctacttcaaggcag

SEQ ID NO: 206458 - DNA, 476 bp, Homo sapiens
ctagctcctaggggtggcgggtagctgcacgcagtaagtaaaccttgggaagagagactactctggatgcattgacttgcatatttcagttacatgtgttattggacattactcaattgtagtcaacgaccactgtattcttaggaaaatcccatggaacagtgctatatacgccagtctcgtatgtccagtctcagcagagcctcagtatctggtatattccaccgttgtggggcaacctgcagaccctgaagacttctagttcaattttgttaactgagttttggttggtattccatactagagttgccatggagaaagaggctaaagtgatgtccaatgaagagaaaaaatttcagcaacatattcaggcccaacagaagaaagaactgaatagttttctcgagtcccagaaaagagagtataaacttcgaaaagagcagcttaaagaggtacttatgtcataaaactttcca

SEQ ID NO: 206459 - DNA, 777 bp, Homo sapiens
caggaggcacataatggaccagcagtagaagcacaggaagaagaagaggaacaagatcatggtgttggccggacaggaacagttaatagtgttggaagtaatcaatccattcccagcatgtccatcagtgccagcagccaaagcagtagtgttaacagtcttccagatgtctcagatgacaagagtgagctagacatgatggagggagaccacacagtgatgtctaacagttctgttatccatttaaaaccagaggaagaaaattacagagaagagggagatcctagaacaagagcatcagatccacaatctccaccccaagtatctcgtcacaaatcacactatcgtaatcgagaacactttgctactatacggacagcatcactggttacgaggcaaatgcaagaacatgagcaggactctgagcttagagaacaaatgtctggctataagcgaatgaggcgacaacatcaaaagcaactgatgactctggaaaacaagctaaaggctgagatggatgaacatcgcctcagattagacaaagatcttgaaactcagcgtaacaattttgctgcagaaatggagaaacttatcaagaaacaccaggctgctatggagaaagaggctaaagtgatgtccaatgaagagaaaaaatttcagcaacatattcaggcccaacagaagaaagaactgaatagttttctcgagtcccagaaaagagagtataaacttcgaaaagagcagcttaaagaggtacttatgtcataaaactttcca

SEQ ID NO: 206460 - DNA, 265 bp, Homo sapiens
tttttgaaatgtgaaaaattggtgaggttagattaagttcatttggtagaatctgaaggcacagactacaaggacagtattttccattggtttccattgtaaaattagaggcatcaggaaaaatagactctttaggcattttgaactttctgataaaagtggaaagaaaagagcataattttctggccaggaaccataagcaccacaatttcttctcaaaatctctgctacttgataacaattaaaaggattgttaaagttcctt

SEQ ID NO: 206461 - DNA, 329 bp, Homo sapiens
agacatgttaataacccctctgaaacccaacctgccatgtgttcagacctctgagcttagtcagaaacctcttcctcttgggacccaagagagggctgcggggagccgataatgcagtgtcagctttctgtggagccgccactccggagcccaccctggcaggtgtctgctgagcttgtgctttcttttgggtctctggggttctccagtgtgattttttccccctgaagatgggctgagccacaggtgggtgccttaaacagcctcagaaatggatcccacctgagctaggacctgggctgcaccctcagtgccgaggataccccaag

SEQ ID NO: 206462 - DNA, 361 bp, Homo sapiens
ggtttctggcattggttctctcatctgattaggtttaacgatgctaataactctgtttccattaataaagagggcactgatagatagtccgtggtgtactctgtcaatagagatatataaatattaccattggatactcctaatcaaccacttataagaagcaaagattttggtgactgtgtatatgatgcttttgaacatgattggcaaagtaacaaatgtaaagagattggcttctattgtcatcgaacaaagaatgagctcagggtttgaattcccaggtcaaatgctgcatacatgatctcaaagctgctatgtctgccctcgaggagacctttatctcctatagccttaggactaa

SEQ ID NO: 206463 - DNA, 1922 bp, Homo sapiens
  misc_feature (672)..(672): n is a, c, g, or t
  misc_feature (1417)..(1417): n is a, c, g, or t
  misc_feature (1535)..(1535): n is a, c, g, or t
ttatagcctgaagagggtaagttattggtcctcgcccccatgccccacagtgaggatgctcagctccccccagccccacccaccccttcctgtccagtttgctcaggaccggacaactatatgtagatgacagaagagatacttatttggagcttgggtgagataagcatgcaggtgcctcaaagaagcaacctctacacacccagtactgggttttggtttccatttggtgtggaatgagtgtttctgaactgtgggtgagaggcagaaaggggagtggtttctatactgctgtccaagcaggctcactctgtttccagggtagaggaatgtgcctccaataatacgatttttctagggccatggggtttgaggttggtggaaatgtttgcctgtcccggcaaccatcattcccaatttggaggcatgaatctcagtctctctggggctcctctctcctttttgaaattttcccccatggtctctgtctctatatcctcccttgcccccacaaccactggatcttgcttgttccacctgaaacttggtgattgtcagctgtgcccctgaccacactgccactaagtccttctcaatctatatcctgagctctgattcctcttctgtctggctgattttcatgccgccttgcctacttgatatgtgctctgnccctgtttgaagacagggaaaattttacatgaaccttgatctatgttctgttttttttttttttttttttgactgagtctcgccctgccgcccaggctagagtgcagtggcacgacctctgctcgctgcaaggtctgcctactgggttgacgccattctcctgcctcggcctctggagtagctgggactacaggtgcccaccaccatgcccagctaattttttctattttttaggagagacggggtttcaccgtgttagtcaggatggtctcgatctcctgaccttgtgatcctcccgcctcagcctctcaaagtgctgggattacaggtgtgagccaccgcacccagcctatgttctgaaatagttgtatatgggctgggtcacagggaaagtgaaactcagagctaatttaaggctggacacagagtcagcaacacacaagacatcatcttgaaggaaggatggctttggtaagtccccagaaacggttttaaagctttgatttgaggaacaaccaccctattagtgatgattatgtgtattcttgttggtctacagctctggcatggagggcacatgggcacatgctgagttctgggggtctggctctctcagacactgtgggaaggaaccacggtgctgggttatgaccctggaggctccccagcctcagctgccgcatggggtctggttctactgtggccaaagtttgcgtttatgcttttccaagccctcctctggccnaactaccagtggctctgctaagcctcctgaaggcaggaatggtgggctcagggagagcagcccttggtttaccccacaggccgcctcctctgtcacatcatcctcagtgggagggatnagctggggagggagggtccagggaaagggctccagctgtgtgggtggcaatgggggctgtcagaaagggctctgtctccctcgcctccaggcagggccagtccctctactttccctccttccctccaattccttcttagtttccttcttcctttagacccaatagcagccacatttcccaagtgctcaggggtccagacaccatgctaaacacttcttttatttaatccacaccaggtagttaataagcaatcctatgaagtaggcataattactgccaacttcatggataggaggaatgatatactggtaagtatagagagggggctgcccaaaagtcagagagggaattcgaacttaggaggctctgactctaaagcttcgactt

SEQ ID NO: 206464 - DNA, 1818 bp, Homo sapiens
  misc_feature (672)..(672): n is a, c, g, or t
ttatagcctgaagagggtaagttattggtcctcgcccccatgccccacagtgaggatgctcagctccccccagccccacccaccccttcctgtccagtttgctcaggaccggacaactatatgtagatgacagaagagatacttatttggagcttgggtgagataagcatgcaggtgcctcaaagaagcaacctctacacacccagtactgggttttggtttccatttggtgtggaatgagtgtttctgaactgtgggtgagaggcagaaaggggagtggtttctatactgctgtccaagcaggctcactctgtttccagggtagaggaatgtgcctccaataatacgatttttctagggccatggggtttgaggttggtggaaatgtttgcctgtcccggcaaccatcattcccaatttggaggcatgaatctcagtctctctggggctcctctctcctttttgaaattttcccccatggtctctgtctctatatcctcccttgcccccacaaccactggatcttgcttgttccacctgaaacttggtgattgtcagctgtgcccctgaccacactgccactaagtccttctcaatctatatcctgagctctgattcctcttctgtctggctgattttcatgccgccttgcctacttgatatgtgctctgnccctgtttgaagacagggaaaattttacatgaaccttgatctatgttctgttttttttttttttttttttgactgagtctcgccctgccgcccaggctagagtgcagtggcacgacctctgctcgctgcaaggtctgcctactgggttgacgccattctcctgcctcggcctctggagtagctgggactacaggtgcccaccaccatgcccagctaattttttctattttttaggagagacggggtttcaccgtgttagtcaggatggtctcgatctcctgaccttgtgatcctcccgcctcagcctctcaaagtgctgggattacaggtgtgagccaccgcacccagcctatgttctgaaatagttgtatatgggctgggtcacagggaaagtgaaactcagagctaatttaaggctggacacagagtcagcaacacacaagacatcatcttgaaggaaggatggctttggccagaccaagaccgagacttggagacctgattgagatttctcgctttggctatgcacactgggccatctacgtgggagatggctatgtggtccatctggctccggcaagtgaaattgctggagctggtgcggccagtgtcctgtctgccctgaccaacaaagccatagtgaagaaggaactgctgtctgtggtggctgggggagacaactacagggtcaataacaagcacgatgacagatacacaccactgccttccaacaaaatcgtcaagcgggcagaggagttggtggggcaggagttgccttattcgctgaccagtgacaactgcgagcacttcgtgaaccatctgcgctatggcgtctcccgcagtgaccaggtcactggtgcagtcacgacagtaggtgtggcagcaggcctgctggctgccgcaagccttgtggggatcctgctggccagaagcaagcgggaaaggcaataaatccaagaaattgtcccaacaaccaccaattcttacggaggaatattatttagccagcaggagtggagtttggtttactgattttactgttttgtgttcatgaatctttattttaatggagttaaaagcacaggaaaatgtatttggaaatgcagcttagtatgaattctattaaagacacaattgggctctgct

SEQ ID NO: 206465 - DNA, 350 bp, Homo sapiens
gggagctgcgttcgccccctctcgatcatacaccgaccacaactaataatctggtcactggtgcagtcacgacagtaggtgtggcagcaggcctgctggctgccgcaagccttgtggggatcctgctggccagaagcaagcgggaaaggcaataaatccaagaaattgtcccaacaaccaccaattcttacggaggaatattatttagccagcaggagtggagtttggtttactgattttactgttttgtgttcatgaatctttattttaatggagttaaaagcacaggaaaatgtatttggaaatgcagcttagtatgaattctattaaagacacaattgggctctgct

SEQ ID NO: 206466 - DNA, 346 bp, Homo sapiens
ccatcaacacttcttcgtgatagtgtgtatttgaataaaatatttcggccatagcgtgtagtcacgtattgtaggtgtggcagcaggcctgctggctgccgcaagccttgtggggatcctgctggccagaagcaagcgggaaaggcaataaatccaagaaattgtcccaacaaccaccaattcttacggaggaatattatttagccagcaggagtggagtttggtttactgattttactgttttgtgttcatgaatctttattttaatggagttaaaagcacaggaaaatgtatttggaaatgcagcttagtatgaattctattaaagacacaattgggctctgct

SEQ ID NO: 206467 - DNA, 472 bp, Homo sapiens
tgaaccactgagcccgacctattatgcttttaatacccacaggtgcatctggttttcctcctttgactctgtgtatatcacgcctatggcttcattcttccattcattctgtgcccaccagacatctccactcctctttcctgggtggcctgacctcttggcatcccctctcccagccaatatttgttccctctgtgattcaaatgaagaggactgggccagatgagtctttcctgagctgtagtttcctggtgtatgtatcgtggtcccgccctgatgctgagtgtgctctcccttctcttctgctgcaggtcactggtgcagtcacgacagtaggtgtggcagcaggcctgctggctgccgcaagccttgtggggatcctgctggccagaagcaagcgggaaaggcaataaatccaagaaattgtcccaacaaccaccaattcttacggaggaatattatttagccagca

SEQ ID NO: 206468 - DNA, 580 bp, Homo sapiens
  misc_feature (16)..(16): n is a, c, g, or t
tagaggatcccgacgngctcacggaacttcaaatcagaggagtttagggttagtaattatagcaacctgtttcttcttttaatccatgtaaatgtcaggtagggtccctagtttgaaaacaatttctacatcaaaatagtgtgatctttgtccaaagaaggcttcatgagagaagttaatctgttaaattgaccacagggatggtgtggagaatcattagaatcatttgggaattccttttgcagttttagatgtacctttttcatcacacattttcatggggaagttgtattttagaaatggcccaaagtcattgtcaagtaataacactgtttagtcaaagaaacagggtggaactagatagtacatgattgttgatcttaagtgccttttaaactagttttacagacagttccaagagaggtgttccaggtactccttaaacaaaggtggcattgttgaactttgtgtggcaacattcatgcctatgtcctgatgtttctgtttacgtttttgaatgttccatgactttttaatcatgtgtcacgaaaagttccgttgaagccgtccataccttctg

SEQ ID NO: 206469 - DNA, 302 bp, Homo sapiens
gttaacgactttgaatactgtgctgggcactgaagatagaggtgaatataaagaaaaggcagatggatttaatgtctaaagtagaagattaggaggaaagcaattaagcagttacctgatttaaaatgttaccctacagtgttcatggaattgtttaaaagctatatcttagatacaaacatgtttgtctcttaatgtgtgggttaagtatttgattagatgagtatgtcctaattgagtaatccaggaggaaaggtcctaaatccctgaaagtaatagcatgtactattttgttaaaatgt

SEQ ID NO: 206470 - DNA, 550 bp, Homo sapiens
atttagaccactttctatgctatactctgtagcaaatcactgtacaattccttgttttgtctatttcacatgtctcaaaatagtaaatacaaatcaatatttcttgagttcaaaaaaaattagtgaattctattgagccagttcaccagttaaggtatgtagcagacatctttccaaataataaatacagcctatctgaagtcatgctatagtatgccaattcaaatttcatggaatatgaaatttccagcataaatctcatctgatccagccccataagtggttccttaatcctttgccacaacctcaacatgtaattgtgaagcctatcattgaacactgccatgggtctgaattctaaaacagctggctgcattttggactatttgggatgtcttctttatattgatttcttgctctttttttttctttttatagccacaccgtcttcatcgcctgaattgatctcaaatatttaaagatggctttcatatcttccatgagttattttctcctgaaagcaaaaaatcccacttgaaatacaaaatag

SEQ ID NO: 206471 - DNA, 695 bp, Homo sapiens
tctctttaatctgtgctatgacttttctttgagtctaatgaatcttgtaattcttaatttgaggtaatgtttcccagtataattctagtaaacacatcttggcagtagtaagctttattttttgaaattattgaaagcacatatatgagatgtaattcactttacagtttcagcatgctactaagaattgataatgaatacagcaaatcagagttttcccaagtgtgttctgtggaacattaattctgtgagatgtttctagaaaagagatctgtgttaaaaaaaagtgcagtatacatcttttttatttttggtggttaggttctaaaataattgtggaaggtaaaaattatgtatatacaaaatagcccttgaaaattcctttgctgcccataaaatagcataaacatagtctgctacaatcatatttttctgcagcattgtttaagattgctttttctttagtgtgttaggtgacacaattcattagcatttaggggctgtatacaataagaaacctatttttacatatttttaaacaccagaatcacactctttgagtttactgcagcaacttttccaagtcaatcttgtttttctccaagtcagtcttgtttacttttaatttgcaaaagtttaaatgcatataattctcctcattgtctacctccccttgtataaccatgattaacata

SEQ ID NO: 206472 - DNA, 300 bp, Homo sapiens
cttctgcctgcttgagtggcagcgttttttccctgtgcaggcccccaggtgtgtgtgattggctgccccggggccccgtgacaggggatgctttttgagctctcaccggcatcttcctccttaaatccagattgggcggagacatgaattcagcattacctctcccatgtccacacgtgaagaagcactttccaggcgcacacacctaagtcgttggccgcgggttcttggagggcgtggcctgagctcccagacgcctcctctctcacctagcactgcacagtgccttccacacacagg

SEQ ID NO: 206473 - DNA, 387 bp, Homo sapiens
gtgacatcaaggagaagctatactatgtcaccctggactttgagcaggagatggccacagcggcctccagctcctccctggagaagagctatgagctgtccgatggccaggtcatcaccattggcaatgagctatcctgctgccctgaggcgctcttccagccttccttcctgagcatggaatcctgtgacatccacaaaactaccttcaactccatcatgaaatgtgacatggacatccgcaaagacctgtacaccaacacagtgttgtttggcggcaacaacatgtaccctggcattgcgaacagggtgcagaagatcgtcactctggtgtggatgggcagctccatcctggccttgctgtccaccttccagcagatgtgggtca

SEQ ID NO: 206474 - DNA, 505 bp, Homo sapiens
tgacagaaaaccaagggagagagcctagcactaagtgtccactgagtgacacaggatacacttatattgacagagtaccgtgggcagtggcagcaggaacacatgtagaaaatctcttgtttttctggccctgggaacaacaaaagtgaagctggtaatccatgaatgccgaagagtgtggagaactccagaaggacaggctgtgcttagtgactttgttctgaagaatatagcatgggaaggtgaaaaagtaactttattgtggaggcgtctacaaacactacctcagccagcatttgcaaagatggctgctccagctacagacattaggtctgcattccagccaacgagaaagaagatttgaagaaggcaatatgccatctctttaagaactgatcgagggagcaagatggccaaatataagcctccactgatcatccttcccacaggaatactaaatggaacaaatatccacattaaaaaaacacctttgatctgggcgtgg

SEQ ID NO: 206475 - DNA, 143 bp, Homo sapiens
cactgagaggactctagagcagttgaaccccgcttcccacctagggttggaatcatggcccaggcagatgctgtgggtcccaagctctgcaggaatgactgggggctgccattcataaagcagctgtcccattattggatgtt

SEQ ID NO: 206476 - DNA, 533 bp, Homo sapiens
tgatctgcagaagacattcctgtgtataacagagtcatcatattcttgggtttgatttgttcttttttaaaatatggaatttttgtttaattccaaatggttttctttattctttttgttgttgtacaatttaccctcaaccaaagaaagaataacgataatttggagagttaaacttatttcatagctttaaataggtgtgtgatttccacagtgactgacgtcttacctgtattttgagatatttggaaatctttacctgtttccccagtggtcatggacagccttgggcttgacttggtttagattctcagacactgtggtttggactgggctggggctgggcccagcctctcaaggctttgattaatccactgcacctctcattttcctgactataaaagagaagctacagttctgaataagcatcttgcagaagaaagaagccaaagcagaaagtattaaactttcatccagcaccataggagagatgtagttattaaatttcagctgcttatcaaactgatatgaaa

SEQ ID NO: 206477 - DNA, 451 bp, Homo sapiens
gatgacagaggcagagattgcagtgatgtaactgcaagatcaagaacaccaatgattgacagcagtcaccagaaattagcaagagtcaaggagtgattcttctctacaggtttcaaaggaaatgtggccctacagccaccttgattctggatctcacagcttctagaactattaagaatacatttctgttgttataagaaacacctagtttgtgtcactttgttacagcagccctagaaaactaacacagttattcttggcaaatgtcaagggatttgctcctggatatatcagctcagattcagtcttgagttcatttaaaatttatatatcttttctttattaagatgaaagtaatataccctcactaagaaaattatacagtaaagtataatgataaaaataaaaaatccataaattatataacccagaactaattgctcttctatca

SEQ ID NO: 206478 - DNA, 291 bp, Homo sapiens
ctccttctgtgttgcccaggctggtcacgaactttgggtgtcaagtgatcctcccaaagtcttgggattacagttacgagccactgtgcctggccagtagtgttttttgagacactaattataactagataatgtttttattttcaagatgcttatattatttagatctagaatctcactatattgttaaactttatctttaaattatttaccaaatcaaggtgattgggctagatttgaggaactctacaactgccttccaattatttttcgctggcagtatgatgctaa

SEQ ID NO: 206479 - DNA, 414 bp, Homo sapiens
tactacgtcagttagagccactaattggaccgttcatgccgtattcctattaaaccattccagcagggttggcatattttgttttaatggaagcactttaatgcttacaagcaagttgtggtcatttctgatcattttcttgtgcctaaacagaatttctacacctaaatatatggaattattgtacaaacccctcttgaatttcatcttagttgcaataaaacatttctgtaatttgccactctctatttttgttttgcaagtattttctaagttagaaactccatctgtcttgttatcatgccgtgtaatatattctagatattgcattgccctatatattagccactagccttgtgtggctatttaaatttaaattaattaaagttaaaaatgtagttcctctgtcatact

SEQ ID NO: 206480 - DNA, 662 bp, Homo sapiens
  misc_feature (661)..(661): n is a, c, g, or t
gaaatagaaatggttagaatttggcagtggagtttgcataatcccttgaattcaggaagggtagatcttaatgcacgtttgccttcttgtagacaaatctgaaaatccagatttttacaaaaccaaagtagtaattgttggctttaaaggtctgcttcctataagatggttttaccacccccccaaaaaaaaaaaaaaaaaaaaaaaaaaaaaaaaaaaaaaaaaaaaaaaaaaaaaaaaaaagaaaaaaaaaaaaaaaaaaaaaaaaaaaaagggggggggggccggaaaaaattgttcgcccgggggggagcagaagggccaaccggtttgtgttgagaaggggggccgcccaaggggggggtagattaaaggggagaggggggcggggggttaaaaaaaaacgggagtgaggagggggaaaaaaaggtgctatggacgaggatcacctactggaaaacaccccccactgctgcggggggggggaccagcagtgggcggaaaccaccccacccaagcaagatataatagcgccgccggaggaaaactaaaacagaagaggcgttgagggcgagggacaaccccacacactaatagcgtcacgtggcacatagaaaatctcgcgtagagagacattgatgaaaacataatacacacgggng

SEQ ID NO: 206481 - DNA, 349 bp, Homo sapiens
ccttcccactgaggcaggcagcaataattgatcacagacttctctagtcacactgcaaaaagtcagagctggccaagaaatgaaccattccagacataaccttgaatactcagacatctcctttcccttcttacctctccttcgttaatagactgcagtcccaagagccaaaccttcagcatctggatttgcctttgcttctgcccacttgtctgagacccaggaactaaaacttcctgtgatcctctctgctccccacgaaaccctctcctgctcctgtgcacattcagtccccctgagcccccttgataacccttccctgctcaccactgtgcagttgaagggacgt

SEQ ID NO: 206482 - DNA, 153 bp, Homo sapiens
ccagggctagtcacagatgagcatcctcaccaataaaactgggtttgttgttctgatgacgctagtatttaccagaacgctctgacacatccccaccgaacttgcgaatcgccgcgtttaacagcctgaaaatctggcctgctttttcccggg

SEQ ID NO: 206483 - DNA, 386 bp, Homo sapiens
agtgtctgaactttgcttggcctctgcactagtccttctgtgaggatgactctctctcactccctgggtgtccttcatttgtctaggtgtaccctactccagactagtcctaccagtcagaaagtagagatcagtcagcaccataagaagacagggcaaggcaaaaaaaggagattaaaaaatgcatccagggccgggcacggtagctcacacctataatcccagcactttgggattacaggcgtgagcccccgcgtccggccaatttttgtatttttagtagagacggggtttcaccatattggtcaggctggtctcgaactcctgacctcaagtgatccgctcacctcgcctcccaaagcgctgggattacaggcgtgagccac

SEQ ID NO: 206484 - DNA, 535 bp, Homo sapiens
agagggttagcaatggagagagctcatggaagaagataatggcaataactaactgaagtctgttaacagcctggagaaatgtgagattttttttgttaaggaggaagcagtgatgtgaaagccaaatattttagtattatattgggaagggatcttagaaatcacttatgaggtaggaaaactaagaagagggaaggaacaaaacacttctcatggtgatttgcccattaatttaatttcacaatgggagttcaattcaagtccattaacttctgaaccagttggctttctggcataccctgttatctcccacctccatttttttcttcccctttattgcatattgatattctttgtgtggatcaagtatacactgaatgggagaatagttctgatttttcttgtgagagatttttttcctatttagaatacaaaatgctttgttcatgtcatgcaaaatgaacaaaatcctttgttcatgtaatgcaagatgtccaaccttttataaagtaattctcaatgatcaaaattttga

SEQ ID NO: 206485 - DNA, 351 bp, Homo sapiens
tattttcaggtaggaaaggaaaatctaaagatttagttttcttaggacaaactgtgaactaccatcatagtccattgcttctttacacgtggaaaaccctgccagtgctcattgtgatatgcagtcatccccaggctgttttggaagctccagttcatggcccaacagtgatgggaggggctctgtggaaccattcagggattcctcagtgaaggtatccatgatatagctgggaagaggaccaaatggtgaggtggaagagtggctctttaccatctatctcacattccttgtcaaggtcaatgtattattttctagatgacatgtttggtatattattccctgagtaaa

SEQ ID NO: 206486 - DNA, 774 bp, Homo sapiens
aagacttgtttttctgattttacatagtaaatggctgctaagtattgagtaattcttaactaattctaaaaactaaaatgtgcatttcgacttgataaggtaaaactcttatctagaggctaaacccatgtattttcagaattgaatttttctccttgtagctttcagggaacaatttcattgacattgcttgcttcctgccttttaccttttaataaaaattgtgatgctactttattctaaagatttatattttataaccagatgaatttcctcaaaggtttccaaacctatatcatatagggtgaaaagcaggaaagtagacatttttcttggcgtgggaattctctacatagggcagtagatttcttaagccaatgaatttctgcttttcagcagtagtcatataatcagtatcataaagaataatgtgtaaataacagaaggcatatgagagtgtggtgttcctagatgagctgttacagattatagtaaaataaggaaatctaagtgctttaagtttatacagttaactcttaggataagagggatgtatgctgagatgtttgtgcatcccagatagcactgtacgataacctgtaaagtattactgaatactgaatagctgaaactgcaattggaaaatctgataatgacgaggaaatttttacgtttccagtttttaagtctaatttggtaattttggctggtttattttggcaggtacaaaagtcagtggattttttcaaaataatttaaggtaaaccattgggt

SEQ ID NO: 206487 - DNA, 264 bp, Homo sapiens
ttcttgactgctacttttggtccttattaattgactattccatgtggacccactccttaaatactgaagtctctcaattccagatgctaagcccccttatccttctttgttttcataggtacttccatgaacattcatgacttcatttaccagtttctttaattttatctacgtactcaacatctgcacttggatcttcgcatatcttgcaaacttagcatgcccataactaaactaaaaatttccctccaaaactgctctttc

SEQ ID NO: 206488 - DNA, 221 bp, Homo sapiens
  misc_feature (10)..(10): n is a, c, g, or t
  misc_feature (29)..(29): n is a, c, g, or t
  misc_feature (32)..(32): n is a, c, g, or t
  misc_feature (62)..(63): n is a, c, g, or t
  misc_feature (69)..(70): n is a, c, g, or t
ggatcccctncagccacgacctcaagttnttngcccgcctcaacctcccaaaatgttgggannacaggnntgagccaccatgccctgcccttccagccctaccggtgtcgacagtttctcacccttccaagtcaggctgtctcaacagcccttactacttaccttaacattttcgacaactctctatataactccctcattaaagttcttttatttgaaac

SEQ ID NO: 206489 - DNA, 284 bp, Homo sapiens
tcagtaagcttatagtgtgggaagaagctgcaaacagacatccaaagcaaaaatatttgtgttggtttatatactattttaattttttgaacagccattttcttaaaacaaaaagacttgtaaataaccatttctgaatagcagtcgtaaatgtttagcactgaaaaatctttgcttatataagaaacaatccttagaaagatacaatataattcaaaattaaatattaaatggaagaattggcaagaacatttggtttttttgttgttgttgtttttgagatg

SEQ ID NO: 206490 - DNA, 549 bp, Homo sapiens
cataagcaatgacctgtgttttcagctaagtagtttcttcagccagcttcctccctgtagaacctcttaggtcctaaggcctctcttcatttttactgtcttgttgtcttttaagccaagctagcaagcagtgctattgttactataattctcttagagtctcttgtgaattttacttgagttcttgtcattggaaaaaccacttgtcccaatctctttgagataagcacttcaccttgtgcttcctgtgaaggaagcacactgttctgtgtagtaggacagtgccttaagatgcttatacccttaagatctttaagggaatttgaggcaccaccttaaatctttctaaggtcttaaaatagggccttacactgacagtcttggcttcaccttcagactttctcctggcggcaccctggatttgatcttatctcagaggccatttatttcagcaatacagatgctcctcagattaggatgggtttatgtctggatggcatttgcatttgttatgtctgatatttgcaatttataggccatcataaattg

SEQ ID NO: 206491 - DNA, 165 bp, Homo sapiens
cttgatacagaggagtccaaagtaaagacagcaaagctaatccatatcccaaataatcatatctgagtattagacacagaaattctgctcttatcagataaagaaagtagcttcacacaccttctcaaaatcataatatgcttctgtaattttttttttttgaga

SEQ ID NO: 206492 - DNA, 143 bp, Homo sapiens
ccacaaattcatcactactttccctcaaacattttcctcctactgtatcagtggacagtaccatccaaggttatggcttgagcaacacttgagagattacttctctcccttcctcccactgaatatccaatctactcccaggt

SEQ ID NO: 206493 - DNA, 502 bp, Homo sapiens
acccaattcggcctatagagcggggcatgacgcacgcttactgggcgctgagtgacaacgaagggacttgccaaacccaggatgtgcaggggaataaaaaaaggtaatcagatataacacccatcacaataaaagactttccagagggttctgatattgataaattagggggaaaactaagtttggaaatgaagggcacagtccataaaagttgagttgtatgtgtgtatccactctgccaaacactttgcttttaaagttgttggtgcttgagcatgactgaggctctgaccttttctgatatgatttccagttcattccctttggaatgaactgcctgacgctgaagcagacgtgttaatgtaaaaaaggtgcctggattgaagtggtacctctccaactaacaggaaatcataacagaaaaggtcagagcctcagtcatgcccaagcaccagcaactttaaaaggattctacaatgccatggcaccttcttttcaacca

SEQ ID NO: 206494 - DNA, 348 bp, Homo sapiens
aaaaataagacaaaaatctctgcataaagggccatgggattgaactggacagtggctgattatctctaggaagaggctgaattctgaaaacatttgtatatgcaatgcccggattggttaaaggagagataatttatttcgttttatttttgtgtctctttgatatagaagaaaagaaatgtgaacagaacttgtacaatatatggtaaattctctctaccagaatattgttgatgttcaggctccaagaattaatgtggttttatcttggaatttaacctgttatttattgtgatatgcttatgtaaggacatgtgttagataatgtgatagccgataatgtgatag

SEQ ID NO: 206495 - DNA, 187 bp, Homo sapiens
gtttgtacataaacagggtcaggatgacttaacaacatatcaaaaaatctggtctaataagtgtcatggcagggactttcaaggtatataactttgggaacacctaaaaatctcaagagcataataggcagtcaacaggtgtttacttatgaaatgaaaataatgatttacaaattttattcaatct

SEQ ID NO: 206496 - DNA, 780 bp, Homo sapiens
ccagcctgggcgacagagtgagactctatttcaaaaaaaaaagtttctcaaaatgttaaacatagaattgccatatcaactaccaattccacacctaggcatctatccataagaaatgaaaccatatgtccacacaaattgacacacaaatgttcataacagcattattcataatagccaaaaactagaaatagcccacatagccatcgactggtgaatggatatacagcatgtggtatgtttatacagtggaatattaccaggcaataaagagaaatgaagtactgatacatgctacaacagggtgagccttgaaaacactgtaccaactcaaagaagccatctgcaaaaggcctcagattgtatgactttgttcatgtaaaatgctacaaaaggaaaatctacagagacggaaagcagattagtcttttcctgtgcctgggagtggagtagggtgaagactgactgataatgggccatttccttgtggagtgacagaaatgttctaaaattagatagtgatgatggctgcagacctggcaataaatggaaatgcaccgagctggacatttaaaacaagtgaatttcatggcacataaattgtctcaataaagccattttttatagaagaatgatctcagattcctaattggccaagagttaggcccgcacacgtttaaaacaggtgaattttatggcacataaattgtatctcaataaagccactttttggaagggaatgatctcagattcctaactgaacaacagttaggcctgcac

SEQ ID NO: 206497 - DNA, 439 bp, Homo sapiens
tcgagctgttactggctatttagaaaagtctgttctggaaggtgcgtctaaagcctgggtgttgcctttctagcgttgcagtattctatttttgaagtgatagagaggtgcagggctcttgtttatattgaaagctgcttaccaggaagtacttaggtctcttctgacaaaaatcaacataagcgcaattaacattgtcttgcttttaacttaatttgctttctaattcatttagcaatggatgtattactaaatgaccttgtaatatatcttacacctgtcaaaagacaaaattacaacaaatttagttatagatctaattggcatttattcattatttggtaagtgggcagcctccattctataaaagagactgagcttccactgggcaatgtcagaacagtgccttttataagggaacaaagaaacagaacaatag

SEQ ID NO: 206498 - DNA, 524 bp, Homo sapiens
tgctctatagtacacattttttgctgaccacttgggaataagctacagataccatgaccatttttgcaccctgaatacttcgcaccctgatacaggagtgtgtatgtcttaagaacaagaatgttttcttggaaaattatatttttgtgtgtataattaatcatattcaagaaatttaacattgattcaatctaatgtctaatgtgaaattcatgttttaattttaacaattgtaatgtctttcatagcaatttccccctccccccaaggcagaggcagggatggtacacgagttctctgtcctctgggtgctacattaagtcatgtgatgtctgttgttggtaacattaacttggttcccttggtgtccaccaaatttctccatgaagctgccattttatttttggaagtagcttcttcatagttgtggggaaagaggatttaggtgaaattattaggaaaaggcttatcaatccttggacattttactcagatattacctactggcatgtgtagtctccttt

SEQ ID NO: 206499 - DNA, 457 bp, Homo sapiens
  misc_feature (209)..(209): n is a, c, g, or t
  misc_feature (249)..(249): n is a, c, g, or t
  misc_feature (442)..(442): n is a, c, g, or t
  misc_feature (452)..(452): n is a, c, g, or t
cagaactgaatatgaatagcaagaccaaatccttttttggctattttctatagcttatttatttgcaacatgtcttcatgagggaacctgtttgatgtcgtgtttgtttgtttattttatttcatttgtttattttttgagatggagtctgggcaacaagagcgagactctgtctccaaaaaaaaatccataaagcagctgggcgcggntggctcacgtctgtaatcccagcactttgggaggccgagncggtagaatcgcttgagcccaggagttcgagaccaggctgggcaacaaagcaagacactatctctacaaaaaataaaatagccgaatatcgtggtgtgctcctgtagttccggctactcaggagcctgaagcagaaggattgccttgagtccaggagttggaggctgaggtatgggcaccactacactggaancctggggtgncagaa

SEQ ID NO: 206500 - DNA, 501 bp, Homo sapiens
tcagaagatggttagtgggcacctaccctgcgacaggggcttttatgtgcttggcagataatagtaaacaaaactgaactccctgcccttgtggaatttacattctaatgggagagacagataatgaacaataaacataataaataaattatatcgtatgttagaagatgttgaaccctaacccctcctgtcacattggaaactcttccacacctttgccctccctggtgaggggaagtagatgagtagattgatcccctctgtccgattcctgtccaccccttggcttctgcccacctctggctttctctccttactgtttgaaaatttctccacagtttgtttctctgtagggtgtggggcatgcagttcaggtagccaggcccctggacgtggctgaatgggactgtttagtgttctggggccttgggggaggagcggcctttcccgctccatcgatgtgactgcttttcctcccttatcctcccacctctggcagaa

SEQ ID NO: 206501 - DNA, 593 bp, Homo sapiens
aaaggtactgtgcccggatgtgcacgtaggctaaatttatgtttctctttacccaaacatgtcattgtagcaaagagtaacagagcagcagcgctagatttatgtttctctttacccaaacatctcagtgtaggaaagagtaacagagcagtattgctgccagcattcttgcttccaggcagttttctcctatctcagaatagaacaaaagggaatggttggctttacaatgagacattccattcccaaagacgagcaggagacagaaggcttcctcttatctcaactgcaaagaggcctccctctttacgactcctcagcacagaccctttataggtgttgggctgggggacggtaaggtctttcctttcccatgaggccatatctcaggctgtctcagtggggggaaaccttggacaattcccaggctttcttgggcagaggtccctgcggcttcccgcagtgcattgtgtccctggttaatcgagaatgaagaatggcgataacttttaccaagcatactgcctacaaacatattaacaaggcacatcctgcatagccctaaatccattaaactttgattcattacagca

SEQ ID NO: 206502 - DNA, 594 bp, Homo sapiens
aggaaagccctcaattgtaccctactgaggaatatgtgggcttgggctttcaataaataatcatgaaagggtgttggattttgtcaaatgtttttctgtgtcaacttagatgactgtgtttttttctctctttctaataatgtagtgtattacaatgaccagttttcttgtattgaatcactcttgcattcctgagataaatctcatcagccctggtgtataattcttttattgtgctgtcggatttggtttgctagcattttgttcgggacttttgcctctataattaagggatattggtttcttctcctatggtgtcatctgaaatgtgttatctgacctcaagaaaatgtttccttctcttcaatttttttggaagagcgtgagtagactgagttacttctttaaatatgtggtagagttcaccagtgaagccatctggttttagactttttgttttttggaggtttttgttactaatcttttttggctggacgcagtggcttacaccagtaatcccagcactttgggagaccgaagccagcagatctcttgagctcagcctgggcaacatggtgaaactctgtctctata

SEQ ID NO: 206503 - DNA, 585 bp, Homo sapiens
cttcagtgttacactactgagtatgatgtgtgctttggctttcataaatgccctttatcatgttcattaatttgtcaaatgtttttctgtgtcaacttagatgactgtgtttttttctctctttctaataatgtagtgtattacaatgaccagttttcttgtattgaatcactcttgcattcctgagataaatctcatcagccctggtgtataattcttttattgtgctgtcggatttggtttgctagcattttgttcgggacttttgcctctataattaagggatattggtttcttctcctatggtgtcatctgaaatgtgttatctgacctcaagaaaatgtttccttctcttcaatttttttggaagagcgtgagtagactgagttacttctttaaatatgtggtagagttcaccagtgaagccatctggttttagactttttgttttttggaggtttttgttactaatcttttttggctggacgcagtggcttacaccagtaatcccagcactttgggagaccgaagccagcagatctcttgagctcagcctgggcaacatggtgaaactctgtctctata

SEQ ID NO: 206504 - DNA, 550 bp, Homo sapiens
aggaaagccctcaattgtaccctactgaggaatatgtgggcttgggctttcaataaataatcatgaaagggtgttggattttgtcaaatgtttttctgtgtcaacttagatgactgtgtttttttctctctttctaataatgtagtgtattacaatgaccagttttcttgtattgaatcactcttgcattcctgagataaatctcatcagccctggtgtataattcttttattgtgctgtcggatttggtttgctagcattttgttcgggacttttgcctctataattaagggatattggtttcttctcctatggtgtcatctgaaatgtgttatctgacctcaagaaaatgtttccttctcttcaatttttttggaagagcgtgagtagactgagttacttctttaaatatgtggtagagttcaccagtgaagccatctggttttagactttttgttttttggaggtttttgttactaatcttttttggctggacgcagtggcttacaccagtaatcccagcactttgggaggccaaggcgggtgaatc

SEQ ID NO: 206505 - DNA, 192 bp, Homo sapiens
caccatgcccagctctttgtcaattttttaaatggatcctgcctttactgttgtatttaaaaagtcatcaccaatccaatatcatctagattttctcctatgttatctactagaagttttacagttttgcattttacatttaggtctatgatccattttgagttcatttttgtgaagggtgtaaggtctatg

SEQ ID NO: 206506 - DNA, 390 bp, Homo sapiens
tgctggcattagaggcgtgaaccaccttgcctggcccatattcaatttttataatggaaagaccatttcttagtgttcccttagaccctttttatagtattatagttttgtgtacattttctctacatgtgacataatcctgatactgtacatctccaaagcacccttactttgtggtttatcacattgttcccactaatggcttccaaaactgggctaactgaagctgagtatatctgtagaattcctttttcattccctttcttctacaaatggacctctttcaagcttaagccatgctgaaatttctcttccattggtgataggtgggactgcttaacctgcggcttaagttattttccaaagattaccataagactaggttgcctt

SEQ ID NO: 206507 - DNA, 721 bp, Homo sapiens
gggatcctcctgccttggcctcccaaagtactgggattataggcatgaaccaccatgcccagaggatggcctttaaattttttttttttctatgtggacataggcatctgtgatcctgattttctatgttacatatactatagaggcatttttatacttttggcctacttaataagatgaagtaaaagtgttgtttctcagtgatattctgccatgggaacataggaccatgtgccagcccaccctgggcatgtgccatttctgcctgcggggcacatgcatcttcccacatgtctcaccagcagtgacagagcagaggcctggcgttacccagcagtgatcacaaatgcgtggtgctgggtgctgaccaggatagtgtcttagcctgccttccatgggccccagtaagtagcagtaggatagaacacatagccagtacccgcaagaccaagatttgaacatttactccacctcccatgagagcttaggcaagctggttaatcttctagagctatggcaaggatgaagaatgatggtgaaaatggcttttttttttcttgagacagtgtttagctcctgttgcctaggctggagtgcaatggtgtgatctcagctcactgcaacctccacctcctgcgttcaagtggttctcctgcctcagcctcctgagtagctgggattacaggcacctgccaccatgcccagctaatttttttttttt

SEQ ID NO: 206508 - DNA, 1067 bp, Homo sapiens
cttgttttttctccaacactccctgacaagctcttgccgcagggcctttgcactagctgtttgttccttctgctgggagagctttttccccagatatctgctttgactcactcactcacctcctttaagttcccactcaaatctcaccatctcaatgaagccaactctgacaactctaggaatctagcaagccctccctcccctctttctccgtctttctctgctttattttttcctttttccacagcacctatcatctccagaaatacatatatttgcttgcttattgcattcactgtttgtctccccctgcgagaggtcaagatctttgttttgttctctgatgtctaccaaatgcctagaataatgcttgcatttggtaggcactcaataaacactttcttatatgtgtaatccacgagataaatataatttttatcacttttacagcatctgaaggacgtagtctggggcctggccccagaagctgaggtacaaagaaggtaacaaacttaatcagatcacccagccaataagtagtggagctgagagttgaactaagaatccttgcacttagccgctacttcaaattgctttcttgaaacttacaaaatgggagcctcatgtaggctgcttcctggattccagtgactcacatgatctaattattctctttgctctgagaaggctgcactcctactcagactggggctaggtttcacatttctttgtctcctaagatatgtaaacatggtatttcattttacaacaaagacctttgaactggattggatctttcattctgtcacgttcttggggccccacaactccatggacagaaagtgagcaccacgaagacaggtcttgttggatattctctttgtccctttctgattccccagtgcccagagcaaggtgggtgctccacaagtatgtgttaaatgtcgtatgaatgacattggagatggtatccagttaaattttagccttgtggccttgtttgacttgaggtcatggttcatcatgcctcaagtcaggcaatgaaaatgagaaggaaccagtagagt

SEQ ID NO: 206509 - DNA, 916 bp, Homo sapiens
cttgttttttctccaacactccctgacaagctcttgccgcagggcctttgcactagctgtttgttccttctgctgggagagctttttccccagatatctgctttgactcactcactcacctcctttaagttcccactcaaatctcaccatctcaatgaagccaactctgacaactctaggaatctagcaagccctccctcccctctttctccgtctttctctgctttattttttcctttttccacagcacctatcatctccagaaatacatatatttgcttgcttattgcattcactgtttgtctccccctgcgagaggtcaagatctttgttttgttctctgatgtctaccaaatgcctagaataatgcttgcatttggtaggcactcaataaacactttcttatatgtgtaaaacaaaaaaaacaaaagaaaaaaaaaaaaaaaaaaaaaaaaaaaaaacaaaaaaaaaaaagaaaaaaacaaaacgaaaaagaaaaaaagaaaaaaaaaaaaaaaaaaaaaaaaaaaaaaaaggggaggggggcgagaaccaacaaagaacaacactcagggggagcacaaaaccacaagtcaccacggccgccgctgttcgagcgacgacgccacccccacgcccacagcacacaatcaacaacgaagacgcagcagcggagcagcaaaaccaccgaacagcgtcgggcagaaaaaaaggcactcgacaggcgatctcgagtcgagaagaacaacaccacctcaggtggcgacggatgatcacagcaccacgacaaccaaagaagaaaactaacgacagcgagcggaacacaacaacagagcgaatcgattaagccacacccccatgcactcgggaccagaatgaccgcgcggatcataagaaacaacacaccgcggggaca

SEQ ID NO: 206510 - DNA, 378 bp, Homo sapiens
caaagcacacacaagcctaccctgtgagaacggagctgccccagttccctgagtgcccccttcagagctctgggtggcctctaacatcctggctgcttgtccatccccctgagcacaggaagcgggcaaggcacaaaactcactcggcgaggaggggagcagctcgctccctccacatgtgcatgcatgtgaacaaaatcacatgcatgtacacgcgtgcacacacgtgacacattcatgcacacacacgtgcacatgtacacacacacacagacttcacctcacgatgctgtcacctttttgtgtgtctctttaaaggtctttttgttttgattccttttgcgggtttgaaatagagatatatgcattaatcatttc

SEQ ID NO: 206511 - DNA, 356 bp, Homo sapiens
agaagcagtgtcttgctgaggatttggctttggatggaaattatctgtgttcactaccatgtgaatcctgacctgagtcccctctctgaggctgggactgctggactttcagaacaagcagtgtgcaggaacaggcaatgagcctgcagccacatggtctgggccctggccctgcgtcctgttagacactgaatctgtgtgtgttgtttaagctttctgagccatggtctcttcatttgtaaattgggacagtgctaatgattatgaacaaaataaataatcaacctgtgtctgcataccttataggatggtgcagaaattcaaatacatgcagaagtgtttttgaaaactaccaa

SEQ ID NO: 206512 - DNA, 414 bp, Homo sapiens
tgttgtccaggctggtctcaaactcctgggctcaggcaatcctcccgtcttggcctcccaaagtgctgggattacaggcatgaaccactgtgcctggcccaatagtagcgatttctgtaaggctttatgattgtccccactcaagggtccacctcatgtccctccacttgcaacacactggcactccaaccatctggcttgccttgctctctccatccctcgatcttccctcccatccccctaccctgttaaattaatccctcctccccacctttcattccctggctgtgagctgggcttctctgagtcccattgtcctcgggcttccccttccccagccagatcccactattctggtcgtgggtctctcccactcatatccctaattccaggccccttgcagggtggcaggta

SEQ ID NO: 206513 - DNA, 467 bp, Homo sapiens
tagagcatttactttagaaattttgcaattatcaattttttctccctatttttgagatgtaaattttctacaactcaggaatgtctttctcaaggacatgagagatatccctttgaaatgtaattgtgaaaaatgatagcacctctatttcaatctgtgtaggagagtaggagcctaactcaggtaagtgacatttagcaaactcagatggcctaaacacattcaccaacttccccactaatgtactccctactggttcatgtcagcatttaataatccttctgctttcttttcagtggagctgagttcagtctgtctctcttctgcagtggtcttctctcccattgcaatggtcttgagtaaagtgttctttgtttgttttacttggagatgatgtcagttcaatattgaagtctctcttccctactacagtagttcaaataaaatccatcttgccattcttaaca

SEQ ID NO: 206514 - DNA, 600 bp, Homo sapiens
gagaaaaaaaatcctgagttaaagaaagagttaagttcttgacttagaaggaactacctagggctcatcagaaatattagaaagaagatacgtactatatactagttattctttaaatgttcatagaaatacaagttcaaaaatgttggtttaaaatatatcaagttaacatacctctgggaagaatgggatttaagggaggcaaaggtaacttcactattttatatacttcactcttgtttgtttaaatcgatgatgtttttaattaaaacatttaaaagttaatacaactagaatagaaactagggtttttacaaagttaatataacattaataaagtaaaagtcagggaagagaaaaagaaacaagaacaaagaatgagattcagaaatatatcaggaaaaagataaaatatatgattcaagtaaatgtgactgttttatatccaaatatccaaagcaaaacatattgctagaatctgtctaataaacatgtgaaaagattctcaagtatattaacaaggaaacaaaacagtaaaatgagaattattttaaccttttggatttgcaaagacaaaatgattgatgatgcttgggatgg

SEQ ID NO: 206515 - DNA, 356 bp, Homo sapiens
taattctaattttaccattgtaacttaattaacatgaaatctataacaaggttacacatactttcccgttctaataccatgttcgtgacagaaacaaagcaggtgtcttctctgcaatgtggtcatctgaggtctgagatgaggggtcacacaggtattttataatatttaagggtttggacaacagtagtgataacaattctgaacagcactggctcctaattgaaaggttataggtaaatttaatgctgcaattttatattaacaccttgtccgaatgaagctcagaggaagatgccacatcccaggtcacacagagaggaggaatggagctgtgctctgctctccacaccacc

SEQ ID NO: 206516 - DNA, 141 bp, Homo sapiens
actgtggctgctttctacccaggaggtgtctcctccaaatgctgtcggcagagatcaaatcccatccctgatgttccaaggcttccaggtgtaactcacaggcccagttcttggtaggcaggtgatttagccttctgtgtc

SEQ ID NO: 206517 - DNA, 589 bp, Homo sapiens
ggttgttctagaattttataatatatataaactctagtgtagtgactggcatgataatttttacttaaacttcatttttgtccaatagatctttctgtgattaaactgttttatatctgtactatataatatggcagcagctaacaatatgtgggtattaaacaattaaaatgtaactacattgcaagactttaaatacatgtagaattttatatatgcaatgatagcacaaaaaggcagttttaaaatttaagtgttctaaagtcattaaatttttcagtatgtggtaaaagtactaatatatattgagctttgataaatcaaaatgcattttgatttttaggtaataactaccaagggataagtaaaaggaggtttgacttacaaattaatggaggcaatgaaacttaaaagtcactattatggaagggtgaggccagaggatcacttgagcccaagagtttggggttactttgagccatgattgcaccgttttactccagcctagatgacagagtgagaccctgcctcaaaaaataataaataaacagtaacattttaaaaaattcattaatgaactaaagataag

SEQ ID NO: 206518 - DNA, 499 bp, Homo sapiens
ggaggactgcctcttgtgactgtggaaggacttctaccaggctaacacccctggcctctcaccctcccatttctcaccctgcaaagcagagtgctatttgattcatgttcttagtctgtggatctcagttgaggagaactcgttagagatttgccctctttctgtctttttgagaccttactggtgcaagacagcaaatcctagctggtgtctacaggacacatgcactcttaggttacataactgcagggaccactgtcattgtatcctggagctggttctatataagacacagcctgagcagtatataggcttcctagtctgctcctggccaaatgtcccagttggaagcccagaggttgtctggctatgccagtggcaggatgggcaagtctaactcaagggtgacatattagcaagacctttatggccatgcatctaagatgctctgtccaagcctgaacttagcaacaataaacctgacattttgaaatccatc

SEQ ID NO: 206519 - DNA, 271 bp, Homo sapiens
agctgggactacaggcgtgtgccagcatgccctataatttttgtatttttagtagagatgaggtttctccacgctggccaggctggtcttgaactcctgacctcaggtgatctggctacctaggcctcccaaactgctgggataacaagcatgaaccaccatgccaggcctatagctttgtaatatagtttgaaatcaggaagtatgatacctccaactttgttcttattcaaaactgctttggctattcaaagtattttgtggtttccta

SEQ ID NO: 206520 - DNA, 807 bp, Homo sapiens
tgtttattgcagcattattcaacttaaatgtccatcaacagataaatggttaaagaaaatgtggtatagacatacaacggactattattcagccttaaaaaaaggaaaccatgccatatgtaacaacagatgaaccttgaaggcattatgttaagtgaagtaagccagtcacatgaaggacaactactacattccacttatgtgaggtatctaaaatagactaactctaaatcagtgagtagaatggtgattgccagagaatggggggagggaaaatagggagttgctattcaacaggtatgaagttttaattatgcaggatgaacaagttctagagatctgttctacaacattgtgcctgcagctgacaatactgtattgtacacttaaatgtttaacagtagatctcatgttagtgttcctaccacaatgaaaaatcaaaatcctaacaatacaggaaaaaagagggattcaataaatgaaatcaaccaatcaataaaaataatatgatagatttaaaaaaacttcaatcactacaacatctcaaaatttttttgttgaacttagagaaatatatatttaatccaaaaatgtggccactttttgttgtttttttgtttaacagatttttagtatggtgttatatatgtctgagttacatacagttttggtaactaagaattcctctcagtacgttgccagattgatctctgtttcttactcttgtgagtaatgtgtaacaaatatgactcccaaataaagcagcatttctgtggctattttgttggcccactttcagagtagtat

SEQ ID NO: 206521 - DNA, 615 bp, Homo sapiens
ccccaaattgaaaaccagagtagcctatgatcattccctgtgggattctttaactgttaaggcaaaagaaaatgcagttgcacttaagagtatatggataaaataaagaactgtgaagtgaaaaggggagagatttttttaaagatgactatattttaactcctcctgactagtaaattcaaggataccaggaaagatgaggtgtagactttaaaccttccaacattccattgtgttaatcattcttcctcatcaaagaggcagtaagggataatttagagtgactacagttacaaataatgtgctgtataagcacccaagagcagagataaggatggaattaagggtgttaaagaaaatatggcctctcttctttaccatttgattgtttttgctgtccctggagactcatatctctctctattcctaggaccaaagtttacacaactgccaaatatataaacaagaacaccccttaaaattcctgtgaaacattgtacatcttaagagagcagatgtgtctatgggctgtcacaaatatcagtcttgctatgttaagcataaacttaacaaatattagtggagacacactatttaggattcgcctaaaaccct

SEQ ID NO: 206522 - DNA, 407 bp, Homo sapiens
caggggcatcctatgggagccaggctggcttctaggacctcttatggatggaagttatttagtggatcttcctggatttgattttatttctttgatctcttaagtacatcaatctttgggtttgctacctgtaatttttgtcttaggaaggcagcatctctattctctccaggaagaaatcttgatgcaggaagaagaaaaagcctggtatcctgccctgtttttgttctcatggagattcaacagatttttacgtaatctctttttactataattcaccctgcgtttcttgaattctttgtgaacatccctttctcctgtagctgacagcttctgttctttctcttggggcttatgagctttctgagtcagatcttttagcaaagccttagttttctgctcatgga

SEQ ID NO: 206523 - DNA, 382 bp, Homo sapiens
tgtgtcccaatgtgctcaatactacaggccagatatcaatcaagacgcaaactatgttctggagaacctcaccatctcattcagcaagctagggaaagaaggaatgcaaaaggatgtgtatatctctcaacatcattcaatttttagataaatattaatatactaaactcaggagttctaatagtttttcaaagtattttcttgggttccccaggtagactaatactttctgcaaataatcgtgtttcatctcttcttcaacagttgtgtaactcctattttcttatttttcctggccagtttactggttagaactgagaaattaccattggttggtgaagtagtaagaaagtacagaaagcacctacaacactatgtggga

SEQ ID NO: 206524 - DNA, 443 bp, Homo sapiens
ttaagtgtcagcctccaggcatttaacaagtgagttgttccaaaccttcaaaggacagtttattgccacactataaaaactgttacagagaaggtaaaaaggaaaagtcattaattcattttacaaaactagtctaggcctgacagcaaaatctggaaaagaactcatctaaagagaactgtaaagctatctcatttaaaataagagattaaaaaatctgaatatgttagcaaaccaaatttaattaggaatttaaacagccacccaccgcaaccaaaaatagtttaacacgggaatttgaggagggattactactaggtaatctattcctacctcaattaataggtgtaacaaccacttctgaatccaaatgaatgccaaaatgacatctgatgacattcaacacccatccttaataaatcacccaagaaaacaagacaggc

SEQ ID NO: 206525 - DNA, 467 bp, Homo sapiens
gcccaggcaaaatctgaaaaatgttagtctaatttagttaagtttttcttgcagaccagaacttctaggaaactaatatacaggttttctccaaaatatattttcaaggaaaatcagagaataaaagtttccaatgcatttagactagaaaattaaatattcaacaaacaatttcggagggccaactatttgccaggatccttgctggaatagtctctaacctcaaggcaattgctgtctagctttaagatcaagagtaattgtgacttgatgtaaggtatctgtgttgctttgtattacattcttcttagctccattgtgttaaatacagatagacaatatttgtacatgataggttggctcaccattaatcacttaagaagtaatagaatgatcaatgattttctttctggcttgtctacgccaaaatggttcttctgctcagttggtttctatagtgattttat

SEQ ID NO: 206526 - DNA, 711 bp, Homo sapiens
ttcagggatttagaaaaagaccatgtactaccaaaataatttcatctgtttgaaattgcatttttcatatcaaaatggcacaagttccttttatattaaatgcattgaaaaccctcagcttcacacatttgaatatttctattttactgacaatttatttactattgggaactactcatattgatttaaacatacacataagtttatatttatatttttttctccttttcatcaccagaaagaatgttttagttcctatttaatggaaccatccatttttatgtctttaagtcatatataattttttctttgctattcctccattgtttctgttttatataattattaaataaatgtcaattgttttgctatctgaagaatgcaaaccacaactgcttctgaagaccctatcatatctagcttttaacctaccagttatgcacctagcgtcaaaaacaccatttcctccgagattcacaagcctactgaaatcaccatagttctttagtaagcatcagaagcctggagtatggatgtatatttttctcctgtctttattataaaaccccttagaaagcagtgacatttactagatcagggattaaacactataatctacttgcagtgggagtcattaaaatgttgacccaactcttcacagagttgcaacaagaactgtgaagtgtgtctttgctatttaaagtgggaatg

SEQ ID NO: 206527 - DNA, 483 bp, Homo sapiens
cctagcatgctaaaggctctgagaagttctgcagcaaatattccattctaactttgctccccccagatgtcagaagatctgcctgccctctttgccttttaagtcacacacactaaccttctgcaaaactgcagtggcatgggacacacttgggaacctcaaagaggttccttggtatcctccacagattggacctgacctggtgcaggggccaggtgcagccacccaggagcatgcacgggacttggccagcaggaccagcccccacaggagaaagtatgtgtgtttgctgtgccaacgttggcgagacgagcccctcagcggagcagcaggcttcgggcagtgaagaggaggctggcacttgggccttctcctggtgcagcagtggtttctgcacaaggcagtgatgtggttgccaacaccctagaccagcaccatccaatccagtggctgccagccacaggtggctacttacgagtgatt

SEQ ID NO: 206528 - DNA, 211 bp, Homo sapiens
ccttaggacttacctcttagcttgtgttgagcctaaagatcgggcagaggtgaaagtttagactcttcctaggccgcttcttagcatgtctcctgtccagtgtgcctttctaaatcccaggcgcatgcaggtgcttttcagtgctccagttcaccacattagccttggtgcctagctcttcttcccaggcattcagctgtgtattgtttac

SEQ ID NO: 206529 - DNA, 792 bp, Homo sapiens
ctaataatgaagaaaataagaatatacaaatgtatgaatatgaaatatatatgagatattcatatctatatggaagaagaccaaaagtgtattaataatgaagcaaataaggatgtacatacctatatatatggaaacaaaaagtagattaattttgcagagtataattttacccttacatactccagtgtgtattatgcaacaataggaaaatctttttccataaccacagtggagttctccacttgagtcactttcacgttgatacagcacagtatctgatccacatctgtattccattttgcagttgcccgataacgtcctttataacttctgttccctccaggacaggatccagcctagagtcagatactgcatttagttgtcacgcatcttcagtctccttttatctagaacatttcctcagcctttttcttttacaacgttgaaactgttgaagaatatcgtgcccctccccttttgttagtaggcaggtcctcactttgggtttgtctgttgcttcatcgtgattggattcaggaagtgcattcttagctgaaacactgcagaggtgacggtgcgtccggggagttacacctggaagcacgcagtgctcctctcttcctcatctatggtgttaattgatcgctcaaccaaggtgttgtccaatttctccacctcattattttttgaactgaacaagcagattgtgaggagatattttgagctcctcgtcaaaatttcctcttaaatttgccatccactgatgattcttgtctgatccaattttta

SEQ ID NO: 206530 - DNA, 799 bp, Homo sapiens
gctgctggcgggccccaagaattgaaactctaggtggacatgctgaccaatctactgagcatatgcactattgactatagaaacaccagcccactgtattaataatgaagcaaataaggatgtacatacctatatatatggaaacaaaaagtagattaattttgcagagtataattttacccttacatactccagtgtgtattatgcaacaataggaaaatctttttccataaccacagtggagttctccacttgagtcactttcacgttgatacagcacagtatctgatccacatctgtattccattttgcagttgcccgataacgtcctttataacttctgttccctccaggacaggatccagcctagagtcagatactgcatttagttgtcacgcatcttcagtctccttttatctagaacatttcctcagcctttttcttttacaacgttgaaactgttgaagaatatcgtgcccctccccttttgttagtaggcaggtcctcactttgggtttgtctgttgcttcatcgtgattggattcaggaagtgcattcttagctgaaacactgcagaggtgacggtgcgtccggggagttacacctggaagcacgcagtgctcctctcttcctcatctatggtgttaattgatcgctcaaccaaggtgttgtccaatttctccacctcattattttttgaactgaacaagcagattgtgaggagatattttgagctcctcgtcaaaatttcctcttaaatttgccatccactgatgattcttgtctgatccaattttta

SEQ ID NO: 206531 - DNA, 408 bp, Homo sapiens
cagtatgttatagtggttaagaatacaaactctagcatcacatatgggttcaaatcttcccttcagctcttacaatctatgtgggttggacaggttaactaattttcctccgcgtcagtttccttagtttaaaataagcattttaatggtctctaatgtagaggcaataatgctgatagaagcctcttatagtaagcacatgatagtaatttatattccctttcaagtgttggataccggaatgcagttattcagaaatgatcatcattgagttgattcattattgtaaatgagttcagcttctctctgaccacctgattttgttaccagtccaaattgattataatcacctttgcaattgtggcttactcattatctctgaaaataaaatttgagtctgtgcattta

SEQ ID NO: 206532 - DNA, 523 bp, Homo sapiens
gagaaaaagctcacaggagtgggtagagagagccctttggagagtttccatggcagagccagcaatgggacacctggtggggacatggagtcaaggaaagccccaagcttggccacagtacagctgcgatgccggcggaaccatgtgaaggccaggggcagctgcaggcacaaagtctgagggacaccaagcactcattgcagagggatggccgcggcagcatgaggcagtatgccttcctaacgaatgcaggaaagccagagaaggctttaaaatgggggtgtgtcatggggttctcactggcagagaagttctggaaacgagaccgcaaaagcaaaggtgcacagtggggacagccacagccaacagcctgacatgtgacacagcctgacacatgcagccagacccacattgtccatacggtggccacagctatgtgtgacaacttaaatttaaaatttaaattagctaggagaggccggcacagtggctcatgcctgtaatcccatgagcctgtaatccc

SEQ ID NO: 206533 - DNA, 280 bp, Homo sapiens
agcagatgacatgggtttggacctgactctgctgcttctagctgtgtaaccttgagtagattacctaggccccctgggcctcagttttctttttggtaaaatggggataatattagtgtctacctcacagggtgttttgtggattaaatgatccaatgtacataaagtgcttaaactgcctgagacataggcagcacaatctaactatctgctgctgacattactatttttattactcctccaagtattgattaaaggcattttgctattgctctgagac

SEQ ID NO: 206534 - DNA, 275 bp, Homo sapiens
gctttcctccccattttacagatgaggaaaccagggaaatcaagggtgtttgagtgactgaccgaaagtcacacagctaggaagtaaaggagccaggatacaggcccagagctctggttttatctgaaaccaaaaccagaagttcctcttccagctgccaccacctctctgagtatcagccctgctaatgacaatgataacatcagctccgcagcatcgttctaagcactgtacgttaatgcgatcagttaataaaagcatcttgccttaattaa

SEQ ID NO: 206535 - DNA, 426 bp, Homo sapiens
tagtgggaaaagagaaaagttggtccatcgaggagagtgttctgcataaggggagagatgagaaggtagccttggccagaggaagaaacttcattacaaccagctctccttctgcaagggaagagggtgaagtttgagtttgtcttgcaggaagacaatcaaactaaagaggccaacaccagcttagagccgagcggccccctgctcagagcttccctgtggctctcctccatgtgatccagaaggagggactccagtgtgaactgcctgttccagaaaccccatcatctcagcccataagctgataagcaatgtcagcaaagtctcaggatacaaaatcaatgtgcaaaaatcacaagaattcctatacaacaacaatagacaagcagagagccaaatcatcaatgaactcccattcacaattgc

SEQ ID NO: 206536 - DNA, 749 bp, Homo sapiens
cccttcccactgtagcattctgcctcctgtatatctgactgaaggtgaactccctgccattggcgttcatttggcattcagatgtttcagtgcatcatcccttttatgttcgtatttccaagttaacactggaatgtactgacaacacatttgtcaggcactacccttcctatatatattaccacatcgaatccttataacaattctctgggggcaggtatcctaatacaaattttccatataaggaaactcagacctagagtggctaagtcactcacctgagagcacacagtaagtggtagaatgggagcttagcccctagactgactctcctgatagtttattatactagttagaactgtatctaatattaaaagattcgtattagcagtttcttttatattatcaaaattttagagtcttgaatagaaataataatgtgattttaaaagtccttatttgaaaccccaacatgcttttgagctgtagaggtggtatcccagtagctgggggtagccgccaaaacacttcagtgtgatagggcctggtcttgctctcaggaggtttcaatgggagcccagttgaaagcactggattagtgattaggaatatcattactgaatgagattgcatgcatgctaccttacaatttaggtagcctcatctcatgtcttcttcttggaccagtggttctcaaggggtttccaggcccccaggagtccggagacccttttagagggtctgcaagg

SEQ ID NO: 206537 - DNA, 136 bp, Homo sapiens
tgaaatgttggatcacctgtgggtgtccatcacctcagcttcatctctctttattaactaagctccacttatttctgaggatgacgcatcaccgagaaaactctaaattagatgagaacttgggaggatacagatc

SEQ ID NO: 206538 - DNA, 583 bp, Homo sapiens
taaagttaccaagtgaactggaattggaacatcaccctccccagcctgctaggtgatttacttaacacatagagtaataaaatcatcgctgttgctttagatcacggattattttgctaataatgctaaggatgaagctgtgatcttattatcacctgaatcgggaggtgtggacactttaagcagttccactttccttctaattccccatccccatgcctttgctaaagctgtcccttttgctctaacacccttcctggaccttcctaccctagctgggctaagtgtttctcctcagcgttcccacttgtttcaaacatagcacttaccacttgtactaaaattacttgccttcttaattagatatgaacaaccctccccaactccagtatgggccttctgtcaataataatacgatatgacagctaccatttattaagggcctcctgtatgaaagaccttaggctaagcatgttttaaatgttatttaatcttcacaatctctgaaaaaaatgaagaaatcaacgtgcttttcttactacctctacccctaagccattattacttttttttttttttgaga

SEQ ID NO: 206539 - DNA, 271 bp, Homo sapiens
ccatattcttgtcttggaggaaggacaatcgtttattttttattactgcagtcctcattattgctcacacaaaagctttatgtgtggtctctccagtgagccaaattatcttaaaattatggaaagtgccatgaaaatagaaagtaaaaatgatgattgaagaagcagattactgaagaaatctgttaaaaaaaaaatagcgacaggaatgtatgctggggaagaaatttatggaaggagtaattttcagcagtgcctctctcgactcttc

SEQ ID NO: 206540 - DNA, 475 bp, Homo sapiens
ccaatattgatttcttgtagtctacagattcattcaaaggaaaatgaaatcaattaaacttttctttaaatcttgtcttccttatctttgcaagtctagtccagatggattggtctagcgcagatgcacctgccccatgaagccttttctatgctcctaattgggcatcatggtacatgatctagaatgatggaaaattagaactgagaagatacattagaagtcatttagagatattctgatccctgaaccttaacattaaccataactctgacatttaagggaccttaaatgtcacttaacattttgtgtctttagggtttgtttgttttataaaatgtcttttactttaaaatgaagcttccctgggcctgtcaacatagacgtgtgttccacacacatgaaacatgatcagtataaaatccgtgctaaaaatattttacaataaataaatattacgatttcaaaccacagt

SEQ ID NO: 206541 - DNA, 426 bp, Homo sapiens
tgaaaaaccactgaatcccaactgaaatgggtgaattccacagtatgtgaattatatcacagtaaaacttctgttaaaaaaaaaagcagctgtagaaccatgtgtatgagatgctatcacttatagatttgctcacatctccataaaatatctctggaaccatacacaggatactaacactgagttcctcagcaaagggacaggggactaggaggaagactttttatcatgtattcttttttaacttttgaactatgtcaacatactactatctaacatttttatttaaacgtgaaataaaagacctggtgtggtggttcattcagcacttcgggaggctgaggcaggaggatcacttgagcctaggagttctagaccagcctgggcaacatagtgagacccctgtttctacaaaacattttttaa

SEQ ID NO: 206542 - DNA, 328 bp, Homo sapiens
aatgggcttggtgttctgagtaaaaaagaaacaaaaacaaattttttttcccatttagagaaatggagaaattaaatggtttatatacagacccgatccctttcataaagttcgcttggaggtaataccacaatttcaggccctctttgaagaaataccatctcgtgttgggttctaattaaagatatgctgttttgccgggcgtggtggctcacacctgtaatcccagctactcgggaggctgaggcaggagaatcacttgaacctgggaggcagaggttgcagtgagctgagatcacactccagcctgggtgacggagcatgactc

SEQ ID NO: 206543 - DNA, 476 bp, Homo sapiens
  misc_feature (25)..(25): n is a, c, g, or t
tcgagctcggtaccgtagctcgatnaacctgttctccagcagaaccaaatgtcagtcacatataccacatttaaaattgcttagaatagataggctgggcatgtggtttatgcctataattccagtgctttgagaagccgacgtggaggatcgcttgaggcaaggagttcgagaccagcctgggcaacatagcgaaactctgtctgtccaaaaaattttaaaattagctgggtatagtgctgcatgcctatagccccagctacttgaaagtctgcagaggaaggatctcttgagcccaggagtttgaggctgcagtctcccaagtagctgggcattgttgtgtgtacctgcagtcccagctacttgggaggctgaagtgtgagaattgcctgagcccaggagttcgaggctgcagtgagctatgattttgccactacattccggcctgggaaacagagtaagaacctgtctctgac

SEQ ID NO: 206544 - DNA, 622 bp, Homo sapiens
ggcatatttggaaagatgagaacaccatatttatcaacaagtttttgcatctgcccagtgatataaagtaactcaggatcacaaagcaacaatatacataaattacagtaatcaaaatttatgttaagcacaggcagtgaattgtgtaagaataaagtatttttcatcagctgaacagttaccaagaatttagattcacagccttggctaaatgacccttccccacaggaagggttctgtggggttcctttattgccattcagtggtgcttgcttgagtagtttgaatctgcccatatgataggcaccttttttattgtataatgatcctggccaagtcatgcgattgggttgccaccttatgtctctagtaaagcaagacactaggatttgtgctgaaaggaaaagagatgcagaaagggcacactggaacttaaagattgctctgtgtgtgccagacacagacattgtaagggctgtggctttcccatcactcactatacttttccaatcaatatcgtcgtgaggtgactgcagtgatattatttcactgtgtcaaaaaatgaagtgacacctaataaaaatgcaaaggaaaaagctggaaaccaaaagaaaatggtttc

SEQ ID NO: 206545 - DNA, 490 bp, Homo sapiens
gataggtaaaattataccgtgacacactgagtgacaaaaaacagcccctttacctaatttcctggtgtgatattggactacaaggcattgtttttaaaaaatgaaataaatatctaatagaatctggtagaatcagatctatttcactgtatgtatatgtatgtgttgtatgtatatgttcttcacctagttttgacagttgtctataatctgtcaggccactaacactaacctccacctgtttacctgtcagatctcaatgacgagggccctgttttctgtaattaagataaccctactcattctggaactatgtaattttacacagataagttaagcaaaaatagtaattcaaactctggaaagtgttaatattttcagagacctacaagtattctcttaattgctctatatagctttcaggaattggacgaagtgagaaaggatccaacttcccaatagtacttttggaacataaaataaagggtgg

SEQ ID NO: 206546 - DNA, 597 bp, Homo sapiens
aggaaacacaatattgtttatagaagccctctaattttcataagttgctaccttcatttggtacctactgattatcatgtgctaactaggagaaaacacctacaagcaaacaatattatagtgctgcgattgattctgctttaatgttgcttgttcaggtagcaaagccattagctacttcttgatagtttttatgaatagacttagcacctagtattgagcaaccactgaagaatgcatcttccgttaaaaggttgatttattagtttatatgtaaaagaacactggaggttataaaggtaacaaagaccttaaacattacattgatttttttttctcagagctttttttcttcttgttgtattgcagggtaataaaatttcactaggcccattggatctataaaatctgaagtacaaccaccaactgatacaaatgaaattgtttgactggagcgataagcaaggacttggctttgaactctgagcagtataagtcgtttctctggcccgtgagggtgaattacagcctgctgtgcattaaaggacaggcatgtatttgtaggagctcccagttcagtaatcactgggtgataca

SEQ ID NO: 206547 - DNA, 428 bp, Homo sapiens
tagaaaatgctcaagtaaaagaaagtgatttacacattttaacccagtcattccattgcatataaagatggcatacaaacttttttgttcctagaaatatgtacttttaagaatacctgaagaaattggaagaggaaaaacttcatccatccatgagatacatggaaaaacaatgacagaaagatgctcagtggggctcaaatttatttaactataggactaaaactaaaaattagtgatagaacaaaatgtgtatgatataaataatgttatattaggtacaaaagtaatgtaggtcttgtcattaattttatttatttatttatgaaacagagctcgctctgtcgcctaggctggaatgaagtggcgtgagtcgagattgcaccactgcactccagcctgggtgacaaagcgagacttcatctcaa

SEQ ID NO: 206548 - DNA, 661 bp, Homo sapiens
agctgcatgtctcagaaacagcttctttctcaagagagaacaagagggataatgctggatctaaaggcatcatctgaagaagacaaagatatcaacaatcgcaactatttggctttctgtccatcactgagacttttcataatcttcccttcataaataggatctcttgatcagaacagaaaagttgagtcttaaatttcctgtatttatttctgactgatactgagggaagtgcaaatttggttgctatgattaaactccttgattgttcttaatgggactcttttaataagtcaaacatttttgccatctaagtatattgatgagcgccactttatctcaaatgtttacacatactagggaaaagcatctgcagtttctgaactctttgtgaatcagtatcactttttcatgttacttcagagatcaatattcagtgcattggttttatttaccatcttttctcccagttgatcttgtaatcatcagaaagggaaaaaaaatctccttcacaaagccctttgcgacaaacttatgtaaataataatctaaggacagctagaaaaaaaatacaccatacaggggaatagatccaaaattgatatctgcctcacctgtatcacctattgtattagtaactggaaaggtaaataaataacag

SEQ ID NO: 206549 - DNA, 160 bp, Homo sapiens
ctctctccacactggaaatgtatgtgcctaattaaaataagatgtactctttaaatgatgaaaataaaaagtgatcaaaatagatttttgttatccttggggcattgggagtttaaacgcaaactgcatggcttgctgtgtggagaattaattattggta

SEQ ID NO: 206550 - DNA, 354 bp, Homo sapiens
ggtttgctggggaccagcagccttgcctgaaacattgactgttaactagcatagtctcccaagaatttttttaggattttgtttaagaaaatacaaattctcggctgggtctcatggctcatgcttgtaatcccagaactttgggaggacgaggcagctggatcacttgaggtcaggaatttgagaccagcctgaccaacatggggaaaccgtgactctactaaaattacaaaaattagccgggtgtggtgtcgggtgcctgtaatcccacctactccggaggctgaggcaggagaatcgtttgcacctgggaggcggaggttgcagtgagcagagatcgcggcactgcactcc

SEQ ID NO: 206551 - DNA, 522 bp, Homo sapiens
tgcagggtctttctattctattacacgtcaagaataaaaaatggctgggagtcacaaaaggtagataagatgaattactgttaaacagataggattccctcgacctcagaagtcctcaaataattccacaatgcttccccaaataatctatgacaacagaaacatcctcccaggaccatcacaactgccatccccctgtcaaaagcagttactccatccaggcttctcaaaggtcaaacagctctaagggtttcctgacttaccaggaaaatgttctagtatcacacaagcaagaaagaaaacatgctgcagattaacatggagtttaatttaatctacagttagactggaataaaattgtcaccatgtccaaggcctgcagagactgtaatgtactccccacaaagtcttctgttgaagctctaacccctaaggtccatgagaaggtgatcgagggtaaataaggtcataggggcacagggctctgacctgagagggctggagtcctcgcatgaggaggaa

SEQ ID NO: 206552 - DNA, 529 bp, Homo sapiens
ccaatacccactaacttaattagtagagattataataattttgttttttttttgagacggagtctcgctctgttgcccaggctggagtgcagtggcgtaatctcagctcactgcaagctccgcctcctgggctcacgacattctcctgcctcagcctcccaggtagctggaactgcaggcgcccaccaccacgcctggccaatttttttgtatatttagtagagatggggttttgccatgttagcaggatggtcttgatctcctgaccttgtgatctgcctgcctcaacctcccaaactgctgggattacaggtgtgagccaccgcacctggccagattataataattttataatcaacttgttaagtaccaaaaaagctctgccagaattttgatcataactccattgaaaccgtgtatcaagtggggggaattctcatctttgtaatattgaatcttctgatccatgaacattgtatgtctcttaagtccttgatttctttaagtaaagtttttataattttctcta

SEQ ID NO: 206553 - DNA, 104 bp, Homo sapiens
agcagacccatttcacacaataaaaacggcaggttgattttgtggatttttgctacaccggctacaatcattgatcctaggtattcgggactcctatgaaatcc

SEQ ID NO: 206554 - DNA, 485 bp, Homo sapiens
agctgttgaaacaagagaatggaaccagcgtttgtgtagcataaaataagtaccaggtattttacatatgcagttacatattcttttaaaaaaaatggtgctttaggatacacttttttttttttttttctgagacagagtcttgctgtattacccaggctggagtgtgtgtagtggcgcagttggctcaccgcaacctctacctcccaggttcgggcaattctcgtgcctcagcctcccaagtagctgggattacaggcgcatgccaccatgcttggctaatttttgtatttaagagacagggtttcgccatattgaccaggctggtctcgaactcccgacttcaggtgatctgcccgcctcagccttccaaagtgctgggattacaggcctgagccaccatgcccagcctaggatagttatcaaggaaatgtattccaaggagatgaaataacttctctgagtaatatacctcatacttggca

SEQ ID NO: 206555 - DNA, 169 bp, Homo sapiens
agtaattactgcagaaaagccaattgagcataaaatgactcgagaaaagggctcagcttcaactaagtagcatgggaaggtggctggtacacccactcaaagtttggctgcttaattatatcatgcctatttacatattgggtacagtgatatcagtgaactataaatt

SEQ ID NO: 206556 - DNA, 673 bp, Homo sapiens
tggaaagagaaaacttaaagggggacgaggattagtctttgtcttgagactttccaacaagagaaatttacatttagacactccatgtatccatgtattttcctaccagaaggtagtgtttaggagttaaatgtcacatcaaagacaaatgttagagccaggagatttttctttctaggaagaaggatatgttagttagtgactttctccatctgattcggattttatctctactgttgtcactaaattcttttcctttctctctccatggagctggtagtttaaaaaaagaaatctgcagggatgggtacggtggctctctggttatggtggtaatagccatgttcctaaatctgaactcctttcttcaggtcaaattgcataagctttccatggtactgcaggctttttctttctgctccccttcactctgcgatgcctcaaacctctcatttccgtccacgctctctgcagacacagagtactgaggctggaaggagaaggaggggaacaggcaggccccactctctgctctgagtagtgtgtgggaggaggctggagaacggagcacttctctctgatcctgcctgactcttttggagccagtgaggtgggggtgtctctgagtgaagcagagggaggcctggaggggctcaggagctggactatttct

SEQ ID NO: 206557 - DNA, 379 bp, Homo sapiens
cttctctcccttctctctctctggaggtgctggcacctagagtacaggctcctgtctgaggtcctgcagttccccgttcctgtgacagtgcagtgcctgtcccgctttagagcccaggactctgatcctgtgcgtaagataggggaagcctaggaaccatatggagagcgtgggtcttccgtgcttctgctgagtgaagcttgtgaccaggtgcatgtagagaccaagaagcactgtgccctgagccattagcgtgtctgttaatgagaagaagactccaagtcgtccatgctgagtgagaggcacggctttgccgtctacaggagttgtaagataaatgtgaaactgggacttgactctgagtgaccgtttctgggtt

SEQ ID NO: 206558 - DNA, 343 bp, Homo sapiens
acaatgatcagttatgctatgtagttatgttttacaaatatgctatatggaacttggtttggggccccttgtatcttacttggacttggaaattctctcataattggtatccatacctctatatttcttttccctagtacactgtataccgggctagcaccaaaatgatcgttccatagtaaaaatctgctccgatggcctctagaatgaaatctttccagccgaccaataattgtgttcagcttttcaatattgtattttagcatggactagtaagcactaaatgatggaatcttgtcttcctccactgcttattgcttcatttaccatcttttcccttctc

SEQ ID NO: 206559 - DNA, 554 bp, Homo sapiens
agatgagacccaaccatctgctctcttcaaaagacacgtatctcatttagcaacacccacaggctcaaagtaaacggttggagaaagatctaccatgcaaattaaaaagagcaggtgttgctatttttatatcagataaacagattttaaaccaataaaaattaaggagattgtataatgataaagcatacaatacaagaagaagacataactatactaaatgtatattcagccgacattggagcactgagagtcataaaacagttctttttgacctacgaagacttcaacaaccacagaataacagtgagagacttcaacaccacactgacagcattagacaggacatcaagggagaaaactaacaaattctggccttaaacttgaaacttgaccaattggattaaaaagacatctacacaacactccacccaacagccatagaatatataatcttctcatctgcatatggaacatattctaagattgaccacatgcccagtcataagggaagtctcaaaacattaaaaaattgaaatcataacaagcacaca

SEQ ID NO: 206560 - DNA, 261 bp, Homo sapiens
gtgaggcccctgcacacctatcaccaccactgatgctccaggacccaagcaggtggtcgcccacaggcataggacaagcacaacctttagagcagaaaggccaagacttggatcctggagccaccaaatgctttactaggtaggtaaccttaggtgagatcatgagagtcttagctttcccagctgtaaaatgcagataatagctacttggcagttcattattgagacgacagcagtagcaacaagcagggccacccactg

SEQ ID NO: 206561 - DNA, 455 bp, Homo sapiens
gagctaaatctgcagatgttagtgagatagtagatgtgacgcttttatttttgttctcgtaattgctaaagaaacgaaaaagtcagatgaaaacagcgcgattctccattagtgcaactgtaaatagatacagtcttttggaaaacaaaagttctttaaaaattcagtctctttgaccatttctgtgaatcaccctaagcaaattggcctaaatgtagaaaatctttagttacaaaatattcatttgattcctgtttataatggaaaatattttaacataaaactcagtaatagtctctgtaatgtgtggtacaccacttgacacccataaatgatatgtttcaaaagaatgtaataatatggagaaatgttaatgatgtaaacctaaatgatgaagtgcagaatgcagttatataattacaactattttaaagtctattcattaaaaatgattg

SEQ ID NO: 206562 - DNA, 272 bp, Homo sapiens
ctagggaatttagaaagccacgtgcaagcctacaacagaacacatgctcataaaagccctatactttaacattgggtcttctcactaaggccctaaacttcaacctagggctgagctctgagctcagtgcaagcttagctaaatgttgaaggagggcactggcacagatccaatctgcgaagactataagaggtattgttctctctcttgctttttgaatgtttgttttattcgttgtttttgtgtttagctgtcaaaaatttttttttaat

SEQ ID NO: 206563 - DNA, 869 bp, Homo sapiens
cctcgatccaggaagccctccaaggcaggaacggcacccagcccaagggttgatgcaggtttgtcactaaaacttgcagaggttaaggctgttgtggccgagcggggttggcgacacagcctgtgggtccccagtggggaggggtctgcagccttggccccccacagaacttctgagcacaaatcatccctggttccactagatgccagggagcatgagtggattgtgaagcttgccagtggctcctggattcaggtgtggactttgttctgggaggaccctcaactggccttgcacaaagactttttgactgggtacactgcgttgcactggatagccaaacatggtgacctcagggcccttcaggacttggtgtctggagcaaagaaggcagggattgtccttgatgtaaacgtgaggtccagttgtggatataccccgctgcaccttgcagccattcacggccaccagggggtcatcaaattgctagtgcaaaggttggcttctcgggtaaatgtcagggacagcagtgggaagaagccatggcagtatctaaccagtaatacctctggggaaatatggcagctgttgggagctcctcggggcaagcccattttccctgtctatcccttagttggaagttcttcccctaccagaaaggccaagagcaaggaaatatctagaagtgtcacccgaaaaacttccttcgctgcactactcaaaagtcagcacaacaagtggaaactggccaaccagtatgagaaattccacagtccaagggaaagagaagagtatagtgactgaggtgggtctctctgtccaacatgcaggcagcactccctcatcctgctcagtgagagaattcaggg

SEQ ID NO: 206564 - DNA, 370 bp, Homo sapiens
ttaagaagtatagctgaccaaagatgtgctggatgactttgacaattgtgttttcttccttgaaggtgttaacaaggatttgagacgctattaatgagattgaaatatgggtgggtgcttggattagtaacatttcagattaattcatttccttgtatgaatagatactatatttcctaggtattgtgctaagtttttgtagtggacaaaacctaccctcagaaagctcaaaataaagacctttttttgatactttatgattttgagagtctatgataaaaggaaagagaatgtgaagaagtaaaacaacatgctttttaacgtttgctggatttttcctttttgaggtagaataaaatttattacaatt

SEQ ID NO: 206565 - DNA, 566 bp, Homo sapiens
gtattttattagttgattagtgggtataaatgtacagttagataaaagaaataaggcctagtgtctgacagatcagtagggtgactatagtttactaaatgctattgtacatttcatttcaaatcgctagaagaaaataatttgaatgtttctagcatacagaaaagacaaatatttaaggtgatagatacccaaagtacacttatttaatctgtacaggaagactccagagtaaagggagggtctcccggcctgactacctcccttctcccaccctatatgtcttctctgaacctgtcacttcccacccctctaaaaaagactgtttaaattctcttaggcctgaccactcacaaccttggggaatcacctaacatctaaccagttccatcttttgaatgggctcaggtgggaaaacaaaggtacccaaatcctgagctttgaccttactctgaggcacagcaccaaggaactgaggggtggaagaggacgttgaccccatctcactttttcagaaaacacaaatactgcaaataaataccacatggaaatcattactaaatacc

SEQ ID NO: 206566 - DNA, 188 bp, Homo sapiens
agaagtgccatttacttttttgacacccagagggataacattgctttggccttggaggctacttactgagaatagctgcataaagtatagaaggctataaagaattgcctggactatcatatctctgtgcagactattatgggagaagcacaaggtgcagagaatctctgcacagcaagaaaaggaga

SEQ ID NO: 206567 - DNA, 370 bp, Homo sapiens
agcacagcggaacccagtaggggaaacagatagcgcagtagggttactcatattttctaatgtggtatttggagatgttatgttagacttaacattaaaactttcccctctcttcaagtgctcaaatgaaagcattttattttaaataaatgtctggggagtgattttgatcatttggcttttctttccacaggctgatattaaatagaagagtatttggcttttattacacagctcgcagttttggtgatctattctaaagtggtagtcaaacctctagctaattaaacagatcagcctagtaattagcctgggctttcttctatcgtcatattgccattattccacaaagatgctgaggcacaaccat

SEQ ID NO: 206568 - DNA, 197 bp, Homo sapiens
tgctcaggaagcaaagcctaagtttcctcttttcctagaaatacagacctatttgtagacctcctgttcttcatcttcagcctgcagatattttgtttttatcttggggaaattctcctcatttttggccatgatactttgtacttgaatcttctcaacctctccaggactttcggaaataaaaggcagaaaactta

SEQ ID NO: 206569 - DNA, 433 bp, Homo sapiens
atcccatgtggacatgtgaactcagtgagaggaggtgctgcggtgagggccacttcttggagatttgggaaaaggagcaggatgtttctggcagtgaggctgggaagggcatccttcatagcagagggaagctgtgagcagagcagaggctgaggacgactccacccaaggggaccggtggggcaggggctgtgccagggcttgacccggagctctgggctgtgtccagttcccttcaaatgagaaagaaggcgccagaggtgcaggggacaggggatgcctgccagccaggccccatctcctctgctgtttagggactcgggttggaatttccacgacactatttgggggaggatgagggagctggtgggaaatgggtttgggggcgcgaggcttgatatcatttcttccgataaagaggcattggctcagc

SEQ ID NO: 206570 - DNA, 281 bp, Homo sapiens
tattcttcttttcctcttaagaataaataatttactgttagaagttcaattaaagaacatgctgagaaagagtaggaccttagaaaaaaataagatggccattcactgaggcccacatttatacgtacctcagaaaattgctcactatctggggtcgctggcacacataccatgtaggaccagaaactggatctcaccaatgtctcagagtgataaaactcaggaatgctaagttatgcaaaacaaacccatatgaaacgaatgctaatggattacttcac

SEQ ID NO: 206571 - DNA, 377 bp, Homo sapiens
tgaatagacattcttcaaagaagtatatgaatgaccaataagcacatgaaaagatgctggacatcattagatactgggaaaatgcgattcaagactgcaatgtgatattgcctaatacctaccagaataggtaaaatagaaaagacaaacattagcaagtattgataaggatgtgtagaagttggaactctcatacattgctggtgggaatgaaaatgttgcatttactttggagaacagtttggtagttcctcaaaaacttaaacacagagttgctatacaactcaacaattccacttctacatatatacccaagagaactgaaaatatatgtccacacaaaagcttgtacaccaatgtcgatagcagcactattt

SEQ ID NO: 206572 - DNA, 247 bp, Homo sapiens
aaaaaaaaaaagagagagatatttatttaggatgtcacaggaagttgttggcagagctcagaagtacacggtgctagacttttaggtccagaagagcagtgactatctggccatctcaaagttgaatctcaagaacctaccatacagctgagcacaaaatagaccatcagtacatactggtttgaggaagaaatattcaaatgaaagactagcaccagaatcaggatgtagctgaactacttaaatc

SEQ ID NO: 206573 - DNA, 937 bp, Homo sapiens
cagggcggccaagcaataaataaaattaatagtatggtcttttccaggtttatatgagggcattaactattcctattgcaatgagatatagatttaattaatccggcaactttacaattccatttattaggagcactatgcggccaaaatttagtggcgagaagaaagaaagggaaccatagtcctcttcctcaagaagaccagccgaagttgtaggcccctaaagcgacttggaggagtgggaaggctggaggggaaagtttgggctaagggcgctaaaggcggctggggaagtccgcttgctctgaacaattccctcttcttttgcttggttccccaagacctttcgcgcctgcaaacgcagtctccaagtctggggcgagccgggatcgggaagggaggcgccgaggcaagagcctgcaggagggcggtggaaagtaaagccttgctggttaattaactttaagcctggggtggtttcttccccctcccccgaaaaaaaaatgtggatctcgctgagacacaagtaaaatcaaattaaacactccaggagaatatgcaccactagaaacgtagtaattacatctccaaggcgatctcgccctagaaagcctttccagggcctggcgctgaaaccctcggctgcggtgctcacccgggcgcgccccgccggccttcggggatgaggcagtgaggtttgactgtggatgaagtttagagaaaatccagctgctggtatgcggagaaagacggagcatttaattatacgaaaggaaaatggaaaacggctcctcagcctcgtcgggaagccccggctctgctctcggctgctttttcaaagggacttctacaaccgcggagcggcagaagccactctgccctcagctacagctcatgaaccaagctctcggctaagttcaactctgaaatgttttct

SEQ ID NO: 206574 - DNA, 456 bp, Homo sapiens
gacatgtgagatgtaggatagtgtccagtaaagtcactaatacttagacctgaagtgaaagggagacaagagtgagcaggggagggctggaaggaaaagtaagggtcatcagtatcataataaaacacaaacaaacaaaaaccaagaaagaaaaaaaagcacaagtgctggtggggatgtggagaaattggaatctcatacattgctggtatgaatgcagaatattcagctgctatggaacacagtttgacagctcctcaaagagttcaacagaattaccatacaacccagcaattccaccccaggtatacacccaagtaattacaagcaaggactcaaaaagatacagcagtatttttgacaatagccaaaaggtggagatgactcaagtaaggattgatagatgcatgggtaaacaaattgtggtatatccatacaatggactagtattcagtc

SEQ ID NO: 206575 - DNA, 498 bp, Homo sapiens
tggggaaatgtcaagttctgatcatctatagatgagataatgctgcaagaattctgcggttactaggctttgcataggcttaaagcagtgattctcaagggtgtgaaagggtaaatattagcatcacttaagggtggttttttggtgttttttttttttttttggtctgttttaaatacacataccctgttgccgcttgtaggagatataagactctcctgaggaaaagcttggtcaggtgtacctggagaaagctcccaggaggttctaataccttcccactgccacttttacctctttaagaatacaaagtacttcccagccgcttccatgtccccattcctttgacttcggctgaaaacagctactctttccttcaatcagctaatttgacgttttacttcccgaggaatcatttgtgtcctgtcagcctatggcatgagaactactcctgcacttttcttaacccctgcattcagaactaaaatcatacatttg

SEQ ID NO: 206576 - DNA, 416 bp, Homo sapiens
cttatttaaatgcattttttttttccagtttagactagataagaacaagctcactctctaacgccagattaattccaccctgtgagtatgccctttacccaagacactttgaggagagagacagggtgttgagcgggaaggcccactgacctcgctggcttgctagctcactcacaggccacacaagaaattctggctgagcctctcagacacactcaaggtcaccatgggaagtcacccaacagttttccctatacacattctggatcagaatcccaagaaatccaggacaagttcccagttaggaaagttccatcaggacggcaaatcctttctttggccttgacgtaggaaggagtggaacctcttgcggaaaacacacaaaaaacacaccttcagaaaggggcaatttccta

SEQ ID NO: 206577 - DNA, 611 bp, Homo sapiens
cagcactcaaaggcatagtgtgaatgaccttgagaatcacctgaagcctgtgctgctaacccaaggtttcaagaaggatgtgacaaacatactgtcctagttagtgctgtcctcgatttccagcgttgagaaggttggttgtcatttgaaagaatctcttctctctgcctgatttatggcttcttgtgctagagctggctgtgctgaggtggataccctgaggagggagatttattggtaggcattgcactgtctttaggtgctgacatgttttcccagccttgcccaaggcagacaagaattgtgagtgcaataataaacctcttgagttccatcaacagctcataggcagaagtgcccttagttggtccctgcccttgcatgaacctgagagggttttttggtgatcgacctctacacctcacttgtctaccccagttccgccgtggtcatgacggcgcagttgtgaatcttgccagctcctcagccccatgcctgcctgaacagcaactcagggcagtagacagtggagaaagcggaagttggctcacccagcctgaagatctttgagcaccagagaacccacgcatcctgcccagacttccccattt

SEQ ID NO: 206578 - DNA, 160 bp, Homo sapiens
tgtactgccttttgtctatgtctggaaatagctgttttgtgtgtttgatccagcttctcagttgtttagcaggagaaagtaactcctgtttcagttatttctccataagtggaagcagagtctgaatatattgtgaaaataaagccagtagggctgggcg

SEQ ID NO: 206579 - DNA, 789 bp, Homo sapiens
ataaaaaataaaaaatcccagaatagtgctttggccaggactttgggccacatgtgagatatttacatttccccagctcatatcaggtactcaccctgagctaatcagttaggcccttggaaagtagggtcaaaattgtgaaatgaacctttatgtaaagtccacatcaccccacctccacttatctttttggacacaaaccattgcacacaaaaaattgtgcccattaattagaatgattagatgactgcttcaaaatagagagactcctggctctttattgtactcttgtgacaaaagtgacgtgcaatattgagatccagtcattacttcatccttcatctatgtttggatcggtggacaagtgcctgcctgttttttagtggcaatattaaatagtaagtaaaagttctgggaagagattttttttacaagaagcttgcaagaggatacattgagtttattgcaatatatgaaatttaccttttggggaaaggtaaattcaaatgaaaagtgtgacttattttaaaagaacagtcataaaaaacttgccagtcccgtttgtttcccactatcagggaaaatagttaattgttaattgttatcctatgataagttttgaggggtttcaggcctacaaaggggaatttgaccatgggtcacacagagcacctcacctttgtattcttggtacatgacacagaatgagttcagcaagcagttagtgtgttaaatgaagcttaatgaaggatattctgatcttctcttgtttgtgcctgacctctccaa

SEQ ID NO: 206580 - DNA, 411 bp, Homo sapiens
aatgccagcttaaggtagaatttcaccacgtaaaactatatttgaaatatatgacttttgaacaaagatctaaagtaatttccttcgccagaacttaacaaaggtggatgtgtggaaatggaagtggcaccagatttagggacttggacacctaatttttctcaggaatgggggtggacagtggtgagtgaagaggcaaaagacagactcaaggaaagtgtgggcggggagacaacagaacccacatgggaattatggaattgaataattccctagccacacctggcccaggaaattttgaagttcttacaggtacagggttgggaaattcatcatttgcacataattcctggagacttgcttcatatcaccagcttctactttgtccccagagacatttctacttctact

SEQ ID NO: 206581 - DNA, 366 bp, Homo sapiens
ggtactttaggttaaggaagggttactgaagaggtggtggcctgagctatttgagaagcccaataaaatttaggcagataaatgaaggaggaggaggagtcaactcaaagcaagcagtgtatattacatgattttacagtgtaaggccagtaatgattgtggttattgcaaattaagaaacactcaataatgtagaaaacagccataatatgcagtgagttaactattgtactcacttaaccactcatttttacttgatcctatggaatgactgggcccagtatactcatcagcaagacttttggcatatatttttatataattggttgaatttttaagaaaagtatgaagggaacaagtaaatgt

SEQ ID NO: 206582 - DNA, 788 bp, Homo sapiens
agagtttaaattaatcttacaccttcttttgagggagtatgttcaagaagagtttaggagtttccctgtagctttattacttgttatttcctaattgtcccagtttcccaattcatgtaagaataataaataaaaatacaaatataaataaatgtgcagagtatctgcataagaaagaaataatataacttattttcttttgtccttagcactgactctgatgattactggaatcactggaaatgtgaccagtatgttagttcttttcatgcctggaacaaggctttgtactgttggaagaatacaggtttcagataaggaaagatctacacaagcacttagttttgaaacttttctgctcccatgtgtcttgaccccttactcataaccaagagaaagggagtttatatctcctctgatgcatttgtaaatgagaaagaatatatttccaggtttcaaagtttatattgctgtagttaggaagagaatagaatgagttgcaagagtggtggcaaatatcctcaaggatgctttggaggtaacaggtacaaccacattgaaggaaatttcatggtttggtgaggatttcaaattagaattagcaattttgcaaaatgtcatagtacttagagtaaaataggacacctttctttaagaatgttgaatattggcccccactctcttctggcttgtagggtttctgccgagagatctgctgttagtctgatgggcttccctttgagggtaacccaacctttctttctggctgcccttaacatttttttcct

SEQ ID NO: 206583 - DNA, 471 bp, Homo sapiens
tgtgactttgggaaagaagtatattgcatgtaatgtttccaagaattagttactgtgtgccagaggagtgggcacataagctggatcagtggctttaatgggcagcagttggctgcaagagaaatttgcagtttcaccagtcttaatgctgggcaacccatatattaaataatgtttggtacacttggatatcttttattgggaattaagcccccaaagcagctttctgtaactattaaagtctgataatgctaagctcttcttcaggcactggagaagtttggcagtctctggaataaggaatttgtttggctttggcactgatagccaaaatgccacttctagtcactttaaatgttaccaagatttcagtctcattgccgattattgaaaggtctgtggcaaataagatttcagtgctgtggtgaagcaatctgtgtgtgctttaaaggtaaataaaaatacagcaca

SEQ ID NO: 206584 - DNA, 414 bp, Homo sapiens
cctgctcagcttcccaggtagctgggattacaggcatgccccaccacaccctattagtttttgtatttttagtagagatagggtttcaccatgttggccaggctggtccagaacccctgacctcaggtgatccatccgcctcggcctcccaaagtgctgggattacagatgtgagccactgtgcccggctgtttttttgtttttaaatagagatggggtcccactgtgtggctcaggctggtctcgtaactcctgggctcaagtgatcctcctgcctcgacctcccaatgtgctgggattataggcatgagccactgcacccagctactttatgggttttattgtaaaactttctcatgaaagcactaagctgtttatgtttggatctgtaacaaggtcccccccacccccccc

SEQ ID NO: 206585 - DNA, 293 bp, Homo sapiens
aggccattgtaaaagcttattttgagtgatttgggagcttacatggtcagggtttaagcaattaaattactaaccaaaatcccatttactaacatattgcatgagggacttgatgaataatctcgtctttagcatataactcaaacattaataacagaaggaaatatgcctcagttcaagccatgggctttgatttttaattctaaacccattttatttttttcagactcaaatatctattaaaagtgactattttccatatgtttttccttttgtattgcataaaacttaat

SEQ ID NO: 206586 - DNA, 903 bp, Homo sapiens
caaaatgctaccaccttagggaataaatcattaagtgatctgtattttattccccatatttctttttttttgagatggagtctcactctgtcaccaggctggctggagtacagtggcacgacctcggctaacttcaacctctgcctcctgggttcaagcgattctcttgcctcagccttctgagtagctggggttacaggcacgtgccattacgcccggctaattttgtatttttcatagagatggggtttcaccatgttggtcaagctggtctcgatctcctgacctcagatgatccacctgtcttgggctcccaaagtgctgggattataggcgtgagtcaccacgcctgtcgggcttcttgtaaagggtcgtttaattatttttttgagctagggtcttgctctgttgcccaggctggagtgcagttgcgcaatcatggctcactacaacctcaacctcctaggctcaattgatccacctgcctcagcctctcaagtattttagttttctatttaaggaaggaaatcttgctattacttttctttgtacctgtgtttatataacttaattcataaaacacgggcttagcaacaaatagagattagatctgtgtcataggaaaatgacaaattattgcctatcttggacctgcgtggtgacttgcattcacaagaaaccatagatgctaaatccacaaatacctttatcttatggcatggcactaaagacttaaaggaaagcacttgatgaaagataatagaaaatgttcatggttgcaaaatcagatattttatagtcgttccgtttgagtacttcatgtgtaacaaaaacttacctgcaaaaatagtttataaaaggatgaaaactgcagagaaagcctttttatgacacagaagggag

SEQ ID NO: 206587 - DNA, 507 bp, Homo sapiens
catctagattatgcaatttgttggcatacaaatgttcataatactatcttaaaattctttttatttccgtagaatcagcaataatgtccccattttcacttctgattttagtaatttgactcttctctctctgtttcttcttacatgtaactaaagttttatcaattttgttgattttctgaagacccaacttttgatttcattgattttctctgtggtttttctattctctaatttttaatctctgctctaatgtttatgttttctgttacttgctttgggttctttttttctttttctgctttcttgagttgtaaagttaggttgttgccttgagatttttcttattttttattataagtatttatagctacaaatttccctctttgcactgctttcactgtatcttatatgtttttggtatgttgtatttttgttttcatttatctctaattattttctaattttcatcctgatttctgccttgatccattggttaagagagtg

SEQ ID NO: 206588 - DNA, 1285 bp, Homo sapiens
gagaaaaaaactgaagaaagagaaatcataagatacaacatataattagaacattaatagattttattgcagtttttaaaaaggtgggggtttttgtttgtttttgtttttgtttttgagacagagtttcgcccttattgcccagactggagtgcaatggcgcgatcttggctcactgcaacctccacctcctgggttcaagcaattctcctgcctcagcctccagagtagctgggattacaggcatgcgccaccatgccctgctaatttcgtacttttagtagagatggggtttctccatgttggttaggtggctggtcttgaactcctaacatcaggtgatctgtccacttcagcctcccaaagtcctgggattacaggcatcagccaccactccgggcacaataactcatctttaaagagctctgagagcaatatgggtggccaaagcactcaggtggaaccagaagtcatcactaagcaaccgtggctgctttgtttgtccctaacaatagccaagcagatgttgtagctcctctgtctcccaccctggccccatgacattgaggtggggtcgttccagctcagatgtaaaaaggcaagtgtataagtatttgggggtgtggcaggaggcagccgtgtcttgtgtatgaagggagtccctgcccacttctccccatttctggaggtaaagattcccatgaaaggtactaggagcattgggcccctaaaccccagaacccatgagtatgttattttagatggtgaaagggattttgcagatatgactaaggattttgaagtggggaagtcatgcaggattatcgacatggaccccatgtaatcacaagatccttctgagagggatacaggagagtcagggtcagtggcaggggatgtgctggcagaggcaagagactggggagatccgaagaaggggtctcgagccaagaaatgcaggcagtctcaaggagctggtaatggctgggcaatggattttcccctgggacagggatggagagacagcagtgatttcagttctcactcttgaaccttctctcttcttcgttcccaaacatgagtccaccagccccattaccactcaactgactgggagccacatcaaccataactcttatgatttaccagttgtaatacttaagcattttctgtggcctggcaatttatttatttattcatttatttttgagacggtctcaccctgtcactcaggctggagtgcagtggtgcagtcgtggcccaacgcagcctcgaactcctgggc

SEQ ID NO: 206589 - DNA, 551 bp, Homo sapiens
cctacttggcattgtgcctctttcttggttgtaggaggggccaaatgtagcaacttatccttcaccttagaaggaagatcttgactggcaccatgccactggacccctagaaattttactgaggtagaagttccctgaattttagttaaacttatttcccatcctctggcatgcaaatgtctcaccaataagtccagtgtgtttgaaagccaccattataggtataaagcagcttgtataatcagtgatgatcattgatgaattgtccatgtattcttttgaatttggaaagatagaatgatgttggctcacaatgtaaaatgtagcttgatcattttatttcctagaaatgataaaaagctgtgccatttctggaaattagaaaaataaaagattaatcataaaagttcaggatttttgtatttcagcctgttctcataagcacagaatgatgtgtgccctttcctattagattttccaagggtgtttctgatttgcaaagtaagaagaattgccttgtatctagctaattaacttggagtactaatgcc

SEQ ID NO: 206590 - DNA, 278 bp, Homo sapiens
aaacccagcttctcgcctccttatccccagaaaaaccttgaatcagtgggatcatgtactacaaatggtcacagaaaaaatcactctgaggagcggggctgttcacaggctttatactttagaaggaaaacttgttgagagtggagcagagttggagaatgggcagttttatgtggctgttggcagagataagtttaagaaactgccttacagtgagttactttttgacaagtcaacgatgagaaggccttttgggtaagtcttactccttaccactc

SEQ ID NO: 206591 - DNA, 410 bp, Homo sapiens
tcgagtccgtaccgtaatcgatcaactgacacacacccacacacacacacacacacacacacacacacatatatggtatcttcatcatgggatgttgcaaagatgcaatgagctaacatatttaaaatgcttatggccgggcctgggggctcatgcctgtagtctcagcactttggaaggcaggtggatcgcttgagcacaggagtttgagaccaagctgggcaacatggctatatttgtgtctcttgtgtagagacaacatttcgccgtgtcgcccaggagttgtctccaacttctgagctcaagcaaggtgcctgcctcagcctctcaaagtcgtggtaatacgggcgtgatcccaagtgcaagtgtccagcagatgcattcttatcacttaagttgcgtgacctaga

SEQ ID NO: 206592 - DNA, 317 bp, Homo sapiens
ggaagtataaatgataaagatttttagatctcagtactcagaattttatttaacactttcataaatcaactgaagggataatcctaaattcttggaaacattgaaatgccaaatcaagagaccacaggacaacttagggttaaacaaaatagttgaaaaaagtagctagttggtttggaacatggcctaaggaaaagtaatatttagataaacacattttttcttttttctctcctagctttaaagtataattaaagaactgtatgtatttacagtgtacaatgtgatgttttgatgtatgtatacatcatgaaatg

SEQ ID NO: 206593 - DNA, 481 bp, Homo sapiens
agattattaaggaaatctaagtgaaaggtgtatagtaacaaactttgtgtagggtcttattgttctaatcagtttcaacacttgctgagaccattttggaaatcgtgtagaaagtaaattatgctgttttagcaggggggaaagcctcactcttcactctaagtagcctagcattcaaaagaattcctttttcagggtgggcgctgtggctcacgcctgtaatcccgacactttgggaggccaaggcgggtgcatcacttgaggccaggagttctagaacagcctggccaatatggtgaaaccccgtctctactaaaaatacaaaaattagccgggggtggtggtgtgctcctgtaatcccagctacttgggagactgaggcacgagaatcacttaaacctgggaggcaaaggctgcagtgagccaagatcatgccactgcactccagcctgggcaatagagcaagattcagtctcaaaaa

SEQ ID NO: 206594 - DNA, 432 bp, Homo sapiens
gccagaaccttttagtcaaaggagcggcatacaactccatgttgtggctgattagggaaatctcacctaattagaagatatgtcctacttagaaataaaagtatgccaagagaaacttactctaagaatatgaggctgggtgcagtggctcacgtctgtaatctcaacattttgagaggtggaggcaggcagattgcttgagctcaggagttcgagaccagcctgggcaacataaggagacccccatctctacgaaaaatacaaaaaattatctgggtgtggtggtgtgtgcctgtggtcccaacaaccgtgctcccaacaggaggatcacctgtgtccaggaagttgaggctgcagtgagccgtgatcatgccactgaactctagtctgggtgacagcgtgaggccctgtctcaaaagtaaaaattcaaaa

SEQ ID NO: 206595 - DNA, 548 bp, Homo sapiens
atgggagacagatttcacattcacaatttagttcaggaaaatcactaaataagcaaaacaacaataacaacaaatcttgtggggaaagtcagatttcagagttgctaccgtatgttatgtaaaaggttcagtattcaacaaaaacatgagagacattcagagaagcaaaatgtgatctgtgtgtagtaaaaaagtggtcagtaggaactatctctgggtgtctgtcctcagaagtaggatttagcctaaagagtctacagagcagctatttaaatttattcagaaatcaaaaggaaaccatgtttaaagaattgaagcaaagactcggtgaatacagaatctcagtaaagagatataaattatttacagaaaggaaaagaaagaaccaaatggaaattctagaggtaaaaagtacaataactgaactgaaagtgctctagagggactcaacagatttgacgtggcagaagaaagaataagtgaacttataagttcttttataagtaccacttataagaaggtaaagcaaatgaaataattcaatctaa

SEQ ID NO: 206596 - DNA, 666 bp, Homo sapiens
taggaaggcctttgaaatgggaagaaggattaccactgagacaaattaaagggaaagagggatatgataaaggcaagcctttcagacttcacaattatatataggattggctccatttcgcttcagtttccatggccatgtaggccataagagggatatttatatccctgcacatactatctcagaagcatgaccattaagccatttggttactaatatgtctaacctcattttaaggcgtatctttcttagaaatgtcattgagatatcactgaacagaaaaatttcaaaagcataatatgtggtccatctcaaaatggccaaattaatctcttttattaagaagccagtgtttatgaaaaaaaatcctgccttaggaaccaggtgagctagttttcagacctaactctatttctaaacatggaatcttgagcagtttcttcaggccagagttttctcatccctccaaataaatgagggctctggctatggtgagtttctgctttaaaaattctgtgattctattcagtgttcaaatcagtttgtaaagtggataaataattaagtgttgattgtacgaataatctattagaatctgaaatacatgactacaaaaacaaatcatgtaaatagaatgtttaaaaataaaaatctcactgaaaacct

SEQ ID NO: 206597 - DNA, 124 bp, Homo sapiens
tgggcaaatccaccctggaggccccaattccagcttctcgtgtgacttttccacaattctctagctccacactgaggccccaaggcttatccccaccctccctgccctcccaggaatgaccaag

SEQ ID NO: 206598 - DNA, 348 bp, Homo sapiens
gtattttattgtgcattaattatacttcaattaaaaacaaccaggaatgtggacattcctcctcctgtctcacctttaacaacatgatcaacagctaacccatacagagcactaaccatgtgctaggcactattcgaagcactgatgtggattacacgcagttactccttacaacagcccttggtggagacagtatgattatctccactgcacagaggaggaaatcaaggcacagagaggtgaagccatctgcccacaggcacacagctagtatgtgggaaggtagagatttgaacccaggccacttggctctctaggacctatcaaatggcggcttcccatattgcc

SEQ ID NO: 206599 - DNA, 335 bp, Homo sapiens
tctctccctgggattgtggccaccgaggtactaccagaactatcgtttgaggtactaccagaactgtctgagacctgttctttttgctcctagaatgcattgtccatctttcctggtgtcacagatagcctgaagtctggcttggccccctgagcctggtattctctcttccaggcctcttgctatggaattactttatccctctggcaaagtcgtcaatctgtatcttaagttacctttcccgtactactttagagcacacagaagtttcctaaggtacatttcctaaatgtaccttcttccatggcacatgagaaataagggagatgccagag

SEQ ID NO: 206600 - DNA, 254 bp, Homo sapiens
tcatccccaataaaagccagtatccaatactaatgttgccagtggtgcaaactgatgctcgatgatggtagaagtgatgacctcaccagacccgttcaggagaagaggtcttgagcactgtttctgacttacgcttgattctttagccacctcaagtattttattagccaacgcattatctttttaatacattactttctctttaaagcagacagagttaatttcgaatgtttgaaagactcctggtattttca

SEQ ID NO: 206601 - DNA, 403 bp, Homo sapiens
tgcactcattcaagaagatagaattacaagagtagagagagcatgaatttgtggaggtgtctttggtgaaagtggtgcttgtatctcaagtcctccagagaaggaagagtgggaggggccaaacctcctttacctcaagcaaatgggttcagctctagccctggaagagcctgatataacctgtaatcccagcactttggcctaaaaaaatttccttattgggggaaaaaaaaaccagatcatcaaggacctgaggaacaataccaaaatgtctaatattcaggacattagagtcccagaaggtgaggagaaagagtgtactgaaatactgaaagaaatcatcgaagcaaaccctcacaagtttgacaaaagacataaaccaacagattcaagaagctcaagg

SEQ ID NO: 206602 - DNA, 400 bp, Homo sapiens
cagtgtaagttgaagaaggtaaaatctggatgtagtttctaaactctgcttggcagttttcatatttaagccactagaagaaaaaaattgggagggaagctgagaagaatttactgaaagaaaaaaatacttgggagggaaattggcaagaagtatgaaaaagcttgggagggaagtaagcaaataaatgagttaatgactgttctggaaaataaactctatcatgcagatatcacatgactgattaaatttgaatttgacctcctgctttccaggtctggtaaaaactaacctgtaagaacttgaaacttagcctttgaatggtcaatccaccactgtaggagaatttatgaatgttcagttgagagaactgaaaataaagaagtaccataggaattaa

SEQ ID NO: 206603 - DNA, 359 bp, Homo sapiens
ctaagagcttgatggagatgctcaaggagattaaagttgaaccactgtaggtgccatgaaggacattcacagtttttgggaggaggtaaaatatcaacattaacagaagtttggaagaagttgattcaaacacaattaagtatttttaatgaaattatgcacattattttcttagacaaaatgctactgcacacttactagactatagtatagtataaacataacttttatatgcactagaaaatttaaaaatttgtgtgactgtctttgtggtggtctggaactgaacccacagtatctccgaggtatgcctgtattcttgttcttgtctaacttctatacaatatcctcagagatct

SEQ ID NO: 206604 - DNA, 236 bp, Homo sapiens
tatattaagtgatgagtttttattccattaagtagctttttattgtcttgtatttctgataaatttaaaattgacatagaagtaataaatctttgagatggtgcttaccaaaatatgattttcctcatcccttacagtaatccttatttggaatctaggatgggcctaaggtatctaggtttgaaaatcaccactttagagtactagaatggaatcctaaacaatctcagatttaa

SEQ ID NO: 206605 - DNA, 221 bp, Homo sapiens
aagcatagagctaggcagtaacatatttgaagagaaaaacaagaacactgaagtttacagagtgctgataagtgatctccagattatatggtcttagactcgatttttcttaatttaaaattgaatttacacctcactttatttgaaaagttatgtgtcatgcacgaatgaaataatgtgcagacagagttcactttatatcattagtggtgtcttggaaa

SEQ ID NO: 206606 - DNA, 591 bp, Homo sapiens
ccccatttttcttgtcctaaaacgagacaagccttacaagttagttcaggatctgcgccttatcaaccaaattgttttgcctatccaccccgtggtgccaaacccatatactctcctatcctcaatacctccctctactacccattattctgttctggatctcagacatgctttctttactattgctttgcacccttcatcccagcctctctttgccttcacttagactgaccctgacacccattaggctcaacaaattacctgggctgcactgccacaaggcttcacagacagcccccattacttcagtgaagcccaaatttcatcctcatctgttagtcatactcccgttcaccgttctcaactactcatacatgccctgctcttctttacactgccggtttacactgtttctccaagacatcacagctgatatctcctggtgctatccccaaactggccactctaaactcttgaagtaaataaataatctttgctggcaggactctgctgaatctccttaggcactctctaatcagatatcctgagtcgtcccaattcttagaccttttatacctgtttttctccttc

SEQ ID NO: 206607 - DNA, 217 bp, Homo sapiens
gagatgtggatgagcaccattgacttagcaatggatatgcggggtgattaatgtagctggtatttgtgttaacccggaactggagcagaaattttcaatgcagtttaatagaattgcttatgaattgaagaaattatgaatcattagttattcagcattctcttatgcagggggcagggatgtggtttctctgaaggcgttcagctttaagttggag

SEQ ID NO: 206608 - DNA, 389 bp, Homo sapiens
caaatattgatggagcacctcctcggtgccaggcgctgctgcagcctctaggaaatcaaccgtggaaacacacggaccctgccctcccggcgccagtgttctggtggtcaggaggtgaagaaaaccagcaagaaccagcacaggaatccgacggtggcagcgccgagagaaacaagcttggaggggaaggagagctacagaggctgcatggatgtgatggttggagtggaagctgacattgtgggccaggagaccctgggagtataggccaagatgaaaagagcctcaatccagagcgttctgtgaagcagtcaccacggccaccctgggccatcagcttctggacttttacaacatagaaattaaatttccattgaatttgttggagt

SEQ ID NO: 206609 - DNA, 239 bp, Homo sapiens
gaagttcaaagaaggagataagtctaatagtctgtattaaactgacacaataaaaacaaagggaaacttgtattgattgattgagtgattatcaacaggcccattaggctagtgtcttcccaagaacctgacatttaaaatcaaaaacaggacaggcctaattttaaattctgcaatgagggaatttaatttaaatgtgagtgagaacagaggtgcatatatcaacccaatttagtaca

SEQ ID NO: 206610 - DNA, 290 bp, Homo sapiens
tcaaggagaggcagctgtcagttcttcctgaggttagatgtccaaattaagcagactctttgtgcttcagtgatactaccttctactctagaattttgtaaaaatacgtatgcgaacctttttggggctccaggcagtgcttggtgtccaggcgaaaatgtgtgaataagcaagcactcgtgtgtgttgggaaaacaaattatccctaaatgctgtcattttctcttaacaccagctgcgatgatgtggaattgaggtacaattaaaacccatgaaatgttctgcaagtt

SEQ ID NO: 206611 - DNA, 133 bp, Homo sapiens
aatcttctcactatctctcaataaagttgttggcattgggccaaagggattcataaaagcaactcacagagggccaaggaacaccagtatggtttcaggcatgtggttctttgaggatctggctgagtatagg

SEQ ID NO: 206612 - DNA, 181 bp, Homo sapiens
gtttctgtgacaacccataccatttcccccaacagaatacatctcacctttattaaaataactgctttgtcttccccactaaagagtatgttctatggagctaggaagcacgtgctcctgtaagtccagggcttggtatgatgcctggcacatcacaggtctcaataaatactgatcaaat

SEQ ID NO: 206613 - DNA, 481 bp, Homo sapiens
cacaccacctgagtctggagtttgagagcagcatgaccaacatggagaaaccccgtctctactaaaaatacaaaattagccaggtgtggtggcgcatgcctgtaatcccagctactcgggaggctgaggcaggatctggtgaaagtttggaggtggatggaggtgagggtaccttctagggctctgacttggtggaatggatggggctctttatggagttcaggatcttaggaggggagagaggagaaggcagggaattcttttctgcttgtttagttgcaagtgttttgttgacagtacggtacaccaaacataaggtcgggggtgagaatagagggagagagacttgagaggcttcagaaatgcacggtgcttctaatcatgaggtcacccaacgagaggctggggagagaggcgcagtaagccagggtggagcgctggagaagccgatgtttaggaggcaggtgggcaggaagaagct

SEQ ID NO: 206614 - DNA, 465 bp, Homo sapiens
tgaaccaaaggcaaccagttaattttgaggtgatcattgagcacatacttgccctcaggtctgtcccaggctgggaattatgggaaatacagagtatctgtaataccaaaatgtaagttctgtgagagcaggggtagtgttggttttacttactgtgaatctgtattaaccaaaacagtgcctggcatataccaggtactcaataggtagttgaatcaataagtaaaacatgccgtcagatattatacagtctttttgtggatcaagtctaacagctatttaaaaatgagcaaccactataaagtaatattaattcacatgtgttttcttattgtaactgacactgcaatagaagtttactgcaggagatagtgagggcagcttcaatcaaagaaagttatataggggtgttgggcatggtggctcacacctgtaatcccagcactttgggaggctgagatgggc

SEQ ID NO: 206615 - DNA, 559 bp, Homo sapiens
aaagagctgtcagccagttactacagacactcaatgcagacaccttcagagtattgggaaaagacttgccttctgccagaacttaacccaaatacacacagagagcaccatgaagccctggattcttctactcgtcatgttcatctctggagttgtgatgcttctgcctgtgctgggaagcttctggaacaaagatccctttctagatatgataagagaaactgagcagtgctgggtacagcctccatataagtactgtgagaaaaggtgtactaaaataatgacttgtgtacgtccaaatcatacatgctgctggacctactgtggaaacatctgcttagacaacgaagagccccttaaatcaatgctaaacccctagattctattggccgatcactactgtgggctgaaggatgaccatctggtctaagaagagtgctgcctacttccttcttgggacacccactggctctagctggtaacctttctgctatttccttgacctctttaccctgaagcttttgtcaaataaactgctacatcaacctgaaaaaatgca

SEQ ID NO: 206616 - DNA, 573 bp, Homo sapiens
ggctcaaacctatcacagaatgtgcagggacccatcaaaaaccatactggaaacactgccctttgagaagttgttggaagaataggatcataatatttccaaatttcaaggcagaaaatgaagacaagagagatgacttctttctcccaaggccacatattaatctccaaggccacataataatctatgggctatacttttgctccctgcatctctttcctgtgttccaggcatcttgaggctcccagaggtcatgacacttacttagagccagataggactgtgccctccagatgacactggaccatcttgctccttttgagtgagctggtctcaggagagagtttactaaattgagccccattttagttctcaagtgaggctttttgcagttgaatcaagggtgaagggttttcagccacaagtaggtatgtttgctcctctgttgtaaaagcccatgattgttttttacaatgtagagtttgttacccaacaagtacagtagcccagccctgcaatctgaatcctcacatcctgcgtgttgtaaaataggaaaccaaatacaggggaact

SEQ ID NO: 206617 - DNA, 473 bp, Homo sapiens
ggctggggggagagggaattagtgtttagtagatatagtttcagtttgggaaaatgaaatacttctagagatctgttgcttaacaatgtaaatatatttaacactaccgaactctacacttaatggctaagacagtaaatttaatgttgtatttttttacaacaaaaaaaattgaacatgtgaaatgtagatgactttgtctaatattatttgtaattttctctaggaagaacatagaaatactgtaaaataagtgtgatgaatgtgtgacaatactcttttttctaaatatcatatgacaactattgaggaaagaaaaagatataccattctatttaaagtcaggaaaagccttaagggatacacattatttatagaatacaatggaagtcatttgcagatatttcaaatcaactgccaattataatatcaaacaacttataaaacctagggcatggtgccataggcctgtc

SEQ ID NO: 206618 - DNA, 470 bp, Homo sapiens
tcactagtgtcccggcagtagcatttcttgagcgctcgctctgtgccaggtgctggcccaagcccttcgtgtgcatccttttgacaaagcagtgctgtgagcacagggctcttaaccccattttacagatgaggagactgagagaggcaggcatccagacaagattgcatgcttgacgcctcctccaggcagatgcaggctccaggagcttgagcatagccatggtatgtggctggtatgtcaggtggagctggagtcttttgtggggactgttgctggaggtgggaggggcagggactgggattggagaatgcagaaagcagaaagggaccagatgaggtggctcaatgcctgtcatcccagtactttgggaggtcgaggccagaggatcagttgagcccaggagtttgagaccaacctgggcaacagggtgaaaccccatctctacaaataataaaaaattattcaga

SEQ ID NO: 206619 - DNA, 497 bp, Homo sapiens
agcagttaccatatggcccagcagtttcattcctagagagattatacacacacgagagaacagaaaacatatggccacacaaacatttatacacaaatgttcgtatcagtgttacagtagctaagcagtgaaaacaagtgtccatccactgatgaatggataggcaaaatgtgatatgtccatatgagggaacatcattcagcaataaaaagtaatgaacaggctgggcctacgtggtggctcacgcctgtaatcccagcactttgggaggccaaggcaggtagatgacttgagttccagaccagcagcctgcccaacatggtgaaacccccaactctaccaaaaatagaaaaatgaagtgtggtgctacatgcttgctatcccagctacttcggagggtaaggcaggaggatcacttgaacccaggcagcagaggttgcagtgagctgagactgcaccaccgcgctccagcctgggcgacagagggagaccatctc

SEQ ID NO: 206620 - DNA, 1393 bp, Homo sapiens
cgtggtggtgggtgcctgtaatcccagctgctcaggaggctgaggcaggagaattgcttgaacccggcaggcggaggttgcagtgagccgagattgcgcactgcactccagcctgggcaacaagagcaaaactccatctcaaaaaaagtgtgaatgtcatgatttagtaagaactgtttaatgtattaatatttatatttcataatctgtaatcatggagtaaaagccaagcaggctgcatcacttgccctgcagtctcctagcacatgaactaatgggcaggcaggagggtgtgcatcatccaccttgcttaccgctgacctccagcacccagacaatccctggcactcagcacaagtaactgctcaataaccagaaacatcaagtgcttgccggaaaaactccatgatgagggagagggaagattacacagaccaaatttaagaatctctgccttaggaactcaggggctatcctgcctgaaccatcgataggggatattttcaagtcacctcaaccactgttgactcactccaggtggacccaccactggcaccttctagtaccacagctcagccttgagtatgtgcttgaactttcgttcgcacttcacattttccacacacaaatataatgtgccaaaatgagccagtcctgctcccaaaaccctgctcacaaaatggaggacgtgagggtgtggacgcatagaatgaatgaaatgaaagatgtcagacaaagcaaattccaaagagaagtgggaaattttctagcctccaagaacagaggacaaaactattaaacatgatacttatctaggtcactagagttcactctaggacacattgttttggaaagaaaagcccttcaccattccccagattaaagcaaattcactaatctgtgttcttactacacaggggcctggctttctcaagtctgggaccctgctgggactcttatttccgacgtcctattgggaggagccctcacatccatcctcctggagatgcccaatgcccccaagtctggtctagatccacccttgcattccaggcttgcacatccaaccgcttcaatgacagcatccatgaggatgtcgacaagctccacatggtcaaggaactaaagtgaccccattttctctaaaacctgtcaaaacagggtgacaacagccctactgagtgttccaagcccccttcaaaggcccacttaccacaggggacagtggctaccaggctggataacccagctgcagaacagtcccaacactgcagaaagtccccctggacagcactgctttggaaattgggtaatacactgtaaaataagtaaggtctagaccagaccttggaagatggaggaaatggagtttggggggatgtctggaagaaga

SEQ ID NO: 206621 - DNA, 384 bp, Homo sapiens
ctcccccacccccacaaaaaaagagttagtataaatacatgtactttgggccaggcatggtggctcatgcttgtaatcccagtgccctgggaggctaaggcaggaggattgcttgaacccaggagtttgggaccagcctgggcaacacggtaagacctcgcctctttaaaaaaaaaaaaaaaaagctttgaggcaggaaaggaaagtgttggggaattggagtggagtaagcaaagagagagtagtagatctcatgagagaagtaggggagtgtaggtcttgtaggaccttgtaagccatggtttgggccttgggttttactgaaaaggagctatgaagccacgagtgggttttgaacaaaggactcatatgacctgagtttgg

SEQ ID NO: 206622 - DNA, 574 bp, Homo sapiens
actaaagaagagatgattcaaagaattaatagtaagtagctttgcatgatcaagatattttagtcttttaattccttatggcatataacatacaattgctctgtttagggcaacttattgttggcgttataacttttgtgtcagttctctctagcgacaaataaactatttaccctagacgaaatagatgtgacttaactatagttgtttgataataaacttctatattcagcatttaattattttatgaagaattttgtcttaagtagaaatgaccccttaggtgcagtggaaaagatgttatttttctctaataacaagttatttcaaatagttgagtgaaattttttttatctttatagaaaccaccagaaatcagggatcaaaatcgatagatgccacattttcaggaataataattctgaaaaataatgttatcagagaaatagcaaggcaaatcacacaaatactgtatagtattttaagatccaacaaaacaactataaaaaatagagttctaaatttcttcatcgttctgaaaaggtagagtttggttatattttctgcaatcaaa

SEQ ID NO: 206623 - DNA, 235 bp, Homo sapiens
aaaagttggtttaatgtggatctcaaagagtttaaagttttccatttaaagatcaaattccttccaatttctgccactttttatttttctccaatgatttcagtgttgttttctttttcatcttaactaaaatttttgtggaaagtttagtctcatacaagctagtccattgttactgaaagtggtacttcttaattatctactttagtctttcaccagaaccatggtaatgtcc

SEQ ID NO: 206624 - DNA, 207 bp, Homo sapiens
ggcggccggcttgaactccgtgcacgcgggcctggagctgcgcccctgcgtcttttcccgacttctgatccgcagaggggcactcggagccccagcctgggtcgcagtgccttcggtctgcgggcctcagtttctcggtccgcgccgggggtttgtgggggcacctggagacatttgggccgttctcgcagtctcgggaagccgcgc

SEQ ID NO: 206625 - DNA, 626 bp, Homo sapiens
atgttttctccagaaacagaggaccccagctcatcagggcattcttgggatgccaagactcaagaccccatgtggtcgcctatctccttcctctgctccctggtttcacctgcgtctcacacaaaaccagaaacgcctcaagcagaaacagagtctgtgaccgaatcatcaattctggtttttttttgttggttttttttttttcctcttggaacagattcgggaggaatctaagtatcattgtaaaattcacaaaatgccaaatccactgagtgagcaacagatgagggaaattgctccacatcccgtggagaggaaatgaacgggactggggaggaagaatgtgctgcgtggtgggaacactgttttgattcctgatgctgcacatctgccacgtttctgcacagagctaccagcccgggcagacactgaggaccctcctcgcgcactggagctgtggcctcggcagctgtgggaatgcggacaggaagcaggggaccctggaggcgagaggaggaggacatcctgcggggatagataaaaaataacggccgggctgtgggaacctcttccgagcaaacatgtgagcccaggaatttcctgagccagagatctgactccggtta

SEQ ID NO: 206626 - DNA, 553 bp, Homo sapiens
ctgtggccttcgcagtgtcctgaagacactagccaagactgtaggaatcaatcacacctcagctctccagcaatagtgttgattcttcatgctgctaaatgaaattaagcattttgtttttggatgttttttctgtccggggcagcatgagaatgaaggcttgaattaaagatttgatgttgcattgttaagtttatgcagaggaaaatacttattaaaatattagattttgcctcatctcagaataaaattccactagaaaaatgaggtgtagttcagctttttaaaataaagttcttgaatgattggttgagccagaaggggagcagcattatgatttaaagttagtaagtatggaatggagaagtaatttagcagtcatgtggcaaatgtcaggagattggatcaaaataaatgtagataaatgtcttatttattctagctacaaattggccagaagcgttttctgtctgactccaaggacacagaagggctatcttttctagtgaccatagttgtacatttttagtcttttgttttcaaattgtcatag

SEQ ID NO: 206627 - DNA, 515 bp, Homo sapiens
gaaaccccatctttacgaaaaatacaaaacttagcctggcgtgatggcgcatgcctgcagtcctagctacctgggaagctgaggcacaagaatcgcttcaacctggggggtggaaattgtaataagccgggattgcatcactgcactccagcctgggcgacagagcaagactctgtcgatagatagatagatagatagatagatggatggatggatggatggatggatggatggatggatggatagatagataaagatatagagagatagatagcaaagagtttacttagataaaattgggtgttgataactaagtccctgcacagttacagcccatctgtatggcttgggtgagagtcatttcgtagacccctcacgtactctgtatcctcacctcattccatctgatcagcaagtgtcctctttattgatatggggagagaataagaaaagaacacctttcctaggtacatttctcctttcaaatatttgtgttgatcctctcatcacaaaca

SEQ ID NO: 206628 - DNA, 513 bp, Homo sapiens
ttatcaaataagtttcaatactgaaattagcaagtatatagttaagatatgggaagaaaaaaatgtcagtcaggaatttcctgtaaacagttcccagaacaaagacaaactcttcaagtgtcacaattaaatgggtgcaaaaatcagtacaacatagtaaagttttatatgttaaatatgcccatttattttactttgcaagcatagcagttttattattttggtcttataatgtttcgtctatgaaacgatatagtcagcagactataggaggtttatttaaatgtttttatttaaataagtcaatattcataccttttaaacataaaattttattggtaaataaatttcataaatctgtataaccctgaacattcacctgaaattaattttcaaggatattaaaagttagaaactgttgaaacataccggacaaagctatctttaagagtaaatttttaaaaattctattactttttcaaatggattggttaaataaaagcaatttttaag

SEQ ID NO: 206629 - DNA, 335 bp, Homo sapiens
agaggcatgtacttgtgttctcagctactgggaaagctgaggtgggaggatctcttccacccagaagtttgaaaccagcctgggcaacgtagtgagacctccatcttaaaaaataattaaaaatacaatgaagagaatacctccatgttcaactttatgttcttctggatgtatgataatgcgggaattttaaggggtagtagttactcattgaagctttgttgccatttaagtttttacctttgctgtgggaatggtactcttagaacatgcacattattttgaaaaggaagtataaactagtgaatatcaaaggggaaaaattttgttaacca

SEQ ID NO: 206630 - DNA, 284 bp, Homo sapiens
tgacccagaggatccggctatacattacctgggcaacgtagtgagacctccatcttaaaaaataattaaaaatacaatgaagagaatacctccatgttcaactttatgttcttctggatgtatgataatgcgggaattttaaggggtagtagttactcattgaagctttgttgccatttaagtttttacctttgctgtgggaatggtactcttagaacatgcacattattttgaaaaggaagtataaactagtgaatatcaaaggggaaaaattttgttaacca

SEQ ID NO: 206631 - DNA, 504 bp, Homo sapiens
ctgcttgtgcttttggtgtcatagctaagaaaccatgacctaattcacagtcacagagatttacatttatgtttaattctaagagttttacagttttagctcttaaagttaggtctttgatccattttgagttaatttttatatatggtgtgaggtaggggtccagctccattcttttgtctgtgaatatccagttgtctgagaaccaattgttgaaaagactcctgctttccccattcaatcatcttggtttcatttgtattttagtaacattttctgttttgaaagatactctggtttatagagagataacatctgtgaggtcacaccgtggcataagatgctggcaaaatttaccctagactcctcagtaactggcactgggccaattggatatccacatgtaaaaaaaaaaaaatgaatttcaatgcttactgtacaccatatacgaaaatttactctaatgaatcatacatagaaatgtaaggggctgggcgcagtggt

SEQ ID NO: 206632 - DNA, 221 bp, Homo sapiens
caaagaggtgtaccatattattttaatcaattttcccagcttgtctccctaccaggaatagaaatacccatgtttctcaacaattttgctaggtgacctgatgcactgaatgcaacactaagaaaatctttcttatgtgtgggatatcttcttccaccgtttttggcacaccccaggttgtcgcagcgttctgatttttaacatgcatcactcacatgtaa

SEQ ID NO: 206633 - DNA, 138 bp, Homo sapiens
aggataaggggggctggccggggagctgccggtgttgccatcctgtaagggatgctaaagtatcaatgagcacttaggcatctctgaaaccatagtgatatggagaaagttgtgtttgccggaactcctgcagagcac

SEQ ID NO: 206634 - DNA, 747 bp, Homo sapiens
tttctcttggctcataaaatatgggggtagcaggaggaaagggaagagtatattaagagcctatatctgagaggtacgttcagtttttcctcaaaagtatctggtggttggactagtaatttattcatttattgagaacctattaaattacagaaaatacttagtaaagagcggtgagaaagatagaaactatccctgtcctttacctggattgaaatctaaagtggatatttgtacaataaactcacaaactaaagaaagaaacgtaagtctgaaggtcacgtttttcttttaaccggcttttgatgggactgaatttaaattgccaaaaggtgaattaacataatcttgaaaacttgcaagttcctggaggcagttctggagggagggtggagcaaaagagatggcagaagaagaggagccagcagcactggaattcaaaagtagacattcttgcctcctccctagtggacagggaggaggggtggggagagcacaagagagccgtgacagaggaagggagagagcacagagtttaagtctatattgatggaactatggttacaaataggggctacccatttatattctcatctggccatgtctcatcagtgatttacaaggatttcatagaagtgctttaataaaatgtacaacctcactgaaatatagaaagtaatactataagacagcaaatattgtatatttatgcaaataattttttaataaaaggtttttttaatgtcc

SEQ ID NO: 206635 - DNA, 486 bp, Homo sapiens
ggatgattcttagtaattgactaaaaactgttttgtctctcatttgtttgtggtttttgcactttattatggacctgtaaaggaataggttaattcttacattgtgtacttggctaatgtcctaaatgcaggcatcttttgtgggtactgttgcccatgaataaacatatgttccctaatcaggtccttatatttttccattaactatacatgaagaaaatatattatgttacaaatgatgcatcatatatatatatatatatatatatatatcttatagattacatattatatactgcacattattcatttaagaagtcattcttgaggccctacctcaaattttctatttatgtataaaaatgcaatttattgtattatatatttgcctattatgtactgatataaattagaatttaccctaataatgtatgagttcacaaaaccctaaataaatgtcagtgtttaaaacatgattatagtatt

SEQ ID NO: 206636 - DNA, 555 bp, Homo sapiens
atgtttttatttgtacatcttcccactagactgtaagctccctgagggcatgtgaatcttactatatttatctttggctgcttcaaggttcagactatgatgcaatctagcctcacctttcaccattttcccataaatatgatctatgtaccaaatacttcaatactgcattccctgaatatactatgctattccatacttctctcccttttatatatgataatcctgctgctttacttcctcatgtatctggtgacctctcacctaaatttcaagattcagcttcatttctaaacacatgccaaaattcacttctatttttaggtaactactggttatttttaatcctgaaataaaatgaaagctgatgcccttaaaataaatatacatttagttgaaaagcacagagttaagtcttcttttaaaaatgcaacatataaaatctttgttttagcaaacattgaaattgatgttcagctatgaaaatggtaattctctctagccaaaacttatacctgaaactcttaccaactgcttcaggagattcactatcac

SEQ ID NO: 206637 - DNA, 362 bp, Homo sapiens
tcggaaatgaggcaggtttttttgtaaaatggtggcagaataaaaatgtgtttatttcaatccctttcttgaaacctacttcacaaatacatgtaaattaatgaaaaaaaaatggacacaaattataacagccccactaggaaatgcagttcgaaaatgtagtgactgacatagctatcaagttcagtggaatttagtccatattgagggaggacattgggagctgaaacagttttccagatctctacctgtttgtatatatctctgaaaatgcatatattctccactcaaacattcaattcaattggtagtttttggtaaatattgaagaagtttacattatttttgggaacttagaatct

SEQ ID NO: 206638 - DNA, 452 bp, Homo sapiens
cctcttccttctcatgattggaagtctgaaggcatgatggatctcagacatcaataatgtcatcaggaccctgtttcctttcatgtttccgttctggtatcctcaacattgactttatcttaaagttggtttctcttaagatcacaagatgcctgctatagttccatgcatcaattccaggcatgataatattcaaaagaagaactctgggaggccgaggcgggtggatcacgaggtcaggagatggagaccagactggctaacacagtgaaaccccgtctctactaaaaatacaaaaaaaattagctgggcgtggtggcgggcacctgtagtcccagctactcgggaggctgaggcaggagagtggcatgaacctgggaggcagagcttgcagtgagctgagattgcaccactgcactccagcctgggtgacagagcgagactccgtctta

SEQ ID NO: 206639 - DNA, 300 bp, Homo sapiens
agcctcccacctcagcatctccagtagttggaactagagacagacaacaccatgaccaattttgaaaatgttttgtagaaatgaggtctcactgtatttcccaggctggtctggaactcctaggctcatccagttctcctgcttctgtctcccaaagtgctgggattacagatgtgagccacgacatccagcccaaggttcattttaaagctatgagttgatttttgataattgaattatttgctcatagttcttttaaaatctgaatgataatgcaattgtttgctttattatcttgtg

SEQ ID NO: 206640 - DNA, 582 bp, Homo sapiens
taggggttgttcaaggaccaaagggtagaagttacagagaagcacagttcatgatgaggaagaatgttctatcttttggaaaagtaaagccacagaacagcctgttttgcaaagctgtgcattttctattggaagcaaggtcagggacatcatagcaggggctccctcaaggaaggcacatttgattaagtaattgccgtaaggcccttcacttctgagagtttgccaagtgcagtaagaatttaaacagccacattgtttgcacatcactgcttgagggggaaagaatagcaaccataagtattaaagtcaaggacagaacagtatcagacagcagtgaggatgaaatacctctgaaaaatgagatttaatttacaaaaatatgatttatgctcttttctaaaaatatgtctacttcgttaaaaaaagaaaaagaaaatagaacaggagaaaaataaaggacacaacctagactcctagaagactcttctaagaggagctgagtgttgtcgcagcatcggacatttccagagtgcctgccactcaccagggacgtgagccatgcttgctaccctcatttcc

SEQ ID NO: 206641 - DNA, 396 bp, Homo sapiens
tcatactgaagctcctcattcaaagcaaaagattgttaaggtcctcatcaagccatttcaatcaatgtataaattgtattttatgttataatgaacagtctgttcaattgaagtttttagctttttaaaagtgcttagaagaatagtaacagaagtgctcttaatggtgaaattattgaactgaagtgcttggataagctgttttatttcttaaatgaaaggagatattttagatggagaaatgagataaatattcctcaaaggagactggtggtaaagagtgactgctctccatggattactgattataacacaagtgtccatcaagagcagcttttattgaagacagtttaattggaccactgccctttagctttaaattacccacggcaaact

SEQ ID NO: 206642 - DNA, 221 bp, Homo sapiens
acccaaagtcactgttttagtacattcaccactttacacattgagttaccagctaagattttagaattacatcactaggtagaatatattaaagatgatccctcagaaaaagaataaaattcctgcagcaactttaaaccaggtgtaggaaggggaatactttcatcaatacagagccactatgtgaaagccctgccttgggagaatcgtaccaaattcaa

SEQ ID NO: 206643 - DNA, 439 bp, Homo sapiens
taggaagtgcctaacccatactatgtgctcagtaaatataattatttcattaggaaagttaatcctgaactatgtgaaatttaaattggaatgtattctttaaacattaaatgtgaccatcctgaaagaaattctcctttcttgatagtttcaaggaatagtcagaatgctgccaagctccttgaaaccatgtagtgagaaatgtagagagaattaagggtgaggggagattttttttgctttgaaaatgtagtcatgcttattaaagaaaatttgagaagtttagaaaagtataaagatgacaaaaattgctcatattcctgctacctcagtgctaaccatgtaagcattttagttaatttcttctagtcattttccccttggacattaattttttcaatgtacagacatacgtgattataacacatatacagaacta

SEQ ID NO: 206644 - DNA, 394 bp, Homo sapiens
gtgggtgaaaaactgattagttaaggtgaataatttactaccattaaatgtattattaaatatttgtaaaattttaatatcatacacattttctagcagaatttttaaaatttgtaagtagcatgctttaataactgcaattattatttgtttatcttaccttgaaattatatatgtgaaaaacaaagcaatagaaaatgccattttacaatgtagctttgactttacataattatctaggcttcatatacttagattaaaaaaataagatacttttatatattcaccaattgaagttactaagaagcattttatatgtttatatgcatgtttagatagttttcatgggtgtgtgctgtatttcatggcaagcaactcctccttgggtgcttac

SEQ ID NO: 206645 - DNA, 403 bp, Homo sapiens
tgtgagttgaatctacatatcacaaaaaagtttctgagaatgcctctatctactttttatgtgaagatattccggtttccaacgaaggcctcaaagcgctccaaatatctacttgcagattctagaaaaagagtgtttcaaaactgctctattaaaggaagcttcaactctgtgagttgaattcacacatcacaacgaactttctgacaatgcttctatctaggttttatgtgaagatattactgtttcctatgaaggcttcaaagtggtccgaatatccactttcaggttctacaaaaaaggttttaaaaactgctctatgaagaggtatgttcaactctgtgagtcgaatgaaaacatcacaatttagtttctgagaatgcttctgtctagtttttagggg

SEQ ID NO: 206646 - DNA, 784 bp, Homo sapiens
caaattgagatcacaatgtgatatcactatacatctatcagaatggccaaaataaaaaccaacaccagatgccagcaagaatgctgagaaaccagatgactcaaacattgctggagggaaagtaaaatggtaccaccagtctggaaaacagtttggcaatttcttataaagctaaacatgctactaccatacctcccagcaattattctgttgagcatttgtcccagaaaaatgaaaactatgttcacacaaaaacctgtatgtgaatgttcatagtggcttgattctatagccaaaaactggaaatgactcaggtgtccttcagcagataagtagttaaacagattgtgctacatccatactgtggagtactactcagcaaaaagaagcaacaaacttgatacacaccacaacttggatggatcttaagagcagtatgctgagtgaaaaaagcctatctatctcaaaagtttatatactgtatggttccatttctataacattctcaaaatgaccaaattttagagaaggataacagatgaatggttgttgggacttagggatggtgaaggaggagggatgggaatgactgtaaaggaggtagaggagggaaatctttgtggtgataaaatagtttcgcatcttgattgtggttgaggttacatgaatctacacttgcgattaaatggcctagaattatacacttatacacacacaaatgagtgcttgtaaaactagtgacatattaataagatctgtgaattgtaccaatgtcaatttcctg

SEQ ID NO: 206647 - DNA, 290 bp, Homo sapiens
tccaataatgctccgtgagcatcctcacgcctgcctccttagccaggttcttggggatgtggaagggaagcccacttcacactgtggccccccctcatccctccctgctccatctccctcccttcatacactcagcactgaagacaaaccatgcacccactgctcctccagcagggtccctgctcgcaatctctgccttttctttttaaaaattatacatttttttttttgagatggagtctcgctctgtcacccaggctgcagtgcaatggcacaatctcggctcactg

SEQ ID NO: 206648 - DNA, 464 bp, Homo sapiens
tctagaagtcagaagtttgacatgggctaaagtcaagatgtcaatagaattgtgtttcttctagaggctcaaggggaaaatatgtttgcttgcctgttccagcttctagatgctgcctgcatttcttggctcctggccccccctcctctgttttcaaagctaagagagaggagtcaagtccttctcaaatctaatcattctgacactttgccattctgcatccctcttccaattttaaggaccttgtgattacatcaggcccacctgaagaatcatgcaataatctcccaattttaatatcaatgttaattctatctgcaactttaattccccttttctttgtaatgtaacatattcacaggttccaggggttaggatgtgtacatctatgagggactattattctgccttccacaattggcccttctattactggcatacaactattaaagattttacttcat

SEQ ID NO: 206649 - DNA, 118 bp, Homo sapiens
gtaacattaatacaagtgctaatttttctcctaactagttatattcttcaatctgtccttaaaaaataattcaaacaattggtcattattttagcttaactagcttttaaatcagtta

SEQ ID NO: 206650 - DNA, 578 bp, Homo sapiens
aacttctgagtcttgggcaaggaggggccttctcaccaaccagtgtctgatattctaggtagcaaatattccttacctactagggaggacactcctatactaatgtcttactaattaaatgttactgcagctggtgggggacagggtattctaaaatgttgggttaaaaccttgaagttgtagttatacaccactgatgcggtatgcttcttgtcccacactgcaaatgacagtgtctctaagcagagaaacctaaaataagggcaactgctgtattctatgagtctcgaaagccacattttatcctgagaaggaagaaaatagtttgaaacatcaaccaccacagtgcttgaagtctgtttcttatcatgtcatcttattttgtctgtagaaaacagagacattctatttctcttaaaactgcttttaaagggaagggataatctgcggtttttgttttggtttttaatggctggctccttgctttaaatcgttgaatgaggaaacatatttgaactcgtaagttttgcaatgtgaaatgaacatgggttcattattccatctggaggttatttctt

SEQ ID NO: 206651 - DNA, 266 bp, Homo sapiens
aagaaaagtgtttccagatggaaggtctgaaattcaagaaaataggaaaatcaaagatattggtaaataagtacagaaatcttgtttagaaagagtacaataataataaaataatacttgtggggttaaaaaagagaattaaaatatattattacaaaccagcctgggcaacatagtgagaccccacctttaccaaaaaaatatttttttaattagttgaggcctaggcatggtggttcatgcctgtaatcacaacactttgggag

SEQ ID NO: 206652 - DNA, 144 bp, Homo sapiens
aagccttcatacgactgcaatttggctaacagcctgagagcaacttcatacaagaccctaagccagaaccacacagctaagcagctcccaaatccctgatcaacagaaactatcagtaattaaatgtttattgtttaaaaccag

SEQ ID NO: 206653 - DNA, 328 bp, Homo sapiens
atgtaattgttcaattgtgtgagtgttttaatccttctgcaattatcatctcgaaggagactttgaaagcatcttaatctctctttaaccattttttttttctttttcctaccacattcaggtttcccaactacatgctctggccaactgggccaccatgatctcttccacttaaatcctcagccttcaataactgctgtttacaaaaagatcttatggaatatggatcactttacagtaaagccaaaagtacttgtgaaatttcacattttaatggagctgtttcattgatatttttttccaccaaacaaatctatttatgtaagca

SEQ ID NO: 206654 - DNA, 200 bp, Homo sapiens
aatatgtcactttttagtcgctagactatgtttgaaagctgtaaaatactggcgagccacaatttaggaccacgtaaaatgtgaaaatcgggtttatggaaacagattagaatttattttcattatggaatgttttgtttcaaagtttgttgaaaaaatatattttgatgtataataaaggtatatagtatgatgtttgt

SEQ ID NO: 206655 - DNA, 777 bp, Homo sapiens
  misc_feature (16)..(16): n is a, c, g, or t
  misc_feature (32)..(32): n is a, c, g, or t
  misc_feature (47)..(47): n is a, c, g, or t
  misc_feature (51)..(53): n is a, c, g, or t
  misc_feature (58)..(58): n is a, c, g, or t
  misc_feature (62)..(62): n is a, c, g, or t
  misc_feature (95)..(95): n is a, c, g, or t
  misc_feature (115)..(115): n is a, c, g, or t
  misc_feature (137)..(137): n is a, c, g, or t
  misc_feature (161)..(161): n is a, c, g, or t
  misc_feature (180)..(181): n is a, c, g, or t
  misc_feature (192)..(192): n is a, c, g, or t
  misc_feature (202)..(202): n is a, c, g, or t
ccgccgagtagatacncaatggatattcacancctcgatattgtagnagcnnngtccnctcnataaccaaaaggtggaagccatctaagcatccnctgatggatgaatggatacngaaaatgtgatacatatgtacnatggaatactattcagccgtaaanaggaaggaaattctgacanntgctactactnggatgagttntgaaaagaaactatgctggccgggcgcagtggctcatggcctgtaatcctagcactttgggagaccgaggtgggtggatcacttgaggtcaggagttcgagaccagcctggccaacatgagtgaaactccatctcaataaataaatagataagtaaaaataaaaataacttctccctttcggattcccgatgcggtggttgctgtaaggggtcctccctgtgccacacggccatcgccatggtgaagctgagcaaagaggccaagcagagactgcagcagctcttcaacgggggccagtttgccatccacttgggctttatccctcttgtgatttacctgggatttaagaggggtgcagatcctggaatgtctgaaccaactgttctgagcctactttggggataaaggattatttggtcttctggatttggaggcaatcagtggacagcatgaaagatgtgtgctctggctcggataagagatgggacatcattcagtcactagttggatggcacaaggctcttcacagatgaacctgtagcagagtggaacttgtactaacttatgatagaat

SEQ ID NO: 206656 - DNA, 490 bp, Homo sapiens
gcaatccacccaccttgacctcgcaaagtgctggcattatagcccctgagccaccacgcccagctcttcactagcccttcaaaaatgcgcttgcaggattcccgatgcggtggttgctgtaaggggtcctccctgtgccacacggccatcgccatggtgaagctgagcaaagaggccaagcagagactgcagcagctcttcaacgggggccagtttgccatccacttgggctttatccctcttgtgatttacctgggatttaagaggggtgcagatcctggaatgtctgaaccaactgttctgagcctactttggggataaaggattatttggtcttctggatttggaggcaatcagtggacagcatgaaagatgtgtgctctggctcggataagagatgggacatcattcagtcactagttggatggcacaaggctcttcacagatgaacctgtagcagagtggaacttgtactaacttatgatagaat

SEQ ID NO: 206657 - DNA, 267 bp, Homo sapiens
gataacagtgggaggcagcagtgttcatactcctgggacctccagagtgacttgagccaaggacatgctggcggttccccacacgtagaagagggtcccactatttgaaaggtgaggcagcctgcccagctgccccagtttcagcccctcctcgtgttcaaaccacacaggcatggacacatgagaaacagcaattagcagggagcctcaggggcctcgttggctccactcaggcataagatggacgggggtgctctgaaaggggct

SEQ ID NO: 206658 - DNA, 554 bp, Homo sapiens
taaatagagcttaaattacccaaacaaggcagttagattagttatgagaggacctcacagctgtgaagattcaccgtcattagcagagaccttgcaatcccctttaactggaggaacggccactagattctacctggaaatggacttgtgctttgaattgaaaagcttcctgtctgtgtttagctaaaaattgctcaggtctattagcatgggacagtagcccagtgacacttgttttattgagttctggactgttcatgttttaaacaaggataattctagatgggcaaagtagctttataatgtataccctgtttcttcttaaggcaaattttaaatttgttatgaaaggaacttgatccattactgtgtccaagaaaagacaaacacagaagaagggaaaccccacggaggcattgatatttgttgtagttaaccgggtcttcttggccttggtggcatgttaacagcttataacaactcacttggcagctggtgctacccccatccccagagactattgagctaagaacgttatctcaattgtcttccca

SEQ ID NO: 206659 - DNA, 119 bp, Homo sapiens
ccattctacacaaaatatcaatgaccgaaaacaccgtttgacatgggcaagattgtatgaaaagactaattatacaaagcaagtcgattcaactatttactttcccaatgtttctcttc

SEQ ID NO: 206660 - DNA, 977 bp, Homo sapiens
tccagctggcccagcagctgctccactaccatgcaatccaggcatccacccaggaggaggcactggcaggctgggagcccatgggagtaattggcctcatcctgccacccacattctccttccttgagatgatgtggaggatttgccctgccctggctgtgggctgcaccgtggtggccctcgtgcccccggcctccccggcgcccctcctcctggcccagctggcgggggagctgggccccttcccgggaatcctgaatgtcgtcagtggccctgcgtccctggtgcccatcctggcctcccagcctggaatccggaaggtggccttctgcggagccccggaggaagggcgtgcccttcgacggagcctggcgggagagtgtgcggagctgggcctggcgctggggacggagtcgctgctgctgctgacggacacggcggacgtagactcggccgtggagggtgtcgtggacgccgcctggtccgaccgcggcccgggtggcctcaggctcctcatccaggagtctgtgtgggatgaagccatgagacggctgcaggagcggatggggcggcttcggagtggccgagggctggatggggccgtggacatgggggcccggggggctgccgcatgtgacctggtccagcgctttgtgcgtgaggcccagagccagggtgcacaggtgttccaggctggtgatgtgccttcggaacgcccattctatcccccaaccttggtctccaacctgccccagcctccccatgtgcccaggtggaggtgccgtggcctgtggtcgtggcctcccccttccgcacagccaaggaggcactgttggtggccaacgggacgccccgcgggggcagcgccagtgtgtggagcgagaggctggggcaggcgctggagctgggctatgggctccaggtgggcactgtctggatcaacgcccacggcctcagagacccttcggtgcccacag

SEQ ID NO: 206661 - DNA, 1267 bp, Homo sapiens
aacaggagggaggctggacactgaggtgggtgaatgctgcagatcttcctgcttgatctctgaacacccatgaccagtcctgcccacaagctttggtccatgctggatgcctacccagaaagttccttcctctcctccccaccacatccccgaatcctgccattcttcagggcacctcacctgccccatctcctccagaacatctttgtcctcactgaggcccagactgactcccttcccgactcctgactgatctgttggtctctgtcactttggcatttccccacacattgccttctgctgttaccagataggctgcatgtttgagtgacgcttcaccaactgtcatggctatgattttccaccatctgtgctgtaagacagtaaaaactcaaccaccaccaccgagatgccatccaggcaggcaaccctgagcgtgcccccacccgctacacactcttctccccagagcacatcagggttctgagatcaacaagttggaaggagacttccaggtgggcaggaacgctctctccttcccaggacccccacgaacctagcccagagctgcagagaaaggggtgcatgagtcgttgaggaaggatttttccttgctcctgggacagcaagtcaaaactgtttgttttaggttttaagttaatttcagaatatcctgccctaaacaatttctttccttacatagcaccaactctctgctggggccctttggctgtttcctttctccattctttccttctcctttcccagatcccagctgggaacctggggggagagcctggctggcaccacctgccctttcttgggccatttcccttcttgtttgtgatgaggaggagcctaggaagtctccatgcttcttggctttctggccctcatcactttcacagccttctgctaactaagctagtgagcccccctgccctttcccattccctctctgaggccaaactctctcatcccagcttctttcttttcatcttccttcctctaaagactgctcagcctcatcggaggctgccttctgaatcctgaccctgctttccacattttgtaagacatctcggccccagagtaagagtgcatgatttacctaccacttccttggatcccaacccctactcactgctagctcctggcagtggcgttcttcctccttccttggtgtgcagatgtgcccctgtgtggcctccttctctaaaagcattctagattgttcttggttccagcacttctgaaacccatcctt

SEQ ID NO: 206662 - DNA, 975 bp, Homo sapiens
ctcccaaatccggtcatccacctttcagagcagcaccgtaaagtgaagacagacatttattagatgaaattctggtttcacttttacacttgtgcaagcatttttaacagtaaaggagaggaaagggaggaatttatatttctagataatatatgaaaattaccttgatattgtatttttaagatctttcaccaatactgcagtgctgcactagaaataattagtttaagaaaatacattcaacattgtccaggtgatcctgtcaccttttagatgacgaaaaacatcttgaggatgttttgtacagttattttcccattgttactcttagagacttttgtttcaaaaaggcaggctcattttattttgttttatcttagaacattttagcagctctttgtcatgggttaaaaaaatctagaattaaaaaaatgtttaatatatgatttatataattttgacaagaatacaaattcttagtcgttcaaaattggaagcgctcttagaagtgtcaagctcagctttccattccacaaatgaagtaactggtaactgtgacttattatgttatacagtgacagttattatgttatacagtgtcagttatacagtgacaaccaggacaaaatcctagggttctagattccccttctggtgctctttttaccagatgatggcattactaattgcctaccttgaggcctttgaaatcaccatgtctgataaaaacatgcaattgctttggtgaatttgtttgttttattgttgttgctttgagtgaatgcttcagtttgctctagattttactttgtttgttaaaaattaccatgttttaacccccgaaaacatttaatgtttttgaaatgattttttcataacaatcttatgagtctattatataataggaagtattttggaaatttaatggtgatatttctttggaaaagaaaaataaaaactctggaatgcaaaaat

SEQ ID NO: 206663 - DNA, 300 bp, Homo sapiens
caggcaggtgccaccacgcccagctaatttttgtatttttagtagagacagggtttcaccatgttggggagggtggtcgcgatctcctgaccttgtgatccgcccacctcagcctcccaaagtgctgggattacaggcatgagccaccgcgcccggcctggcccttggcattttaatttacaactgttcccattcaccaccccatcccccaacactcagtatcacagcatggtaaactggcagttttgctgtccccagagtcacctgacttaatttggatcgctacaaaaatgcttctca

SEQ ID NO: 206664 - DNA, 394 bp, Homo sapiens
gtcccagaaagatacttggggtactattcacagaaaaaagggaagtggccacagggctgataaaacgacgatgcccactacacctgggtattttctttctttttgttttttgtttcttttgagacggagtctcactctgtcacccaggctggagtgcagtggagcgatctcagctcactgcaagctctgcctcccaggttccagctattctcttgcctcagcctcccaggtagctgggactacaggcgtgcaccaccacgcccggctaatttttttgtatttttagtagagacggggtttcaccatgctggccagtctggtctcgaactcctgacctcatgatccacccacctcagcctcccaaagtgctaggattacaggcgtgagccactgt

SEQ ID NO: 206665 - DNA, 564 bp, Homo sapiens
ggaagatcagagtattaaataactctccccagccaagtaagctcttaataaatgtcaggtaaggctaaacctgaacgtcgagcctagagagggcaaagagcatgccggttcagagcagacacccctgccaggcactagctgggtgactttgggcaagttacttaacctcactgtgcctcagtttcctcatctcccaatgtaaggataatgtacctacctcacaggtttgttgtgaagactaaatgaagataatgcaataaacggctgagacccatgccaagcacatggtaaaagtgtgtaattgcgtattagcagcagcagccagagcaatagccaagggtcaattaactcccagtccagtgttcagttcatgattgtccatgcattaagagccaaagcacccccaaagccatctcaccctgctgaagcagtctaaagtgctcaactaagttggtgcattaatctctagaccagaggtcagcagacgttttctgtaaagggccagacagcaaacattttaggtctctgttgcaactactcagctttgcccttgtgaatgaaagc

SEQ ID NO: 206666 - DNA, 510 bp, Homo sapiens
actgaaacctagcccagatcaactacacaaaggaattaagatattatggaaggaggtgacaggtaatttttatggtttttgtttttgtcctattctttattttaaactaattcacttgtatttgaaaaaataatgcacatacatgatagttctaatagctcagcaaggtaaatttgcctgcagaactaagacctgtagtctctgacctcagtcataaactgttaggttcttgtgtgtctttacagaattagctatgcatgtacatgaagctaattctccctctgtccatttattccttccatccccttctctccctcccttcctttctcaaaaaggaatatactgtgtgtagtgttctttgtctgctttttacacccactccacttaatagggcggtctccctatcaacataagtagatgtcctttttttttttttttcgcagacggagactcgctctgtcgcccaggctggagtgcagtggcgtgatttcggctcattgcaggctccgc

SEQ ID NO: 206667 - DNA, 561 bp, Homo sapiens
agttagatctttattaacatgctatgccactgcagggagggagcaggaaaagcatgatacacaatttaagacaagtgccaccataggctactgttggcaaacaagagctccaccaaactttttaaagtgaagaagcaacagtctgagccatttttctcaccagtggcaggagggggagacttccaccagcaacatggaatcttcagtggatgcagctgaccaaccctcctgacttctcagtcttttcccaccactgctcaccctttatgttcagatgtattcagcactagataaccatacttattaactataagtgatgtgtgtgtgtgtgtatgtgtatatatatataaaactgtactttaagaataaatatatataaactatatgtgtaacaaatttataatatataaactataaatctgtgaaagtattcagcattatataacggcaggctgtggtgatttagattggtggagctcctgaccatgcctgaaaatccctgtaccccactttgaccgtgattttttaagggaatattgtttttttacatctgtatttaaa

SEQ ID NO: 206668 - DNA, 643 bp, Homo sapiens
aaataccacactctttttttgtggggggcgggggggcagcgggtagagacagggtttagccatgttggccaggctggtcccgaactcctggcctcaagtgatctgtctgcctgcctcggcctcccaaagtgctgggattacaagcatgagccaccatgcccagcactaaatactgtactcttctagttttccttctttctcctgtgctctttctcacactaaaatattacagtgccaggctttgttcagtctccctgggtaatacccattcccagggctttagatgccatctgtgtgcttataacaccctaatttatatatctagcctagcacttttctccctgaaattaagattgctctttgacctctccattaaatttatttccaataaatatctcaggctttcctgttgcatgtagtggtacaaccatttattcacttgttcaagtcaaaaatcaagaattattcttaattcctcttttttctttatttcttatgtccaattagaagccagactcattgacttttaacttcaaaatacatttcaaatcaagtcactgggaaaataaagtcaaataacaagtgatctctgcttccaaagattgttcatagtagactggcaaactaattagcaattatgtga

SEQ ID NO: 206669 - DNA, 399 bp, Homo sapiens
tcagacgaagatttcaatcagtacacttgctaatcttgttcagacatggagtaaacctggactactaagatttagtgactttataatcacatcttccaaggcaaagcaactacccaaattaaaataattggtttgctattacctcctggacacataatgtaattcctttctatcagtatctcatggaagatagaatgccaaccccccaaatttggggttgccagataagctaatacattaattatcatgatgataaccaataatatcttaaatgtttttgtcagtgagtagaaaaagcgaattccaagtaagaataagaactttatatccactttatttcgcatcaaacttaaatcaaaataaaatgccttccatctctacctagattttcttattggg

SEQ ID NO: 206670 - DNA, 749 bp, Homo sapiens
aaactcaatcagcaaaataaattcaataaggaagatttgaagatcaaagaccttcctctctctggcttcacatttctcatcactagttgaaagcctgaaagaacaaaaaagctgacccttccctgagtaagagagaattcttcctgcgtgatgatcttcaatctgggacattgactttttttctgcctttggcctgaaacattggctctccctgggtctcgagcctgcgggcctttggactggaactaaattatcagctctcctgggcctccaggttgtctattcaccctgcagatctttcaacttgccagaccccataattatgtgaaccaattcattataaaaataaatctcgattgctggcaagatggccgaacaggaacagctccggcctgtagctcccagcgagatcgacatagaaggcctaggtcatcaagatgcacagcacaggacagaagcccctctagtcctgcacctggtgacatggaactgctgtgctggtccacacagacacagcctccaaccaagcctggctcctacccatcacagttctgtaggctgcccatttgcagaaggccttccatctgacactcctcctcgcctgcttgttctccagccatgttgtggccaatttgccatgaggaggttgcagtggccaagactgttggaaactgtgcggtgtagctgggagagaaaggacacactctaaatgttcttactgcctgtgacgatgcagctacagcgatgta

SEQ ID NO: 206671 - DNA, 571 bp, Homo sapiens
actagaggacccccaagcagcttactacagactcacatttcagttctgaatgtacttcatgttgatatttgaatatagtgtgaggtaagggtctaatttcatttttctgtatgtggatatccaattttcccaatgccttttattgaagggactttcctttcttcattgtgtgttttggcaccttgtccaaaaatcagttaattgtaaatgcatgaatttgtttctgggctttttatctgttcctttggcctatgtgtctgtttttatgccagtatcatgctgttttgattaatatagcttggtagtacattctgaagtctgatagtataatgcctccagtttagtccttttggtccgtgattgctttgactacttgggttaatttatagttccatacaaactttaagattattttttccattttggttaaaaatgtcattggaattttgatggggattgtattgaatctgtgggtcactttgggtagtatggactttttaacagtattaattctcctgtttcttgaagagatttccaaaggtgtctcttatttaagcataattgtcttgga

SEQ ID NO: 206672 - DNA, 863 bp, Homo sapiens
tgtttattgagatcctttgtccatttttactcaggttatttgtttcttacgattgagtagtttaacttcctcatacactttggatattaatcctttatcagatgtatgctttgcaaatatttcttcccactttataggttatctcttcactctgttgattgtttccttggttgtgcgggagctttttggtttgacgcaatcctatttgtctatttttgcctttagtgcctatgctttgggggaatattcaataaatctttgcccagaccaatgtcatggaacatttcctctatgttttcttctagtggttttgcagcttcacactcacatttcagttctgaatgtacttcatgttgatatttgaatatagtgtgaggtaagggtctaatttcatttttctgtatgtggatatccaattttcccaatgccttttattgaagggactttcctttcttcattgtgtgttttggcaccttgtccaaaaatcagttaattgtaaatgcatgaatttgtttctgggctttttatctgttcctttggcctatgtgtctgtttttatgccagtatcatgctgttttgattaatatagcttggtagtacattctgaagtctgatagtataatgcctccagtttagtccttttggtccgtgattgctttgactacttgggttaatttatagttccatacaaactttaagattattttttccattttggttaaaaatgtcattggaattttgatggggattgtattgaatctgtgggtcactttgggtagtatggactttttaacagtattaattctcctgtttcttgaagagatttccaaaggtgtctcttatttaagcataattgtcttgga

SEQ ID NO: 206673 - DNA, 275 bp, Homo sapiens
tcggagcctctcaattacttgcagttacatattgagtcccaaaaagcttggggattttaaaaggtaagaaacggggaacaggtcaggcaagagtaatcccagcactttaggaggcaaaggctggcagatggcgtgaactcaggagtttgagaccagcctgggcaacacagtgagaccctgtctcaaaagaaaaaaaaaattagaaaaagctaagtgtgatggcatgcttccggtaatcccagctactcaggaagctgaggcatgagatttgcttg

SEQ ID NO: 206674 - DNA, 414 bp, Homo sapiens
ttcaaagaaaaagtaagatgtttaagacagtaaaaggctactagagtcaatgatttttccatctaaaataccttcaatcatataaaagatggacattttaaaataacaaagtcctagaaagaatctatgtataaagagtcgtaagaaaggagtgagataatatgtttgttaagttacaatttgaaatccaagtatccagtacataggtatatagccacaaatgctgggaaagtacttctcaggtctcacagctatgaaatgtagaactaaagatcctacagtctccttcaactttatcattttataagcctccaacagtactaataaaatcataacgtattaacatataattcaacactttttttttttttttttttgagacggagtcttgctctgtcaccaggcaggagtgca

SEQ ID NO: 206675 - DNA, 218 bp, Homo sapiens
tcgatctcctgaacttgtgatctacacgccttggcctcccaagggaagtttttaaaggcattagcaaatataaatatctactaggagagacagacagaaaattagcaaaagaaggagaggatgtccttataggaagcttttctactctgaactgattctctatgcatccacaactgccttcacctaggccaacacctgctatcatctgcctatacaca

SEQ ID NO: 206676 - DNA, 287 bp, Homo sapiens
tgggggaatatttcagggaaaaacaagcaataatagtgatagcagtaatagcaactagctgtacttttataagattatcttactgaaatcctcacaagtgttagatactgttaccgactattatagcttctacataataagaatgccttatgtccataagaagacatgtctgtagtgtcttctaatgtagaataggaatggtaaaattatttcactgagccagacctggtgacttatccctgtaatctcagcactttgagaggccaaggcaggaggattgcttgagc

SEQ ID NO: 206677 - DNA, 742 bp, Homo sapiens
cagacctaaggcccagggcgcctgggggctggagcaagagaagcaaaaggagccaagggtgggggtttggggttcttgtgagggcccagccccaggaccccaggaccaggacacccaggagccccagggcccagccccagttcagaaggcaggggccttctgagggagcttaagggtcccacagcccaggacccccaccagggccagtggccagcgttgggggactcagcctcctcgtcgctcgtcctctctgtttctcccaccttttgccccctttctccttgcctgttcccacccgaggccccctcttggcctgcgtgagccggggcggcactgaactgggggccgatccgcctgggcggcggtgagaggcagggccgggagccgggccgctgggtttgggcctggcccgctcgccgcaatattgatggcccgtcagtgcagccctgattcctgtgctttcagttaaaaggtttctgttgttgtagcttatgcagttgctctgttgctatggaaacgtgacatcaaaatgacgtttcccgtttaaaagcttttaactaaattcctgcctgtcagatgtaggccccattttgagcgtggagctgccttcgagcgagcgtgagcggcgcctcccgcccatggtgcgtggggccgggccggggccctcgctgagcgcgctctctcaccccacaggcgcctccggcatggcggcggccgaggggcccggctacctcgtgtctcc

SEQ ID NO: 206678 - DNA, 414 bp, Homo sapiens
cagatttgcgtgaggacaaaggacacagtactgcttgtatagagtttgaatgccatgtgactgtttccttattgagcagaaaaacactcctctgggaagtagtttaaaaattattttatttttggtctacttcaaggactaaaaccttggaataaaatttttacagaattctgtatatgtgataaaggcaaccactgcttaatggtggtaatttaagtggggagaactgttcttccggtttcatgagaaccaatcacagcaaaaggaacatttcttgctctactttttttttttttttttttttaaataaagactaagccaaatacataaacctattatggataatggccttctccctcctcagcccttaatacaacccacctcctgactacatacaacttgtttcagtagaac

SEQ ID NO: 206679 - DNA, 156 bp, Homo sapiens
ttatgctgagtcctctgggaacccctccctctggaatcacagaaagtaaacaccaaactggaaacacgtctgcttctctctcccactgcatatctcttcatgaaaatgtctcatgaatttgaagctatatttcaagcttttcctcaccttttccac

SEQ ID NO: 206680 - DNA, 551 bp, Homo sapiens
attggagtctgcccctccagtgagatttctacaatactatgatattggaaagtaatcagaagctcttgttttaatagaaacagtgataactgggaggtataatttctgatgaggttggtgatcatccttactctttacccttgatagccaaaaagagaaataattgtattttctatttcatgtagttttggatatttgaggtaatatgtgaaagctgaaaaatacattatatgtacctgtattttaatccataaaacataagaaaaaaaactttatatgccaaggaagacagctttaaaaacacaatatactcaagaggatttttaaatattccccaaacaaataaattataaatgtttgaagtaatgcatatcctagttacaccttgtatatgtcttgaaatgtcactctagacctggtaaatatgtacaattattgtttcaaataaaagcggtttttataaaaacaaaaatcttcaatgataaatgaagtttatctaaaaataaaatgaactacaattgatgatttatatggagtatttaccattataa

SEQ ID NO: 206681 - DNA, 492 bp, Homo sapiens
tcagaagtaaactgggagtggtacaaaggtattgaaaagataaagcctgcatcgataaaatcagctgctatctgatgactcatggcgtaagagatatcatcttttaagcattcagttttctagtttcagggggatttccccttgtcatttgaacccctcaaacgttacgtttaaatggtaagagattatctcattttgataataaacaatggaaacagtctccaatactgaaaaaatgtccccaaattgccattctgcacatgctatttttctcttagggaagtaaaaataacaacaatgaaattgagcacatgttatttaccatgcacagtgctagggtctttacttatgttgtctcatgcaatgcctactataaaactgttagacagcaattttttagataaggaaactcaagctcaatcagggtaaataacatatacaaagcaatgtgaaattaaataggaatctctctaataccaacacctgtgtccc

SEQ ID NO: 206682 - DNA, 127 bp, Homo sapiens
gacaaacggttttgtctgcagacctcacttctatcctcctgtattactgagccatgccaagaacaagcctctcacagaagctgcttgttcttggattacactttcttgacatcaaaatgtttgctga

SEQ ID NO: 206683 - DNA, 427 bp, Homo sapiens
gcagggaggataaattcaaaccatcctccatttctgcattagcgagccattattactaaaaggactgacttacaatacttcttaaatctggagattgtaaagttcaaactttatcatgctgggtaaaagtattacaattctgaggtagttgtgtaacaacagagggaaataacaggcattctggctacagtttcaaatctctgccccatcaattaccagataacctctctgggtctcattttctgaaatcagtcaactgaaattgactacccattttgtaccagcatcctacaaaatagcttttttaaatatggtggtaaaggctgggtgtggtggcgcatgcctgtaatcccagcattttgggaggcctgggcaggtggatcacctgagactggaagttccagaccagcctggccaacacggcgaa

SEQ ID NO: 206684 - DNA, 1054 bp, Homo sapiens
agatggccaatattttgatttataaattatgggtcacaggccagccaaacttgaatgtgatttattctgtgaaatcattctccaacccaaccatccctcctgtgtgtttccagacactctgaatgtatttggggttagttatgtacacatctgtcttccctgctaggctgtgagatccagaagggcagggagcacctatcacacaagctggtacccccacctctaagcactgtgcctggcttacaccacctgctcaatcagtattttctcagtgttgacaaaaatgactacatgaaggatggctttctttaatctcatgttcattccacgttgctacagtggcgatacaaaaacgaataaaacacatttcttgctttgagaaggatacagtctaagaatattagaaaacatgaatacagcttttaagacagaacatcatgttgtgtctgcaatctctagcccctaatatgtactaaactttaaatattttgtgatataaagacaaaacaaaagtaatattttactaggacattatcctaatacataatttctcttgctctatgagtattttttttaagccacccagtaaatgtgtagcaacaaagaaccatttggaagttattccctgtcttgcagactgagtcagatcatggctaactgatggtcggtcctctctcatgtttcttgttttgttttgtgtttagggttatttctttttctttgcttttcaccattactatgaattttgaaattccttccattttgcaaaaaaaaaaaaaaaaaaaaagctttcctaattattgttcattataactgtaatcttttaaaaatgaaagagtccaaaattcatctaaatgtctgttaaaatgaacagaagttgacttaagatacagtgtagtttttagtctacatatttaattttcagtgtattcccagagaaatagcagtgttgattatctctctttcatgtcctaaaattaatagcagctcatactgaacccgtctaatggaaggataaagacttaccctccaggccagtaactacaaaatgact

SEQ ID NO: 206685 - DNA, 379 bp, Homo sapiens
aactcgggtagtctgaagacgatggggcagggcagccacagcacctactgccatggcgacttggccaccgttataagtagatgcaactgtacaaccaaggatagccaagggtggacctgagccccctctccagaaattctgccttactttagaatggggtgaacagcagggaaaatgaacatttttctttgctttttctcctccctcctttcttttttctagataagccagccagccaactgcttatgaggataaggagaaactggggcaaagtttaaggatgtcgcaaagtctgggtggccttcagtccatgaaagagaacacatctgttctatctcaggctgaggtcatctgcatcctcatcaataagctgactgag

SEQ ID NO: 206686 - DNA, 279 bp, Homo sapiens
aaaataaaaatacaacaataaaagtaatacaaataaaaaatataacaactatttagatggagtttatgttgtattaggtattgtaagtaatctagagatgatttaaagtatatgagaaggtgtacataggttatatgcaaatacttcaccatttcatataagggactttagcatcccctggagccctggaaccagttgcctaggaataccaagggacaactgtacacacatatatatagcaactttttcattttaaaaattgacctaatgttagagata

SEQ ID NO: 206687 - DNA, 456 bp, Homo sapiens
atggtcagatttggatgttagcagtatattattggctgcataggaaatcatgcccacaggcagggagatgacctaaaaggttgctacagtcctccatgtgatgcaagatgatggtctgaaggagacatatgggctgagtgaagggatgtttttgaagttacgtatcaagaagagtgggacaggttgtagagaggagggagagagaaaataactgctggagtgaggtcccaaagagtcagaagtgaagtaaagggtcttctttctcatggagttctgagacaaatttgtcagctgtctgtgaatactgataatgaaatgaaaagctcattttcgtacagtttttcctgcaaataaattttacgctatctctcccactgccattctgacacaattatagtattcctgtgggatctatgttttattcttttttatatactcatacctggtatagtaaat

SEQ ID NO: 206688 - DNA, 468 bp, Homo sapiens
ttgactgcctctttcctgggatccaactcccaggaagttctgacacttgatggtaggtgataggccaacacatttgtaagaaacaaatatttactgaattcagctatgcacaaagcactgttctagatgcttttatgaaaattattttatttagtttacttaactactctgaaattggcttttattattaccattttagaaatgtaaaaactgagacttagaaattaggttacatagccaagataacacagtgggaaggtggcagaacgttcatttaggacttggtccttggtaactccatatctaaactgtttggattcagtaagtctgaggcccaagaaatgtaaatacttctggcgaggaggtcacattttaagtaacaagacttgactacttttgcatatacgtccttattggaacctgagaatcagactctgagttaagtagtttaagtgttatcttaattat

SEQ ID NO: 206689 - DNA, 679 bp, Homo sapiens
cacgcgtcgcccacgcgtcgcccacgcgtcgggacaaacccacccgagtcactctactgctgtttcctgtgtccacatggtaaactctcagcttctggccaaagaccttggtggaccctgctgacttgctcactactggcaagcaaagtgttcactgatgaatgaacaattacatttacccacagactgaaatatgatgttattttgttttgactgaaattccaactcactgtgagaatactgtgaaaaaaatcatgagaagtatcctcataggtgagtcttttcacacatctgcactagtgaatatctgaattttaaaagccactccagacctacataggtgatgaatgaagaagagtgcccttccatgaacacatgtgctggagacgtgttgaatttcttccccctcagcataatcagaggaggtgaccccaagcaccttagagaccatgggaagttcctaatgccggcctgatgcagattctcttctccacggagcaccatggccgctgggctctgccttccacacagaacgatgtgtacttgaaaacagtacactcttgcacagctgtccctggagcttccccgtggagctgttaaacttgccctccgctggctgttttccacaaagtaatatggttacatagattcacggctcatggcaatgtttcattaagac

SEQ ID NO: 206690 - DNA, 418 bp, Homo sapiens
agaggttggtgtatgtaggcattatagaaggtgaagtatggcttataaatatcagcatatttttaatgctccagcctgaaaagtccattgctgctgctgctattattattgttaatagttattggctgggcacggctgggtgcagtggctcacgcctgtaatcccagcactttgggaggccgaggcgggtggatcacgaggtcaggagatcgagaccatcctggctaacgtggtgaaaccctgtctctactaaaaatacaaaaaaattagctgggcatggtggcgtgcacctgtagtgccagctactctggaggctgaggcaggagaatggcgtgaacctgggaggtggagcttgcagtgagcagagattgcgccacggcactccagcctgggcgacagagcgagactccgtctccta

SEQ ID NO: 206691 - DNA, 754 bp, Homo sapiens
gctgaagcgtgaattggccttatgttccctgcctccagaccctattttcctgcatcaacgggaaagggtcagattcactggctcagctgtttaacctgtcctggtgccagcagctggagctgggtgtcaggaccagcccgcaagctcttccctgccggaaggaccaggccagtcgctgtccttttcatgctagagagtggttgtggttgctgacttagcagagaaggtgcttggctttccccttaactggagaaaaaactttctaagaaccaggcctggttggcagcagacctagctttcttggggtggcagggaggctaaagcatacctcaggacagtcagtggtgggtccagcttcggctggaggttctttctactgaataacttctacgggctctgtcattagcaggatttgtataatttgaagcagagctgggcaactgcagagcaatggggaagccagcccagtgtggtggcaagacctgggcaacttgggaccagcctgggctgtctcttgccagctgttgttatcagaaccaggctcttcacactcagatccttgggccccccatctcagaatgcccagtggttgaaaggatgaaacctggaatttaagtgacttctcagtgatgtgtgcccttctctgacggttccttgttcatcccatgtatttactgactgcctgctatatatgcagagccaaagagtggggcctggtcttgaactatctcctcatctgccccttctggcacct

SEQ ID NO: 206692 - DNA, 700 bp, Homo sapiens
gctgaagcgtgaattggccttatgttccctgcctccagaccctattttcctgcatcaacgggaaagggtcagattcactggctcagctgtttaacctgtcctggtgccagcagctggagctgggtgtcaggaccagcccgcaagctcttccctgccggaaggaccaggccagtcgctgtccttttcatgctagagagtggttgtggttgctgacttagcagagaaggtgcttggctttccccttaactggagaaaaaaggaggctaaagcatacctcaggacagtcagtggtgggtccagcttcggctggaggttctttctactgaataacttctacgggctctgtcattagcaggatttgtataatttgaagcagagctgggcaactgcagagcaatggggaagccagcccagtgtggtggcaagacctgggcaacttgggaccagcctgggctgtctcttgccagctgttgttatcagaaccaggctcttcacactcagatccttgggccccccatctcagaatgcccagtggttgaaaggatgaaacctggaatttaagtgacttctcagtgatgtgtgcccttctctgacggttccttgttcatcccatgtatttactgactgcctgctatatatgcagagccaaagagtggggcctggtcttgaactatctcctcatctgccccttctggcacct

SEQ ID NO: 206693 - DNA, 382 bp, Homo sapiens
ttcttaacttttatttttaaatagtagattaagctggcaatactttagagctggcaagctattgcccatgggccaaaaccagactgctgcctgttcgtatctaataagttttactacaagcatggtcacaaccattaattgatgtattgtctatggctgtttctcaagctacaactgcagagctgagtggctgtgacagagaccagctttcaactcctaaaaagcaattactatctgaccccttatagaaagaggtgtctgacccatgatctagagtgtctcaaactcctaactatgattatcacaaagacagaaaaccctgaagtctcacttgagaaggcagttctaaagcagtcatcattctgacctgagaaccttgggg

SEQ ID NO: 206694 - DNA, 278 bp, Homo sapiens
cactgtacattcttgagcaggcaatgacttcacaaaaggatttctcaaaggttagtcctgcaacagaagacagcgtggattggactggaagagtgggagggcaggtggagaaggcattggtctgcaagtggggagcagccctgggggcccagccagtcccctgtgccctgacaagtggtatggcatggatggatggctctacttctgggccgccaggatggacaggtactggttgctcttcaccatggcgataatgaggaggccaccggtcagcagga

SEQ ID NO: 206695 - DNA, 595 bp, Homo sapiens
gcaaaccacactacttcgccgacactcgccagagaacggcagcaccagaggcagttcctgaaggtttgccatggtagcagcctctggaagaggaacagggaatttgtcttcaagctgtattgtatacttacaaatatattgtgtatgtgtttagggtaatttggggaaaactaataaaattcatgaggaggccaaagtccctgcacatttgcaagttataccttggtgcttttccagaaggactatatgggagtgattgtggtagaaatgaaataagcagctgataaatgggtcatttttaattttcattttttatttaaactatcgatctttttattgcaataaaatgtcacaagtaaaaataaagaatttatgacagttttaacgtggtggaaggtagagcaaacaaatggagaaaaaatccaggtgaaggattaataattaaataatgaaactcttaaacttgaaaatatctgtgaactttaacaaaaatatgtataatagatatggatgcaaattccctttgatgcttacatctgagaacccagggaagtgaaaggaacatattaagaaggagacttcatagcaacactgg

SEQ ID NO: 206696 - DNA, 402 bp, Homo sapiens
taaagaactcctataaagcaataagaagaaaagataaacaacccagaaagggaaaaaatgggcaaaggtatgaacaggcaatatccagaagaaatgcaaaatttttgtctgtacaaaaattatgttgtagactcatgtaacacccagtaaactacatgctaggagatttaagaagtcatgtttttcagaactaacaaattacatatatttacacaatatcagaatgggaaatgcctgtctgaacttgaatctacagacaaaaattaccaagaaaaatcattaaaattatcatagacttgaaaaaacctttgtactagcattcgtctaaatcaatgtgaaaaattctaaaatttatccaggcaggagaagaaacacagttaataaaaacatgaaaacctcatt

SEQ ID NO: 206697 - DNA, 563 bp, Homo sapiens
ctctgtgagccccctccctgagctccactttcccttatgtttttatctgaaatgtcatggtatacaccaccaatttcagggtgtagtgttccctagttccattttctggtactcagtaaattttaggaatgagaggctttagctcattaataactcacacaggtaaatgtgtgtgagtatgtcatgtgggcttttaagaatgtggagagggtgggataatgtcctatagtcatggaacttgccaactagctcccaaggaagaacacacacacttaagacactgaggagaaggacagtgctaactgtgcatccctggctgtgagcccttttgttgcccagagataatggagggtcagagtagtcagaaaatccttggaggtggcatctcagagaaaaaataatataaaataaataaacactgggacttagggagtattaagctgagggcccttcacagtaactacaaaagaatgacttggggatttacttgtccaaaagtatacacaagactggagacgtaatttgtgggatatagtactaaatgaaaatatagagtcacttgt

SEQ ID NO: 206698 - DNA, 457 bp, Homo sapiens
aattaaaaagaacgaggtagacacccatctattaacatggaaaggaaggcattattctgttaagttaaaaaagcaggttagagaacagttcatatagatgatattatttatgcaaaacatatgcatacatacatatacatgggtacctgaacacacacccatattctctctttctcaaagaatacactccaaacttttaggaatgattactcttagacagtaaaagggaagaaaggagattttttattatttctcctctcttaaccaggaagaaaagcaggggaaaaaaaaaaatctttaaagccccagatgtcatgtaatggaaattacagaaattccttgggttctttctctgcctccaccaagttcagaggcagaggcttgggtgcgctgaagattccctatcaccagtaaaccaccggcatggccgaagaaggcactgctgctgctggtgtca

SEQ ID NO: 206699 - DNA, 416 bp, Homo sapiens
ggctagccagttttcccagcaccatttattaaatagagaatcctttcttcattggttactagtacaaaaacagacacatagaccaatagaatagaatggagaactcagaaataagaccacacatctacaaccatctgatcttcttaaataagttttttaagagttttgatcattttctgtggcacacttttacataatttttctttagatatcttcctaggtatttgatctttatgtgtatattattgtaaataacgttcttaaaattttgttttctaattttttgttggtagtgtatgacaatgcaatattggcctcctgttcaacaaacttgccacattcacttattaatcataattgtttgtggaatcttttggattttctgcatctaccatcctgtaatcacaaatgcagat

SEQ ID NO: 206700 - DNA, 366 bp, Homo sapiens
gtgtattactgcatgcatcaagtgatggcacaactgtccatatgtcagtccatactctattgtaatgtaaacaattcaagcacaaagtctaaattttcctgttgccaatgccaaacatgaggcttggcatgtggtggttacttaacaaatttcactcttatgtttatttctgtactaattaagactgtaaaattatctaggatgaagcctaagtcttataattcctccacagcacacagcatagcaagagcacactgcaggcatacaacagtgatggtttagctagcagtggaatgtttaccgaaacacagttccatggacaaaatgcacttttcaaaccatatgcttacctataagataagatac

SEQ ID NO: 206701 - DNA, 182 bp, Homo sapiens
atcactttactattggagaaatttagggcagtgtgtgtgagtgtgtgtgtgtgtgtgtgtgtgtgtgtgtgtgttgggagtaccgagttaaggggcctccaagaccatgttgaagggatgacacaaatggtctggttttcttttgctgtggactgcttgtctggctttgtctagctgaatgc

SEQ ID NO: 206702 - DNA, 388 bp, Homo sapiens
  misc_feature (181)..(181): n is a, c, g, or t
  misc_feature (183)..(183): n is a, c, g, or t
ccatgttggccaggacggtctcgatctcctgaccttgtgatgcgcctgcctcggcctcccaaagtgctgggattacaggcgtgagccacagcacctggccagtacatgttttttatgagtgccggttcttacggtatgttcacgtagagactgaaggctataaaaactttccttaccactngnacatgtaattggtagcctttcagagatttatccgtattacggttcttgatttgtagacgtatatataacattcacctaatgttttgtgttcttttttccctgcagatgctgtacccctcaaggatttaaactaacgaaaaatcaataaataaatgtggatttgtgctcttgtatttttaagtggattaaaaaacttactacctta

SEQ ID NO: 206703 - DNA, 436 bp, Homo sapiens
caatcattagcaatatatgagagtgcctgttttcctacatccttttattaacttcacatatgaacttttttcctttttaagtgcagtatgtaccatcaaagttaccttttacttcaggaatggtggttcaggtcgggctcagtggctcgcgcctgtagtctcagcgctttgggaggccaaggcgggtggatcacgaggtgaggagttcgggaccggcctggccaagatggcaaaaccccgtctctgctgggaatacaaaaattagctgggtgcggtggtaggctcctgtaatcccagttactcgggaggctgaggcaggagtatcgcttgagcccgggggacaggttgcagtgagccaagattgcaacactgcactccagcctgggccacagagagacgccatctcaaaaaaaagaatagtggttcagatacatag

SEQ ID NO: 206704 - DNA, 152 bp, Homo sapiens
  misc_feature (146)..(147): n is a, c, g, or t
atacacttaatggcataacaatcaaaattccaagaggatttttttttcaagtcacttaatgtcttgatttgaaaaaggcaagaatagctaatatttttaaagaataatgaagggggacaaggtgtagacaattgaatcgggtaccnngagct

SEQ ID NO: 206705 - DNA, 336 bp, Homo sapiens
cccctcccttctcctcagaagcaagagttttcctagacctggctcgatgggcccccgagtatgtagcacatgatctagctaaaagttttacattaaaatagaactccttgttaaaataccatacatcattgactcaccaacttaagccctattgcataatacatttgagtcaggatataacatagagtaagattttaaaagaaatctaaccacctaggggaaagcaagaagattctctcagcaggccaacctgtcttaattactgctgaactctacctaagcctttaagtgggagcattttgagggctccttacagggttgctttccaggaccacc

SEQ ID NO: 206706 - DNA, 401 bp, Homo sapiens
ccatttcaggccaagcaaaggcgtggatgagtaaaagatggggcctgtttggggactgtgactgggctgagtttaggggataagaaactggcaactgcagcatagtggcaagaacaggggattaggaatcgagaggcctgagaggagtattcttctggatatgttgtttagcttttctgaactttagtgtccttagcttataatgagattattatcttgtccaagggattattgtgaggataaaatcatagaaatacccaagagctcctactacagggtccagcacatactgagcgcgtaataaatttttcttgaattgcatttttattgagagatgtggtcgcaggtgaggctggaaaggatacacttgttcacgcgaggcctgtagtggtgccaaggag

SEQ ID NO: 206707 - DNA, 664 bp, Homo sapiens
ctagtcagtgaaagctggggtggctgtaataacatcaaagtacatttgaatgctaagaatattatcaaggttaaacaaggaattttaaatgaagaagggatctatatttcaagaggatgtagcaactctgaacatttatgcacttagataagagagcttcaaaaatatgaaacacaactgatagaactttaggaaaaaatagacaaatctacagtatagttagaaattttaatagccatgtctaaataatttgtagaacaaataaaaagaaatttggcaagaatgtggaagacttgaatgacgccatcaaccaatatgacctaattgacatttatagtacacaccaccctagaacagcaaaatagacattcaagcacacgcagactatttatcaaaaaagaccattttctaggccacaaagcaagtattgacacatttaaaatactttagatcatgtaaagtacaatctctgactacaatgaaattaaattagaaatcagtaacagaattctatatggaaattccctcaaatgtttagaaactaagtaatacactcagataatacatggtcaagaagaaacaaaaggagggttagtttcaacgtatgttgacctaagggaaaatgagaacaccatcccgctatttgtgggatgcagatacagca

SEQ ID NO: 206708 - DNA, 320 bp, Homo sapiens
tcagcagggtgcaggccaaggcaggaggcgtgtggtattgattgattggttaatagaacgggggacctattttaaacatttgtttttctgctttttcttttactttcacactttgacaagggtgtgtcctttaaaagctggttgggaattgttaatgggtgactctgatatttccatataagtagtttttaaaaatgtatcaggcatggaagccacacattcatggaccgatacaccccataagtagatctttgttaagtgttatagaatgatacagggtgttggccgggcgtggtggctcacgcctgtaatcccagcta

SEQ ID NO: 206709 - DNA, 404 bp, Homo sapiens
aacgttacagaataccatgtattgtgtcaaaaatgcatttgcaaattttcaggaagggctcgttgggtgccaagggctatgtgaggtgccagaaacagacaagtagctggaaacagatcaaatcagacaaggctactttcttcgtacagcatataatatagctgaaaagagcacacacacacacacatccttttgcttacctgaatttcatatttaatgttcttggactttttttgttgacctcaatccataagaactgtagttctccccagtacagtttcagcaccaatgaccaagtctcatcagaggaggccacatgatgatctagcagatagactctttattcagtatgtgagagtcatttacagactggggacataaattagaaatgatgagctggatgt

SEQ ID NO: 206710 - DNA, 570 bp, Homo sapiens
attattataagtaatattattagccgtcttctaaatgaggtagtacagtatagtgcaaaaaccatagaatggtcagaaaagctgttttctaatcctggcgctaccacttactggctttgaaagacagcaaattctgtgattcctctgagcctgtttcccagtctataaatttgggatagtactccttaatccttaatcttattgtgaggccttgctgaaattatgctcattgaaaacaaacacttaagcttggcatttagtagacactcctcaaaagttgtagtagttatcactgctagaatctgctaccatagattaatttgtaagtttttaaaaactctttattcccttgataaggaaaagtgtatgcttaaatatgttttggcagtttataatggatcactgtctagatttcttttggattctccattaatctgaactaaaaatcagataaatttctgtaaaatttgttttgccacacctgatggaatcatggtcaagtcactttacctctctgggcctgtttcctgctggcaaggggagttgtgacgtgtgaatgttaaagcccct

SEQ ID NO: 206711 - DNA, 174 bp, Homo sapiens
tgtctttagttatgtaatttttatacatgttaactttttctgtagtctcatggcaattacaattattattattattttttgagatgctgtctcactctgttgcccaggctggaatgcagtgatgcaatcttggctcactgaagcttctgcctcctggtagaaataaagaaataa

SEQ ID NO: 206712 - DNA, 295 bp, Homo sapiens
ggagccagagagctgagcaacgcacctacactatgctaggcgccgtgggctgcggacagcccatatggagatataaaagccaaccgcagaggtttaacacagccttcctcaaagtgggtcaaagtggtccaggatccttttgtgcttggatcccctggggacttgttgaaaagcagattcctaggtgctgagccaaatctacgaacacatatacagatgatttaaatacaatgataatactgagaacctttgtcctaaaaagtagggctaaccttctgattaagaaatgatattg

SEQ ID NO: 206713 - DNA, 443 bp, Homo sapiens
aaaaaattactgagtccccctctaaaaaattctattaaaatgacaattattttttaagtttatagccctcaagtataaacaataggctcaaaaggttgaaaaacagtgtcttggtccactcctgtgaggtgctaaaatgtaacgaaaaggccaccggtgctagggcataggaaggctacttaccttcccagagcccaagtttcttcatctgtaaatagaaggtggtcgtaatacttacctcatggggttgttgtgagaattaactgggttaaagtatacaaggcacttagaatagtactggtacataagcattccacaaatgtggcccattattacattattgttgttcttactatactttttctggtcatgtttgttatcccaaatttgttactcataaataaaaaggaaaataagttgggtgtggtggctcatgcctgtaa

SEQ ID NO: 206714 - DNA, 244 bp, Homo sapiens
tgagccaccatgcccggccagggtctttcttatcctagaaagaggacaacacccttctccctgtcctttttctcattctgctaccattcaagcttctaagtcaaagatccagttcatcttttcatagaagtatgacttcatttattttagtatattactaatgaacaactttaatatagcgatcctattaatatttttaacataatttgtttacattataaattaagtgggaaggggaagatga

SEQ ID NO: 206715 - DNA, 341 bp, Homo sapiens
agaagcaatttcccaaacagataaaaacacttgacattggtaatcagcttccaataaaatctcaggaattggccaagtgagctcaggcatgcgcattaagagacaaaatagcagagtatggctttctgggggcattccaccagaaaagggaaaacccaggtgggcatgcatataacttcctaaacacactgtgcatgctcacctcccaagcataaggagggcactgcacatgtgggcagctcacccttcagaaagaatgtagggaaagggatgcaagaggtcagaagtgggccagcacataaaagtcttaggatcaagtttaaatggggaacttgccttca

SEQ ID NO: 206716 - DNA, 352 bp, Homo sapiens
aattctgcaatttcttaacaggtagttaagaaattgcagaattttagcaatactaggaatcacggagcccagaatacaggtgtaatattgcaatttcttaactacctgttaagttcctcaaggtcagagcttctgctttttttatctttctttgcccagcaccttgaatagtgtgggacacgtaattgacgctcagtagatatttgtgtattgaactccatcccttgtcctcctcccctcttgatgtttttctctactggccttatgctacacagtaaagcagggcatgattatgccacttgattacccccaagagattggaataaatgcttatgccaaattcctacagcta

SEQ ID NO: 206717 - DNA, 395 bp, Homo sapiens
aaactcctgggctcaggtgatccgcccaaagtgctgggattatatgcgtgagccaccacgcctggcctaaaaggaccttcttctcaaaactaagaaatatgtcttcttagtggttttagtttatctgcatttccattttcaaaaagagaatatacagataaaataatggactgaaatgtcaaatttagaaactcaaaatatattgctcaatgtaatgaaatctcacctctgaaaaacagtggaaggcatctctgctacattctcaaattttcaagttaaaatggaccaaagctgaagtcatttcagtgcttcaaagctgcatcctctggcccgtgaccacacacacaagtgatttaactgtgagtcatgatctcgacctagcccagcatttctat

SEQ ID NO: 206718 - DNA, 526 bp, Homo sapiens
gactgtggaatccagggtaataagagtagaaagaggtagttgttggtgagcacattccttctctgaatccctgtctactttgattcagtatgtaaagtaccttacacacagtggctacttgaaaagtgttttctttcccgtctttctactgtagcactgtatctttatgccttgtatagcatgcttcaaaagaggcacaaatcacttcccctccttggttgcctcttgaccagtattaagtctagagactgcatagcgagaaacatcaaattacaggtcataggtgatgggacttctacaggggcgatggcttataaattgcagagccaggacttaaacctgggtctcctgactttaattccagtaatcttttaaaatattgccctaccttttgaaacctcacagtgatcctgcatttattatagagtcattcagttgattcataattaatgcttcaatataattagttgctcataaattgttaggttccctgagcctctggggcattggtaaaatgtgatcgctc

SEQ ID NO: 206719 - DNA, 370 bp, Homo sapiens
ctcccatgaatcactcttttctgtcctatggcattttgcttatctctatttttgcatttctttcttctctgccattatataatagcgtgctttagctatatttttgaactcccctacagtctaacatattattggtccccaagtgaatgttcagtaatatctaacacacaaatgtatattcagtgctgcgtctttaaaatacctaaaacatgttatgtgtcattttttgttcaattacttcttgatgtagtttctggtgtgttagccctcttttactattttgctaatattgttctcactgacccctactatttattgctattatatatcctttttttttgtgaaaataaatgctccactctttaaggtt

SEQ ID NO: 206720 - DNA, 370 bp, Homo sapiens
ggtgggagatgtctggaaacatcatggacacatgccgggaaaacacggaagctgtgcaccaaggtgctgacaaaggaaaaaggagaatggaggtgtgaacatccagctagcaggtcccactcagaaactcctgcatttccagacatggccaccagctctgtggatgagacaggggaggacagggtacctcacaccaggaacccacacaggtccatgtcttgctctgtgatcacacaacagcctccaccaccctgacatgcaggagggaggtcaaagcctcgggtccaacaacaggctccacagcaagggaagaaaggcaggaaggaactcagggccaggtcctcccaggcagcagctgcctgcacgctgt

SEQ ID NO: 206721 - DNA, 806 bp, Homo sapiens
agattgtctgagcttcataaatatttaaggtttactctgtactttcatccctttctatggggaagtaactctcttatttcatcctttttatctttgttcagcacacacgtgctctttttattttctctatgtctcacagctctcagagattatcaatttgctccctacgctttaatccattctataagttccatccaactttttgttgcttgctatgacaaaatcgaataatcttaaataatgcagcaaacacacgttgcagcctgtttaagatattttaagagttctttttgatctaggagataaaacacaaagttttcagtacagcaggttcttgtaagcaggttcttaaaatctcctcctggctacatctttagactcatttcctacctctcataaaaatgccctccactaccctacgacacggaagtactcgacatttgctgaacttgcatgctctcttaatctctatacgtggcagtttttaaaatctcttgtctacctggagcactagttctgcacattcattaaaaagcataagctttgctttctctaacaagtattacttgaacaccactatcttcttaaccccaaactcagacccaaatgtgcatgtatatatgcacacacacactcccaatagcttctctctttccctgtgttccttaggtataatgcaaagaactcatagtagtattaaagcacttaaaacattgtattacatttttatatcactctctactccattagactgtaagtaactttgatccagggatcaaaatatatttctccttttatctccagcc

SEQ ID NO: 206722 - DNA, 472 bp, Homo sapiens
agtgctgggattacaggcgtgagccaccgcgcccggccagcccactgtctttcttatgattaaaaattaaatcatttgattaatacactgtagggctgtgaggaggaagcggctggaaatgctattgtattatcttttactcttttttgttcttcccctgtgggaggatggaacaaaatgacttgttatccatatattctggatggttgaaagaaatattctatatcaatcacgttcaatcgtgactgtttaccagggttttcagttattttgggacacctaatagtaatcattagtcctaaaacctaatgtgaaaattaactggaaagagggaatgcaccatctgtagatacagtctaaagtagggtttttgaacttaagcttacaggaaagtcaaaccagagtagtctaaaaaatgaagattggtagtctgcactctagcactccaggaatttatttttcattcacctta

SEQ ID NO: 206723 - DNA, 447 bp, Homo sapiens
ccaggaatcctaaaacatttcccatctggcacttcacaggaaaagtttgcaatttttggtgtaatggagtaaaataatgatactaaattggagtgcctactctgcatgagacatgtgcactgtccatgtattatttcatttatacttcccatctggggagaggtaggtatcagtttcttcaaattataggtgaagaaattggagctaaatgactaaactaatatgtctcagaatcagaagcataactgaaaactttcaggctccacagctcatccgtggttttctacaacaaactctttcactatatacttgagaacaaatgaatatattgacgagcatgaaaacacacagtacacattgaatacataagtgatgtggatgtcaaataatgaagtagccctagagaaatccagctaatacaggaagagttaattgcatcaatagaga

SEQ ID NO: 206724 - DNA, 163 bp, Homo sapiens
cattctacctctgcactgtccaatccatagacaccagccacttctgactactgagcacgtaaaatgaggctggtgcaactgaacaactgagttgtttatttcgttttaacgaattcgaatttaaatgaatcaggggcagtggctcacacctgtaatcccagca

SEQ ID NO: 206725 - DNA, 373 bp, Homo sapiens
tgctcacagccaagaaaagtctaaggagacgtgacaaccaaacacaatatgatatcctggatgggatccagaaacggaaaaaggacatccagtaaaaactaaggaatgtccatacagtgcgggcgtcacttaataataacatgtcaatattgttcattaattgtgatacacgtaccatagtcacgtaaaaggttaataacagaagaaatggttcagatgtgagtgaactctccaaactaacttctcaattttttctgtaaatcaaaactgttctaaaaaatagtctattttaaattttaaaaaatagaaactctaaaagtggcaacctcacagtatctttaccaagtttaagttgagcttggtaagtttcctg

SEQ ID NO: 206726 - DNA, 685 bp, Homo sapiens
aaactgtggatattgacagtttttttctgggctgagaaaactctggaaccatttgctaccctatcagagtggtttgtccactagatggtggccatctacaccatccctggccctctcctatccgtcaacgctttatacttcacccagtaacataggtggaagttgaagttttgtttttcaggttgacccagaaggtctcaactctgggattactcatgccagtacttgtttttggtagactggtgttttggtatacaaagctacttttaagtactgaaaatatcagtaattatatagtaccaatattttagtatatttggaaatctgaattattttgtgattgttatttagttaaggcaaaaagacaaaccctatagtctacaggtctagatatgaaagctgcaatcagccactccattgagtgacccagagttctgtattagttcggagactttctaaccaagtataatagaaacttgacagcattaatattgtctaggcaatagcatcagactcttcatttatatatgatgaagcttaaaaaaaaaagacaaatgctttcaaaaagctatagtccctcacctccaaattaaagaagatctgttttaagaagtataaagcgttgagttacatttgagagacaggaaagaaaggatttttgttcaaaattatactattttatttt

SEQ ID NO: 206727 - DNA, 405 bp, Homo sapiens
caagctgatttctcagatctgccacttactcttaaggcggatccatttgctctctgatatggtttggctgtgtctccacccaaatctcatcttgaattgtagcttccataattaccatgtgttgtgggagagacccggtgggagataattaaatcatgagggcagcttctcccatactgttctcgcggtagtaagtctcacgagatctgatggttgtatatggggaaacccctttcacttggttctcatttctctcatctgccaccatgtacgatgtgcctttcaccttcagccttccaccttctgccacgattgtgaggcctccccagccatgtggaactgtgagtccattaaacctctttttctttataaattaccgagtctcgggtatgtctttatcagcaa

SEQ ID NO: 206728 - DNA, 225 bp, Homo sapiens
ttgaattagtttatagcacaatgacaattatctgctgagaaatactgctatcggtggctgggcacggtggctcactcctgtaaacctagctctttgggaggccgaggtgggcagaacacctaaggtcaggagttagagacaagcctggataacatggtgaaacctcatttccactaaaaatacaaaaaattagccaggcatggtggcacatggctgtaatctcag

SEQ ID NO: 206729 - DNA, 375 bp, Homo sapiens
ctatatttttattagagtaacactagctgctgtaacagataaatccccaagtctcaatgccttaatacaacaacaatttctcatatagcaatattgtcttctaagtggtgatggaggaacccaggctccactgtgtgactctgctatcttctagagaccattctgtgcattcagccagatggagaaagcacataggactgggtgagggttttacaggccaagcctgggaacggcaaaagttgcttttcaccaagtgtacccagctgtgtgccctaggcaatggaatttggcaagcaagagtttttgccaagatataattgctcataattctggtttatttatgaatatctattctatacttccctttatactggt

SEQ ID NO: 206730 - DNA, 695 bp, Homo sapiens
cagcattgctgcaaacatgtctcgcctcccaccatagggcggtttttgtcctatctcagaattgaacaaatgtacaatcgggttttataccgagacattcagttcccaggggcaggcaggagacagtggccttcctctatctcaactgcaagaggctttcctcttttactaatccacctcagcacagaccttttatgggtgtcgggctgggggacggtcaggtctttctcatcccacaaggccatatttcagactatcacatggggagaaaccttggacaataccccgctttcaagggcagaggtccctgcggctttccgcaatgcattgtgcccctggtttattgagactagagaatggcgatgacttttactaagtatactgcttgtaaacattttgttaacaaggcacgtcctgcacagccctagatcccttaaaccttgatttcatacaacatatgtttctgtgagctccagattggatcaaagtggttgggtcaaagtggctggggcaaagctacaaattaacaacatctcagcaaagcaattatttaaagtacaagtctttttcaaaatggagtctcttatgtcttccctttctacatagacacagtaacagtctgatctctcttttccctacaataacatacattacaatgagttgggaaataaatgtctctccaagactgaagcccc

SEQ ID NO: 206731 - DNA, 204 bp, Homo sapiens
tttggaagccttttttttctgttaagaaggaatttccagaatccatgatattttggccaatgcagagggtcttctctgagtatagcccatgtttccctgttgtgccttaaatactcttttctcaacttctaaatcaagtcaaagaatcagctcaagatttcttatcaaattttatgtactccataaagtcttactaatgtcact

SEQ ID NO: 206732 - DNA, 503 bp, Homo sapiens
agggggttatagagttaaataagacagcacattgctttctgtttttaatggcggacattgctgatggtttcatagaaagatgcaggaggaaaaatggatacccaagggaatgaagtcttgagaaagcaagaagcaatgagacccaaagtcaaatgaagagactgtcctgctaggagcagggacacgtgtattgtaataggaagaaatatgtgtgtaagtgaaggcagagttgattttctcaagagtgaggctgagaacaaggagtgtagttatgtttgaggaaacaatgtttgagaagtcatattatttgtggagatacactattttgtttcatttcctctaacaagtgtcattggcatagtcatagcccctaaatatctaaaaattaattccactttaaccacctcccctagttcagtgatagataattttaagtgaaaataaccatgcaaatagccaccttatgtgacactttattaaaatgataaatgatgcaatcaaaa

SEQ ID NO: 206733 - DNA, 534 bp, Homo sapiens
ctaacgaggacttggtgcatttgagacactctcagctgtactttgaattttgattccagagaggtcacgactctggtcaagagggcagacagggaggtgggaggacgggttgtgtgcaccctggataggccggggtagggggaggagaaaggaacggcagatgaggggtccatcttgggtggagcagaagttaaaggtgagagccctccactgagaaagcgcagccctggatctaggcctgaggaatttggagcagaggggatggggtcacatccaggatctgctgaaaatttgggggtgtcgaggtcagtgagggaagcctgagtcccacgggagcaggtggcagtccagctgtttacatgctagaatgttctattgaacacccactgtgagccatgtgcagatgcccccccacactcagtgctgggagcacagaaatgactcatatctggcctcagtctgtttggatagacagacggtatggccagtgctatggagccatcagtgctgtgatggtgggaagaggagcagggc

SEQ ID NO: 206734 - DNA, 408 bp, Homo sapiens
acattccatacactatgcatactaatactccatactatcaattgccctcatcagaaggatcttctggctaaccagtgatcaacatttttaatagcaaaaaaggtctgatacttagagaacatgttaaccacgtgaactggggcaggttactcaacctctctgcatgtgcctcagttttatcgcttgtggaatggtgatggtaacagtaacaacctgacaggtttttgaggattaaaggaactaatacacatacattatttcaacagtgcctggcagattctaggcattaaataaatggtaactatcactattattatgtaaaaagtataaaaatctgctatatgaatacttatggaaaattacatatatacatatagacacacatataaactattaggtctctttttt

SEQ ID NO: 206735 - DNA, 374 bp, Homo sapiens
aatgtgcaatagtctaaaagatgcagctgacgatgaattagtaattggaagagcactttcagcaaacctccagaggcagtagaaaatgttttaaaaaacaagttagcttatttgtaaattttctagcttatatctagggtaaaactagaacagaaaggaagaaatataaaaacagagaaggggaaatatttgaagatataatggagataaatttcaaggtagaaaaaaaccttcagattgaaaaggtttatctcaagcaaaatgtttctatatgtaagtatttaaaagcataactttgaacttattttctattaagccatattgtcattagaatgtgagaatgtattaataataaaaatattcttatgaaagat

SEQ ID NO: 206736 - DNA, 505 bp, Homo sapiens
ctcgtccttatgtttgcgagattcatccatgttgttacatgtggctgtccctttgtttttgtgctgtatgacattctactttatgaatataccagtgtacttaccattgtgctattgaggatatttgggttgttcccagctggggactattatggatagtgctgctgtgtgtgcctttggggtacatgtgcatacattctgctgggtatgtacctaggagtgggattgctggatcatggggcgtatctgtcttgaactttagcagaatcaagccaaaccattctccaaagtagatgtaataatttgcattcacacaagtagtgtgtgaagatttctgttgttccatagcccgagcaacacttaatcatatcagactttgatgtttttagccattgtggtatataatggtgtatcattatgattttcttttgcatcaaccttacttactactgagactagatgccttttcctatgtttattggccatttggataattttggttttt

SEQ ID NO: 206737 - DNA, 510 bp, Homo sapiens
aacgccctgaggtgactggccctttcttcatggattccggtcacatctggtccatctttgtcagctggcctctgggaagaatgtgggctcggccacctggagcagttgcctggggagatcagaggagccctgaggggttggcagagcgccctcgtggtatccatacccccatccctgtagctgagctgattccaagaagtgccctctgcttccttgtgaatcagatgtttactgcgctcctgctgagcctgctccaggcagctgggtggggccgtagggtgcctgtctgctcaagcctgcagagggaggccagctccccaccccagggtcagccaggctggcaggcaacagcctcaagaaggcagtgtgcgtgccatggcacacggggctgaggccgcgaggcaggggccgagggaagcggcacagagcttctctcaggcaccagaggggagctgagttctgggctcagagcaggcttcgtctgagggcttcagcgtcctccttgtgaaa

SEQ ID NO: 206738 - DNA, 496 bp, Homo sapiens
caaagatcttaggtgctggtcctgtccctcacttatgggaggaactagtggacagctactgaatgtagttatgggaaagatgagtggttgtgtaccacggcattcattcattctctagattgggcacttgctatgcaccagcacacgctaggtaccagctgaacagcaagacatggtgtctcctccctggagcccacctcctgtgctctccagcaagtgccagggaggggagtcagaagtccaaatgtagagcagttctcagtaggaagccccacctgaggaggctgaactccgcatggagagggtgtggcactggttgacctcctggactgtcacacaggctgtggttaggttggtgccatggtgctggctagaatggagccagagggacttagacctcatattgcacctgtccaacatggaccgcagtggtatggcacgtggcaggcaggaaccatatcaagtgggtggtggctgcatctgggccatgtcccct

SEQ ID NO: 206739 - DNA, 239 bp, Homo sapiens
atagctttctaacatacaaggaagcaggaggaccttggcatttccgtcatagtccagacctgatgttgaaacctttacacagagcctgctttgctttgagaccatcaacactcagattcaatactaaaaatcagtgaattgtatagtctaaaatggtgacttacgtgaatttatggtctgtggaatatggcatctcaatttgttaaaatgacagacattaaaagactttgaatgttgta

SEQ ID NO: 206740 - DNA, 933 bp, Homo sapiens
ttgagagacatgatgttgctctgtcacctgggccagaatacagtggcacaatcttagctccgtgtagccttgaactcctgggctcaagtgatcctcccacctcagcccctcaaacagttgagattatagtatgaaccactgtgcctagccttaagtgatttttaaatttgtactgaacagtttgtcctttccttccattaaatcatattagaagtacagaacttgatatttcctgtagcaatacagtttttctttgatgaagtttgatttcaagtacttatttttcataatttaaagctattttttatagagagaattttaatcaaatatttggatgtcactattgctatatatggtattaagtatggtgaccatagtttgtaaactccaaactgacagcaagacaggaaatttgtgttagcaaaggcttttttcttactgtttgaattttttaaaaattagatacaatacagagaggagcacacaaatcattaagagtacagctcagcgaattttcacacagtgaacatgtgtaaacagcaagtaacaaaagatttacctgcatcctataacctcccattattcccttttctaggtactgtctctccactgcattcccaccaaatataaccactatgctgaattctgacatcataaatgagttttgcctgattttgagcttttgtgactggaagtgtacagtgtatataccctttcgattctgtcctctttagtttaccattgtttgagaaatttatccatactgttccagaattaactactgttaattattgttaattaactactgttgtagttaattcatcctcattgttatctagtattcttttgtgagtaaacacaatttccattctactgtgatcccagctatccatttgggtcgtttccagtttggggtccattacaaatagtaat

SEQ ID NO: 206741 - DNA, 152 bp, Homo sapiens
gtagaaacaatgaaggcctgggggagcgatggtggtggggatagaaaggaagacctatgggagaactgagagttaagacacaggggcctccaagttcctggttagggataactgggtgcctattcaccagaaattagaaacagaggaacagg

SEQ ID NO: 206742 - DNA, 531 bp, Homo sapiens
gtggcagaggaacagtgtgagcaaagaccaatagtctgggaaaaggaggaggataggctgtgggcggagcaggaaatgtgggtggttctctttgccaaggattctgaatgccagatgagcaggatgaatgtatcttgtgggcaccagagaggcctgggcctcagcctgccccctgtaaaatgaggtgattagactggtctgcttcaagccttcctagggcaaggggctgtcacagaaagggtctactctaggttcttccaggttcaaccctggaaaggcagaatgggaagtggctggagcagctcagaggctaggggtaatattttgctccagagctcaagtctgagaatgactattttaccaagctgtctgtgttgcatccctaagtcaccctggctaaccctccacccagtcagggtccttcagagaaagcccaggccttgggtcaggaggcaagaagggtgatgggtgtcttacccctggctccaaccctaggtaagggttggccctcttggagcttcaacttgctca

SEQ ID NO: 206743 - DNA, 323 bp, Homo sapiens
tctctcttacaggtattatgtaaaaaatagatttggaggctcacaagaaataaatgacagaaccaagatgaaaaagtagatttctctctcatccataatattttattcctgaatgtaattgaaatttaaaatttttagatgcagcacgcacaaaaaccccattttcaagagtgtaaatccagctatggaatatcttttcacggtatggtataaaatccagcaaaatctcgagagatcacttgagttagttttgccaaaacaacaacatccccataaatcagctgactttaaaaaatgactcaccgctccttcagtctttatca

SEQ ID NO: 206744 - DNA, 365 bp, Homo sapiens
accttcctatcccttgcaaagccctttgataaactggcaataaagacagtatcagtagcttgttatgacaatattagttacaatattgtttaatagctttttagagcctagcacagcccagaacataaaaggaactttaaagaaaaaaagaaatagtcattcaatggtttattcaagatgtaccgattgaaaagctggacgagtcaaaaatattatcagtatagttctcttgacagtaagtgggaccagcctagcacacactttctctgccaacatccccccactgtcctcgctaggaagtgtggtccattaagtccttgaatcctcataagagtgactttagagttgtaactatagagacaaac

SEQ ID NO: 206745 - DNA, 503 bp, Homo sapiens
gatgaggctttttgagagaactcttactaaggtgaaggaccagcgatttacgtagaatcctagaatctcaggagttcttagtggagaacctgaatggcatcactgtcgaatatttgaaatccttgttagcacttggtataaaaactggaggcagttttagagtgcagccagtgtagttaaagtaagaattgaaatgatactaaatggcacctctgtttcataagtgaaggtcaaattctgatgtaacccttgtactcttggaattatactttaataggtgcttatgtcattgatttaccattttgcttaatggctaaataagattgctaaagtgtgattttattcatcagtacttactttatatttagaggtatagaggaaaatgggccaaaaaccacatggctgccacggtgcacttcagcaaccctgtagctaacctgtttaagtagaatcaatctgaaggttgaaagtgacctcaaaggttataaagtctattcatccct

SEQ ID NO: 206746 - DNA, 284 bp, Homo sapiens
  misc_feature (45)..(45): n is a, c, g, or t
gtcgacctcggtccctgttatctccgcactttgagaggccaacgngtgggcattatccttcagcccagagttcaagaccagcctgggcaacaaagcaattctcccgtctcagcctccccagtagccgggcgtggtggcaggcgcctgtaatcccagctactggggaggctgagacaggagaattgcgtgaacccgggaggggaagcttgcggtgagctgagactgagccgctgcactccagcctggcctgcagagcgagactccataaaaaaaaaaagaaaaaa

SEQ ID NO: 206747 - DNA, 666 bp, Homo sapiens
aggagaccaagattagtgcctctaatttatatacatgaatctgctagcagcaggaataaggcttcattttaagggcatggcagtattacctcaaaacaggacaagtctgataatctacttggtttctatagttagatgttagctattcaacttttgttatatacatttcatcctatgatatgtaaagctgagaaactcgtgtctacatcaagtccaatattctgaaatccaggatctcaaaatataggggttagacgcactttctaatgagaagataaagctcaatggtggatgatgtgtgtgtgtctattaattacaaatggatcactctgcagaagtactgtgaagcaaacaaaggaattactacaaaaccaaaaattatacaaggaatatttttacaatttgttcttgaatattcaaatttttaagaatcagatatgcttaagtggcaactgatgaggcaccttcaagagtaagtatgcaaaaagaaatgtatagccaggttctgaaaaaagaacaaaaactcaagactgaaaagatgacaatttgaaaacaacttcaaagcttatagtcaaggcaaagtgtattaaaaaaaagaaagggaaaacatcagatcttattaatggtgggaaagacacataaccaacctaagaggtagtctacaga

SEQ ID NO: 206748 - DNA, 480 bp, Homo sapiens
ttcagtattctcagtcaaatcttgcttcatacttattataaataccctgaaggagtcataccaatgtgttctctgtaaatgccatgaacaacactttgtttttgtataacggttttcatgactattgtattaatagcacattcaataatatttcaataggtcaaaattatgtcatatgttttcttacaaatttttgtcattttttagaattaatgctacagcccagaaaataaatattattatgaaagcttgtttgtaaaaaatttcagtaattttatatctttttggtaagattagtggcttctattgtatatatttacaatggatatcaatgttgatattgagttatccaatctaatattcttaatagctccagcttgaactatgaatggtagatgactatgttctgtacgtataccaatatgagtatttttctatgttaaagattttactagaatccttaaataaaccataatcatc

SEQ ID NO: 206749 - DNA, 391 bp, Homo sapiens
tgatatgatgccctgcgaaggtgtattagtcaggattcttcagagaaaccgaaccattaggatttattatatggagttggctcacacaattatggaagctgacaagtcccaagatctgcaggatgagctggcaagctggagacctaggagggaccagtgtcccagtttgaaggcagttaggcagaaggaaatctgtcgtcgttactcaggtgaggggtcagcctttttgttctattcaggccttcaactgattggatgaggcccacccaccttagggaggacaatctgctttactcagtccactaattcacatgctaatctcatccagaaacacccacacagacacactgtgctatttttgcaacatttctgtaaatctaaaattatttta

SEQ ID NO: 206750 - DNA, 602 bp, Homo sapiens
agaaaaagcttgaagattcacagtggagcaaggctaattggagccttcctcagagcagctcaactatcccagttttacctatcccattccttgccattcccacttgtaattctgtcttggcaagaacaccatactgaaggttcttaaagcagtttgtagactttaattagttctgtggaaagtcagtcaaagctcagccttcattctgccaacagagacaacagtggtgggtgtggaaggaaggcaagaagaagatggacacccagagcagttgtgcaacttactgaaggccatgtggataggaggaactgggtttaaaacccctgagtcttgataaaagtgtcttagccttctagattcctaaacaggtagtgggctcatcctactaacctactttgctagggtgttgttgatgaatgcttataaaccctgtcctagatgataggtttggaagattgttaaagaaagcatgtcattaagtccctactcaccccctccttgacaaatagccctggagggaaatgaatattagccagaatcgtagggcctccacttcaatggaatgaactgagattcaacaacaagagaaatgttccaacagt

SEQ ID NO: 206751 - DNA, 617 bp, Homo sapiens
aagacgtctctgcgaagctgtaatatcctatcttgccgccatcagtgtctattgtcatcagtcacccagagtcaagaagatctgaagaggatcaaccagtccccacatcctgcaacctagtcttcaaagtcttacctacacaaccattagatccttcttccctatcacttatatatcaattagcacttaattccttctttacatgtctgtctcctcatcaaactgaaagctccatgagggcagaggccagccatctttgtattccagtgtatacacaggttagctggcaaagtatatgttgtactgagttaaagaataaaaatctagcctggtgcggtggctcacgcccgtaatcccagtactttgggaggagacaacttgtaaaaaaatgggagtaaaatttaagccctttttttcccctagtaaattgaccagaattttcatcataacttaaatataaatgaagattcccataaggcatttaaaaaaaattgacttaaagtctcattcattcattgtgagtcaacaaataatttactgagggcttgttatgggccagacacttggactacatcagtccggaaaacaggcaaaatgtctgccctgtggagtccatc

SEQ ID NO: 206752 - DNA, 383 bp, Homo sapiens
atccttttatataagaaatttcctgttatttaaaatttataacagctttggctgctaaattttatcaaaactttttgggacatatattgatacaaccatatggttttcctgcttacttaataatttacagaatatcaccaattcctgttaaactactcttatatttctgggctaaccactgcttgtcatagtgtgtttactcttttaattttcaacttgctttgacttgccgagattttgtttaggattattttaaatgtattcaaaagtatggttgccctttagatctttggggggtgctgtcttgaacagttttagtaatagagcaactttttattttttaatagaactgctatttaattttttatttcttaattggcagg

SEQ ID NO: 206753 - DNA, 262 bp, Homo sapiens
cttaaaaagtatccccccacagataagggagaagtattatatgcatacatctgtaaaaccatttccataattgaaataaatgtatcattttgactttttttggttttctaataccttaatttctgactttatatttagtagtatgtacttacatgtgtgtgatatgtatttcattctttgtctagttgcttatgtgaaaactattacatttatttttaatatttatttagtctttaaaaataaaatcaattctcatttatgt

SEQ ID NO: 206754 - DNA, 477 bp, Homo sapiens
ctttgcaggattcatttaaggacttactaaaattgcctttatgtttctagatgttttagttttttccttaatattttggattttgcaatgcttttactgtttttggatggcttttaattttttctcattatattttcttattgattacttttagtatccacacactctactgaattcttactaatgttaagtggttacagttaattttcttgagttttctagttgttatttcttatggaaattgtattcctacttgtgttcaatatcttgtagtaacagccacaagttctagaaccattgagtactaaagggcagaacatgtatgtgtgttttgtttctaaatataatggatatcatttaggttttcacaactaggcatagtgacggttgtcaggttagtaaagtattacttatcatgttttatgtgtattttatatttaagattttctcaataaaaataaaagttttattgtaaaa

SEQ ID NO: 206755 - DNA, 558 bp, Homo sapiens
ctgcattttaatttttgtacctcttctcagacgctgcattgtatgatagaatatttattttattattaaaaatggtgaattaactagcacattgctttttctatcttaataacgactatcttaattctgtaaaattataatgtaagtcttgagtaaagtagtcattgcagtattttataatcctagtcatataccagagctttctcaaggggaaaagtattatagttatctcttcaatatttgcttgtgtgaaacagttattaacaccgtttatagctaaccctgtctgtagtgactgttttgagaaccctaaatctctaatttaaaggcccaagattttatcagtttgtatggaacctgtgtttgctcctcagtcctggtttcctaataaacttatgaagatatttgtgatggatttctgaagatttcgagtacatgtgaggggattcagtacaaattacagggattcaacacattgacagcaggaaaaatgtaatgaattgttaggtggggaatgatgtaaagtgaagtaatctgaataaaagcctatattatatt

SEQ ID NO: 206756 - DNA, 180 bp, Homo sapiens
tctaggaaaaagagctatgtggaaagtcaacgtttgtcaaatgctctcagcaaacagtcagctttacaaatggagacagcaggaccagaagaggagccagccggagctacagaatccttgcagggccaagatctcttcaacagggcttcaccactggaacaagcacaaggtactgaacta

SEQ ID NO: 206757 - DNA, 557 bp, Homo sapiens
ggaagtaggccccaagttcccttggcaacaagtagagtagaagcgatacacagaaaactgagtcatcggtgaatcatctgaggatttctgtttccaatccttggaaataatttaccgattgttttttatttgtgcagtgtttgctgactctgagtggacacctcagaaactgtaacatctttggtcaatttggtcaatcgtttaagaaacattctggatgctccaagtagaccttaagattgatatccaaacaaaacaaacctctgcttgctttaagatgacactcactccccatctgaggaggaacagataagtgagtcaaggtattggcaatggggaagtcccctttctacaaagaaatctgatgtccccagaaaaatgtttcatgacattgtcacatttaaaatgttagtcacaacaaattttcagacacctaaaaagagaacaaatatggtctcatacattttctctctctcactctgtctgagacttatgttcatcagttactcaattcccccatttttttttttacaaatacatctcttatataatccctt

SEQ ID NO: 206758 - DNA, 543 bp, Homo sapiens
gggaaacaaactctacaggtcatatgccccaacttcttcaacagataacttgaaagaaaggggtggagggggaacccatagatttaaaaagatatcaaaacatttttaaataggcaaggctaacctcaaaaatacgatgctaggccaggcgcagtggctcacacctgtaatcccagcactttgggaggccgaggcaggcagatcacttgaggtcaggagttcgagaccagcgtggccaatgtggtgaaaccccatgtctactaaaaatacaaaaattagctgagtgtggtggcaggcacctttaatcccagctatcgggaggctgaggcaggaggatgacttgagcccaggagttcgaggctacagttagccatgatcacaccactgtactccagcctaggcaacagagagaaaccctatctcagaaaaaaagactcctgagctgttagaagagatcagatccccacacatttcattcatagtaatgagactatttctcatgagcaaagtcagagtagccaggaaaatgctgctttacctcac

SEQ ID NO: 206759 - DNA, 482 bp, Homo sapiens
aaatgcctccttgagatataagttatttttgagctaaaggcaataagaaactgcaaattgagaggaagctatctctaccctcttctctttctgcctaaagataggaaaataaattctttatagatgacaactctagactcatcagcccagagatgacaccagaggaatctgcaaacaaactttactccattagtttcatccccaatatttaccttcccacagttgcgtgcccttggaagtttaaaactgtttttctttgtctgtcattcctttacaagtgtattgttctttattgaagatgttctataagtggagctaagtcatctttttgaggtatttccattgagatttctccagtgtggtgtgtgtggcatgcattaatacacttgtttgtttgtttgtctgtcattaatctgtcttgtattaaaggagtctgtccaaacctaagaactatgatgaataaaggtaaagtttctactcct

SEQ ID NO: 206760 - DNA, 414 bp, Homo sapiens
ggtggcttcaggacctgttctgtttgggtttggtagggacagggcagtggcccatattttcatattttcattactgtagtagaaattgttggtgtctgtggcaggggagggcacctgtggacggtaaaagaggaacatatatttttatttccgtggagcaactcattgttcctgaatctcttctgttataaaggagaaagatgagtggactttttggtcttggtccttctgtctgtgagtgtgaggctagtaggtaagcaggtggtgctgatgcctttaagggacttgtctcaagatgcaggtgttacttgtccagagaattttatctgaaaaggatttctagaggaggagaaagaggaactaagaagaaggagaggaagaataagaaggaaagaagaaagaaaaaagtaaaag

SEQ ID NO: 206761 - DNA, 405 bp, Homo sapiens
ggtggcttcaggacctgttctgtttgggtttggtagggacagggcagtggcccatattttcatattttcattactgtagtagaaattgttggtgtctgtggcaggggagggcacctgtggacggtaaaagaggaacatatatttttatttccgtggagcaactcattgttcctgaatctcttctgttataaaggagaaagatgagtggactttttggtcttggtccttctgtctgtgagtgtgaggctagtaggtaagcaggtggtgctgatgcctttaagggacttgtctcaagatgcaggtgttacttgtccagagaattttatctgaaaaggatttctagaggaggagaaagaggaaaaatgcttcttttcagctaaacatatctcagatcaagagctgtgt

SEQ ID NO: 206762 - DNA, 301 bp, Homo sapiens
gaggattccgtccgaccggaagcatctttaaacttcagtaaatgcattgtgtgcttgggagtccactcattctcttctcctcaacttaaaaaattctatctgttcttcaagaactggctattccatgaagctgtccgtgtttgttttggttcttgctgatctatttcccagttgttcaaacttttccaacacttaaacagtctgctgtatatttagacactgattttgtgtcatttgtgtcttcattacttaatgggttcattatgtagattatgacagcagagatctctttcaaaccctg

SEQ ID NO: 206763 - DNA, 878 bp, Homo sapiens
ctgcaaagtccattttgtggtgtcaggtaaaagattcacaagttccagggattcagaccgggatatctttggaggccattattctgcctaccatagggtctcagagatcctcctcattgcttccctctcccacccaacctaggggagtgggggtgtgcaatggtatttctgacccagacgggccaagcaggggagtcagaaaggggcccttgcctggtgttgcacagaagagggagaggatgttctgtgcctgagggtagaccaggaaggctgcctggaggagggagctgtatcctaaaggatgctcaggagctggcattgaggccagtggcatagcctgcacaaatacaggaggacctggggaggccaggggtggggctgggggtattgggtggggctggccgcattctccgtcttaaccagctcgctcctaggtgcttttgtggcttctgcactctaccagcttggagccaggggcctcattctctcttgcagtaaaatgaggctgatgactgagcctaggagttgctgggcatctggtctgctgattaccaccttggtgcccaatgtctgcctgcctatccactgctttcaaacaaggaggctgcctgacaccacccagggggacgcctcccacccttgcccagcctcagccaatctcctctttctcttcttcagagctggagttgtgccctcctatcctctctctgcccaccccatcactgctgtacaccctgccccttggcacttcggccccggacttgctcctcctggcaggcctgggtgcttgtgaagccgggtgccagagggcccagcacggcacggcctttgattctgttttctgtaaatcgacgacaataaattctctttttccttca

SEQ ID NO: 206764 - DNA, 412 bp, Homo sapiens
gcctggaggacagagaaattaatattaaatatgaacaggctgataacgactttttattttgcaagtagtcttcttttcaaattttattagaaacaagatttcctcattgactccacgataatttccagagtcctcaaaagccgtgactgaagtatgagtatgttatacaagtgattgtttttagctttgaaaagtaaaacatgctcattgcagcaacagccataaagactagtacagtgttgtacaaacaagttaaaaggcccccaccccaaggcagccctgttactcctttagcccgtgcattttgttttttgtttcaggcttttgtatgcactcaaacatacacattaatttcgctagctctgcactggtcattttcaaaactgtaattgaaagtcactctgtaatactg

SEQ ID NO: 206765 - DNA, 803 bp, Homo sapiens
cattataccagggaatcatgagaacttttctaggaatcagcatttgtatactgctgtatgttgaggttgaagttaggggaatatcccagtacgttttatgatgataacataactttaatgctccaacctgagaaagataaaatagactaagatgaccattgaatgcaaacagaaagttctaaatgaacaattaagcagactgaattcagtcctgtgttgaaataataataaacaattctgtttcagaaatgtaaaatagtttaataccagaaattcaatcaatataattagctaataatatatttgcatcagccaactaatgctacaatgttgtataacaggcaattataaaatctcagcagcatgcaccagaaagcatttgttgagtgtcagtgtgttggctggagtttcattgacctaggctggcctcatctggagaggctctgctccacatggctctctcatcttctttggagcagaagaatgtcgagcccagatttggagctagcaaagccatattcttctcatgatgatggcagaggtgtgagagacaaaaaaaacattcaaaggctctgccggcacagtttcagaactggtacactgtcatttctgcctcactctattggccaaaaatagttataagactgaatccagtcaagggttggagaaataatactcttcccttttaaatgggaggaactgtaaagtcacatgagaggggtgaaaaattaggacctgatatggaaggatgtgtgtcccttccaactctcaagttgaaatgttacctccaatgttggtgatgg

SEQ ID NO: 206766 - DNA, 580 bp, Homo sapiens
ctgttgatagaacctaacagtgacccagctatgaaaggagaaattttgtttccagggcctaacctcagcatcagagaataaattatagaaagtatggaagtggagctaaaagacaacaggtaaatgacatctctggtttaatcctacctttaatcgtataaagattaatcagtgattttaggtgactttagcctaatccgtccattattaaattctcagtgtttaatctaatggttttaacatccattggttactgttacctagataatttattattttattagtggccacaacacagaaatttcctgattttaatatcctttatgcatttattagctggaattctataaagaagaacattccctcatcaactatttggttattttgaaatacagtttgtacaggaaaggcaggaaagatcttgattatttctctttatcatttcagagttgggttgggtacagtggctcatacctgtaatcctagcaccttgggaggttgaggtgggagaatggcttgagcccaggagttcaagacagtgtgttcaacgtagtgagacctcatctctactaaaaataaa

SEQ ID NO: 206767 - DNA, 214 bp, Homo sapiens
gaatgatgtcctctaaaaattcctgtgttgaagtcctaatggccaatacctcaaaatgtgaccttactaggaaagagagcctttaaagaggtaatcaagttataagaaggtcactagggtgggccctaatccaatatgactggcatctttataaaaaggggaaatttggacagggcgcggtggctcacgcctgtaatcccagcactttggaagg

SEQ ID NO: 206768 - DNA, 409 bp, Homo sapiens
ctatttccctcatcaaacttctatagctcaaattctcaaattcagacacttctcaattaaaggccacattaaaatgcaaataatatgtgggaccgtaatcacactttagcctcagcaacacacattatctcttttaattcacacacagccattttcaacacagataaaaaaactgaggcttagaaagcttaaatgattggctcaagataacacagttcttaagtgggaaacccaagcttcaagccaaagccttcaaaatttcaatcttagagtaatttaattgcctcaaattagccttaacagggggcagaatcccaaaagaaagcaaaagaggaagggggaaggtcaaagaaagtatggtcctggagctgggaatgctgccaaggggaagatgaaaagaatgaaaaag

SEQ ID NO: 206769 - DNA, 525 bp, Homo sapiens
ctcctaaagtataggacttaggtctgattcatttttgtacctctagagccaaacatggtgtattagtttgctcagactgccattattaatacaatatcacaggctgagtagtttaaacaacgaacatttattttcttacagttctggatgctggaagttccagatcaaagcccagcagagttggtttctagtgaggagtctgttcctggcatgtagagagctgccttctagctatgttctcacgtctttcctcaatgcatatgtgaagacagaggtcaggccagggggagggagagagggctctctggtgtctcttcttataaggacagtaatcccacatgtggtcaaggccctacccttatgatctaatttaaccttaattacttccttattggtcctatctccaaatgaagtcacactggggattagggcttcaatatatgaattttggggggacacagttcagcctataacacatggtcaatcatgatttaagctgatttggaaaaaattaagtctcaattg

SEQ ID NO: 206770 - DNA, 261 bp, Homo sapiens
  misc_feature (26)..(26): n is a, c, g, or t
atctaaaggatccaccttagtcgtcngaagggcttcagagtaattccatttgcaaggaactcaggtcctttcagcacactggattgagagtgttgaactggaaagtagtactggacataacaatctgcttctccccagactgttgcctgaagaggggctagccctttaaccatctctatatggatctcaaagcagtgctccatcagtccatttcctcggtcctctgccatagcaacagatgctgcagttggctggtccacg

SEQ ID NO: 206771 - DNA, 404 bp, Homo sapiens
gttattccttaaagctaaatcctagaagtagtagaactcttggttcaaaaagtatgtacacttttcaggcttttgatacattttatcaaaatcccttccatcaggtcttcctcttgaggcaggaaaatagggtctggaggcagggaacataaggccaattcacacttcagctatgacaggaaatatcctctccatgaggcatacaccaagtaaatgactttgtaactttacttcatcctcttcatttacacagggcatacatgaagtaaccaatggaatcctctagggggtatttaaactcccaaaaattctgtaacggggcccttgagcccctatgcttgggtccattcccaaactgtggagtgtactttcattttcaataaatttctgcttttgttgcttca

SEQ ID NO: 206772 - DNA, 317 bp, Homo sapiens
gttcagtcatagctacatgtacgcacaccaatgtggactaacactaaactgttatgttggaataaatgactcatttttttcagccaccagcatgcctgatggttaaacaatagaccagtctaatatttgcatggcacaaacagctaagttatttttgcctttaggacaatgttggggcactgcttacaaattcttagtgatcaatctctgaatgtttgagccaattgctttcctggagaaaaataatgtagaacaatttatttatttttttttttgagaaggggtctcactgtgtagcccaggctggagtgcagtag

SEQ ID NO: 206773 - DNA, 380 bp, Homo sapiens
tggagaaggtcccctcatttggtccataaaatacatacacataaacagttaaagaacagcagaaggcatgtagtatgagtaagtatccaggggtggtagaagcattcagtttaggagttcagaaaaaggagcagtcattatcagaagtatggaaggagaatgggagctagagagctagacctgggacacctgggacatgggtagtaaaggatttaacgacaaatcaagtttgagttctcgccttacaccaatcagtgggagagggggtcgcatgatgacacaatcagatttgctgaacagaattagttggaaggggaagcagtgttagaggcagggtaacaataatccagatgagagagatgatgactttctgaagtact

SEQ ID NO: 206774 - DNA, 231 bp, Homo sapiens
agtcggcagtttccagtcaagtcctattctctttcagttgagttttacaaaaatccctctcttgtatgtagaacaatctcatttctgccattcccaagtcctcagggtgcatctcattgtcgtcttcctttacatcctacagtaggtaccactaaatattacgtgattgattatctcccagctccagtataaaatccttaatggcgtaggctacagaaacatttattttat

SEQ ID NO: 206775 - DNA, 399 bp, Homo sapiens
gatatgggtctcatagagcctctcctccaatacacagcttttaatgagaagagcaaagggcttatgaattgaacttccatggaaaatcttcttctcctgactcttcaaacacctctcttcaatgcctgtacactccacatctcccctccagctagtctgggggttggaggaggcctgaggacttcccagtcctaaggagcacaaaggatagcagacaagcaaaaaaggacagggaagtaggtcccttagtcttgctctcatctgagcccttggtggaaagggcagaaaagatttctaagcctccctatggcccattccttccagggatgtggagcaaaagtccagtattaaagagcaaagccatcaccaccctctcatgtcttctgggagacatgcatt

SEQ ID NO: 206776 - DNA, 370 bp, Homo sapiens
agtgatcaccttttgggggtccgaaaatatcctgagattttaccttcttattcttttaaaataaatagtgcttactctaaaaaaatgtgaagactaaatttttcttctctgaaatatatgcttattcttgtttatgtagtcttggacagttggaaatcaatgcttctattacaaaatataggaaatgaaaaggagaagttgtaggaaagagattaatcatgtcttagatatgctaaataaataagtatatacaagggatataaagtaaatgttgtcttgttggtggttacagatgtagggctggaaattgggagatatttaaaggcttttggtatacaagtgagttacaaacatgtatgtagtagttgaa

SEQ ID NO: 206777 - DNA, 465 bp, Homo sapiens
caaggatttgatgcaaattagtaggagggattatttagtaaatattatttgagaataaaattggctaatcatttgcaaaagagcagtgcattcctatctcactcttggagcaaatgcaaaaagccccaaagagtacatagaataatagtgagcattcatgtacccatcttctggcctaaatcatcataaccttggtggaagctttccgtgcccctcccaaatcacattctcccatggcttctgagaagtaagcattatcttaatgctgatgtttaacattctcatgaatccttttataattccacaatataagtatgtacagtattcccccttatctctggttggccttcacagtttcagttacccaaggtacagtacaataagacattttgagagagagagaggctacattcatctaagttttattacaatacattttataattgttctattttattatgtttg

SEQ ID NO: 206778 - DNA, 183 bp, Homo sapiens
ctgatcttgtggaagaatacaattgaccattgaacaattcgtgggttaaagggcagcaacccccgtgcagctgaaaatccatagataacctttgactccccaaaaacttaactactaatagtctactgttgaccagaaaccttgctgatgacataaacagttaattaacacatacttggtcta

SEQ ID NO: 206779 - DNA, 403 bp, Homo sapiens
atctgtttttattcaaagcctacgggtttcaatgttaatctcatctataagaatttcttcacagaaacatgtttgaccaaatatctgggtaccatgacctagccaagttcacacataaaattagtcatcatgggtggtcaattgagagttgtcatggcagctgtgcaccatcagcagggacctaagatctttcagtatttttttatttttatttttttgagatggggtcttgctatgtttcccaggctggtctcaaactcctgagctcaagtgatcttccacctcatccttccaaattgttgagatgtcaggtgtgaaccaccatacctggccctttcaatatttgtatttcatcatttttaatacatgccttttatcttctaggttgcctcacggtcacaaa

SEQ ID NO: 206780 - DNA, 269 bp, Homo sapiens
atctgagttttactagtatcatctctctgaaagacattttacagcgccaaaagaaaactgacttgtcatgttctgataaagtttgttaaatctaaaaatgttttctataggaaaataataaaggaaaactaaatgtggagcattaggagtccatgttcatgcttcacagacactgacttgttgagccatcttaatcactgacagttgagtcagatgctcttacctgaaattctctgacagaaaaacaaaggctatagtgttttttcaag

SEQ ID NO: 206781 - DNA, 586 bp, Homo sapiens
cctggtcttggaagaatatccctgtgatacatttagcagttcagcagctttaaggcagacatttctatagctctaattgcagccattttagttcctaacaaacaggtccagcccaggcccccaatctgcatcagttacttctggaaaaggagtcaggatctgcttcttggagggtagagtcacacacatacaaatgcacacgtgaatctctccatggcgtttagtctagttctgtggttctcaaccatcccctcccaacgaacccaaccccagtgcagttttacactcctcccactggactccaccctcaccctgtacacaccggatatttggcaatgcctggagatacttttggttgtcacaactgttggggagctgctactggcctctagaggccaaggatgctgctaaaagtcctacaatgccccctacaacaaaaaaattacgtggcccaaaatgtcaatagtgctgaggttgaggagccttggtctagtgaatgctgttaaacacacacacaactgaaattacttaggattgaattgaccttggagattatggcaaagtaatgaaattgaaggtattctct

SEQ ID NO: 206782 - DNA, 523 bp, Homo sapiens
gtcagagaagatgccctggcagggtcactagaggagtggagggaagggcacttcgtaccgtggcacttcatatttgggagcaaagaaagcatccaccacataaggcgcttttcacaaagttgctctggttctggaaagctgtttgaccaagcgaggtgaacctagatagcctcaccctttcaccctcaagttggactcacagtggcaggctctggagccacatttcatgtgacctttttatgtaaagtccttcagcaaattgatgaggaagacatggcaaaatattccacatgaatagacatttccttgtgtgggcatttgggttctacagttttactgttataaaaagtatttgctggtttctttattttaatttctattaactaaagttatcagctcaaaagatagaaacaacagaagtataaatgaaagcatctttgattttgaggaacttttgagaggacctatctgactcattaaatcttttttgttctttagtactcccacaggattttttaaaatc

SEQ ID NO: 206783 - DNA, 622 bp, Homo sapiens
ggataatgaagctgtgagaggcaaaaaagaaagaaagctacttttattttgttttgttttgttttgtttttttgaggcggagtctcactctgtcgcccagtctggagtgcagtggcgggatctgggctcactgcaacctccacttcccaagttcaagccattctcctgcctcagcctcccaagtagctgggactacaggtgtgtgccaccacgcccggctaattttttgtatttttagtagagacgaggtttcaccgtgttagtcaggatggtcttgatctcctgacttcgtgatccacctgcctcggcctcccaaagtggtaggattacaggcatgagccaccttgcccggcccacaaagctacttttaataagtcattgcttatttagcatcatagccctcaagggtatccaaaaatctaatgcaaacattaataattaaaatgaaattagatctaaaaataggattagacatcaaaatagacctgtgacattgacataaaagtagaacaaagcgtgttgtcttagtccattttccactgctataacagaataccacagactgggtaatttattttaaaaaaggaaatttatttctcatagttctggaggctgggaagtc

SEQ ID NO: 206784 - DNA, 393 bp, Homo sapiens
actcctcacagacaacatggatagcaagtgtagctagatgataaattgcttagaagtcatactagtgcagttacttccctggtttaaacaagtacttgggtttaaatgcagttcctggttacctttaagtactgcaatttaaaacaaacacttgaaggctacagtagctttctagattgttcccaaagccacactgagatcaaaggcagtgttgttctcccagactggcgttcaggcagaagcacctggttaaaccagttccatcggctatgggatcggcccagcccaagatgtttatacaactttctgactcttgggggaaggcaagtctacttgatttttctgctgcttctgtgagtctcagaagtttccgaagctttacctgtcaggtag

SEQ ID NO: 206785 - DNA, 370 bp, Homo sapiens
aagttttcccctctctgggcctctgttttctcatctgtgaaatggggccagtagtagatctattgcgatgcctaaagaagctgctccacctactcacgcctgtaatcccagcactctgggaggctgaggcgggcggatcacgaggtcaggagatcgagaccatcctggctaacacggtgaaaccccatccctactaaaaaatacaaaaaattagccgggcgtggtggcgggcgcatgtagtccctagctactcgggaggctgaggcaggagaatggtgtgaacccgggaggcggatgttgcagggagccgggattgcgccactgcactctggcctgggcacggagctagactccgtctcaaaaaaaaaaa

SEQ ID NO: 206786 - DNA, 698 bp, Homo sapiens
gaaagagagaaagccaaaatgttcatgcccttttttgagccacttttttcaatgagttggctactgtctccctagctaaacacatctcagccaagcccagaaccagtatggaaggtcactaaccaaagctgtgggtaaatggaggcatggaaatctgtgacctttaatgcaatcatctacaataacaagccaatgaccatgaagctggacagagaaatagattcctgggaggaagaatagcaaaatgtctggagtaagaggaagtagggtatttcagggaactcagcaaacagtgtgatgacaaaatgaaagcacagtcatgcaatcagcacctgggtaaatatttaggttggagtctgtgttgacccagtctgcaggtaaccctcagcctggcccagcatttcactgccctcctactacttacccagaaacaactctcctgtattgattaagcaggaaagaggaaactctcctggaagacacaagggcagatccaagcaggagctaaggttttccagaatgtggtcttaggtctgtgaatggcttttggacagaggcacagctgaacattcccatggtttctgtgactttagaatcactaccacctcttgactatgcacctcttgactaatttctatttctcaaattatagaataaaaaatgctgattctaaggataaaaacacaacaaataatcca

SEQ ID NO: 206787 - DNA, 139 bp, Homo sapiens
tcctagaactgattaatgaattcagcagagtttcaggatacaaaattaatgtacacaaatcagtagctctgctatacaccaacagcagcaaccaaggtgagaatcaaatcaagaactcactccttttcacaatagttgc

SEQ ID NO: 206788 - DNA, 380 bp, Homo sapiens
acttaccattgtgttacagttgcccacagtatccagtacagtaacatgctggagaggtttgtagcctcagagcggcaggctataccacatagcctatgtgtgcagcaggctataccatctaggtttgttactctgaagctgaacctaaagatttagagctgactggacaaatataaaggatgtcaaaaacagtgaccactgacatgccattcaaggcacatggaagacagctcaggcttgaatgcctctaaactgctcattggtaagatcagctatcagtgagacgcagtgtaagtcagcattattcactgagcctgctatgaccttaaaatcattgctcctggggtatgttcacccaccaattagtttatatgctcact

SEQ ID NO: 206789 - DNA, 595 bp, Homo sapiens
attagccgagtgtggtggcacacacctgtaatcccagctacttgggaggctgaggcatgagaatctcttgaacctgggaggtgaaggttgcagtgggccaagattgtgccactgcactccagcctgggtgacagagtaagatcctgtcttaaaaacaaacaaacaaacaaaaaaacatgtttgtaaaatcctcactcttctgtaggttggcttaaaatgattaacactactgagggactgtgatgttgcagacattgtgggtatccacacagcagcccagaaacatcaccattccatgtcacaggccaaaaggcagagattcagtgagcttaaacaactgtaccaagatcacctgttaagtggtataactgggtctcaaattcaggtgtgtctgactctaaaactcacaccttttttccagtctgacctgccacttgaattaagtggctccacggttaacttttttatccatgatgttgaaaccccattctgaggactttctccttgttcaatacgtaagaacgaggtaagggaataaagatggctacaaattctttgacattccttccatggagatgtggggtctaactcccct

SEQ ID NO: 206790 - DNA, 394 bp, Homo sapiens
atagctgattctagagtacccctccgtgactccatcattcgcaggcgaagacgtgcctcatcctcccagcttctatgctgctcctttcagatcccttaccctgtccccattttcatgacacgggctctccagccaggaagaagacactgtttctcactctctctctttcccatctttgcctgtccctctcgctgtgtaacttcccttataactcagcctgaggccagtgctagaaaggcacatcacctgacttattctgtgcctgattctacctagatcagtgcaaccactggcttctcagggggacccttgagtactgggcactgatgaactgctgccaacacagtcatcatttctgccattaaaaggtcctaagtcctctccagtggcaggg

SEQ ID NO: 206791 - DNA, 489 bp, Homo sapiens
gattttgggtcccagatcctctactctggattttaagttttatacatttcctctgcaatacttcagctaaggcagcaaaagcggaggtctccatacaacgaaagtttgtgtagagtttcagtcttgttacttagtcaccagtatattggggttttctaatgaaacttttgaagggcaaagtgtttccctgggcctgagaagttacctgcattgaatcaaataaacacatgcctggggcaatccttggatctttcttcattgttgaccaaatggttgaaatactatcacacagtttaaaatgcctgtgggagcttcagataccttctcggcacctgaatggtggtcactcttgtttattctttggatattaccactttctttgacacttgtgatttatattaaaaatagttcattacctaccttcccacagagcccctccctaaggggtgatccacatctaaaaataaaatactcattatgcagtgaata

SEQ ID NO: 206792 - DNA, 418 bp, Homo sapiens
ctcagtaggaatcctatgaaaaagtttgttgttaattaaaagacgtaatattcaagaagtattatggacattacagttattaagctaggcaataaatctccttgacccataaattctcatttttgaattcatatgtcacctactttgtgtaataattgtccttatatgttttctcttgcatcatcaactgttattttttttcagagagtttcactttgttgtccaggctggagtaagactgtgtctcaaaaaaacaaacaggccaggcgtggtggctcacgcctgtaatcccagcactttgggaggccaaggtgctggaattacaggcatgagccaccgtgccaggccttgcttcatccactgttacagttgtattctaattcccctatgtatatatggatacattgggtctttgttt

SEQ ID NO: 206793 - DNA, 659 bp, Homo sapiens
gctactttgaatatttgaaagttcacagcctggcagctagtgagggtcctccctagtataagcattacagagcaaattgaccatgcctgcaggaagatttaatacagcagagcagcaagccttttaatgcctaaaaattctaaagttatacgtattagaaagatgtatatttaatttagctcatgtctttaagacaaaggcgtctagtggatatttagtaaatacctgaaggaaggaaatacaataccagtattgcagatgtctgtaaatcccaagtaattgaaatcttcaggtcaaaggaatagtgattgcttctaagaaagagtcaagttcaaagaagtgtttgctaattaagagaactgaattactccaggcaaaccaaagaaggcaatggaaaggaggaaaactatacaaatattttcagggtgtggagatgggtgtttcagaaatcaaatatggaaagaaaacaaaaggagaacagaaagagttatggtatcagcaatgggaaatggaagagacaaattagcctgaactgttcagtgtcaatcaccagatacgccaggagtagggagctgtctgacttgccctaagtggagtggtagagctttagaagtaactgttgtggctataagagaacatgaatttatcaagggacaaag

SEQ ID NO: 206794 - DNA, 191 bp, Homo sapiens
atcaggtaattcttatttggaaagtacgacctttgaaatcttgaacaaaactcagtgaaaagtccattttaaatcaaatcaacaatcagacacaaaatttgagatacaccaggatgatcttcggaaattatctaaaaattcatttttttccatatctatcaatattttgatgatgccaaaatttttcccta

SEQ ID NO: 206795 - DNA, 398 bp, Homo sapiens
aacgtcaccaccatcaatcaccaccacccaattcctactttttacagaaataaccgctgtttattcattatgggttgtattttttctatgcagctgtgtacatgtttacatacaagattttatcttggctgggtgctgtggcttgcgcctgtaatcccagcactttgggaggctgaggtgggcagatcaccaggtcaggagttcaagactaacctggtcaacatggtgaaacccccacctctactaaaaatacaaaaattagcctggcatggtgtcaggcccctgtaattccagctactcggggggctgaggcaggagaatcgcttgaacccgagaggcgaaggttgcagtgagccgagatcactctagcctgggcaacaagaatgaaacttagtcta

SEQ ID NO: 206796 - DNA, 398 bp, Homo sapiens
gctgcatctataaagaaaggatatggaacctcagagagcctggaaagcctatccgagctctcatagttactaacaggaaaagattggattcaggctcaggtctgagccactcccaaacccattctctttcccattccgtcaaatttcctgtgggactcaaagtttcagatggaaacccctaagtctccaaaaaacaaaatccttgtctaaaggcttttactagtggtggtcaacctgatgcatatcagaattactcagaaaacattttaaaaccatagatttaaggaccccatctctatcttgatgatttggactatccagtgggttaggccaccaagcatgtgtccaaggggccttggggatataagcaagcaagcctgggccctgaagtcccacct

SEQ ID NO: 206797 - DNA, 598 bp, Homo sapiens
aatgagacagctcaataaagataggaaatattttttcagttacttaaagagaaaataatactggtggttctccctgtaaagaggtagaattgccaaaaaatgcagaattgatcagcaaaacccagctataaagaaagggcaaaaggaactttattttagtgccttatcccaatatccttttatttagttttttgattaacatgatgtgtgcctattttcagaatcagtgactgccagctgcagctcttgacattatcaagtgagctctggaaaattctgggtagctctttcctattctctcacatgcccaaagaactaagtaattttggtcctaactcttactattctattcttcttcacatgaaatcacattgtttcatactgaaaaccaggatggctattagttcttattaatctgtcattattaggaatgagaggatataaaagaggtatataaaatgtatgagtgtagagcttttgtctaaggcaattactctgtgaatctgaggtgagacatttcttaaattttgaattgtggagctctccattttttgataaattatattcatataaacattataataaataacactgctta

SEQ ID NO: 206798 - DNA, 192 bp, Homo sapiens
atctttttggattctctactcaagacatacaccaagcctcagaaggcagaagacctttatggacaagtaattcaggcagtaaagtaatagattgtaacaggatcctcaataaaatttgatgcagaacaaggagactctgaataggaatcaagaaccaaggccaggcaatctgagactgtattaactgctgtg

SEQ ID NO: 206799 - DNA, 310 bp, Homo sapiens
ctatgcccatgtctatttatcttcttataatttttgcttaatgaaaactaatgatccattatctgctgcataagtatttatgtttgctttctctttattatgccttatggcttttgtgttaaaaagctattgatttatttaatattttggaaggattgaattttaccctatctaatatcaagatcatgactcttgattcctttttgttttcacttgtttaatatatctttcttctatctttattttaaacacaagaagagctttgctttcagtttctattttacatagtctacaatcggattttacttat

SEQ ID NO: 206800 - DNA, 575 bp, Homo sapiens
atagaaataccccacttctggtaccaattttctgtattagtctgttctcacattcctataaataaatacctgagactggataatatataaagaaaagaggttcaattggctcatggttccataggctgtatggaaagcatggcagcatctgcttttggggaagcctcaggaaaaagcaggagcaggtgtcttacatggcagaagcaggaccaaaggggtggggaagatgttacacactttttaaatcaaccagatcttgtgagaactcacactatacagtaccaaaggggggatggtgcaactctgccctcatgatccagtcacctcccaccagacatcacctccaacactggggattacaatttgacatgagatttggtggggacacagatccaaatcatatcaggagccaaagcaaagatgaaagctggcaatgcctgttttcttgttggagtaacctcacctttttgccactccagacaaaaaaagaaaaacccatgtgcccatgagccttttgaaccaggcagagtaagaaatctacctagcaataaccaataaaatgtctttaaagctga

SEQ ID NO: 206801 - DNA, 292 bp, Homo sapiens
tgccattccatgttaaagtggaagataaacataccatagggaaaaacaattctactcctacatgtattacctgaaattaacccaaaacatgcatattaagagaaacactggttaacaatagccaaaatgctcacttagagcagagtgaataaactctggtatagtcacaaaataaaatatcccacatcaactaaaaaacaaaaaaatgaaccacagctttataatgttttattaaggaagcctgatgtatacaaaattatatctcctggatgcatccatgaatataaagctc

SEQ ID NO: 206802 - DNA, 368 bp, Homo sapiens
atgatctggctgctaggaatagaaaatgatgcccttgctgcggaaaacaatttggttgttcctcacagaatgagcattgggtgaaaaatgaaatcaagatggaaatgtaaaaaatttcttcgaactggatgacacaacctatcaagacctctgggatacagcaaaggcactgctaagagcaaagtttgcagtcctaaaaacctacatcaaaaagtctgaaagagcacaaacagacaatctaagttcacatctcagggaactagagaagcaggaacaagccaaacccaatcccagcaaacacaggaaataacaaagatcagagaagaactaaatgaaattgacacaaaaacaacaacaacaaatacaaa

SEQ ID NO: 206803 - DNA, 408 bp, Homo sapiens
ccagaagaatctctttgggaaaagacagtgtacagttgtggaagagcccccttgcgcaaaacaaatgttctcttgcctaaaattcatccattaaggaaagctatccttaaaaaaaaatgggccaggcgcagtggcccacacctataatcccagcactttggaaggccgaggtgagtggatcacctgaggtcaggagttcaagaccagcctggccaacatggtaaaacatcacctctactaaaaatgcaaaaattagccaggcgtggtggcaggcgcctgtaatcccagctacttgggaggctgaggcaggagaatctcttgaacccgggaagctgaggttgcagtgagccatgattgcaccattgcattccagcctgggcgacaagagtgaaactccgcctcaaaaaa

SEQ ID NO: 206804 - DNA, 413 bp, Homo sapiens
ttagatttatttaggagaaattgcacttggtgaaccactttctctttaattattagcattaactttatcatttttgtttcaagatgtcacagctattgttcagcactagaaattatataaattattagctgaagatgatgactggcaacatttatgtctgttcctcctcttaaatttcttgttcagaaagtctgttgttgtaaacatccccgactggaagctgtaagacacagctaagctttcagtcagatgtttgctgctaccggctattcacagacatcctcttgatataattctgtcccggagtggagttgaggaggctataaaatgtgtgggaaaacctcagaaatctttagctgcattcttttactgcactgacagtgcacgtattatgatagttgaatgtagggtgc

SEQ ID NO: 206805 - DNA, 340 bp, Homo sapiens
ggatggatggatggatggatggatggatggatagatacgtaaaaatttagaaattaaaaaaatgtatcttgggaagagagtcttcaagatagtggggaaatgaattttgagtaaagactggctaagaagttgtagccagactacactagtcatgttttggctagagaagggagccttatttaaagaagggcaaccataaggaaaaacagagttaggtagctgctctcatcaaaggcctataggctcgaatgcaggcctggaaagataaataggacatgttgaaggaagaaatgatagcgtttgattatttttgtggtgattttttttttgtaaaggtgat

SEQ ID NO: 206806 - DNA, 591 bp, Homo sapiens
aaggaaaattatgcccagagtgactctgttctatggcctgggagggaaactggggtgaatgtcctaaattgttgtctttgaaaagaccgtttctaaaattcgtggcccaacgtagccttttactggttaactctaagtatttaagatgttctccaagcgttttaactgaagacactgcgtcttattttgtcttcattgaatttcgaagaagcatctgtagtaagaatatttacacggtttttctaggtaattgtttgtctcctggaccatagagtaccttaaatacgttacattatataatttactaatagtaatacaattttatgaagatatctagaggtaacaaattcaagattatgtatttctatctctggaataataattactgttttcatttgtaaaagagattgtaagggaaataaaatgtaaagttaaagctaaatgtcattgtattctatgcttgctgtaaggtcaaaatatgtgatcctgatggaatatggtaatatccctttgctctcctccgcacactgaggaaccttttcctgggactaatagacccccctaatgggatgcagacagtgcctcagagta

SEQ ID NO: 206807 - DNA, 462 bp, Homo sapiens
gctgacctagaggatcccggctatcacattatccataaaaaaaatcaacaaaatggattaaagatttaaacctaagaccttaaactatgaaactaccacaagaaaacattagggaaaatttccaggacattggtttgggcacaaattgtttgagtaatacccaagaaacaggggccacaagcaaaaatgaacaaatgtgatcacttcaagttgaaaggcttctgtaccacaacagaaacaaccaacaaagtaaagagagagaatgggagaaaatatttacaaactacccatctgataatgtgatagcggcatcacattacctggctccaaaacatactataaagctgtaatgagcaaaacaggatgatactgatataaaaacagataaacaggtcaaagtatccagtgagcccagtaataaatccatgaacctagagccatgggattttcaacaaagatgtc

SEQ ID NO: 206808 - DNA, 400 bp, Homo sapiens
agaaacgccgcgctcaggtgaatgagaaatgttctgatacaggaaagaggagttcgtgtttctttcagaaggtgaccgttttcctccttctgaggtcacgagctgtccgtccgatgcccagaattccgaggcctgatgtggcgtgtttccggtagctgggctcctcggagagctgtgggaagaggcgcgggcgaccgggggcgtcagcgagccctgtcttcgcctgccttcgccggcgtggactcttcccagtgcccgtcttcccccgcgaagtaatagtgtcctgtatttcctgactgtaagaagaatagtgcttttaaaaaatgcctgctccctgtaatagcagcagtagttcgagagtacatacatgtttataaaagaaacttaaactctcattctt

SEQ ID NO: 206809 - DNA, 354 bp, Homo sapiens
ggggtgggtggccagggctgtctagagcaaaactacccagcagtgctgaagcagcatgcagcagctgagtccatttctaagaagtgagtggtgagttgtcagggcgcctgagggccaaagaaggaaagatggggctctggcaggaagccccagacattcagcccaaaggccgacctgcctccagccagtcgggcctgcccggcctcccctagcgggactctgctccctgaatccagtctctggtggccagctgcctcccaggacaggtgctgaagacaatgccgagtctggcccacctgtctaacagtcaccaacacttcccgaagtaccctaaagaacagaggacgccttggg

SEQ ID NO: 206810 - DNA, 236 bp, Homo sapiens
acatgactcattgtagccaagttgactcctgctcctcatagttgttatctattagtctggttgtttggttttgtacctcagattccatataggttaggtgctctatcagaaatgcatatggctgcaagttattgaaaagccactttagcaacacctaatcaaacagaggtttatttttctcacataagtctggtggtggctggacacagtggctcatgcctgtaatcccagcactt

SEQ ID NO: 206811 - DNA, 283 bp, Homo sapiens
gtcccatacagtgctgtatgctacaggctcatcagggccacatggcacccctcagggaagtcatagttccagtatagatggtcctgttcaatgctagcattaatgctaattataaaggactatacattattaataacactcatgtcttatctaataacaacaataaaagtaacttgccacttaccgaacatctattatatgccaagacataggcattttaataggcattttatttattcttcaagacccttggatgtttcaataaaggatttacataaatgta

SEQ ID NO: 206812 - DNA, 375 bp, Homo sapiens
gggaggagccccaggctgtggatgtctctgggggaaccttggttgagcaacggccagaggagctcctgaggccaagcggtatctgtcgcctccctacctttgggcgtcttctggtcgccaatgtgctgcaggtcatggctccggaatcaaattgggctcaaattgtgtgagctccaacgcagtggagcctggccctactcccaccttcacctcgtggatctcggagctgcaggatggctctgcccaccgcaccctaagctggcctcgcttggggctggcatcggtggacagcatgttctgggcgtctctgctcctttctgctggtgcctgtgcctgtgctggccgcccactcatagatatcaaagccacaggacg

SEQ ID NO: 206813 - DNA, 767 bp, Homo sapiens
aaagtaagcaaaactgtctaaaatcatattgttactcttctaacttttccattagaatattcaataccagtctgtgaaactggatatataactttccttatgcaaacaaaaaactagctgaatatcatactactatgcacctgagtatctgttatctgaaagatctttggatcttttataaacatcaatcaatgctgtgcagacagagctaagagggaaaggcaattagatactgtgaaaaaatggaggcaatcagaagaaatacagtccatggtggcagtgacagagctaagcaggaggtatggataatctgggtaagtgccatggaaaaataaatatcatgattgaacttgaggcaaatggaaacagttcaaattggcttcatacactactctgtggaacatatgatgtccatatgtccattaccaacaaactgaaacatggaaaataacaaaagccgatgctatgatggctataagaacacacccaatgccagtctctaccacaccgcagcagcataacttactacagctgccaggtaagttggctaagaagtcagaagcaataagaaaaaaaggagaaagaactaactataaactgttctctttccctacagaagacaaagttgggatctatactagaaagtagaatgtagcaacgataaaggctgaaagtaaagcacaattttttctctgtagacagtttctaaaagtataaactactttggaattaaagaaggcaacattttatccaaaactacaaacgat

SEQ ID NO: 206814 - DNA, 809 bp, Homo sapiens
cgctctgctccgaacccattgtatacggccggctgcggactcccaggccgggccgtggcgggggccccgggacccccgagtgcccctccggctggtcccgcgggccgcggcatctccgccgccgccttcctcgcggcggcggcgagggcgccctttcctccccgcgcgggtgacggggacgcacccccaccccggggcgccccttcgcggggggagagccgggcccgagcaagtcgaggcaggaaagggccgccacggactgcccggcccgccgatcgtttttattatcgagattattattaaaagggggcggggaccccaggacgcgggggaggggctggatacgcaggtatttttattaaacagattattcctgaaataataatacgcgcaagatggctgaaggtggctgtgatgagagtgttggggttgggatttttttcttcctgttttttcttttttgatctgaggataaagctctgaggcgacagcggctgcggagaccctgcccgaagcgccctcccctcccttgagaagccgcgggcagacagacggacctcggaccgagcaacgggtgcgggcccgccccggacgcgtcgcctgggcagcagccggggaccgcgggctctcgcctttctgccgacttcttccaattctcatcttcttttattttttggacaggaccggggtgggtggagcagaggtggagagaaatcgggacttggcattttctccctctctctctcctaatttgttggaggccgccagccctccccttggaaaaaaaaaaatcccaccaaaaaaaaaaa

SEQ ID NO: 206815 - DNA, 411 bp, Homo sapiens
ctaactatccaaatctcacccacacactagggtccagataaagactcactgattaacagagatctgctcaaaccatcctaattcccaattcttcctttgtttaaactcctaaagtgtttatcctctttctcattcattttcaagtttaaccacacactgcctcacattttaatctgacctatatgacatctccctaactagaacacacacacacacatacacaaaagaatagaataccttgtacaagtagttctcaatcctagatcaggataacacataaaacttcaaaaaatacaggttcacaggccctacccttaaagatattgaatatattatgtcttatttagaacccatagatctgtatttaagttcccccaaaagattctaatagggagccaggattagaaacca

SEQ ID NO: 206816 - DNA, 775 bp, Homo sapiens
agatgatgctgtgccgcgtgtcgattgcatgtcagaagttacatgatctttacttgattcatgatgaggagatggccactgaaattggacagtgacagtcttttctgcccattgttcaattatattcgtctctttacattagaaagtatttggggtagtagtattttggtgctgtaagaaagttcattttctcatcaaccactcacctattggtttaacaccatttgttgatctttgagtatatcagtaatttcatcagggtttgcaaaataagactttaaattctattgttttacattattaattgatgttttttgataaggtagaacttgtgaaatgggactatttgtttgtctttaaatacagtctctataggaaagacaaaataaatacttaaatctcactctttaccatttttcaaagtgaagaactattccgttaaccacctcaaaagatgataaataaaaagggtatttttagttgtttcaactttttttttttttgagatggggtcttactctgttgcccaggctggtgtgctgtggtgcaatcatggtacaccgaagcctcagtctccctgggctcagatgattctcccacctcagcctgggactaaaggtgtacaccaccatggccagccaatttttttgtattttttgtagagatggggttttgccatattgcccagcctagcctcaaactcctgggctgaaggaatccacccgtctcggcctcccaaagtgctgggattacagacgcgaccacaatatccggc

SEQ ID NO: 206817 - DNA, 623 bp, Homo sapiens
ctgtaaaggttttttttttagtcttatgtgattttgtaggttatatagagcatctttctttcttactgtttaataagccaactaactaaaagaatacttttcacaggtactctagaagataatcactttaaggcattagcctaacattttgggaacctggagtagttttttgttattaatattttcttaaattgattatggtgctgtgatgtggatgtgttaagatttatactgtgtaaatgaatgactgtaaactgaagggctacatttaattaaattatcaaaacctgtgctataatcgccctttttaaggaaagagctattttctaactcattttactgaataacaaactcactgaacatatgtaaaaacttacctgtgagaaaattagtatttattgtatttgttgcgtcatgttataagattattatttaagcataagccattaacatgggtaatttcattttgtggctttaacgtaggtttccctacgtttcagataagaatgttgacccaaagaagtgcaggcttcaaatatatcactttgatttggaatgagttctctgaatatttaaataatatccaagttgtatacatttctaaagtaattactacattagat

SEQ ID NO: 206818 - DNA, 265 bp, Homo sapiens
gcttataagcacttggctgtcgaaatggaaagcagaagtacaaattaactgtgggatatttaatgcaccacagatatctacccaacacagaaggtaaccagtcaataactacctttttttcttttaacattaatctggagaataaaggcaaacagaaaaactattggaaaggagtggttaatatgcatatccccatattcccatcttatgaaccagcaggatgatttgcaagtaaaaaattaggtcaatctaaaatcatgatcca

SEQ ID NO: 206819 - DNA, 335 bp, Homo sapiens
tgatgcagtattttacctgtaatttacaagcaacctgacactttcatgttactggtgggtataaattgatataaaagggggcaatatctttggcaaaacctttcagaaaatataaaaattgcaaattttcatctaataattccacttttgcatgtgaaaaatcagtgtataataactttgtaatattaaataggtatatataggcatgttttataatagcaaaagattagaacgtgaaatatcaggtcactggttaactaattatgacacatccacaaaatagaatattatgtaatacaaaaagtgaagaatgtcttcatatacacacagatctg

SEQ ID NO: 206820 - DNA, 798 bp, Homo sapiens
ggccccgtcccggcctcgcgcacctgctcaggccatgatgagcttcggcggcgcggacgcgctgctgggcgccccgttcgcgccgctgcatggcggcggcagcctccactacgcgctagcccgaaagggtggcgcaggcgggacgcgctccgccgctggctcctccagcggcttccactcgtggacacggacgtccgtgagctccgtgtccgcctcgcccagccgcttccgtggcgcaggcgccgcctcaagcaccgactcgctggacacgctgagcaacgggccggagggctgcatggtggcggtggccacctcacgcagtgagaaggagcagctgcaggcgctgaacgaccgcttcgccgggtacatcgacaaggtgcggcagctggaggcgcacaaccgcagcctggagggcgaggctgcggcgctgcggcagcagcaggcgggccgctccgctatgggcgagctgtacgagcgcgaggtccgcgagatgcgcggcgcggtgctgcgcctgggcgcggcgcgcggtcagctacgcctggagcaggagcacctgctcgaggacatcgcgcacgtgcgccagcgcctagacgacgaggcccggcagcgagaggaggccgaggcggcggcccgcgcgctggcgcgcttcgcgcaggaggccgaggcggcgcgcgtggacctgcagaagaaggcgcaggcgctgcaggaggagtgcggctacctgcggcgccaccaccaggaagaggtgggcgagctgctcggccagatccagggctccggcgccgcgcaggcgcagat

SEQ ID NO: 206821 - DNA, 475 bp, Homo sapiens
tgggaatatgccgtttgagtgtgttttttaaaaaaagactgggatggagtttagggtagcggcaagagtgttactgaaacaatggatcatggaatagaagctggacaaaaggagacatgataaaaagaaggttgatagggtagaaaaaataaggcaacggttgaggtggtagtcaggaaggcctccctagaagtagataagtggaagctgagatccaaaaaatgagcagagaattggccaggggaatagggttaagtggagtgataagaaacagtgtcccaggaagagggaatagtgtctaaaaggtctggagctgaaaaacagcatgtacttgaagaaccaaaagatgatcaggattgatggaaaacagaatgtagaatggttggggagggtaggaatgctgagaaagagaatgctgggagatgaggcgtgagagccaggtagggccatgtggtgagggccacttcgtgggcag

SEQ ID NO: 206822 - DNA, 294 bp, Homo sapiens
  misc_feature (177)..(177): n is a, c, g, or t
  misc_feature (185)..(185): n is a, c, g, or t
  misc_feature (194)..(194): n is a, c, g, or t
  misc_feature (245)..(245): n is a, c, g, or t
  misc_feature (268)..(268): n is a, c, g, or t
  misc_feature (286)..(286): n is a, c, g, or t
acagggaggtggcgtccaggtagtagagaacaataagagtaatgctcttaattcaaaagtgctgtcaagatacagttcagttcagagtaaaaacaacaaagcaaaacaatgacaacaacaacaacaaaccaaaaaatgacatattctctccctgccccgaaaaaaaaaaaaaaatcntacagaanaaaactgcngcattctcatcaccatcattactaccattattaccattttcatggactaanctgtttctcacttctctttattntcccctcttacttcctanatgtggcc

SEQ ID NO: 206823 - DNA, 517 bp, Homo sapiens
tgttgttgtgtcacatgcttggcacggacacaagcacctcagagcctgctggtggaagctgggaaaacccaagggagggcaatgcccatccttccagtaaaggtgtgtgatgggtgagtcacagtgctcaggcatcctctccacctccgggacttggcaagcctaacaggttcctcatctgagttggaaattcaagtgtgccctgaaatgccaacatctaataagaaagaagcataattgctgtggtggaacagaggggcaaggaaaggacccagcagccctgcctttttagccctgtcctcaaagtctatgctggcccctgggaggctccatgggattccaaggtttccagaactatagtttgaaaaccacctctctgcagtaagaggaataggtggggttgggcacagctctagaacccgtgtagaaaacagatcaggaaatggagaaagcagaagtctgataaacttgggccatacttacacggatcaatgaggccctcgactcaggtggtgtg

SEQ ID NO: 206824 - DNA, 811 bp, Homo sapiens
ccttccttttaattatgttttatctttaaatcatttctacctctcacatcttactatatgcagttaaaagaagccatgtagctctttcagtattttccttagaaatttcttccaccacatattagttcattgctcttaaattctgccttccaataaagcccaaggcatggacacaaattcagccagattctttgttaatttctaataaggatggcctttattccagtttccaataccttgtttctcatttccagctgagacctcaccagaattgcctttgccatccctatatttatcaacattctgatcacaaccactgaagtaatctctaaaaagtttcagactttccatacagctcttctgagccctcaccagaatcaccctttaacattccacccacagcaatagtctttttctgacatccagttcaaaactttttcagctcttacccattacctagttccaaagccacttccacactttcagttattcattatagcaactgcgtacttttccagtaccaattttctgtcttagtctgttttgtgttgctataacagaatactacagactcagtaatccacagcaaacagaaatttattgactcatggttctggagactgagaagcccaagattgacaggctgacatcttatgagtggcctcttgctgtgtcatctcatggcggaagggcaaagggggtgagagagagagcaagccagcaaaaggggccaaactcacccttttataagaaacccactcacgtgataacaaacccattcctgtggtaacaacattaatccattcctaag

SEQ ID NO: 206825 - DNA, 370 bp, Homo sapiens
ttatgtcattaaattcaggcaattaacaggataaatatttaacagatggattgttttatttaagagggagtctgaatgacaatttgacttatatatgagtatgtttttagataggttgagatgcttttttcctgttagtggggaaaaaataccttctatgcataatcgtcaatgttactttgtaaactctttgttcattgattattcactgctaattttttttttagggagatatacctaatgctaaatgacgagttaatgggtgcagcacaccaacatggcacatgtatacatatgtaacaaacctgcacgttgtgcacatgtaccctaaaacttaaagtataataaaaataaaaaaaataaaaataaa

SEQ ID NO: 206826 - DNA, 506 bp, Homo sapiens
cctgcctaacacgagtgttgacttgttagctaacacattccacctggaagagtcagcagggaaaccccaagctggcctggctctggctacaagaattcctggcacatcaactgccgaataatggagtgaagcttgcaaacagaggagatattttgattcttaagccactagttccggatgttcacttctgagatttctttgcagatgcaaaggagttgcagggtataaagaatatgaagaagagaatcaagaaacctgacttcttgccagagctctgccaaccattaaatgtgtgaatgtggccaaggcactgtccttttgggagcctccattttgtcactggtaaaatgaggaagctgaatatattttctcttgggaacctttgaggtctatgtatatgtcttattcaagtgcataaatactctaagagagaaaggatctttgcatcttagagaagtatataaactctaatatgcataaagaaacagctgggaatcttacagtga

SEQ ID NO: 206827 - DNA, 471 bp, Homo sapiens
gggtggtcaggaagggaaaaaacaatagttatgtttaggacatgttgagtttgagatgcttctgtggccttcaagtagagttcagttggcagctgggtagccaagtctatacttctagagagaggtccaggctacagaagtgaatctgggagttatcaccatctcaatgacatttaagcccccagaactagaagaaatcatctagggcgtctctcttttctggagagagagatctgaggacaaaagcctggtggactttaaccgaaggaggtaaagaataaccaacctgggaggaaggaaggcaattaggagagtatggggtactaagagccaagaaaatgaactgtttgaagtagtcagtcacgttatattccctacctttattacaatgattatcatcataaccacttacaggactctctagaagaatgagttcaggctatctcctgatttccccaataacttgctctg

SEQ ID NO: 206828 - DNA, 364 bp, Homo sapiens
taccaagtattgtgattgccaatataatgagaattctaagatagacagatgtaaatgaggaataatgggcaggatttttcttttaactaatgacacacagtaatgaaacttgattaaaagtatatgtcttttggccgggcgcagtggctcatgcctataatccctgcaatttgggaggccaaggcacgcagatcacttgagcttaggagttcaagaccagcctgggcagcatggcaaagctctgtctccacaaaaaatacaaaaattagtgagatgtggtggcacatgcctataattcccaactacttgggaggctgaggtgggaggatcatctgagcctggggaggtcgaggctgccatgagc

SEQ ID NO: 206829 - DNA, 499 bp, Homo sapiens
agcaacgtataaatacccaaactcctcaccccagcattgaggccagattcccaatgacagatgaaactcatgcaccatgacacacacacagacacgcctgaaatatatgatagttggtctgttcattgaggacctgtcatgcgcaaagctcgaggcaagcggctctccatgagtgtcacaggttgccctgagaatgtggtcaggtccactttaccatacagaggaggagggtgtttagggtgcaggttactgagccaagggcattcagtgagtcggtagcagaaccgggggtgggcccactttgatatggaaggcatcctcttcccactacatggccctacatgaagttccttcacttgaagtatttcagagataagtccttccttagacatcctttttgatctacctcccgcccgaagcaagagcatcctcagcagatggtcattcatcctttctttttgtatgttttattggtgtttttgggtactacgctttggca

SEQ ID NO: 206830 - DNA, 420 bp, Homo sapiens
gttgcagtgagctgacgtgacaccactgcactccagcctgggtgacagagcaagactccatctcaaaaaacaaaaacaaaaaaaacagatagagggaggatggtcatgtctgtgtcatttccaaggtcttactgctttggggttcattttcacctcatttagttcgtgcgagacagcgatgatttttgctgttttatgaaggaggagtttgtggcttgagttgctgggagttggccagtgtggcgagctcttgtggccatgccagccggcgcaggagttgagccctcgaccacccgctgcccggtccccactctgggtccagggacagcactgaaatccacacctttgacctgtgtcactggaagcacctgtcccagatacattcactttgacttgcgccttgtaaaacccacattccct

SEQ ID NO: 206831 - DNA, 293 bp, Homo sapiens
gtggggctatatcttctgtttggatgtgtagaaaggggtctgattgctgtcaggactttcccaaggcttgaggagaagaatgtgtgcagtttagtggtgagtggtctctaccccaaggagacaggtaactgatcttcaaagctaattcctcttaatattttaagcagtgaattagcaaaaaagctcttaaattgattactctttccttctacaactctagaaaaatttacagaacttcaacttggtaattatttatatgcattcttgagctgttttgaaattgtttcttgtaa

SEQ ID NO: 206832 - DNA, 354 bp, Homo sapiens
cagactctggcttccaccagggccccggacacctgcttcctcagggcagacagagaggggtgacacactgcaccctgtggctgggaaaaggggcctgggactgtgcccgtctgggacggagcagagccaccatcccatgcaggcactatcaccgcaggcaaagctgggactggggaaggcagcctgcccgggcggcctcagggactggggtacaatgtgggagctagggtggaagccaagctgcttcccaccctcccaaacacccgtttgggctccaggggcgaggggtgaggggcgcagccatgggtgatccacgtgctcggggcaaatgcagacactccagcatcaccatca

SEQ ID NO: 206833 - DNA, 446 bp, Homo sapiens
ggaacttgccatcattcctgaaaggtttttttgtcctccccatagaaatgagagaggtttttgttttaatttttattaaaacaagagctgtagtagtaataacactaactaacttaaaaaaaattatttagccaggtgcagtggctcacgcctgtactcccagcactttgggaggctgaggcgggtggatcacgaggtcaggagatcaagaccatcctggctaacatggtgaaaccctgtctctactaaaaatacaaaaaaatctgccgggtgtggtggtgggcacctgtagtcccagctgcttgggaggctgaggcaggagaatggcgtgaacctgggaggcagagcttacagtgagctgagatcgtgcctgggcactatactccactacactccagcctgggcaacagagcgagactccgtctcaaaaaaaaaatagttattta

SEQ ID NO: 206834 - DNA, 473 bp, Homo sapiens
gaatgaccctgtacaaggaaagggatttgcttgagatccacacagctgtttaaaggcagagttgggattggaaccaagtcttagagaatccattgttgcttctacactgcattattgctttggttccctagtgtacattcactttgcttaggagtgatatgttcagtttatcttctctaagaatggcagctgttatttaggacagtggcatgctgagaaatagattgatttctattctatactgtgtccagtaaaggtcgggggagaaagagtaaatcttatcttcttctgtacttttctttgattaatgtaagagtctagagttttatcagaagattattgtcctttaaaatattgatggactgattatcacttaaagggtataaacagtgggtagtaattcagtgattgagaggttaattgcaggttttttttttttttttttctggtaaccatagaatgaatgtagaatg

SEQ ID NO: 206835 - DNA, 270 bp, Homo sapiens
aaggttaataatgaaaatcactaccagaacaccgggttggaagtttaggatggcctaacaggaaaaacatatttttaggagctctctctccagtaactgcttaattcactcagtttaccagaaagctgatttgatgcagctgccgactgaagagtaaattattctaccgtggtgaaaatgtggaggccattctcacatcctcaaattcagaatgctcataattatgattcctgagtagtggaatgataaagatgttgttgtttcttttct

SEQ ID NO: 206836 - DNA, 561 bp, Homo sapiens
ttggccaaggtagatggacaatgtcatggtgccataatcaggcaaaaataaaggaatctgtcctcactacagcacagcctgtccccaggctcctgattatttttgtttttaccacctccaaggaagacatagtgtttgtcacttaggatgatgaccgagccacacataggtaatataacccagtagccagagggagtggtttttaaacatttggacagatcttacagtactggtcagaaagtgaaaaaagcagtgtggtctttgggtttgaggttttgtgcccgtgaccgggtcatgcaggttacttttgctcagtagttgatcatttgttctgttgtttttgttgcaagagagacatccagacctactcacacccaaaccttgatttctcccccttcattctgaacccttcagtttattagtatttgcccattcgtttagtccacaaatgcatctgtgctaggtgctggggatagaattgtgagtaaagctaaacagtccctgcctcgtggatgtttacatgctattggaagagacagacaggaaacaattgtggtaagt

SEQ ID NO: 206837 - DNA, 709 bp, Homo sapiens
tggaagagggagtaaccacataaaaaggagttggggaatagaacagatcttctagtgtggaatttaaattgggaatatcagcttatgaaatagttaaatagatacatacatgtatagatatatgtatacatgtatggatcagtgtatattatagacatatattaatatattatctattctagtgctctaaatatcaattctgagacaactggagttattcaagacttcttccgtacactatatggtcagtttcatttgggtctcaaagtacaagatccgccagttacttgttattaatttttccatggcatagtcacacatatttttacctgctttgaaacagcttttatgatgttatgttttaaaacttatgaaaatgaatatttgcagggataaatgattataaagtatttaaaagtttgatgtaatatcatacaaattgacagatcatattccgtgaaaacattacagctaattagaggacaatatttcttagatttctaccccccaaaaataattcattttatcctccattttgagtggtgctgaaaaaaagtattaaacagagttcttaaaatatgctataactagtagaaattatttttttaatttctattgttttcatttttcaaagtaaaatttatttaaaatttatatcaaaaattaagatttatcagactatgtctactttggcaaaataaactgtttt

SEQ ID NO: 206838 - DNA, 510 bp, Homo sapiens
tcccaagtatctggagtataggcatatggcaccatgccaggctaatatttgtaatttttgcacagacggggttttgccatgttgcccagtctggtcttgaactcctgagctccaacaatcttcccacctgagcctcccaaagttctgggattacagggaagagccactgcacccggcctatcactgcatttttaaagggaaggaggactatagtgagattcactaaggcttacagaaaaggtagaaccccagatagatttaaagacagagattataatattcttgagatgataatatccaaatttagctttcatagatagggaaatttgaagtacatcagactataagttggcattttgtgcaactaattaaaactacgtttgaaagagagcaattgcatatttgttactgagtaatattaagcaaccatgaaaataaatagaaataaccaagaaattgttatatttaaatcctccctccttttttggaaagagaagtattgatattttt

SEQ ID NO: 206839 - DNA, 328 bp, Homo sapiens
taatttccacgtgcccctggcaaccattatctcatctcaggacagggcagaagggggatgaatgcactctgggaagcctcttggagccagccttgctgtgtgcctaactaggtccttaatatatactacgtatttctgaagacaaacaagttatcagcatatcatcatcaaactgcgatggtctctccatgaaaactcaaagcaagaatactgatgtgaataaaaactctgtgaaggcatatgctgcctggtttattttccacaggagaagcctcacatgtagggtccttgaagcctgtgttcaaattaattgtgggacggaagatca

SEQ ID NO: 206840 - DNA, 438 bp, Homo sapiens
ctggaccacaggctgtaatttgctgagccctggtatatatataaaatataagaatattagacttggaagaactcatttttcgataacctcattggatggcaaaaaaacagttgcagccccaaataattagtgacctttctgttgcttcatatttttaaaaagtcaggatggtgggtgacgcctgtaactccagcactttgggaggccatggcaagcggatcacttgaggtcaggagtttgagaccagcctggccaacatggcaaaacactgtctctactacaactacaacgattagccaggtgtggtgcctgtaatcccagctacttgggaggctgaggcaggagaattgcttgaacccggtaaggcagaggttgcagtgagccgagatcgtgccactgcactccagcctgggcgacagggtgagactctgtcttaaa

SEQ ID NO: 206841 - DNA, 325 bp, Homo sapiens
gggcagagtttgtggtgaggagccagcaacagacaagctaatatccaaaaacatctactcacatcaacttaatttccagtttctttcaaattgaaggtaagttccaagacaaactttttattctattctctgaccaagtgttgggaaaagaaaactgttaccattttcatttctagcatactaaaacaaaaaacataaaaaccccaaaatctaaaacacttttaaaaataacatggtgttaagagtagtttgttcagtttccctatagaaaatgatttatggaaggagaataaaagattattctgaacactaaaacaataagacc

SEQ ID NO: 206842 - DNA, 262 bp, Homo sapiens
gagcccaagtcctgcccacactgtccattgcaggcagggcccttcctgctcagccccgctacggggacagggccttctatgccccgtgccccttcctcctctggcctaggtgtttctgggagctgggcttaccttgaccaagctggagtgagttagacctgctgtgaggtgacctgcaggtacctgggccagatcaactgccctgcggggagtggtggtggtggagagggctgatagtaaactgtgctggcaagtatggcca

SEQ ID NO: 206843 - DNA, 481 bp, Homo sapiens
ctatcatttctcacctgggtttttccacagcctttgaactgttctccttgcctcagatccttctcatgcttctcaccattgcccctacaatccattctttttagagcagccagtgatccttttcaaatataggcagatcctataactcctctgctcatagctcactaatgccccctcatctaattccttcagctgaaggccaaagtcctatcatggcctacaaattgctgataactgcctgctacctctgtaggcttctctcttcacattcacactctactactgctgtgcctgaatcacaccagccatacccccacctcacagactacatacaagctgtgctgtctgcttgtgtatcagttaggagatacacaagttatgactgttatttatttatttttttgtagagacagggtctcactatgttgcccaggctggtctcgagcctctggcctctagcaatcctcccacctcaccccta

SEQ ID NO: 206844 - DNA, 278 bp, Homo sapiens
aaccacagcaatgggtattagacaggcacgtaataaatgtgtgatactataaaacaggaatacagatacgaggggtcatcaaaaatttcaaggaaaatgaatattatgaaaaaactacggccaggcatggtggctcatgcctgtaatcccagcattttgggaggctgaagcagatggattgcttgaactcaggagcttgagaccagccttggaaacatgtcaaaaccctatctctccaaaaaatacaaaaattagccaggtgtaatggtatgtacctg

SEQ ID NO: 206845 - DNA, 376 bp, Homo sapiens
ctcccttgagtctttgtgttgtgtttcctcatgaaaatacccccaaagtagcttaatgagatttagcagaaacagatcttccaggtcatggcccattcaagacaacatttttttcaacttctattttaagttcaggggttcatgtgtaggatgtgaaggtttgttacatgtgtcatgggggtttggtacacagattatttcatcaccctgctattaagcctagtatccattatatctagttataatatttttcctgatcccctccctcctctccaagagaacattttattattccctaggcaggtggttcttaacatttgccagtaaacttttaactgggaagcctctttaaaatgcagaatcctgggctccactc

SEQ ID NO: 206846 - DNA, 517 bp, Homo sapiens
ggatccccactgaaagccatgaattactcttattagaccctgtagaatcccagtttatggcagtgacattaaaaacatctagtttatgacttggattaggcagcctgtaaaatggcttccagtgatccctgctttctggtatgtatgcctttgtataataccctcctcatgagtgtaggcagaggtaacatcacttttgaaactaggttatatatattcaaacaaacaaacaaacctgtggcttccattttgggtactttatctcacactctgatttcttgctccgtgggaaacagactgtaatattgtaagcagtgctatggagaggtccatgtggtaaggaagtgataggtcctgataacagccagtgaggatctaaggtggatccctttctgagttgaatattgagatagatgactacagccctggctacaccttgattgcacctcatgaggaattctgaacaaaaacactgtgctgaaccgtgtccaggctcatgagccacataaactatgag

SEQ ID NO: 206847 - DNA, 437 bp, Homo sapiens
catgtagccctaaaccaggtaagtgtcagaactgagagcactttcttttctctgtagagcatcagagtcttctatgaataattccttcctttgtttattcaacgaatatttattgaagtgtctgctctgtgctaggcactgaaaacacaaagatgagtaagaaactgcctaagcctaatcagtttaagactaattttggaaaaaaacaaggagatatgctctttcaatttcctagaaaaataaatttcacaactttaaaaaatgtgatggaattgtcaaaaatagattaaatatgttgcataaattgtgaaatgaaaattatcattctatttattctgtgaacaggtacaattcttaattttttattgaatatcataaaagcagagaaaaactttgagttttcagatattatacccaaatgacagtgacacttcaaa

SEQ ID NO: 206848 - DNA, 568 bp, Homo sapiens
cagagtggactgcagaggcaataaacaaggatgttgtgaagaccctgtttctttctagcgtggcatcccaggataaaatatacaattaatagatactggaaggcacactttctgattatggagaaaccatcaaatttggccatggttttgcataggggctaggttggaaattcaactagaacaatttaatgtctactggcaaagcttcttaattatggaatgaaagctacctcaaagtgcctggaggcttgagctgaatggtgagatcttcattgacctgacctcctctgtgctgaagtttgctgacttgaggagacctcccctaagaacagaccctcccctcagggctgccttcagcgatgatgattgacgctggcaagtcagtcaagtgggaagtttgcggcacacacggctcaaaggactcacccagtttgccctgttggaggatgttaacctttgcacactatttttgacatttaatttttccttccatttagtgcatgactctttttttgtctttctagtaaattcatttagttagtattattctttgcctattttgtctttt

SEQ ID NO: 206849 - DNA, 525 bp, Homo sapiens
tgtacggtttaatgaattttgataaatgtatacatccacttaacctccagcctaattacgatatggaaaccctgtgtgttccctcctgtctttttctagtcaatctttcctaacctttattctgattcccataaccacaactttttccttcctgtcctagccaagttcatataaaaggaattatgcagtatagaaggaattgacattccttttatcccaagaggaataagtgattgaagacttttaagaaggaaataggcacaatctgatttatgtttgtaatgatctttttggctactgtgcgaagaatggtgagtatgccacttaagtattatttttcttcccatcttccagggggaatatgactcaatgaaattcttgggtcgaccagaatttccatactggacccattattaagggaacctggaattatttctgccattcccgattcttcccagcagatggccccaaagttcagttcctgaattgcctcgcggagccgcgggctgcaacgtgaggcggccg

SEQ ID NO: 206850 - DNA, 515 bp, Homo sapiens
actattgatccataaggcaactgggatgaattgcaacattgttacactgaactcaggaagccaggctcagaaggttacatacttagactcctagtcagcattaaaaaggaaaaaactacgttgcaattgagccacctggaggaacacccagaaaactatgctgagtgggagaaagccagtccccagaggtcacatactgtatgattccatgtgcagaacattcttgaaataacaaaattatacaagtggagaccaaattagtagttgccaggggctaaggaggggtttgggacagtgggaagtgagtgttcctgtgaaagggcaacatgagggatgtttgggagggaagcattcccttcttgctgtatcaatgtcagtatcctggctctgatccattactgtagctgcaaggtcctacccttgagggaactggccagagtacctaggattcctctgtattattcctcacagctgcatgagaagctacaataatctcaaaataaaaagtttaattt

SEQ ID NO: 206851 - DNA, 245 bp, Homo sapiens
cgcctggcctcaattttattattgaatgttacacaacagacttctccagttgtatcttgtttttaactaaatctcctatagaaatttcataatcactataggctattatgtataaatttacttttttgaaacattgatctacagaattaagtatttttttatttaaattgggcctggtcttatcagaaattgaaaaaatattatcttcttgttagcattgttttttactgattataaaagtgaca

SEQ ID NO: 206852 - DNA, 280 bp, Homo sapiens
tgatgagtaaattaaataagtaaagttccattttcatcccaaagagctaattgtacagaattagttcttcatatggttcagaagacatggttccataaataagtaaaaagctatctaacttcttagtacacacgtttaaagaagccatgacaaatcactggaactcaatggaccttacactgaaataaattccagatgactctaatatttaatttttttattcctaaatcctgagaaaagttttttgataagacacaaaatctaaaaccagtaaggccaa

SEQ ID NO: 206853 - DNA, 622 bp, Homo sapiens
ttctcaccagacaaaagtctaagttatctttctttggcaaaagactcactgttgatacacagcaattaatgttacggagttttagtgaggatttttttgagccatcttaaaagcacgtctgttggttagagaaatgggtatttggttctctgtactggtatgtgttaagaagattatgtcttactatttctgagctctttcaagatcaaatgaagacagaattgttcaaagcgtgggttgacctcccctactcagtttttggctccttttggaaatctgatgtctgcccttctaagcgtaaggtgagcattatctggtcagtttcagctgaccactatgtgactgagatgtttctgaggttaagaattgagtgcgagtcaggccctccctttgtggggttaacatgagaaagaagacaacttcaaatttaattttaatagaatcagacttcagtatcctacaagaggtattaatggagtcctgcaggagtgtaaaggggagaagatcttctcccctgacactcaacattcaaatcatccaaccttcccttcccttttcccagctcataagccacttcaggcagtaatagttgtactgtaattatgccaggcttctgattggt

SEQ ID NO: 206854 - DNA, 741 bp, Homo sapiens
agatagatcagtagaaattaacccacttaaggaagatagagttagaagattgagaaaataaaggaacatagtctcatgaaactacatatttaggatcaggaagttggatgctaccttctcccttagggagaaactaattcctcatagttatttttacagcattaaagtgttcacaggttattgctctgtctgtaagtacagaaatggtagtagagaatcaaaagagcagcaacatgactgatctaatggattctattagttaatggaatctagtagccaactgagtaagcaggttaacaaaacattttcacctgctccatgagactctgactctggatcaacaacctaggtctgtatttaccagataaaacagtatgtgttaacaacactgctaggcaacattgcttatgataaaaataatccccagctggtaaagtacatctaggcttagagaactataaatacctgagagaaagtaatagtttaggctttcctgagtatagtgacccttgtaactggtacatctctttcagtgaccccaaggtctatatatgaaatgtaaaaatagatattggctcttgtggaaaactgaggcttctttggtaagggagattgtaccacccactgatgtagatctcatctccttgcatttgagctggagaaaaaatagttcctacacctatgagtacacctggagagaaaatacctcctggagctagctgcctactgctacagggactg

SEQ ID NO: 206855 - DNA, 730 bp, Homo sapiens
ccttatcaggaacacgggaaattgggaacacaggaaaatgctgattttgtttttaatgtcacatgtcctgattttttgctaagtaagttatggttcctgaggatgaactttgatgtttggatccctcatgaatgtttaatatgtctgacaactccttacacatttaggttgcaggttttggccaggctctaaggcttccgaagagcgagccagtggccctgcctgagccccgtgggtttctcctcttcctgttaacttatatgtcatgtaaatagtggccgttggagaatgagtggtatccagcttcccacagaagcctggatgagagcataaaaatagatcgtttggaaaagggcccgtgaccctctgtcacccttgttctgggtaaaggaaatgaaggaggtggaagccgagaggagaggagcatagacattcctgaagtcccagaacgacgggcacgcgcctcccaagttctagcccggtcccggggggctgccccgcagcagcagccttcccggccacctcacccccgcagggcaccagggacaccagctgcttaggcggaataccagaaagtgagatgagtgttgtttccacacactaacggtattatgcctcctgctctgggtctgagcagcaaagggaaaatgtgagaatattgtgggaattaagggcagaaggaggccgagccagcaggatgctggaactaaaaggagcgtctgttcagggc

SEQ ID NO: 206856 - DNA, 419 bp, Homo sapiens
gtacctttcatttgttgattaatcttcacaattctagaaaaaaagagttttgataagtgtcttttgataatgatgacatgaattcatagaattgaaatgagattcccaaagtcacacagattataggtaacaatatcaagattccaattgggtctaccaaatcccaaaactaaagctacactgattctcaaatgcttgtctctttccataagggtaaaaatttaagagcacaattagttgggagggtcatgcatatttgtaataacaaataacagaaagttgtctttcttaccatcttatctgacaaaattttaaatatagaggagaaaaagaaaacataatgatagatgaaagctagaagagtggaaacggctacagaatagcctggaaggaagggacagctgggggaggatgagaag

SEQ ID NO: 206857 - DNA, 341 bp, Homo sapiens
tccccaaagagccaaagtttggaatcaaaaagactgtggtttaaatcctaagtactactgcatactgcccctgtggccatatgcaagtagcttaacctctctgagaggcaaatgccttatctctaacatgaagatagtaattcttactcccctgtgctacaaattcaatacaggaactgtgctacagcactcaatacatggttgcagtttttgtttgtgttttgttgtcattgttagtaatattaggtacaaagctgggcaggaagatctgaagctgcacacttacctgtgtcaagcagagcagactgtctgggtctgaatcttggctctgttgcttactt

SEQ ID NO: 206858 - DNA, 399 bp, Homo sapiens
gtccagcattgcgctgcctccgtcttaggagcactgaggtgcaaggggtaaagcactgagggctggctggggaaatgaagtctggtaacctcactctagcctttcattccagtttgctccgcattcccctgctgaaacatcttgtgggctgttcagtgcagtgaaggaagaggctggggcccgctgccttagccctcccaccgacctactcagcatcccaggcaagacactgagctctgtctccagggccccatcactgggtgatgctgacccagcacctcactgtagcacagggaatgtcaccaggcagtgctatcctggtaactacgtaagctggacaggtgttatttactggtatgacatgactatcattcaggcttcatttaatccagtaagtgt

SEQ ID NO: 206859 - DNA, 294 bp, Homo sapiens
  misc_feature (21)..(21): n is a, c, g, or t
  misc_feature (38)..(38): n is a, c, g, or t
actcgtaccctgcttgtacgntccgtattcccgggtcnacccacgcgtccgcgcgctcgttccgcacagttggctggccgccgtcaggctgcacggcgccggcaggacatttaaagagtgaatgaacacacagagttatatgacctgctaaaatgaaagatccaaaaaaaccgtgctgttctgatttggtactcagtaaatggtgaaatgttatcaatagcaggaaaaacagctttatatttaatatgatgatgacaatgacacctggcaaggaatatgttgagcagataaaaa

SEQ ID NO: 206860 - DNA, 429 bp, Homo sapiens
agagagaagaatactagtaatattaataattaagtataatgctcacttttcttgagctactttatgcaagacacattctaagctctttacccgcataacttatttaatcttcacagtcaacccattttacataccaggaaactgaggtagagagaggttaagcaatacgcccaaagtcacataactagttaggaggagagctggaagtgaacccaagcagagggctccagaagtgccgttacccacccactctgatgcagacaataacagacatcacctccaagcacctgctctgagcaagcaatgggctaagtcctttataggattatctcatttaatcttcagagaagccctatgaagtgggtgctaacatcatccacattttaaaaaaagaaattgaggctcacagagatgatgtgatttgcctag

SEQ ID NO: 206861 - DNA, 529 bp, Homo sapiens
aatttatcgatatgttctgttaattccatctgataaaataagctaataaaatatttaaaattaaatttaaattatggctgcagcaatattataactcttgtaatattttgcagttctttttagtgacttaatggtttcttaccttgtgacaatttattaaagctagccagaatagattaaatattgatgggaaatgtactaaaggtctcggacagcccgtaactctaaatatagctctttatttttgtaatgttatgttgagcttgccccaaaattaaccttagaaataagatcttatttcattctgttgacttcccatgtataatgtatggaggcgaatgagaagtaaaggcaagttgagaaactcctccagaactcctgtgtcatggccagtctacatgcctaaagtgtgtcttcctgtgaggacagtgccatggtacctcctaaaatgtacagatgtgtatttatgctatcaagattgtgattacttttcaatatctagactgtattaataaaatagtatttcaga

SEQ ID NO: 206862 - DNA, 181 bp, Homo sapiens
ctgattcagcagggagaaaaagaaactaattaaaaatttaattgatatcatcagagaataaaatactcataatataagaactggctgctcagagaaagtaacaatctgagaatacaaaagagttattgaaagttaaaaacatggctgctaaataaacatgtcaatagaagaactgaataat

SEQ ID NO: 206863 - DNA, 111 bp, Homo sapiens
acctggctgggtgcctgtagttggtgctagctggtgttggcatagtgttagtgtggtattagcctgctgctagtgtggtgtccacatggtgtctccatgatgttagcatgg

SEQ ID NO: 206864 - DNA, 452 bp, Homo sapiens
ctactaaatacctatgtgtggttactgagtgtggtatacttggacaccgagctcccccacccatcagatgtcacaaagagtcctcttactcttggataatttcaaatcaaactgacctccccagatattgagaagcaaaataatcaacaacaacaaaacctgccttgtaaatatgatttacattgattatgtggggatgttctgaagggagaagaaaggagctgtcaccaactcaaagcaacatgagagcaagaatcatgctaattttgccgtctgcctctcctatgttcttggtgccaagtctgtagttgaggttcatttacctgaatgagtgactaaagctttataacttgaacactttgaatacatagatctagcataaataagcctattaatggcaactttgacctgtcaagcaataaccaaatgatttgtgtgcctgctggattgtc

SEQ ID NO: 206865 - DNA, 106 bp, Homo sapiens
caaatgtgtgactctccaatcctaaaatcctcatctataaaataaaaatgactacatcccagggttattgtgaagattcaataagccagtgtccaaaaagggccgg

SEQ ID NO: 206866 - DNA, 496 bp, Homo sapiens
tctcgtgttgttataaatacctgagactgggcaatttataagaaaagaggtttaattggctcatgattctgcaggctgtacaggaagcctggcagcatctgcttctggggaagcctcagggagctttgactcatgacagaggcaaagcgggagcagccatcttacatggcaggagcaggacctggggtggtgggaggaggtgctacacacttttaaacatctggatctcaggagaactcgctcaccatgatgagaacagcaccaagaggatggtgccaagccgttcatgagaatccaccccatgatccaatcacctcccaccaggccccacctccaacactggggattacaattaaacgtgagatttgggttgggaacacagaaacaaaccccatcacatactaaagattatttccttggaagggattcacttagatccttttaaagtaattggtacatttattttaacttttccccaaatgtaaaattgatcttc

SEQ ID NO: 206867 - DNA, 256 bp, Homo sapiens
cctccattttggaattactgatagaaaagaccccaagtctgaaaagaaacatttacaatctattctctgtgaagcgtgctacctggagacattcctaagtcttacgtcaataactctttcaacccattgccaatcaaataatctttgaatctacctatgacctggaaggccagccaccttccagctgtcccgcctttccggagggaatcaatgtacattttacatgtatttgattggtgtctcatgtttccctaaa

SEQ ID NO: 206868 - DNA, 394 bp, Homo sapiens
tcagtcttcaaatttcagacccatgaagggaggaaactttggaggcagaagccctggcccctatggtggtggaggccaatattttgccaaacctcgaaactaaagtggctatggtggttctagtagtagcagtagctatggcagtggcagaagattttaattaggaaacaaagcttatcaggagaagagagcaagagaagtgacagggaagctacaggttacaatagatttgtgaactcagccaagcacagtggtggcagggcctagctgctacaaagaagacatgttttagacaaatactcatgtttatgggcaaaaaactcgaggactgtatttgtgactaattgtataacaggttattttagtttctgttctgcggaaagtgtaaagcatt

SEQ ID NO: 206869 - DNA, 273 bp, Homo sapiens
tcttaaaacaaacaaatgaaaaaaccattttctctcctccaagcaagcctaaggccacatgtcctattctcacacaggtgctttaatttcagcccagtctctagagcctaaatttggctcctctgcaatttccatgggctctaggtttccagcttatacttactgctttggctgtggtttctctcttccatttctaccacgtgaggatttccttttattttgtttaaagacagcacacattaaaaaaaacttttgttgttatcgtttacccaa

SEQ ID NO: 206870 - DNA, 310 bp, Homo sapiens
cagatttcagaaaatatttccaaaatgaaccactttgctgtgtgtcgcaagttattgctacttctgaaaccccctttttctttccttgtaattttacattggcaattacatttcaacatgagttttgactgggacaaaccacaccatctaaactgcagcattctgttttaggtatattgccttcttggagacagactattcgacttccgtaattaaaaagaagtccaactcttaggcctgttcattatagaaaaattgattcataattataagtgaaatttatatttcattaaacattttttcaacgaat

SEQ ID NO: 206871 - DNA, 387 bp, Homo sapiens
atgccattttcctgcctcagcctcccaaatagctgggactacaggcgcccaccaccatgcccagctaatttttttttgtattttttttagtagagacggggtttcactgtgttagccgggatggtctcggtctcctgaccttgtgatccaccaacttcggcctcgcaaagtgctgggattacaggcatgagccactgcacccggcccactttgttaagtactttatttattagttatggtggttttgttgggaaactggtccacagacttttcacactagtattctggacctgatgacctttcactcaagtattcggcatgcattttgggatagccactttgattagcacatttagaaatctaacattgattctgtattaatagctg

SEQ ID NO: 206872 - DNA, 414 bp, Homo sapiens
catggaactgtctttgagtttggggttcaggaatctatttggccttttctacccaaagaaaaaaaaattatcatcttcatctctaataaatggcagcaccttaatttataattcaaaaggagaaataacacatatgtggctgtcaggaaaggggaaacattttggaaatggcttttgtgaaagattatgaagtctacctactgtaccttatcactgcagaaggaaaatgatgtttcttttgatcaaaacatgacaaggagcacatcaaaatcaatacatggagaatttaatcctctgagctgtcagaatcacaaacagagaaagtgaatgttaatgacagaaaggcaaacatgtttattgtggaaaggttactgctgagatgcctgcctaccctcttagaaaaagtaaagaaag

SEQ ID NO: 206873 - DNA, 342 bp, Homo sapiens
cttcttaatctgaacagtgggactaacagcagaaacctcatttttaaaagcagctttattgagatacaactcacataccataatccattgaaaatacacaattcattattttttaggatactcataggtttgtgcagccatcatcacagtctgattttggaacatttttgtcttctgtgaaaaacgccaaaccaaatgtaaatgagtagagccattacggagaatattatgggggctcctcaagaggtgagaagggatagagagaggttggctaaaggctacaaaatttagctagataggaagaataagttctagtgttgtactgggtgactacagctgacc

SEQ ID NO: 206874 - DNA, 446 bp, Homo sapiens
gaaagatttggtggttagaagaatagagttcctgtttagttgcttatgttttttcagtaaagtatgtgagagtggggccaatgaggaagggtttatgttctacagtatttatcttagaaaaagaaagggaaaaaaaggaaaggaaaaaaagaggaaggttgaaatttttaggaaaaaaaagatataaaatagttgactcagagagcaaaatattaatcttactaggaaaaccttttaggattatggagcagatatagagtgtttcagctttgtggtcagaaatttaaagcactgtgccagtgtttggctgctctggtgcaggcccagagaagttatactcagatgggcaagtgaatataaaagaagtacaattgcttttcataatgacgaccaggacatcaaaggtggataagggagagaatgaacacagaatagacataagagtt

SEQ ID NO: 206875 - DNA, 489 bp, Homo sapiens
cacgaagcccgccagatgcacaagtcaaaactgatctagagattctgaagtacgctgtgctccttgagaagtgcggagccactggaaccacaagcagcttcagacaggaaccaatgaggccatcaaaaccctcaacagaggcatctgtgagttcattgtggtggctgcagacaccacgctgcaagagagcattctgcactcccactgctgtgtgaagagaagaatgtgctgggcctgcctggaatgtttgcgcactccaggcgggccctggggcgggcctgtggggtctccagtcctgtcatcacctgttctgtcaccatcaaagaaggctcacagctgatccagtccattcagcagtccgttgaaaggctcctagtctaaacctgtggcgtctaaacccgtggcctctgctgcacaatctctgctgactcctccccctgaggttattctcagctactttctattgctataaaatattatagtactaaa

SEQ ID NO: 206876 - DNA, 604 bp, Homo sapiens
tgtcacacacctgactcatttaattcccccagtaacaagttatgataacatgtatgaaatgtctactagggaaacctgttaaagactcggtgcccagggtttttatcaagggctgatcatgtaggaagccactgcttggcacatacccagcttctagattcccaaaaggaaggcaggtgttcagcataagccgtattgtttgcataaacaatttaggcacagtgaacaactcatatcagttagggtggttgggaaccctcctgaaatctaagttcccagatgtcagccaagggctgtgtcttttaagtaggcctttctaagagtaaacaatcaggcctacctactatgttaactttttatctacacaggaaatatgaatggttcttttgtttgttgttttgctttttcgatcaaggagttgcttggtctcactttaaggaagagtgaatttcccttatagtagatgtgttagctctgtccctataagagcatgatgtgagagagcctttagaagagacgtgttgttttaaaactgggagattcagctgtccataagacagacattaatatcccgaatgcacttactagaagaggtttatttctc

SEQ ID NO: 206877 - DNA, 397 bp, Homo sapiens
ggacgcggcagtgatccgtactcgtggcctggctgtggccgtgtgtgaaacaagtatttatcaaattttctcaccaagagccaaatatttcaaaaatgaaattatacttcaagggcataatacaataataaggaccagacttaatctctcaccatgaccagccaggaagctagagagaaaagttctatgaaataactgttttcagacatggaaagggttgcggtctttcagagaaggaaaataaactaggaggatcccaggatgagctggctcttggcctagaggtaccttaggacagtggtcaactgcactgaactgcagcgctaggagggacacccaagcagaccttggtggtcttgctgaggtgagggcatcaagagttcagggatgcagaggt

SEQ ID NO: 206878 - DNA, 517 bp, Homo sapiens
cagagcactgattccgaagagaggcagcagggaggtgcatgcctccagaagtcatttgaacccgggaaagcaatgttttttcaaatcatgcttgccactttgctatgaaggagtgataacccactttgagaatcccttcaatagagtttctgtcattggtactacacgacattttgggggctctgagataggaaaagaaaaaaaaagccaaatcctttagcatagagttggattctctaaatagtttgtcacagtttttctggagtctaattgtctataatctgaagaaagagaaaattaaaacaaacaacaaaccaaaaaaataataaataaaccaaaatgcatcttgctaaattttgactctaattctgatacttaaaaggtggaataggggctacttgtctgttagaaaattgctaagtccttaattgtgatgaaaagtctcaaaagtgatgtgctcaactaagattataatttctttttagtttttatgattacagatttaatgatatggcaa

SEQ ID NO: 206879 - DNA, 466 bp, Homo sapiens
ccctttgtttgattcactaggttaaaaacactgttgttgtagaatctatgaagggacatttatgagtcaattgagacctacagtaagaaaccaaatatttcgtgataaaaattagaagcaagctatttgaaaaaatgctttgcaatgtgtacattcatctcaccaaatataacttgtgttttgaatcacctgattggaaatactctttttgtaaaatctccaaagggacatttctgagcccattgaggcctataatataaaacagactatcttgtgataaaaactagaaagaagctatctgtgaaaaatgcttgtgatatgttgattcatctcagagttaaattattattttgattgaacagcttggaaacactctccttgtagaatctagaaattgtaatttctgagctcattgagacctatagtgaaaaaccaaatatcccgcaataaaaaccagaaacaaggc

SEQ ID NO: 206880 - DNA, 356 bp, Homo sapiens
ctgagtcaggtgattcgcctgccttggcctcccaaattgctgggattacaggtgtgaaccaccatgcctggccagtatctcactttttgaagcaaaaaaatgtaatgtattgtgagatttatgtcatatagaagtaaaatgtgtaacagcacaaagaatggagtggaaaatgttgtaatgttctgacactatatgtgaaatggtatactattatctgaaggtagactatgataagttaaaggcgttcagtgtaaaccctagaacaacatttaagaaattatttgaaggtacactactgtaaatcctagagcaaccacaacaaaacccaaaaagataaagagccaatagtggaaata

SEQ ID NO: 206881 - DNA, 519 bp, Homo sapiens
tcatctcggcctcccaaagtatgggattacaggcatgagccaccgcgcctggccaataaagcaatcatattcatccagcatcctttgagagggtagagaaaatcattattcacagactgtcacctgggtttggcgtgcattcctacagattttacctatttaagagatccttaaagtttttctgattcactgttaaggtaagcctagggatcttgcagtgtatatgtgaaggaaatgggtaacggactgttgagtgaatacagtgtatagattgtagcacatatggtgatctgtgaaacgggggtgtcatgacacaccccttcctgcatcccaaaattgtgggggtcagggtggataacgggcatttctgcagcctgcacagcagtgccgaatgcaggctgcaatccagcaatgtcactgctgggtatttatccaaagaaaggaaatggctgtgttgcaggcatgcctgcactcacacgtttatcacagcgctgttcacacagcagcctaggtgaggaa

SEQ ID NO: 206882 - DNA, 543 bp, Homo sapiens
tataaacatgtttgtgaatataaacatgcaatcagtttttaaaaaatttttatcaggcatgagccaccgcgcctggccaataaagcaatcatattcatccagcatcctttgagagggtagagaaaatcattattcacagactgtcacctgggtttggcgtgcattcctacagattttacctatttaagagatccttaaagtttttctgattcactgttaaggtaagcctagggatcttgcagtgtatatgtgaaggaaatgggtaacggactgttgagtgaatacagtgtatagattgtagcacatatggtgatctgtgaaacgggggtgtcatgacacaccccttcctgcatcccaaaattgtgggggtcagggtggataacgggcatttctgcagcctgcacagcagtgccgaatgcaggctgcaatccagcaatgtcactgctgggtatttatccaaagaaaggaaatggctgtgttgcaggcatgcctgcactcacacgtttatcacagcgctgttcacacagcagcctaggtgaggaa

SEQ ID NO: 206883 - DNA, 237 bp, Homo sapiens
attactcagctatgtgtctttgagcaagttacttaacctctctgtgcatctgggtcagcatttctaaaatgggaataataatatctaccttacagatgaatattaaaagaggtaactagtacgaggtgcttaacagtaaatgcatttcagaaaacaatttttttttcatttatgaatttctgttgttatagcgggataaagtcacaccaggggaaagaggttgacagggacagacaa

SEQ ID NO: 206884 - DNA, 572 bp, Homo sapiens
actgattcttcaaagaaggatgttgtttggtagatcagtggttttcacattttagattgaactttttaaacacagagtccaatactgctttcccagagaattataagcagcgtatctcagatgtgacccagagcctgtgttttgaataagcttccatctgatcttgattcaagtggtcccaggaccaccctcagagaaccacacagccgacagacagagctgagtagtggagctgggaggggcacatcaggcagaagaaccatctgtgagaccagagtagggcagaaggcacaggcacagaaggatcgagaaactggagggtgacaatcttagacatgcaggcagatgtctgatcatgaaggccttgcttatcatgtgtagatgcttgtacatgatcctaatcagtttaactatttaaaacaaatgagaaataagatcagatgtgcttaataactttcaatgttagtaacaaaaaattgaggtaacaaattctttccatttgatttactgctccatctttttttttttggaaggaaggaagccatgaagaaacaaaaaaaagttggcggccg

SEQ ID NO: 206885 - DNA, 561 bp, Homo sapiens
ggaataacttgtagacggtgacattttaaagtgcaaaaaaaaaaaaatagaaaaaagaacaagctcatatattgaggaataaaagaggccacaaatattaaagatgagtgttaacctatatctttctgtggaaaagagtcacgctaataaataattaatcacattaggccatttgctccattccgaatgaagaatgtaaatgccagatttagagcacatcttcaattcacatttgcattctgaagaattagccatttggggcaattatttacttttatttctcttcatttccttctacatttgagactttataaaaaagttttcaaaggaagtgctatggacataggttttttattccaaactattttacaaatcaaaatggtttgtaacctcttgcagacatttttacaacacaggacctactttttttttaaattttgtgttctttttttctataggttttcaatcataattttctatgataatgagccccaccttcgtatatttaagtctcctatacaattagaaaaagcataccaattaattcaacaagaagcaaat

SEQ ID NO: 206886 - DNA, 338 bp, Homo sapiens
tggccatttagggcttcgaaaacgtttaatttcatggccatcatttaaaaccagataaggctggttgtggtggctcacgcctgtaatccaaacactctgggaggccaacgaggtgggtggatcacttaagtccaggagtttgagaacagcctgggcaacagggcgaaaacccatctctaaaaaaaaaaaaaaaaaaaattagcttggcatggtggctcagtcccagctattcaggaggctgaggtgggaggactgcttgagcctgggaggtcaaggctgcagtgagctatgattgcaccattgcattccagcctgggtgacacagagagaccatttca

SEQ ID NO: 206887 - DNA, 481 bp, Homo sapiens
aagaaaacatgatcaaacagaattcagcaatatataaagaaatatataccacgaccaagtggtacttattccagagatgcaagggagagctcaatatttgaaaattaatcagctcaatatttgaagaattgaaccatattaacaggctacagaaaaaaaatcacatggtcataccaattgatgcagagaaagtgtctgacaaaattcaacactgattcataataaaaaaactctcagacaaataggaacagaggggaacttcttcaacttgataaagagcatctaccaaacacccctacagctaacactgtatttactggtgacaaactgagtgacttatccttaagaacagaaacaaggcaaagaatgtccactatcaccattcatatacaacataatgctagaagttctagctagtgcaataaagtgagaaaaaaagtatagtggccaggcgcagtggcccacgcctgtaatcccagca

SEQ ID NO: 206888 - DNA, 509 bp, Homo sapiens
tgagaagaatgcgaagaagaaaggaagagtgagcctctctttcccatcgttaccctccattgtcctcttgacaccctgctttcacagagaaagagtttgagaccctctcccaggagccaaggagaggggaacagctggcttcacatcatctttctattcaacaagatacaaaaagctgaagccaggatgatagaaaagcaacaaagaagacacggtccttactcatttcccttcccacttcagagcaaatgtgagaaaagatttcatgcaatgctttagagaggggatgcctcagacaatcggtcatcagtgaggaagaactgaagcaaaacctgctgagctgtgaggctgacttgcttctcaggcagcgctgggatgatgtattgtccttcctgacttgtgacaaagagaactattcggtgctggggttgagctagggatatgatagatatctttaattatatgataatcagagatgagctaattagatatcacttgataactgatca

SEQ ID NO: 206889 - DNA, 504 bp, Homo sapiens
ggtgcctatgagttaataattaccttctggatagtttgggagggtaattgccttttatacatacactcccttaacatacaacgataatgattaagaattttcttgtaattcccacgaggtgattatttaacagagcaacaggccagggtaggctggcgtggggagcagcgctgctgagagtcactgactcgcagcgttacggacacggctctgcagaacgaggcttgcacccaacagagcaccagagcccagggaggccgagctcctcatcgccacacatcatcgccacacatcggacttatattcatttacgggacctaagagtatgacacatcatcatgacaaagttgaagaagaactagcactgcggcaacctgagtgggattcaggaaacgcagtgaggtcccgctgaaaatcaccttcgagtttcagaggaacatctgaagtcagactttacataatgtaaagaataaagagcaaaactcgagaaagtcatataactta

SEQ ID NO: 206890 - DNA, 364 bp, Homo sapiens
gaaactctccaaatatgcaccccacttccccattctccacagggaatatgggtctcctcccagcctgtcattgcccttcctacttcatgcccttctggctcaaatgtcacctctagcctgttgtcacctctacactaatgactcccccctcaactcactcagccacatctctgccagacactgacttcttgtactagagtcttactgcctcatttgaccttaagaccctggagaccaaggaactcctgttattattatttttttgtctctcaccctggcccccgcagcacaatgctcagaacgtagtagatgtttgttgaaacaatggtaataatgccggggcggtggctcacgcctgtaatcc

SEQ ID NO: 206891 - DNA, 555 bp, Homo sapiens
tcacatacaattcggggagttaggaaggctatgtacatatatgaagctacgttcacttaggagaaatcagagaaggatggagcaggcttgaaagaattcctcaagccacacacagacctataaacatagggcaaaagcaccagtggcacagggacttaaacacaacttctgagcaaatactgactcaaccataggctactctgacccaggggcaaatcctagaaatccaggatgaaaaataaaatcagtatcatccctggaagtctagaagaatgtgtgtatgcccaaggctatgcccttgaaggagcaatcacagaaggatcctccaaggtactagtggctgaatgaggtggtggataggggacaaggaaatatgtaaattcactgaactatgagagccatctccaagccatccacatatccaatggcaaaggataaaaatctaattggctaaaggatgcttaagcacaacctttaactaataaatagcttatgccaagctacggtcaaaacctaagtagccaggctaaaagataaaaataaagaaaaaatatc

SEQ ID NO: 206892 - DNA, 245 bp, Homo sapiens
ggggtcgattctgaggatcccttttttgcatgtggttccagttttctcaacacgatttgctgaaaacactgtccttacctttttgaatggtttttacactcttgtcaaaaatcatttggtcatacatttatgaggtcttatgtctgagctttgtattctattttttggtccgtaagtctgtatttatgttggtaccacattattttgatgagggtagctttatagtaagttttgaaaacagaaag

SEQ ID NO: 206893 - DNA, 481 bp, Homo sapiens
tgttctttttgcctggaatgctttctcccactgttttgtctagacaagggctgtctattaggactttctgtgatgagggaaaagctctgtatctgctccatccaatgtggtagccactagccactagccacatgtggctattgaatacttgaaatatgcctggtataaatgactgaaattgccacatgtggcaaagagctgccttatagggcagcgtgggtccagacaactgttacttactttgaaatcattagctcagggctccaggtctccactgggaaaccatcccaatattatggttgatgtaagtgcccccgttcccccacccccacttatgttcctgtagtaaccttgttctccctctatcccaatactcagaacaccattgtcagtgattcactgatctgcctcctctgctagaccaaatcttttttaggtcaaagatatgcagtgcagtcaataaatggttgatgcctagatg

SEQ ID NO: 206894 - DNA, 1043 bp, Homo sapiens
gactatccttgcttcccctccctctcaaagctgccaggggaaactgaggcaggcacactcatggtgaactccaagaccacaccaacccaccggcctggctggggtgcagtcttttctggttgtttctctagcacagctaaggtcagagtcacaggacagtagcaatcactgtcaatcttgctattttctgttttctttgaattaccaattctggctcatttggaaaagaaagccatgccccgtctaatttctaaacacgcctacctttttgagcctgtgcctgcttgccctttcagagtccccttggacaacttcaatatctggaaacttcctgtgagataaagtggcttcatcatataaaccacagaagacccctcaaataaaatcaccttgtgggtctggtgagccaggcaagctcaggagggctgggatcctacagaacagccaccagcccacatctccaaggttaagccccgtggtgtggtgtggtgtggtggtgacggctgacagcacgacagccaatggctggactttggtcctgccccagctccactgctgcccttggacaagtgtcccctgagtctcaccctgatcacctgggaaaagggcacgagagggacacagctccccaaactgcccgcaggtcagagtctataagtgaaagcatctacccatgatggacacagaggaggcactgactgagcaccactgtgggcttcatgactgttccaaagcaaatggggaaaaaaatccctgcttcgggccgggcatggtggctcacgcctgtaatcccagcactatgggaggccgaggcgggcggatcacgaggtcaggagattgagaccatcctggctaacacggtgaaaccccgtctctactaaaaatacaaaaaaaattagccaggcttgctggcgggcgcctgtagtcccagctacttgggaggctgaggcagggcaatggcatgaacccgggaagaggagcttgcagtgagccgagatcgcaccactgcactccagcttgggtgacagagcaagactctgtct

SEQ ID NO: 206895 - DNA, 259 bp, Homo sapiens
ttgttaattatctgccctcttgcctattgcctgcataaggacagggatttgtgtgtctttcattccggctgcgtccccagtatacagcatagcccctggcataaaacaaacatttaataagtatttgttgaatgaatagccacaatatataatacatgtatgtagagtgaacactgaaaataaaaacgagcttagaattttctaagggtacatattttaaaaattaatttgcgttttttgtttgtttgtttgttttttg

SEQ ID NO: 206896 - DNA, 286 bp, Homo sapiens
atcaatgaattataatttcagtaatcctttgctcaccctgcaaggatgagcgtggagaagaagagtggagaagtaacccacaatgtaacttaatttcccagcgagaacctgaacccttactaaagtccccagtagtagtcagccaactgcaaattgctgtgggaatatttacagtaacaactattaggaaacatgcagtattttgtttgccacgaagccaacttaatcttcagtgtcacaatgcaagttaagatttcctaaatatatttttaaagattttctatga

SEQ ID NO: 206897 - DNA, 547 bp, Homo sapiens
ctgtttggatacccaaaagttcaaatgttagtgggaggggagacaatgtgccttccctaacctgactgataatactggatgccttccctaacctgactgataagactggatggccgacgtctagctgcaggcagtctctgtccccacagggagtggcctctgcctcccgcttgcccctgggtgggctgaagcagtaagctgactctcagggcaagcgtgttcctaagggtcttgtctcttccttagggctgggttccagtagaaaaactggccttcagagaaaggagagactcttccaaatcttttgttaggtcagtagttctcaaagtgtcccctgttgccccagagtccgcatcacctgggaccttgttagaaatgcaaattctatggccccattccagacctacagaaccagaactctgcgggtaggcacagcaatctatttaacaagacctccaggtgacagtaataatgtatggtcaatttaggaatcccagggctgggcgcagcagtggcctgtaatccccaaaggtttgggaagccaaag

SEQ ID NO: 206898 - DNA, 114 bp, Homo sapiens
tgtcacctgtaaagcttaatgttgtgctaactattccatcatgcagatcactggcagaaacatagaataccaatattcttaagtcaaagtcaaaaagaaatccactagtgatgt

SEQ ID NO: 206899 - DNA, 529 bp, Homo sapiens
gtatgctaatgagagaactggtggctgggggccctagatatagcttcaggatgggagctggtctccagaaaggccaagggaggattagcgggttagcgctttcaaccttaccttcctataccgcagaaggtagtgccagactttacttgaattgtaggacacccacctagtgtcggagagttggagaagtggggttgaaagagacacccatgtttgttattaaaagcatgagtaaaaacagctcgcctaggaatataatttttgggtcatatggtaattttgtggttattctcttgaggaattaccagactgtttccaaagtggctgcaccatttcacattcccaccagcagtgtaaaaaggattcaatttccccatatccttgtcagcacttgttattatccatcttttgaattctagccatgctagtagatgtgcagtggtatctcactgtggctttgatctacatttccctaatgagagaagatgatactgagcatcttctcatgtgcttattgaccactgtgtat

SEQ ID NO: 206900 - DNA, 292 bp, Homo sapiens
acgagagattcgggtagctacatgaaagcttctcccctgcagtccctggaagaagctttctgtagctccctgggggtggagtcggtgccggagctatgaacctcgggagtcttaggatgaagggaggagggaggggtgtccaaagggccccaaggcaagaagctgggggtgggagaagctggcagtgtgggtgggatcctgcccctcactgacatcctctgaggctggtcacaccccacccaggcttcctcagcccggggcactcagagacagacaaagagggccatggaac

SEQ ID NO: 206901 - DNA, 1142 bp, Homo sapiens
tattcaaactgtttttcagtctttgtttgttttgctttttattgtgatttccgatttttaaaattattatatttttgaaggcaggatgcccatactgtgaaattaacaggttacatatgtgcagtattgatacacttcccctttaacaaaatttaattcactaatcacatgcatttctaaagccctttgaaaatgtgtgtcatgcttatgggtggccacattccagagggctgaatatgtgctagaaaaggagaggaggcttgggggtggggagaaaacccttacaaggcaagagaactgagcatgtgcaagactccttactaaacgaaggagggcagaggagtgccgttttggaaatatcaaggggaatgaaaagagaaagagaattgacgggagagagaggaatctgcccacactcaggggatcatccagaattcacagatgaacagggtgcactcaaggaagactgcccctccatcagagcaccacccctcagtgactgctgacgtgtaagacacttccagcatctttttaccaggccccacccttggggatgcccagaccaagatatcactctttgcactaagtgactcctgagataccagccctttacctgacttacattctgtcatcctgcatcagaattgtttcgaatttttagaggtattgtgttataatggtgttcaatgaagttggaagaattctggctctgctgcttagaaactggcaagttacctgatttcttgggacctccattctctcatctgtaaattaggactaataatacctacaatgcaggatatttgttaggattacacattagttggtactcaataaatggcagctattgaaaagcagtgtagtatggtggttaaaagcatggagtctggatctagacagaggttgaatccttgctttgttacctactgtctgtgtgactgattttctatgtgtctcattttcctaatctatcaagtggggataataatggcacagtttctatctcgtagagttgatgaagagatatgatggttataattcagagtctgtcagataaaaagcatttagtagatggaagtagcagtggtagtatcaacagcaggagtagtaataattgttgttgttattattattacaaaata

SEQ ID NO: 206902 - DNA, 585 bp, Homo sapiens
ctttacctgggtgggttacagtgttttcactagactcttcaatagaattaatattttaagaaatgccacttgtttatttgaaaagtataagaatcctatcaatgcagtaggcatgaatgtattcatgtgtctggctgttcatgaagcagctgatatcttaagtgtaagaggtgagatttactgactaccagtaaaatatgcgagttgggaggctaatgattttaaattgtaaatgcgtctgcataagatcctttaaaatagcttttattgttcttaaatttatgtttaaaagaaattgacattaatattttcaaatcatccataatctcccaaaccttttttggttttctgtttagtaccatttaaatctttgtgtatgtgtatatgagctacctttaaaagagcagtcacccatgcgagcatttgttacccaattagtttgtacttttttttggtttttattttgttgttgttatttgtttctttttgagatggagtctcgctcttctcacgcaggctggaatgcaataatggcataatcttggctcactgcaacctccgcctcccaggttcaagcgattctcc

SEQ ID NO: 206903 - DNA, 578 bp, Homo sapiens
acagtggagatggtttgcctcagttgcactgtgcactgtaaaagcagtaccaatggctgtgcagacattcctaaagagaatcttagttttcttcctccactttaatagtggtcacccagtgggttgagcaaacaaacatttattgagcacctggtgtgtacaagcattcggctctgctttggtgctgaggagagtaaagctgccagggaaaaccgaggggacacacggacagctccagtggggtagctttgcagtgggactcacacctcttcattctaccagaagccagaagatactcactggggacagtcgtgatgggagtttttccatgagcagcaagagctaatgggccgtttgcctacaagagaaggtgggacagcagattcctcctggagaatctcccttgtggccctctcattgccctctgacagattgcaagcctgaaatctgtcagctttgaaagattgcctgaccctccagtatttggctatgtaagacaggtactgaaagacggcttttgttgaggaactgactcccaataaaaatggttaactatccagtgtgagaaaacacgccgt

SEQ ID NO: 206904 - DNA, 248 bp, Homo sapiens
aaggtttgggggctgccctccttaatcagagcagatagggcacccaccaccccagcagctgccaacacctctccccaataagtatttatttcttgtaagaacacgcttgatacacatgtggtcacccatcagggttcatgccagatctttctccagtccttcctatcacctttggggatctgctgccaagtccacaccctgaggtgcataaatggcataaagaaaatttcagctccacttcctcaact

SEQ ID NO: 206905 - DNA, 670 bp, Homo sapiens
ggaaagagtatgggactagcaaacagcatcctgagggagcatgtgtgcctgcgagaacaccagttggcaatccatatgctcattctgtgaaggggctgttcctgaatgaaacttatgtgcaggagaacaaagataattatagaacaaaaaatgatactacttttgtgaactttgtgactctgaagtagaggattgctttgtacttggttagccaatgtgaggaaataatgacatgttttatacaatgaggaagattacattcatgccttgtaattttgtgtacaaataattccattattccttataaacttcaagccctcaggagcactgatttaccatactggtcttggacctttgacaagttgttggtcatttttattcttagacaagactatttctgagtacctgttacaaaattctgaggttctttaagactttacaagtccataattgaatgaaatctttacgtttatccctgttttacatgctgaggtcaccagaataagtatggtcataatatttaccttttagtatattagcctttgacttactagccaagttggttggtggtgctattaagggtaaagtaacaggtaacccctgtgggccagttgggttcatggcccaaggttgctccactgcttagccatctcagaaataaatgcagggt

SEQ ID NO: 206906 - DNA, 760 bp, Homo sapiens
ctaaggttttgatggaaatatgagataaggacataagaaattctgttgtccaataaaatgtgaaaaaaatgcaattttaccagtgatcaaagaaatgcaagctaaatcaactataccattttttttacttattaagctggcaaatatttaaaaatacataattaaactgagacacattaaaaatacatatgcatttacattgataaggatgtgaggagacagatacttttatgcactactagtgggaatgcatatttgtataagtccacaagcccttgtctaagtcactttggccagatatgtttcagaattcagaattttttggattttataaatgtaatatgaagactttcacttcaggacaagatgcatttggagttttttgcggggggtagggaaggggcaaaatatataaaataatggttcataagacattggacaccaggcagtgaaagatagtgacccctgaaagataagaaacaaatgacataaaccctaagatttctaccaaattactccctggagaaagttttcacggcatgactcagagagggagaacgaaggcagagcttagtctctccgggtcaaggggacagggctcagagtccaggaaagacaaggtggctagagtttgcagggtggagtattaggtgagagccatacagagggctccatagatctgcagaaggtaacttttgagtattcagttgagtacttacccacttatttacccactgtgtgaggaaactacttcaggtcc

SEQ ID NO: 206907 - DNA, 257 bp, Homo sapiens
tccagataaatgaccttaatacaaatattagggtggaaaaacccctagatccaaagatccaaagatgcttttgtcaactgaaggcatagaaagtgttaatatttaatcaacacagtaggaaaagtcatttcccaaccttgtccaccttcaagggtcccattcaatttcataaagctacatactttttactttgcaaaaaaattttttagtgtttttttaaatttgatttcgacatctcttgaattaatctgatcgtt

SEQ ID NO: 206908 - DNA, 244 bp, Homo sapiens
aaaatattcttagttaaccccccatcccttccctctacacacatacacactgatgactaggtgtggcatttgctctggattgcttataatatccttctgtaatttgtcttaacagtgtctctcaaaccttggttgtttgtttagcatttgcatgtccactgaataattactgctatggagggaaaattctgtggtttattcttttagtaagaaacctttaataataaaaaagagtccaagtcac

SEQ ID NO: 206909 - DNA, 525 bp, Homo sapiens
cagttgtatgggaaaccccattcagaagggccctgtgcttggaattgaatactctgtggttgccatattgaagttgttaatacttgcatctttgaatttgtgtttggtaagtgaagtggggcaggacacagaagcatgcgctgaggcttgagtcttgattcacaccccaccctgccttccatggcctctcctccttcctgagacaggttcttggccacccactctatgccaccatgtggtgtcctgggttgcccagctagcctccccatttgtgcttctgccatgtgattactgccgcccctcacctgggctcacctctctgccatgggttgggacagtaggcccttagaaagagggtattgacttgttcatttccaagcagggctgcatattttctttctttctttccttcaatttctttctttccttaatttctttctttctttctttttctttctttctttctttctttctttctttctttctttctttctttctttccttccttcttttctttctttcttt

SEQ ID NO: 206910 - DNA, 930 bp, Homo sapiens
ggaaaggctacttgaggacaaaagagaaagcggcccatctaccagctgggaagagaaccctcaccacaaaccaaattggctgaaaccttgatcttggacttctggtctccagaattttccagtggctagaattccaagatcaaggtgtcagcagcatggttctttctgagagctgtgaagaagaatccgttccatgcctctcccccagtttctggtggtgtgctggcagtctttggcattctttggcctgcagacgcatcaccctaatctcagcccagctccggaacgcctttcccatgtttggtgtgttttctacctaatgagttttgatggaagtgaaggctgttatttacctctggaagctaaaaataccagctccctggtcatctcagagttggtttccgatgcaactaaaaacatcaactgatatgaggtccaaaagatggaattttaagcaccaaagacgctcccttatgggcaaagtctcaataggacatctgcatgttcagttgagattctgctttcccctcagatgacagaattattggcaaccagttaaattgacgcaattggaaacccagaaacatgatcaacaaagataaggagatggagataccagtcacccctatcaaagtggcaagtgggagggggatgctggttggtctgtcggagctgacgaaggaatgggattggaatgtttcttttaccaattatgtaaacacagcctggagttccgagatgagtccatctcacttgctcagaactttgcctggtgagagcggttacaagcgaacaaggtggaaatgaaagaaaccctgactttcccactaggaaggaagagactgttccttcttgtgatgtactctgaagaaaaattctaggatttggacagatttcttgggttataaaacatgattttcttctctgttt

SEQ ID NO: 206911 - DNA, 238 bp, Homo sapiens
atcctgtccacttccacagcttcagttaccacctatgtgctgacaactctcaaatcttcatctctagctcagttctctctccgggactccctgctatatatcccttcacctgctgagcacctcccttcagacgtcccactagtgggccaaactcaacaatctaaattgacctcttcatcactcgtgttccctgtctcagtgaggtccatcatcaccagccaataagttctccaagcca

SEQ ID NO: 206912 - DNA, 391 bp, Homo sapiens
ccactgcactccagtcggggcaggagagtgaaaggctgtctcaaaacaaacaaaaaatatatgctctttgggcctggactggacaggccacacaaaatacccctggggaagaaggagatttgactcctggcttgcagcctgtgtagggccaccaagtgatcaggtggggtctggggtcagggaatcctgggcccagctgctagttccatcacttacaagctggtgcttgctgagctcacttggtacctggggatggtcctagcatcttatgcacaggggttaggctccaggtgaggttgcagatcttgtgctggttggcatggactggatgcatcaacaagccccagagaccaggagatatcccacactggaaagtattcctcatgcatca

SEQ ID NO: 206913 - DNA, 528 bp, Homo sapiens
accgcacctggcctctgagtctgttgtaatctaggttctgccatctctttttccttgcttttgttgttgttgaagaaactaagtcatttgcctacagtcctacagcctggattttgcagattgcctccttagagtgccatttaacatattttcggacgttctgtatcccctgtaaactggtggtaaatccagaggcttgatctgattcaggttccgtttgttggcaagaatattttgccagcggtgacacacacttccatcatgaggctccagatgcctggttgtctctctttttgtaatgtccacagctggccaggcacggtggctcatgcctgtaatcccaccagtttgggacactgatgccagaggatcatttgagcccaagagttcgagaccagcctgagcaacatagtgagactctcatctctgaacaaaaactttaaaaaataagccatgaaatttaaaagaaattaaaaaaaaaagctggatacagtggctcgcacctgtaatcccatctatttgagagga

SEQ ID NO: 206914 - DNA, 561 bp, Homo sapiens
ggcgtgtccacagctcgatcaaacagcctcagccccactgccacggaccagccacgtccacagcaaaaggaatcgtgtccgacactaagaaactgtgaccacccagtaccaaagatgcctttatatagaaacggactgtggcttgcattctttccctccaccagctcctgaaatgaaagggttccgtcacacaatgaaataagtaacagcagggagagagagagaggggaggtaaattgtttggaaagtagaagacagggtggaaaagatgaaattcaagacagatgtgtgagacccgcaaacatatgtctttgaatttatgcatccaagtgattgatgtagaataagaaaaaacagctacaagcccaataaagaaataaatataggagtaaatacagaacaaagtatcacgttccccacttcttccagaccaacatcaattctcgtctctctttctgctacataaagttgttacaaaacggggcgagtgaaggatcgaagatgaaacactacgaattaagcagaggttctctgtgtcctgacaccctcaggaggacgtca

SEQ ID NO: 206915 - DNA, 511 bp, Homo sapiens
ggctatcacattatcctagagaagtgctgccaatacagcaaccacaagccacattggccattgagttcttgaaacgtggatgttgtgactgaagaatggaattttaaattgtaattaatctaaacttaaattgtcatatgtggctagtgtaccatgttggaatgtgcagttccagagcagcgcttcttagaacagggtgtctaggccagcagcatcagcgtcccctgagaacttaggcatattcttggacctactccagacatggtgaatgagaaactctagggtgggacttacattctgtgttttaagaagtgcccccatgtgatgctgatgtatgcaggagcttgacaacctctgttctaaaggaagtttatgaatattattatactgtcaaataattggaaacaatctacatgtatacctgtagggtatacgctacttacattctgatgcatttatacaatgataatgtgatagcgaggctatcacataatgcaacctcgaagtcagc

SEQ ID NO: 206916 - DNA, 228 bp, Homo sapiens
atcgcttaggaccagagtggaaaacattcaggaacacaaaagacccaaccaagctcattagctctgtttgcctctaacttatctctatggcaactcacagagggtccagggaaaaaaaggtttttaaaattagatcatcaagaacttcatccagaacagccacaacacaaaactctttcaaaaagcctttggttgttgaaatggtgagggcatgtttcctgcttaagc

SEQ ID NO: 206917 - DNA, 374 bp, Homo sapiens
atcaaatcgaaaaacagaaagtaatccctttgcggagttcagttttatgggctggaatttaaacttgttgttgtgccactgtgaactgggatgatcactgtcagcaagtagtcaccaagctgctgggattggggtggtgtttgtaaaaagttaatctggtgcagggtggcataacacataagagtctgtttcttttgagatatttggcagaggttcctaatgtgcttggactctggagccacactgcttgacttgaatctggcttctagtatgtcaggcaagtttttaagctctcagtgcttcagtttcctaacttctaatatcaggataataataatagcaattttatatggttactgaggggattaaaactg

SEQ ID NO: 206918 - DNA, 268 bp, Homo sapiens
ctgggcaacagagtgagactcaaaaaaaaaaaacaacagctggggctgaagattgcttgagcccaggaatttgggaccagcctgggcaatataatgcgatcccatctctagaaaaaataaaaaattagccaggcatagtggatagtggtacatgcctgtatcccaaattctcaggaggctgaggtgggaggatagtttgagcccaggaggttgaggctgcagtgagcagtgatcactgtcacctgggcaacagagtgagaccctgtct

SEQ ID NO: 206919 - DNA, 365 bp, Homo sapiens
ttgggatttatattatgtagatttgctacttttttcattcattcattcaacaaacatgaagtaactactattaatatacatatattactatgttaagtgctattttaagaggtttattttatccaaagtagaaaagggtaggcaacttgcaaactgttcaggtttgcctatgtgccaagtactgcatttatacaaccatgaagggggagaaaaatcctgtaagtgggccgggtgtggtggctcatgcctgcaatcccagcactttgggaggccaaggcgggtggatcacctgaggtcaggagtttgagaccagcctggccaagatgatgaaaccccgtctctactaaaaatacaaaaatcagcca

SEQ ID NO: 206920 - DNA, 565 bp, Homo sapiens
ctcctggttcgcaggcaagaagcatgactgggaggcctcaggaaacgtagaatcatggcagaaggtgaaggggaagcaagcatgtcttagcatggcagagcaggagagagagtgtagggggaagtgccacacatccccttcaagcaacaatctctaatgagaactcactatcacaagaaaaagcaagggagaagtcctcccccatgattcaatcacttcccaccaagcacctcccccaacacatagggattgcaatttgagatgatatttgagtggggacccagagccagaccatatcaatagtgtaaatcctccaattttatttttctttttcaaagttgtttcagcgttagcttttctaggcccttggaatttccatatatattttagaataagcatgttaatttctataaaaaaaaaatgtcatgaggggaacagggctgaacaactacctattagatattatgcttactacctgggtgatgccatcattcataccctaaaccccagcatcatgcaatatacccatgtaacaagcctgcatgtgtactccctgaatctaaaa

SEQ ID NO: 206921 - DNA, 442 bp, Homo sapiens
caggaggagcaagtttgctgggaaagagcaatactttggttttggacatgctcagtttcaggtatagaggagacatcatggtggaaatgacaggaaggcagttgaatatgaaagtctgtatcaggtgagagatccagatcggtagagacttgacaaacaatggcatatagactttgaagtcttgtgattagatgaggtgtaagagatacgcagaaggaggacagaagactgcaaggactaagcttgggacatgtccatgctaagactttggaaagctgaggaggatgcagcaaaggaggatgcagagtcctcaagggaaaagggggaaagccaggggaatgagatgccttgagaccctggggaagagaggtgtcttctctaaatggtaggtattcagcatcagtgtagagacacctgctttgtaatatttatttggtcatgg

SEQ ID NO: 206922 - DNA, 689 bp, Homo sapiens
ctttcttagagaaacttagtccttcccatcatatgtattgaagggtttttttgtaagtttgtcttgttattttttatgggtttttttaagtatatatagaagttttgtttatttttaatgaaatcaaaactgtctcttctgtaatggctctggtttttttgtgacgcttagaaagtccttctcattaaagatcaccccaagaatctccctcactttgacttagtatttttagcatcatagccttttaatagttatctgcatggattagaacattggtgtttaaagttttttttaaccagaatagtatgaaatacattttatatatcacaatgcagcatacacacatgaaaaaatatattaagaaaatgttatttactcatactacatctgacatgttattttctactgtttcatttaagaaaacagtactaatctgttcattagtttcatagcctactaatagttcagaacccagtttgaaaaacatcggattagaggattccagttttaagttctgaaaaatttctgaatttatgtaaatgtaacttgatgtatcagaaagttatctttaatgagattcctcgagtttctgcttttaaataagtagtgtttcatatttgaaaatttttgaaattcgaggtaggcatgcttaattgtaaacagttttaactctgtttaagttgcttgat

SEQ ID NO: 206923 - DNA, 503 bp, Homo sapiens
tggagacagtatcttgctctgttgcccaggctggagtgcaatggcgcaatattggctcactgcaacctctgcctactgggttcaagcgattcttctgcctcagcctcccgagtagctgggactacaggcatgcgctaccacacccagctaattttcatatttttggtagagatggggtttcacaatgttggccaggctggtcttgaactcctgatctcaggtgatccacccgcctctgcctcccaaagtgctgggactacaaggcaggagccaccgcacgcagcaggttcctgtttttaaaagtgtttcctaacttagccttaactttacttttacccaaattaattcattttagctctactatgcttgggaatccctgagggaaaaaaatcaaatatggattttaaaaatatatatttgagaaaattatttccaaatgctcttctctgaaatttgctgtcccaaccattcactaaacccctccaacttcatcccctttatcc

SEQ ID NO: 206924 - DNA, 584 bp, Homo sapiens
ctataaagtgagtgcgattactttgttcatttcaaaggcaaggagatagatgtgcaaagggattgaatgagcgacttcaggatacgcgattggaaaagcagcagagatagtactggaacccaagtcaacctggtgaaagagtcaacatacagcccattgctttcagtccctttttccctctccatgaggtttttccctcatggagaaaatgaggattctcttgctgcctgcattctactgagtgttcatcactttagatagatgatagtagctgaaggcatggggtaggtgagatcaccagggaaacatacagagaagagagaaaggccttgggaacaagccctaagctcagaaatgggacaccttcccaggtcggggctggtggagaagaggcagcatcagggaaaacacagtggagctaagcttggatctgaacattaatggttgagaaggaaggatggagaagtggaggtgcgagaagaatgccacaagcaaagggagcagcatttgcaaaggcatatcagatgcaagagacaatatgttaccttggaaaatcagcaagcgatttcaggatggccgcagca

SEQ ID NO: 206925 - DNA, 414 bp, Homo sapiens
acatctcaaacacttcaattttacataatctgaaaacttcagaagtgagatggtttagactccagttttttacatattggcctctactactaacctggttctgatgtccttcattcacttattaaatatttgagcacctgctgtgcatctgacacccctaaagtctgcatgctataaatatgtagttgtggacctggtaatgggaaaaacgtgttaatgtgtcctcggaaattagagtgatatgggaggggctggcttgttactcggggtaggaaagcgcccagggatgctgctttttgcaaaccatgctgaccagcatgctttgtgcagctctggtctccctgtattcattcaatgttaatggcagactcatggggcagtatttttccccttaagaaactgtaaatctattat

SEQ ID NO: 206926 - DNA, 707 bp, Homo sapiens
gcagagcgcagtggctcacccctttaatcccagcattttgagaggctgaggtaggatgattacttgaaactggagttcaaggctgcagtgagctatgatcgcataactgcactccagcctgggagacaatgcgaaaccctgtcgctctaaaaaaaataataataaaagaataaagattcaggtatctgtgaactgatagggagagatttccaggaggtattgttaaatggaaaaaaaaaagcaaaaaatgtaatgatcatctagcatatactatgttttatgtaagaaagaaggggaaataagaaaaacatacagttgacctttgaacaatatgagtttgaactgtgtgagtccatttatacatggattttctttcaataaaagttacactgagtgtggctgcctctcctgccccccttccacctccttcacctcttctacctctgccacccctgagacagcaagaccaacccctcctcttcctcctcatcctcctcagcctactcaatgtgaagatgatgaggatgaaaacctttatgatgatccacttccacttaatagtaaatatattttctctttcttatgatttttaaataacattttcttttacctagcttacttttttgtaaaaatacagtattaatacatataacaaataaaatacgtgttaatcgactttgttatcattaagacttctgatcaacagt

SEQ ID NO: 206927 - DNA, 431 bp, Homo sapiens
caggagaaaaaagagtggtaggcagtacaatagttattgattatattagggtagtagaataactaccctattccattttctaaatttttggcaattaattttattatatcttctttttggtctcatcagcgtactagaaaaacaaaaggcagccaggcggggtggctcacgcctgtaatcccagcactttgggagaccgaggcaggtggatcacctgaggtcaggagttcaggaccagcctggccaacatggtgaaaacctgtctctactaaaaaatacaaaaattagctgggcgtggtggcaggcaccttaatcccagctactcaggaggatgagacagaatcacttgaacccgggaggcagaggttgcagtgagccaagattgcgccattgcactccagcctgggagacaagagcaaaactccatctca

SEQ ID NO: 206928 - DNA, 305 bp, Homo sapiens
catgtgagggatccaggttgtgtgttccttgtgaaaatctaatgcctgagatgatctgaaatgaaacagtttcatcccgaaatcatcctcagcaccccctgccctggtccatggaaaaactgtcttccacaaaacaggtccctagtgccaaaaaggttggcgactgctgatttaaagtatacaaaaggatatgcacaggttacatgcaaatactacaccattttatagaagggacttaagcatctgaggattttggtatcccagggatccttaaaccaatctcactgaagatactgagggatgac

SEQ ID NO: 206929 - DNA, 447 bp, Homo sapiens
caacctgctcaaaacaaggtcccgttctgaggtgctggcttaggactcggacatatctttagaggggtgggaggggagatgcaattcaacccacagcaaagcagtggggctctggcttgaatgcagcctctgtcatgagcgacctgattccacctcgcaccctccactgatgtgagccatctctccctggatgctagttacagcctcaaagaacgccccttggggctgcagacagaactccgccctcatggaagaagctgccggcaagtgctgggcagagggactagctgggaggaaatgaaagcaattcctccaagatgctgtcctcggggagcagcctggccaccctgcctgaaattgctgccgctgacacctgcaagcaagaagctcctccggccggggctggctccgcccacttctcaggccccgctgggcctcccgcggccg

SEQ ID NO: 206930 - DNA, 586 bp, Homo sapiens
taagtatgattttgtagttatagtgatcctctccacatcttaaatgatggcatacatttcagcattgggtgtgtgctaatctgaacgcataaagtagatggagtgattccagtattttaaagtagtgactcttaacactggctgcacattttaattacctggaaaaattttagaaaatgctgatggctgtgccccattcctaagaattttgatatacttggtttggggtgggcagactgattcaactctcatgaatgcccacacagtgatcatatgctgtgggtggacactgggatttttaaagcttccctcagattattggaatgtgcaaccaggttgagaatcatttttaaagttgattttctattgtagtaaaatatacctaacatatttacaattttaaccattgtaaaaagtatagttcattggcattaagtacactcaattcatattgttgtgtaatcattactgctatccatctccagaacactttcaccttcccaaactaaaactctgcacctattaaacaataacatcccattcccccttccaccaagcccctttgtaaccaccactctactttctg

SEQ ID NO: 206931 - DNA, 557 bp, Homo sapiens
ctagcaaaggggtctcgtgtctctgagtccagtgaactaaatccagtaatctataaaactgtgccgtgctgcctctaatccttacccactttttttcttcacatgctgataatgaggattcatgggtctgtatctgtttagtgctttgatattttggcaaaagatgtggggagaaggtagactagttgaagctgatatgatttttcctatgtactttttgggtaatatacatgtttgcagtgacatttgctagtcctaaatgaaactaaagattggggggggataatagtgtgattggatgatactgggaatgagataataagaaatatcctcagctttattgccaaggccaagcagtttgatactttgcttgtttgtttgttttggatgcaatccctaagaccagtccattcaccctaatgaaactgttgacaacacttagcagaaattctggtttgatgtttatattcttaagccagataatattttggtgacctgatatttctagtggcccagtgcctcagaagtagagaaaatagtgtgtagcttaacaaaaa

SEQ ID NO: 206932 - DNA, 543 bp, Homo sapiens
aagcctctctctctctggactatagaactatccctaagaggccaggtgtggtggctcacaccttataatcccaacgttttgggaggacaaggcaggaggatcacttgaggcccggagttcaagaccggcctgaacaacatagcgagaccctatctctaccataaaaaagacccagaacatcctcgccagcctgtgctccctatggggcaccccctccagtggaagtgagggcagccacgcacccctgggaatgccttagagaggggccaattgccatcgccaggggcctgactctgcaaccatccacacctacggggagtccatttgagagatgaggaagctgaagctccaggcccctggctcgtgctggtcacccaaccacccggaacctggtcgccaacccgctgtcagttgctcggcagtggactcctctcctggctcagggcgcggttccggcaggcgtccaccaggtggcagcaccggcacattctgcaggctgttccggctcagagctcgatgtagtgctctggggtaacctgggcc

SEQ ID NO: 206933 - DNA, 430 bp, Homo sapiens
caggcgaagaggggaaggagtaaccttccaggaagaagaaacaacagtgcagaacgccctggggcagtcagatgcttagtgttctgaggaagttaaaggagcccagggcagctcaagtggaggaggaggaagcagaagacagctgaggagacagggaggagcagacccagcagagctccgtacactgtcgaggtggtttttaagaacaaagcaaaaagaattaatagaagtagacaaaatggaggactattataagctaattaggctttatatttgcttccctacatctggaaccctttgttttcttgagaggttcatattttaagctaatgactgtttttcggtgtggccattacgctttttttgtttatttgtttttttagagacagggtctcactctgttgcccaggccggagtgcagtggcatgat

SEQ ID NO: 206934 - DNA, 270 bp, Homo sapiens
tcaagatcgagccactgcactctaggctgggcgacagagcgagactccgtctcaaaaaaaataaaaataaaaaaaaataaataaataaatctgaattggcttttaaacaatatattacgccaaagttgtgatcagacaaacttgatctaatgttagagatagtatctctaacattagaactctttctcatagacgttgaacgttctctctctcttctttcactgatgtggtccctttctttttctctctttttatccttcttatttctgc

SEQ ID NO: 206935 - DNA, 787 bp, Homo sapiens
gaacccttggaagtggatgaagagccatgggagtatggttcatttaagggagaggccagagaagtgggaggaaacccaggacagtattaatctctgaagccaaaggaagagagcatttcaaggagggagtggtggtgaatagtggaatgcactgagtggcctaagtatcctggattttcactttagactgggtggtatggtgaaaagagtatgaactttaagtcctggccagtggcttcaacccctgtgacataggacacatttgtaacctctgtgagctccagtttaatctgtaaaacgggtttaaaatacctagctcataagatgctatgagattttgaggtggtgtctatagatgcctcgcccagtgctactctgggagcagagtggagggtgggttggcatagttgaggctggagactgccgcagaggtcattaggatggatcagtggaggccagactgggaagattgagggcttggtcagtgggacttggtcatgtagcagcaggcatggtgagttttatgtgtctctgaggtttccaacctggattcctggagtatcccagtgtggattggagaagaggcaagtgtgtggagaactgttgaccaagtttccattttggacatgttgaatttgagatgcctgtgggccatttgagggaagacaaggagacattagcagagtctggggagaggccagcctgggctggagatgtgggcattaccagcatgtgtgtgaagcctggatatgggtgaggtactctgaaaggagataagaggagcagt

SEQ ID NO: 206936 - DNA, 443 bp, Homo sapiens
gtgactgtcaggtctggttctcacctatcatctcctctgtgaagtcttatctgcacatccaggccccaggaatttcttcttcctgtcatcccctagagcaatgatctctcacttactatgtagcacaagttactatgtattgttgtttcttaaaatgtcacaacaaaagctcccaattagatattaagctacctaggagtagagttttgaatttgttgaatctccagtgactaacattggattcttaagggaatctccatatgcccttttacccagtagacattaaacatttgatgttgaagaagaggctgatggtgttaccgccagaatgctgctaagaacatgatttctgtggctaaaaccagggttctggtccaagttctgctctatctttgtggcatgaacttgggcaagactcaacttctgtaggtctcaactatcta

SEQ ID NO: 206937 - DNA, 307 bp, Homo sapiens
ctcattacagcatttgctttgtataaacttgaagaacctgtacatcatccaaactctcatctctccattaatactgagtcaaatagcactgccttgatacataacaataattcagagataactgataaggtacttacagaaaatgaccaagcatttaattgactccttaattcttaagggtcatgctatgtaaggtagaacatatatgttccaaatatgttcaaactttataattcaattaacagtaaatatgattcacatcaaaatggtgtcataggtgagtggaattttgatgctctaatttatg

SEQ ID NO: 206938 - DNA, 425 bp, Homo sapiens
taaaggacctccagcaatgattttacttctttatgcttcagtttccttgactgttgagtcggggtggctatgatagtacttgctactggtgacaattgggatggttttagaacaatcatggtcaaggagagagtgatgggtgttatgacctcagctgtaatcctgatgaccacaagtatgacgggacttagggagcatctggggaagctgggaaggcttctcaatagcaattgctgggtggacctggggaccctcgccgaggggggtcaggttatgggccatgtaagtgtatctctgtctcattccggcccctcctccaagccacatgtctgtgacctatgctttttttctattcctttttcaggaaaccatctatcgacacctggtaagtccctccgatttccattccacttccctggtctcca

SEQ ID NO: 206939 - DNA, 489 bp, Homo sapiens
gagattcattctacatctgtgtaaattttttaccatctgttatgtggtgataatagttcttacttcttaggaatagtgtgaaatagctaatgagataatataaagtacatagcataatacctggcaagagtaaatacccaataaatgttagcattattatttatatctccatcagatgatcaattggcctcttaaatacttctggagctggaatgcttgttatttaatgatacagcttattccacttctggatagattgaatgatgaagaaatagttcacttatcaacctttcagttgcttaatgtcaatgattgttatgattcttaggtttttgttctttaggctaaatatttccacattgtcttgcaaatagtggatgatggatatatatttgtttaattgtcaaatattcttgattcaaaaataccattgatttaggttatacattttcatttaaaaaatcgcttcattaaatgtatataattttt

SEQ ID NO: 206940 - DNA, 453 bp, Homo sapiens
ggagttcttaaagtgagctccaaggaagccaaacattgtaatatgatgccttattctttaataacaacctgtcgagtgcggcttcctgataacagcctttgtccaagtcttaatgcaaccaagaatgaagggtcgttttcacagcagcttattataacaattattattaactgggaatataattaaatataaaattaaatataaattaaaatgagagaaaggggagacctttctcatctattccatcatctgtgtaagagttctctcctcttcaaagtcctattctggtttctgggaagcttttactgtttcttaggaagacacgccggatgtaagactgttaaactcgtttaaaccaattttgaataagctacttcttaggctagggtttctgtaaggcccggatgagatgggttggaaaggattcagcatatagatcagaagtgtttaaaa

SEQ ID NO: 206941 - DNA, 461 bp, Homo sapiens
tgtcaaactggaagttgtgaaatggtatctcactgtagttttaattttcacttctgtgaatacaaaagtttgataattttttcgttgtttatcagccttagtatttttttgtgaaatttttcataatttttcccattttattgaattggcaatctctgtattattaatttgtaggaattttgtatacattctaaatactaaatctttgtttatattagttgcaaatatcttgtcacaatttgtggcttgtcttcattgtctttatagtgttttttagaaaaaaaattttcaattttcatatattgttttatcaatcttctcctttatggattatactttgtatatttatatttttaaatttttatttttaattgacaaataacaattatatgtacttatgaggtacaatgtgatgttttgatatgcttacaatgtggattgattaaatcaggacaattaac

SEQ ID NO: 206942 - DNA, 608 bp, Homo sapiens
gaccctccccaagtaagacagaattcttcctgcttgactgccttgtaactgggacattggcttttttccctgccttgggactctaactgaaacattggctcttcctgggtttgagtcaagcctaccagccttcagataggaactacacccactggcattcctggttctcaggctttcagattcagactggaactcaaccactggctctcttgggtctccagttgcccacctccataatcatttaagtcaatttcttataataaatcttctatattttttgcttatttatatgtgataatatagatatagctatacatattgtatcctattggctctgtttctctggagaaccctgagtaatccatttacccttatcacttctatttgaaattgtactgggattcttagccagtgcatacaggaaagaaaaaagtttggaaagaaagatgtaaagctgccaccttttttcagattttgctttaacattctactggagctcctcacctgtgtagcaaggtatatctacaggaaaatcatgtcataattacatttaatgtactcacattcaactatataatcctgctggggagaagaaagaaaaagagaac

SEQ ID NO: 206943 - DNA, 553 bp, Homo sapiens
gttgacaaaattaagatgtttaccatgatcttcccaataaactgaatgtactttggtaaagaattaatatcatataaatttgttactgcaattatatttatttattttttctttttttgagacggagtttcgctcttgttgcccaggctggaatgcaatggtgcgatctcggcccaccgcgacctccgcctcctgggttcaagtgattctcctgtctcagcctaccgagtatctgggattacaggcgtgaaccactctgcccaaccaaaaaatatttaaagacaaaggaaaacaaagtagcaagctactctgttttactatgtttcgtattttaacatctctgaaatctgggtccatttaacagtggatggatagtggtcctccaagcttgtcaaccaatgccatccatttcctgtgcttactataagacatcaaaaacaccagattggaaaaaaatccaaactataatggtgagagaattgatgaataagatgtgttgtacaacattcccaaagacagctaggtacctagcaccacagctttagttctttta

SEQ ID NO: 206944 - DNA, 711 bp, Homo sapiens
accaatgtaatttgcttgtattttcatttttatgtatgggcaatataataaaaatgtgtctaatgaagtctaagaaagctttctaagtaagtacaaaattaaattctaagtgatttttcctatgtgtatatttttcttcattttccagactacatatttttgaaaaatgtaccattagtcttttgtaacttaaaacgagttctgttgtttatcatataaaatgaatgcttttttcccaaaaaaaaaaaaaaaaaaaaaaaaaaaaaaaaaaaaaaaaaaaaaaaaaaaaaaaaaaaaaaaaaaaaaaaaaaaaaaaaaaaaaaaaaaaaaccaatttaacccatccaaacaagggggagcaagctaataacactggaaagcgcgcggtgtgcacccctagtgtcgtcaaaaagagccgctcaggaacaaaaaaaaaccagatgcacattgctgaggcagacacgaactgcaagagagcaaccaatatttacttccggggaggtagacaaaacatgctgaacacaacatctaatacaggatctatatagccgctaaggggacaatacaaagcagcctcagatggctcgacacagtaataacacatgcgaaattctaattggagctagctgaaaagttttttatatcgcagatcatacatcagagaacttaatcagaggatatgtacaaaaagcagcggtgcatgagtaaaga

SEQ ID NO: 206945 - DNA, 622 bp, Homo sapiens
tggtgagagaattgatgaataagatgtgttgtacaacattcccaaagacagctaggtacctagcaccacagctttagttcttttatggattctgtaaggaaatgcttgttgccagtgctttcagtgctgcaaaggataaattctgtggaaaaacccagacaatctctgagtcggaagtaatagttcaaaagtgatgaaattttagaaatacctttaccaatgtaatttgcttgtattttcatttttatgtatgggcaatataataaaaatgtgtctaatgaagtctaagaaagctttctaagtaagtacaaaattaaattctaagtgatttttcctatgtgtatatttttcttcattttccagactacatatttttgaaaaatgtaccattagtcttttgtaacttaaaacgagttctgttgtttatcatataaaatgaatgcttttttcccaattctctgaagtccatttattttaataacaccatttgtttttttgccttcttcctcaaatgatccctttgttttaatcaaccctacctgctatccattcatgcaaaatacttttcccaatagtcattccttttcagtatgatgtattaaaaggaccactgaactgaatg

SEQ ID NO: 206946 - DNA, 354 bp, Homo sapiens
aggttgcagtgagcggagattacaccattgcactccagcctggatgacagagcaagactccatctcaatttaattcagccccttataactcctacacacccaaagtgcctgcgaatgatcactggcactttgggcgtatagaagttgagagacttagtcaatatgactaataggctgtcaagtccttccgttttctttcaggtatccggttgaaaacttaaaaatccaagccaggagggggatgatggctcatgcctgtaatcccagcactgtgggaggccaaggcaggtggatcacctgaggtcaggagttaaagaccagcctggccaacatggcaaaaccccatctctacaa

SEQ ID NO: 206947 - DNA, 494 bp, Homo sapiens
gctggaaccgcaggcttgtgctgccattcctgcctgacttttgtagttttggtagaggtggggtttcaccatgttgcccgggctggtcttgaactcctgagcccaggcaatctgcctgcttaggccttccaaagtgctgctaggattacaggtgtgacccaccaggcccagcccacttctgaaatgttaatgtgcataggaatcacttcagggttttgtatcaaattcagtttcttagatcctacccacagagtttctgattcaatcaatagggtggtgggggtgtcccagatcctgtgttgttaacaggactccctgtgtttcagaagctggtgctatgaaaactacaccttgaaaactattgtcagagtgtggtccacctctagaaaatattggcctgtctttgccagagtttcacccattccttagggagaacgggtgtagctgtctcttcctttccagtctgtgtaggaagcagaaccaagctcatagag

SEQ ID NO: 206948 - DNA, 603 bp, Homo sapiens
gtttaacagggcatctaaaatgataaaaataaatagaaaatcctgggttttttgtttgttttgcttgggtttggtttggttttgagacagggtctcgctctgtcacccaggctggagtgcagtggtgcgatcacagctcactgcagcctccacctcccgggttcaagctatcctcccacctcagcctccaaagtagccaggactacaggtgtgcgccaccacgcccggccaatttttttatgtattgcagggacagggtttcaccatgttgcccaggctggtctcaaactcctgggctcaagccatctgcctgcctcggcctcccaaagtcctgggactgtggtgtttgtttgtttgagacagggtcttgttctcgtcgcccaggctggagggcagtggcgcgatctcagctcactgcaacctccacctccagggctcaagcaattctcctgcctcagcctctcgagtagctgggactacaggtgtgagccaccacacccagctaatttttgcatttttagtagagatggggtttcaccatgttggctaggctggtcttgaactcctgacctcaagtgatttgcccgcctcgtcctcccaaag

SEQ ID NO: 206949 - DNA, 451 bp, Homo sapiens
cctatctatatgaagcacttaaatgcccaataagtacgaaggtcatgaaagtatcacaaattcatttaaaaaagttaagaaaacatagaagttatattcatgaagtattcataataacataaaaagtatttaatgttaactttaaaaagaagaatataaagctgtatacgaagcataactatttaaaaataaaaatgcatagaaatgactgaagaaaatgtgtcaaaacattaatagtggttgcctgtgggtggtagggtagtattatcgctggtttgtccgttgacacttttctgtatgttctaaattatataaaatggccatgtattattaatacactcttataatccaaagaatatagagcattaaaacagaattttaaagaattaacaaacatataatgttcaactgtgaacatatgtatctccccaaggtcgtctggggatcctct

SEQ ID NO: 206950 - DNA, 363 bp, Homo sapiens
ttgacggatggatggatggacagatggatggaaggatggatggatggatggacagagggacagacagatggatggatgaacagatgtttaaaaaccacgcagatgaagcatttagtaatgtttaaaattaagtgaatactaaagagtttcctgagttatcccctccttcagaatgagccacttttagaacattagagattcagagacagcctgtgcagacatcccgaattccggtgatcatgagtataaggagataacgctggaatgaagctgctcctcctaaaggccagctggccaaccccaaaccaggcaccccagatgagcagggcatccgacagccgccatgtgacgcacgtcttcttc

SEQ ID NO: 206951 - DNA, 164 bp, Homo sapiens
gttgcaggttattcttggtgggcacatacaggttcatggccacctttgctcctgagcatgtggctttccattgacggatagaccaccagttgtttgtcctctactcaaggatgtttagcttgttctcaatcttgctgctgtaaacagtgctgcagtgaacaccc

SEQ ID NO: 206952 - DNA, 531 bp, Homo sapiens
taatgagtggttgaaaggcaggaatgccatcttaacctcacagttttacacagtacctggcatagttgatatgtggacgtgtatgttatgtatggacttgcttagaaagaacttttaattcctgcatctcttatcaaacctaagttgacttgcatttttcttaatgtttgcaagttttgctcttgatgatgactttcattttaaggttacttagtccatttattggatcatttatataggtaaaaatgtgttaacttagacacagtctcatctctacccccaagaaatgacaagcagcaaaaccagctcaactttccagactaaatttttcattcttatatcctttgttaataaggcctctggttgattttttttttttaacagctctgttaaggtgcagtttacatgtaatagaatctgttcatttaaatagagtttgatgacttttggcaaatgcatgtagttctgtaactaccgtttcattcaagcagtgtaacgtttccattactgcacaaagttccctcttgctca

SEQ ID NO: 206953 - DNA, 569 bp, Homo sapiens
aagggcagtgaatcgagactcggtacccaccactcctatagatcagtattcctggtagttccgagacttaatggccacaaatgttgaaaaatgttagctctacgggaaaacgaatcgaagcgttttcaggggctcgagtagttatgagcttagtgtaggcccaagttttaagctatagaaacatctccctgtatgtgccaactcaaatccccgtccctgtaagaaacctggacaccagcatgattttaaacacttctacacctctccgtcctatttttccatgctccacgctcgaaggaaaaccgccacccaagaaacacacggagctagccaccccgaagcactggaagggcgcaatagtttttaggtcaccccgcaaaggccacaggtggcgccacccccctgcccccgcaccgccgccctccgccccgcgcccccagcttctctccagcagcgcacacttggagcagtccttcccgcggccatccgaccctgacccatcgtccccgggaccggctgctgggcgcgaggaacccaggccgcggggctacctcgcgcgcgcctcgtgc

SEQ ID NO: 206954 - DNA, 641 bp, Homo sapiens
gtatcaagtgctgaactacaggggcatcaaattcatgtaaatattgcctgtggatgatcatatttgcctgtgattcctttatgttaggctttttctcagcatgatgtttttgagatgtgtccatgttactgagtgaatgactcttttgtttcttttcatcactgagtagtgtttccttatgtgtccattcacctattggttgatattcaggttctttccagtgtggaacttttatgaataaaactgcagtgagcatttatgtacaagtctttatgtggaaatggtttatttctcttgggtaaacttttaggaatggaactactgtgtcatgtaagtgtatatttaaccccataagaaactgtcaggctgggcacagtgggtcacacctgtaaacccaatactttgagagggcaaggtaagaggattgcttgagctcaggagtttgagaccagcctgggaaacatagcaagaccccatctctaaaaaaaaaaaaaaaaaacttaaaaattagctggcatgggggcgttcacctgtagtacctgcctgaggcaggaagaccacttgagcccacgatatcgaggctgcagtgagctatgattgagccactgactgcctgggccacagaatgagaccctgttcaa

SEQ ID NO: 206955 - DNA, 504 bp, Homo sapiens
ctcatttatttttcccaccgaaatttggaatttaggaagagtcgatatagctatatttagatgatttatctccctgaagacattttgggatcatttatacatctctataaacaatgctctgatgttcctttattttgtttagagactgggtcttgccgtgttgtctggagcggagtggctcgatcgtagctcacaatacacaatacaatcaaactcctgtgctcaaagtgatccttccactcagcctccacagtagctaggtctgcaggtgtgtgccagcacgtctagcttttgattactattattatttttgtagaaatgagggtttcattatgctgtccaggctggtcttccaactcctggcctcaagcgatcctcctgccttctgccgtctgaggagctgagattacaggtgtaagccaccgtgctggtcctgatgtcatttaaatacaaacatgatactgtattccttgtagaaagtgctacataaatataatttttttg

SEQ ID NO: 206956 - DNA, 601 bp, Homo sapiens
gtgaagctacacatttttcacagtctagaggccctagacctgtcagcggccaattatttcaaaggccagacatgtgcaccttaaagagagactggaacttgcagacggcctctagaaagccataaagatatttactgtactattatgttctggtagtatacttggaagataactgccaaaaatcaccagaaaaatacttttcaatttatgagcagattattacaagagcaatttaccaagacctaccaatgaacaatgaaaactatgaactgttattctaaagctaatagaaagatgtggttttcatgtccatttccatcatctgcacaatgtaacctttaaaaatatttcttaaagtgttaagtttatgggagcaaaaaaatattgaaaaattatcagaaagttcacaaaaaccttacaaactcacatgtcatcagattaaatgttctcagagagcctgcagtttttcacactccctgcaacctcatggtcatcgctccacagcaagataaatgggtgacaagacaatcctcttctagtttggttggacaaatgtcaatatcagcataactttcaagtctttctatgtaaatctgcaaaa

SEQ ID NO: 206957 - DNA, 393 bp, Homo sapiens
ataaaaataattttaaatattaatatggtatatttaccctgataatggagaaataaaaccttaaaattacaaattattttaataattcaagatggatactgatatcaatacaataatacaatatatttgggtctagctttcaagactaatagccagtattatgcatgataacatttgagtttgtagtaattaagaaatatccctagtcatgtaaagttttctttaaaggtttaaatttgatattaatatgatataagcaacattaagagcttgaaatgatcaattctggtattaaactaaatattatcacatatatttttgtctggccttgtagtattatgatttcactcactgaataaagataaactataatattgatcatacctaaatatg

SEQ ID NO: 206958 - DNA, 201 bp, Homo sapiens
gctatttgttgaatgcatctatgactcctcaaagtactctgctaagggtaattaaaaggaataggatgttatgaattagatgaaaaataaaaatcaaacactattggaattaactgtttttttccttcaaagcaactgatgacattgatatgaaattggaaatatttaaccgtttgcaaattctttttatgctaatagagc

SEQ ID NO: 206959 - DNA, 325 bp, Homo sapiens
gctatttgttgaatgcatctatgactcctcaaagtactctgctaagggtaattaaaaggaataggatgttatgaattagatgaaaaataaaaatcaaacactatagggcaacctcctcttctggtttaggaacaatctgttccttttccgtaaggatcatctcaatgtggcagggagagctcatgtatgggttaatccgaccatgagctctgtaggtccggcggcgcatcttaggtgctttgttcacttggatatgctcaatgaccagagaatctacatctaaacccttaagttcagcattactctctgcgtttttaagcatgtg

SEQ ID NO: 206960 - DNA, 772 bp, Homo sapiens
ttaacctgtctctccccgctgctagcctatgggctatttgttgaatgcatctatgactcctcaaagtactctgctaagggtaattaaaaggaataggatgttatgaattagatgaaaaataaaaatcaaacactattggaattaactgtttttttccttcaaagcaactgatgacattgatatgaaattggaaatatttaaccgtttgcaaattctttttatgctaatagagccaacatttcaacagttattacttcactttttacttgtgtaatgagaaaatttagaattaaaaatgtacaaaattgaaaaaaaaaaaaaaggaataggaggctgagtatggtggctcatgcctgtgatcccagcacattgggaggcagaggcaggaggatcacttgaggccaagaattcgagaccagcctgggcaacatggcgaaactcagtctctacaaaaaacaagttttaaaaattagttggccgtagtggtgcatgctgtagtcccagctactcaggaggctgaggtgggagtgtcacttgagcctgggaggttgaggctgcagtgagctacggtcacgtcactgcactccagcctgggcaacagagtgagtccctttttcaaaaaataaaaaagagaaataggaaatagcatagaatggaggagctgagccacaggtgctgctggtgggcgcacagggcaaggtggacaagggacggggagggagacaaaggcagaagaggtcccttctcctcctcctctcctcagggagtaatg

SEQ ID NO: 206961 - DNA, 213 bp, Homo sapiens
ctatttccatctccacacacatagggcctatacagggcagtaaatatttgctgaatcaattcacttctggggcctgatgttgcacagcagacaacatattgggtttttagtcagcttctagactttacttttagtattgctaagttttgcacgttgggttttacagttggtttttaattgttgacccatatacttatccttgttagtttttat

SEQ ID NO: 206962 - DNA, 178 bp, Homo sapiens
gatactgatgaataatggtctagctaagtatccaatttgcattgttgccatctactaatttcagaatcattgctcattttcttccttgcagaacttttgaccctaatagcatgcctgttgaaattatttttattgtatttgccttcagaagtggtttgaattattacccaatgaatat

SEQ ID NO: 206963 - DNA, 268 bp, Homo sapiens
tgccttttattcgaccttgtttcacccatgtatctatggatctttcctctcagtcttcatcggggggcctcttacctgtatgcagacctatagctcaggcctccagcagctttgtgaaataaaatttgtcatgtgactgatcttctatagtcagagagaacagagaatatatgctagagctctttctcacatgtaactgaaagcctcactttaggcatgactggatctagggatgtaaatgtggcaaggcccttgatttcactccctg

SEQ ID NO: 206964 - DNA, 581 bp, Homo sapiens
ggcaccatagaagaaacaagtgatttcagtcaaagggcctggactcacgagctagcaactttggacagattcttgaactctcagcctcagtttctgcttctgtaaagggagataactacagtgaccttcaggttatcttgaagatgccaatgagctagtgaaaatgcaatttaatctgtacagaactaaacaaatgtaagtcagtgctaatattctgttcctagtggggacatgccaagtctctttactgcaaccagtggttcacatatggaaatattgtgctaatttccaactcctacttatatatatgatttgttaactctggaggatgcagccatcagcataagcaaccaacagaagaacacgctggatcctctccttttcctgacagtgtgtagtcttcatgggggtggacaggctagatttaaaacgatgggcggattgattatttttctgcatctatttccagggttgtaatgtatattctctttctcccacatcccgccttctattttcttctccctacacaggctcttttaatacaaattaattaaaagcaggcatcttaagaggtggcttaa

SEQ ID NO: 206965 - DNA, 420 bp, Homo sapiens
cttgtcatatccaactaaatcaattgaggggccaggaggaaaaagcacttagggcatataatgttgctccatgaatgtaattctctgcaagcccgctgctgaaactgcctgtggtaacctgaaaccagtattatctaatagctgccgaaacaatctgttgtgactctaagactaactacccactgctgtcaccaatcacagcttgccagctcctcaaaactttactagtgccaaccttctctttgttctttgtacatactgaagatcacccaatctgtcccaaaatgcaattcttgttttccaaataaaacatttttaatttagagattcatctctatattttctttgacttcaacagaacgacccaccgagacactcagctaagagcatcgagggggcgccgagagaacgacccaccga

SEQ ID NO: 206966 - DNA, 367 bp, Homo sapiens
ctttctgagattgctctctaatttctctagaatccccatattcccacagctttgatcaaaagacagtggggataaaagacttccctaaaagtttctctttactggttcttccgcattaaatctgatgctctatttgtgggtttaactcggtatctattaaagactgtgaaatgctggtttattttgttagtttttcataagctttcccactcctgatgcagggataatttgagtgagtagtgttcagtcaataagcaaagaatatgttaggggcttggctgttttcctagcaagggtttacatcaaagaaaaagcatggctaaatagggtttcttttttttgtttgagacggagtctcactctgttg

SEQ ID NO: 206967 - DNA, 176 bp, Homo sapiens
cccaccttattaatattgaagtgccttagggcttagttcttgccctttatgttgtatcttacttcctcacttggtgatcaggtcctatctcatggttctaaataacatcattacagaagtgactctcacaaggaagaggtaggaaatggtcatttttagttaaatattgaaaatgg

SEQ ID NO: 206968 - DNA, 386 bp, Homo sapiens
gcacgtgagaggcacagagtgggccctgctcctaaagtcacagcacagcccaaacaattacctctcagcccccagcctcacaggggctgcacaggacacgtgagaagagaggtcgcttgcacctccgttctgactccgtggtcctcccactactgtggaggaggaggctgaggatgcctgcttgctgcaaggaaggaaaaccatggccctgaccgttggcagctgacagctagaccagagtattctcacctatgcacgagcgtttacagaatatcagcaataatcagaccagctcactctgtgatcatggtggaaggagatggagacaagggcacgcggtgattctatctggacagagaggcaaggacgctctgcaaccacaaaaa

SEQ ID NO: 206969 - DNA, 465 bp, Homo sapiens
cttggccttccaaagtgctgggattacaggtgtaaacaactgtgcccagcctatcccttcttaagaagatcccttaagaagatcttttctcaaattgattaaggctcagtattagtaagtaaaaaagtcatcagctgagatcttgaactctaggacttaactgcggttactgaacctttatttctccaaaagctctcctttctgaattacgagtaatctgaaagaaaaagtacagagaaatatatttgctattttaatatataaacagagctctgttttatatttaaattgttgatttgatgaattagtagggaagttaaatcagtgataaactgggacagaagaaagccaagtattcaatgcctgaaactctaaagtttttggactggattgtcttttattcatgtaagtactccatctgttaatgcattttctctccaaaataaagctatgcttgaaacatca

SEQ ID NO: 206970 - DNA, 526 bp, Homo sapiens
actcagtaattgtgtgtgaagtaagtgaaagagcataatgaaaatcctgtagactttggtgtttcatatcctggacagagagaagatgaagtaagagagaaaaatgagcataattttggcatttattaataccaggctgtttcaatgatctcttatgtaatctttcatcatcattccactgtgggttttattttgatgcacaagttatggaagatgaaataaaatttcagagaagtgaagtctattttaaccaaggtcagctgggaaaaggtagagaaagaattcaaatataactaccctttaattttttgtcaatatgctactgactcgtgagtcagaggtaagatgataaaaagagtgtaagcaacgttaatgtgtgtcttttccctcacaaagatgatttcttcttgaagttggcttaaaggtcactatggatgttgagactaagtcaaggcagtacttgataatgaaactatattgtctgcaggcctgcaaacaagcttagtttgaggagaattattgaatg

SEQ ID NO: 206971 - DNA, 446 bp, Homo sapiens
acactaccttattcccactctcatatggaattctacctaactggaatgacctctttccatctgtctgcccatgtcttataaaaccaccttaaaaaaattagtaaaagcccacaaggttagaattgtgataaggacttaaggtttgctaaggtatgggcatagttaaatcataaccagttattgtttcataacttgctttgctttgctttgcttttctataattgcttacagcttaggagtcacatagctcatggtcacagatttgtaacttctcccattgcttcatagaaaacatcagtatcataaaacctaagactggtgtttgaggtatttttcagactttgcattctgatgagccaacgatgccacccagatctgtgacccacaccaaggaactgactcaccagctctgtaagccccacccagaaactgactcaggcacaaag

SEQ ID NO: 206972 - DNA, 281 bp, Homo sapiens
tgctttctaaaacaaacttctatcttctatgcaaatggaaattaatagacatttataaacatgagaataatctaatcacacttaggaagattatctgatggcagaataaacagactggcggatgcaaagacttgggttaaggagtgatcagatgaaactactaggcattgctggaggagaaagacaagagtctaagctagataataatggagagggtgagttcttgagtcgttgtcttcttcacggaaaacccaaatttcatctattgattagacttcacg

SEQ ID NO: 206973 - DNA, 234 bp, Homo sapiens
ctatcacattatctatgtgccattaagactgcctgggaaaagaagctagcatcacttaggaaatctgagggaaagtaagacagtttgcaaatgatccctctgtcaaagagatttgacacataaaaaaatcaaacaacatacttatagttctaggggggtggggaacttccttaaaattgaatagtgtgtctgccaggataaaaataatattgtctgtgtttgcatatgtgtatg

SEQ ID NO: 206974 - DNA, 742 bp, Homo sapiens
ggcctctaaattgttaccaaaacaaagatccctaatttcataagcagcttcagtgagcacatagaattaacagccatatttcttacgctgttttttccacaatacctaccttgtatccagggattaaattcatgtaattctgaaggaaaggatttggctcttagcctgcttgtcagagtgagcatgacttagttgtgcacctgtggctatctctacctggtttcttctcttgtaccgtgagcacaagtagccactgaaatctcccgagttccagaggcccgtcccccctcagctgtatctccccatagtgcacacattcagcccacattcccccgtgttcaaggccagggcagatcatgcacatcttgcgctgccggtcagagaacagaattcctcatatttctgaaagtccaaggaacagtgcagcagtaaaaataacttaaaagtgggctgtagtgctcttgttttcacagtaccattaaccagacacatttgatagaaaatttaaaaacttcatttaatttgtctctgatcaatgttgtgttcatggagttacctactaaagaaatggaaacccaaaggctctcagtggatgagttgaaccttttttttttttttttgcattactgagagaagtcgtggaagcccaaaactagtttcatgagttaagctaaacctatgttttggggtttcttggtttcacacctgtctctgggtgtatctgctattttgtgtgcatgtg

SEQ ID NO: 206975 - DNA, 381 bp, Homo sapiens
tggggtgatctacagaccttaactgagtggtagggaactaccagtacattgaacacatccatgggatcacagcaaggaggccaaatgagataggatagggattcaaaggagaaaaacagaaccacagaagtacacagctctcagatgaaagccacttaatcagcctcatcccattttccaaaattcagacaaatgcagagaaacactgggcttatttagcagtatctatactctaacacacacatacatgcacctgtgtgttaatctaattagacagcttttctagttctaaaggtgaaatgcacgaagagcaagttcttaggttattttctctttaagcaagggggactcttacatccaacgcatgcaacagctatttag

SEQ ID NO: 206976 - DNA, 356 bp, Homo sapiens
gacctgaaaggatcaaactatctccatataactatattcccgaatgagctgaagaaaatgtacaggaatacaaaaatatcttggacccaacaaggtaaatttcacaaagcctagcattcaataaaaaattaccaggcactggacaggcctgatggctcacacctgtaatcccagcactttgggaagctgaggcaggatgattgcttgagcccagaagttcaagaccagcctgggcaacacagtgagaacctctctcaaaaaaagaaaggaaaagaaaaaaaaattaccaggcgtgcaaaagagtaggaaaatacaatccataatgaggaaaatgaatcaactaatggcagtcaacc

SEQ ID NO: 206977 - DNA, 314 bp, Homo sapiens
aatgttgctttctggcctgcccccagcccccatcttttacctataaaaaccccaggctctgttggcagaggggtggcacagtggcagagtggagcagcagagaaggagaaaagagaagcagcagccaggtgtcggagagaagcagtttgacttcagagggatggcttgacagcgagacttcagagaagagttccgccagggacagctgaactctgggagaagactgcctttccactccatccctgttccagctccccatcctgctgagagccacttccactgctcagtaaaatcctccatattcaccacccttc

SEQ ID NO: 206978 - DNA, 246 bp, Homo sapiens
caatatttttttctcgcagtatttggtggtagttatgtaaatggccttgtaaccccttataccatccggcgatctagataccaaccaggaaaacgtaagccctatgaaacagatgatgatcaaaataccttttcaggtatttgtaattggcaaagctcatctggtattcacagtggaacctcctacctcactccaaaaacttaaaccttcaaaagctagtgaaaccagaagtgtgagcagcgttgg

SEQ ID NO: 206979 - DNA, 589 bp, Homo sapiens
tagatgcacaccgcaatgcccagctaatgtttaaatgttttgtagagatggacatcttgctgtgttgcccagggtggtcttgacctcctgggctcaagtaatcctgccacctcggcctcccaagatgaattactggagtggaatttctggataggaggaacgtgtttttcccttggacagatgcaacccacgtgtccccacagaatcacacctgtctacaacaaccagccacattcccagaccttcactttcatgcacacactgacataggaccttatccagccttgggttctggatccagcactctggcaggtgaagtggctcctcgttgtagttatcatggggtttagtgccaggagggaccccagaattgcctagtgccacacctttgcaatgtccagcggagctgaggcgcacctgagatcgcccgtgaggattggcacaggtctggatgtgggcttgggtcaccaggctgcagtagaacagcaggcttattctcctgacctgtcctccccctgccatgtttcacctggtccctgtgttcccacacacctgccagtaccacttgcatcactgtttcctgcagatt

SEQ ID NO: 206980 - DNA, 268 bp, Homo sapiens
gtcacaaagaaggaagtcatgcctttgtggaactattcagcagtaaacagcaaaatgcatgtgcatgtgagagatgagggatgagttccttaagccatgggctggtgaatatgtaagcaaatttaaataacttgccgacaagctcctttctccaaaaatgtatttccctggcagcaattgttgggtccctctcttcttttcaatagccagatctagaataggtttcctttagtaacttgtttccctatttggttatatatatatatat

SEQ ID NO: 206981 - DNA, 199 bp, Homo sapiens
aagtgacctcacccttgtgtgcacacgctcccgggtctctgctccctacactgactccggcaccaaagtgatcctccctcatctcttcccgcagctcacacccctttgtctttccctaaccctcctctccccacaacccaaaccgggtcacacattggcggcaggtgggctgggattcgaccatagatgggttttgttt

SEQ ID NO: 206982 - DNA, 241 bp, Homo sapiens
ccccgagactgctgagcaagaacggaaacagacattttccattaagctaggtccagtgggatctgctaatctatcagagcctcattccccacggcggcctctctcttatcttcccaggctctggctctgagacactccctctccaaaaagcaatcactagcttccaggactaaaagccaaggaggaaataagaacccaagaacagacgccccctaagcaccacaccccggggctccaaacc

SEQ ID NO: 206983 - DNA, 833 bp, Homo sapiens
gcccactcccgaggggacggtctcccgcccgccctcacacacagctagctcttcaggccaggcccccagggtttcgtccacctctcacctttgacgacgcgaatgaagaatgaggaggtgctgcgatcgaacgactgcgaggaaacacacccgctctcatggcattcccagtaaactgagaagacgtgattaaacctcaggatctcctactaatagagaaatgtataacgatttagctaccagatctgaatactgaagggttggtaggggaccagagaatagaggaagcattgtaggttctagagtggagaagggaccatccaaaatggagtttgaaagagaattctggcctttgtgtttagagtctggaattgtcaagagtctgaaagcacagaataagactgcagctagagcaatttaggcgccatagtttgtcaaaacaggtaaggggaataaaggggatgacaccaagagatgtgcaaagaatctgaagaattcacctgaaaaggatacaacctcctcctggaaggcagaggagtaaatagggaattggaaattaattccttatttctgcacatgcacagaatctgggcccaggtgacttatggaacctttatagagaccacggtgactgacactcatgggaaagggggttagaggggcaagaactgactgttcatcaaaaattattagatgagtgtgtccacgacaccaggagatatgttgaatcatggacagggaccagcatatccactaagctctatatatcttgatggtgcaggatccaagtgggatggaacaaccaattcctgcccatcctcctgctcaataat

SEQ ID NO: 206984 - DNA, 410 bp, Homo sapiens
gcccatagaaacagactcagaaataaagatatgatggaattagcagataaatacatttaagcagctattacaaataagttcagagatttaaaggcaaccgtgcacataatgaggagagaaattaaatgtataaaaaagtctaaatattgtaatatgtgctgttttctttcagtgaatggaagagtttaacgaagaaggaacattggaatcaagagttgagaacataagccaggcgggctcacgcctgtcatcccagcactttgggaggccaaggcaggagaactgcttgtacccaggaggtggaggttgtagtgagctgagattgcgccactgcactccagcctgggtgacagagtgagactccatctcaaaaaaaaaagaaaaaaagttgagaacattatcacagcatg

SEQ ID NO: 206985 - DNA, 151 bp, Homo sapiens
gcacatttcagcttgttctgaagaatcccaggctctgggacctgaacatatggtctaagttatttagccagataagacatgggatttcctacaagtagggttttgtcagcaggttggtaaacagtttttcctcagcttggacactccatat

SEQ ID NO: 206986 - DNA, 337 bp, Homo sapiens
cttttaatcttatttaaacttctttttttttttgccttgacaaatttaaacttatttttcttaacttttatgggtacatagtgtgtagatatatttctgccatatatagcatattttgataccagcataaaatatgtaataatcacgtcagggtaaatgagggattcttcaccttcaacatttattccttgaattacaagcaatccaaatctacacttttagtcactttgaaatataaaactaaattgttatctttattatagcgtcatttttgtggtcataataaaaatcatataggaatgtaaataaaatctatacatatctggaaaaaaaaaaa

SEQ ID NO: 206987 - DNA, 1029 bp, Homo sapiens
ttcaaaaattctacagggcaggatttatggtaacagatctttgtaccagttctcactggatcttcagattgaaggtgactgcatctcagtaataaagtggcaaaacttaagaaatcatgggaagaagctggtacctccttcaggccaaaataaaacgatgaagcccaaggagggaagtgctggaatcatggctaaaaatatcagatggcaagtgtctatactctggtgcaaacagcattagagaaagcccaccattaagactccagaactcagtgaaacttgggagcacaaaccatgatcagcatgtttagactggtcactagaagaagggataacatccaaatgccaattcaatcatccctccagatcccgggatgaagggcacttttgcatgcagaaagaagcaaagcacaattccactgggtggtcaggcccagaggccaagatggctgcaaaatttgggcaggtttcccttctctcagttgccatcctatagagaggttaatgagccttctagttcttctcctgagtcagtcctgttttagggatgtgccctcaggatacctctcatgaagtcccttggtgtctgtacctctgaattaatgcccagataatattttctcgctgggaaggatctatcattgaaatccagggtaacattcaactggagagtccgatagctgatatttaaacccaagttggtctgattccagacctcttaataacctggctgagtgagggggacatatcaacaaataggaatacttcagtactagttgcaaatcagccataacataattatctgtgtgttttgggaagtcattttaacctctctgtgcctaaatttcctccattgtaaaggctggggatcaagtcaaataatttctaatggttcccttggctctaacgtttaattattttagcttacctggctctactcacgcaactatttctgtatttgtgcagcaatctatgtgtaatatctatttacagtcaaaatttattttataagtgatttcacattacaat

SEQ ID NO: 206988 - DNA, 394 bp, Homo sapiens
ttcaaaaattctacagggcaggatttatggtaacagatctttgtaccagttctcactggatcttcagattgaaggtgactgcatctcagtaataaagtggcaaaacttaaggtaggttccacatggaaagacaatacctgtaaaagctaagccatttaattcatcccctaaccaccacaacaaacgtttaggactagtgatgaccactaagcactgttactaacgtaacctcatccttcccttgtattcagatatgctttcttgagagggagagtgaataggtgggtattatagccaacaggtaagacacaggcatgggcaatcaaagccattacaatttaacctgtttattgggacagaaaaaaatgagaagtgtttttctagatgcactttt

SEQ ID NO: 206989 - DNA, 304 bp, Homo sapiens
agttaaaaagaccttgtcaaggttggagagaaacaaagaggagtctgaggaagaggccataaaggatctcattcaatttaaatcacattatgcgtgactaccaccaaagagacctcataaaccagggagaatgatgggtgtggccttcagactgggaaagcaggtggagtctggtttggaattaaccaagaggtctagctttctatcagatcctgaaagctcagagcccaagagatgctttatggcttatttatttcctctccttattccagggaaatgctttaagcttcatacctagcagatc

SEQ ID NO: 206990 - DNA, 485 bp, Homo sapiens
cttccagccctgtctctgtctagcactgtgcccataatagctagtaagtgttttctaaatacataagtgaaaacaagtatttaaatggatgaatcaaattattaaggaagaatggaatcaatggacagatgaatttactgtggcggacagcttgaatcaagccaaacctagaccagtagttaaaaaacaaatcatcagctaggcgtggtggctcacgcctgtaatcccagcattttgggaggccgaggcaggcagatcacgaggtcaagagatagagaccatcctggccaacatggtgaaacttggtttctactaaaaatacaaaaattaactgggtgtggtggcatgctaggacctgtagacccagctactcgagaggctggggcaggagaatcgcttgattccggaaggcagaggttgcagtgagccgagatcgcgccactgcactccagcctggcgacagagcaagactctgtctcaaaaaa

SEQ ID NO: 206991 - DNA, 147 bp, Homo sapiens
tcagtgcgtgtgcatgcatgtgtatgtgggttcagctctatgcctgtctgtgtgcatgcatgtcccacatcgtgtgtgtgtcagtgtgtgtgcatgcatgttcagctctatgcctgtgtgcatgcaagtcccacatcgtgtgtgtgt

SEQ ID NO: 206992 - DNA, 305 bp, Homo sapiens
tggacaaaggtacaagttgctcccatggaggatgtccctgcagaaaatctgcaatccacaagagaaggcagcaaagtcctcatggaacttccctgtttagattgataagccaagaccacaattaaaccaagacaaacaaacgcacaaagtttatctctgaatttctgtgtaatgcccagcctggctcttgatgactcagcgatgctctatcctgatttaaactttcccctgtcgtcggggttcccaggctgctgtctgtggccacacagtcctctacattcgaacgctttgcctttcgtcccccg

SEQ ID NO: 206993 - DNA, 518 bp, Homo sapiens
ggcagaaggcaccagaagtgaagcttgcattcacagctcttgccaggaatcatggccacaggttcagcagcttccagagggtttatttctgagcaattatagcaagttaaaccttaaacagagaaggttcgtgtacttacactgcaagagctgatctcctaaaggaactgaacagagaagcacacacacagtggggtattcctttgtcagatttaagtcttcaacaaattggagaatagccaaaaggaatgtacacattttttgaaggagaggatgtggatagcctggaaggtataaatgaagctttgagaatggtggcactctccggccattcagtttttcatagaacacctctagagaaagaaacacaaactacttcaaattatcctcatacgataatctaaccgagctacactgagtagttgaattggccagaatgcatcaacttgactgccagtttaagatcccaaaactgaattccaacatctcttaggaggaaaataaactattcaaccaaa

SEQ ID NO: 206994 - DNA, 578 bp, Homo sapiens
atatatttttgtatctagtatgaggtagagatctaaattcgttcttaagcatgtggatattcgcctgtctctgcactatttattgcgaagagtatccttttctcattaaatggtcttgacacccttgttgaaaatcagttggccatagatacatgggtttatttctgtgctctcagttctattccattgatctgtatattatacttttgctagtaccacactgttttggttactgtaattttgtagtaagttttgaaatcagaaagcatagagttcttcggttttttcttctttttcaagattcctttagctacagagtttcctgcaattgaatgtgaatttgaggattttcctttccatttctgcaaaaacagccaattaggttttgataaaaattgcattgaatctgtagatcaatttgggtagaagttgccattttaaaaatatttagccttccgggccaggtggggtggctcacgcctgtaatcccagcactctgggaggctgaggtgggcagatacctgaggtcaggagttcgagaccagcctggccaacatgatgaaaccccgtctctacta

SEQ ID NO: 206995 - DNA, 538 bp, Homo sapiens
cccttctacccagcctacgagggcagttttctctggaggagaagagcctgtcgctgaaaatcatgcagtacctttgcccagcttgctcagagtctgagcaagctgggaacccacacgtgaccctgttctactcatcacagtccaggcagccctgcaggatctggccctatcacctctgtgacatctcctctcccactccccccagcccacttcactgcagacacactggcatcctcactcttctccatccacaccaggcacattcctccctcagggcctttgtactgatcatttgtcccacagatgtccatctcaccccaccttgaagtttttcttcaggtatccccttctcagtgaggccttttcggacctccttattaaatatcacaaacaattccacccccacccccttccctgatcctctatggcacttactacctgacgcctacccctcacaatcatggcaagccaacgccacttatccagtgaaccactagcacgaaaaaaactctacctctctagtacttatctccctaga

SEQ ID NO: 206996 - DNA, 710 bp, Homo sapiens
taacttcctcctcctgggttcaagcgattctcctgcctcagcaatcccgagtagctgggattacaggcatgtgccaccatgcccagctaattttttatttttagtagagacagggtttctccatgttggtcaggctggtctcgaactcccaacctcaggtgatccgcccaccttggcctcccaaagtgctgggattacaggcatgagccatcacgcccagtggagatccccatctcttaaaaaaatctgaagcagatcacatcatccttccctgctgggaacccacacgtgaccctgttctactcatcacagtccaggcagccctgcaggatctggccctatcacctctgtgacatctcctctcccactccccccagcccacttcactgcagacacactggcatcctcactcttctccatccacaccaggcacattcctccctcagggcctttgtactgatcatttgtcccacagatgtccatctcaccccaccttgaagtttttcttcaggtatccccttctcagtgaggccttttcggacctccttattaaatatcacaaacaattccacccccacccccttccctgatcctctatggcacttactacctgacgcctacccctcacaatcatggcaagccaacgccacttatccagtgaaccactagcacgaaaaaaactctacctctctagtacttatctccctaga

SEQ ID NO: 206997 - DNA, 219 bp, Homo sapiens
aattagtggattttttttctcctagccaagttatttagcctcttcctatatgaaatactccttcttttcatctgtttttgtttttaaatgagatgacaattcatgactagtcttggtccccttaacacttagtgagtgctcaacaaatggtaggaattattatggataacaataattagtgtaagttcaatatgtaaataaaactgccttttgttcact

SEQ ID NO: 206998 - DNA, 413 bp, Homo sapiens
aagtggaatccatgtttgttctgtttgttaaaaactgtcaagttgattgaatgttttgttagtgcttttccttttcttgacaatttgtcaagaatgtcatttgtaaactttcttcccattataacctattgatatctcctcacagtccataaatggccaatctttaatacatgctgcatgggcatgggaaaaggcgcatgtctgagacatgaaatggttgcagtgaacaagtcagttaagtcacttttactaagtatgcctttctcagccctcatgcttttatttatgcttggcccatttgtgttgaagattgggagtggttcgttaaagtttccaaatattaccaggtttccagctgaactctacccattttagggtggtccctgttgcatgagcattgctagttaatggct

SEQ ID NO: 206999 - DNA, 235 bp, Homo sapiens
cgtggaaaacagggaattcgtgggcaacaataaggtgtgtgcacagcccctcaagaagatgtgccagtccttatctaagccacaggagcctgtctcctgtgaatgccatcatctggggctgccttgttggccagtgtcctccggatttggtcattgggaagcaacaacaggggggttggatttggtcactgggaagcaacaacaaggaaaggcgtcggggtttctcttcccagga

SEQ ID NO: 207000 - DNA, 386 bp, Homo sapiens
gcttaagaacagtgtgaaaagtttgaagcaagcaaggataaatgaaatgataaccaatcaactccacttcttaagattaagtaaatgagagaaagcacaatcaatcaacaattgtgggcatgctttgtttggatgtggaagtggaacatgaagtggaaggcaagctgcatttcatggaattagattaagtatgaatttaaaaaggtaagtattaagaattatcaagaaaaatcactaaatgcacacccatatagcatgcaattatatatgggctaatactaatacagtcaatgtagcactaccatgagtctgaacctgtcactattacttagtagcaatggcagaagctagaaggttcacacaatgaaggcaggcaacagaacctg

SEQ ID NO: 207001 - DNA, 337 bp, Homo sapiens
agagaagctggctgacatccccaggatgaatcatcctttccatctgatcggtacaatttgcttgatgtcatcaatacagtgagccagtgtgatattctgcggaattgaagatgactacagtccctttggactacactatgacaaagaacaagagtgttagcacagccctggggtaagacaacaaatgtgtccccaccatatgaagatgaactgactttgatcctccctactgatggggaagaaggcatttgcttgatcaatagcctcttacaaatgccagaggctatttgacctgctctagtaaaattaccacatctggcacagaagctgcaatcag

SEQ ID NO: 207002 - DNA, 291 bp, Homo sapiens
tagagggaggtccggtggggaaagtcagtcaaattagttgtgactgaactagcttgtcaattcagtgagacagatcaaaccatagccccatgtagacaccaccagggtttgcactaccagtcagtaggtcactgagtcctgcccctgtgaaatcccccagccacttagagcagtaaagattgattaaacatgtttatatgcaatttgaaaatggttctttcaggaaacgtgtggttctttaaagtcactttaacatgagagattttactttagtttatttatatgctagcc

SEQ ID NO: 207003 - DNA, 356 bp, Homo sapiens
ttagtggaaagaggttggattttcaggtcactcagcctcaaatctctgatccatcatttcctggctgtttggatagctagtcaattaacttcttcaggcctattccataaatgtgatatgaaaacaaggtaatgcaacctacttccaatagtggctgcaaagattaaaaaaagacaatggatgtggaaagcctaacccagtggctggcacgtaataaatcaaagcagtttctagaaaaggagagaactttaaaagtgtgggaagagagtagttggcaattaatgatttagctagcatatcaaggacagcaacaagctgaaggtcattcttagatttttacccttcgtaactatgaa

SEQ ID NO: 207004 - DNA, 323 bp, Homo sapiens
gctaggggcaaggggagaaggtgggacagatctgattaacagctgggaggtaggatagacagctcttggtaactgattagataggagtacagagagggaagagctgaagaggactcccaggctgctggcacagataaccaaacaggagaagtacccttcactgacagaagtacccttcactcagtctagagactgagactggttttggagactgggggaaaaaaggataattcagttctgaatatagggaatttgaggaagatgtgagacatttggagagaaattaagaaggaagttacatgtaaaggacttgggactcatga

SEQ ID NO: 207005 - DNA, 423 bp, Homo sapiens
tattaaatatatgaatgcatgaagttcttactgagcatgcagatacagttatttaagtgttatgtgtatcagctgggtgaggtatatttttgagacgtaaccctttacatttgaaagtctggtatttaatttggctaaacttcccaaaccatagggaaatactcattgatccattaacttattcagcaaatatttattgagtgcttattataaggcaatcattttataaatgcattttattttagggatctttctcttgccacaaataaaataacaggaaggattgagttttgccgtgttagagtgattcttgggttggatcaagacattggtgagggataaccagacaattacctggacttcccaaaatcatccttcagtctttttactttcctgtcactgactccctattaaccataaaga

SEQ ID NO: 207006 - DNA, 292 bp, Homo sapiens
gagaacagcttaagggcaacatgtccacctgcacatatagcactttttaaaacatgaagaaaagcaaataagaaacaacgcaattagttcaagaatgcttcagtcattaggtgtgatcatgaaggggtgagatttttaatggcaaaaggaatggggctgcttatgggatttatgatgtggggtgttaaaatgtatggatgctgggtctcttggttttgagagaattgtttaagctagctgatcctataaacctaaagaccagggtcagggtcctaaagttaatgcttaagac

SEQ ID NO: 207007 - DNA, 311 bp, Homo sapiens
ccaacgctgctcacaagttaatattatgtaaaagagaaaaacaacagatgaaaatgaggtaatcaaaaactgggttcttttaaaagattaacaaaattgatgaaacgagctacacaaatcaagaaaaaaggagaatactcaatttactaaaataaaaatgaaagagttgccattactaccaatattacaaaaacaagagaaatgtaaggaaatactgtctacggattatatgacaacaaaatagatgacatgtgaaatggatcagttcatagaagaacacaaactactgaaactaactcaagaaaaaaatg

SEQ ID NO: 207008 - DNA, 612 bp, Homo sapiens
  misc_feature (147)..(147): n is a, c, g, or t
  misc_feature (503)..(503): n is a, c, g, or t
  misc_feature (524)..(524): n is a, c, g, or t
  misc_feature (571)..(571): n is a, c, g, or t
tgagcctgccccaaactacagctcccgaagtgctcggcgttcggagcgggcttccgttcccagcgtgcccagtgagccgggcgccggaagaaccgttgtctgccacgcgcagccccttgtgcgggatcaagcccgtgtgggcgaggnggggtcgggccgggcagggcttgggctgggcctccctgagggggtgctcgcgaggatttccttcgttccacaccctcactctacgccctgccctgggcattgtcgtctactagtctattctgatgactcccacatatctatctgttcagctcagctccctctttctttttctttttctttctctttctttctttctttctttctttctttctttctttctttctttctttctttctttctttctttctttctttctttctttctttctttctttctctttctttctctttccttccttccttcttccttctttctttctctttctctatctctttctttctttctttctttctctnctctctcttttttttgagacngagtctcgactctcgccaggccggagggcaatggtgccgctcggttnactgaagctccgctccggttcgccggtctcctgcttcctcc

SEQ ID NO: 207009 - DNA, 185 bp, Homo sapiens
attcaaatttgtttcctccatgagctcctctcgtgctgcacctgcttagcaacggtgaagccagtgagctcattcaaatatttactgaccttgccgggcgcgatggctcatgcctgtaatcccagcattttgggagtccaaggcaggcagatcacaaagtcaggagttcgagacctctactcgac

SEQ ID NO: 207010 - DNA, 232 bp, Homo sapiens
caaagctgccaacaggacgccccccaagtccccgggggacccctcgaaggaccgggcagccaagaggctgtcgctggaatcggagggtgccggtgagggggcagccgcatcccctgagctcagtgccctggaggaggccttccggcgctttgccgtgcacggggacgccagggccaccgggagggagatgcacggcaagaactggtcgaagctgtgcaaggactgccaggtg

SEQ ID NO: 207011 - DNA, 366 bp, Homo sapiens
aatattcgctgatcagcttaaggaaggccattaaggtgacaatggtccgagcctcagttaagccaagtgaccacaaagcccacagctctgcacctttatgtgggcacttcaaggctctcatgttggtccagagaacaaaaaatgcaacagttaaagctaccttgagccagagaagaaaacaggcagctctacccttctaagtccagtaagactgaaggatcaaaggccttttactctcaccaacatgctaagtaaattcaaacaacaggactgaagaggacctagagaaaggtcctacctgctcctcttcacccacagaacacgtttcaaacatttcaaaccacgagtttttatttacacttaagc

SEQ ID NO: 207012 - DNA, 1014 bp, Homo sapiens
ggcgggggcgggatgagaaaggtgctggagctgttggagggacgccaggaggtggcaactaccaggggtgtgaggggctgacctgggatggaatcctgccacccggactcaggaagaaaatcctgaggtggcgacctgcagactgggctgggagatggagagcccgctcacgcccacccgaccgcctaccaccagtgttcccggatgcatgggctccagcgcctgccctttcgccatttcctcccaactggcattaaatcctggtgtggtagatatcagtgattaagagtctaggcagccacgtgttctattgccgccagtccgcaggaaacgcaagtgatcgttttgctgcgttaactctatgggcgcccaaatcttaggaatccattccacgccaccccgaaaacagcgcttgacccttctggactgccacgcaggaggcgatcaatgtttttctttctttatttttttaagagacaaggtctcgccctgtcacctaggctggagcacaatgaggctcactacagcctggaactcccggacgcaagtgatcctcctcagcctccggagtagctgagacctcaggcgtgcgccaccatgcctggcatcaatcaatgtctttcaaaataaaggctgttaaacgtagtataggaaagaagctttttaatggtaggttctaccagacgtgtttgtttgatttttaggtttggttaatgcattgtttcccgtacaatctcaacccgcggaaaccccgaaactctagaattcgtgccggtctctttcgcttccaggtcatccccggggcaacggccgccgctctaattcttgtcagaacctccaggccagtttcagcaacgtgcaggcagaagctggcccctcggtgggatgcgagggcgtgtggagcgcggggaggagagccccacaggcctttcctgggcacccgcggtggatgggaaggctccttcgggcgcctttcagggaagttgtttggctgagggaaggtggtccgtcacg

SEQ ID NO: 207013 - DNA, 285 bp, Homo sapiens
cattgtatttaagaaattgggaaagcagaaaatgcttctgtttttcttttgagttgaacaatgagaacacatggacacagggaggggaacatcacataccggggcttgtcaggggggtgggaggctaggggagtgatagcattaggagaaatacctaatgtagatgatgggttgacgggtgcagtaaaccaccatggcatgtgtatacctatgtaacaaacctccacgttctgtacatgtatctcagaacttaaaatgtaataataacaataataaaaacctcaa

SEQ ID NO: 207014 - DNA, 389 bp, Homo sapiens
cagcactttgtgaggccaagggaggaagatcacctgaggaattcaaggctgcagtaagctatgatcgcaccactgcactccagcctgggcgacaaagcaagaccctgtctctaaaaaaagataagaatgaaaataattttttatgaaattttcaggaactagtaaggttaaaggccagattctggttctttagtattaccattaagatgcaaacacaatctctctttaccacctctaattgtaatactaataaattcacaattatcatgattcctataatcaggctgttgttgttgagagccaagttaattaattaccataatatcaaaaaccagttcatcatgaaactatatatatatttatacacacacactttttttttttgagtc

SEQ ID NO: 207015 - DNA, 271 bp, Homo sapiens
actaaggacccaataggtggttctgctcttctgggctgcattcaggtaatacagactggcctttctcatgcatctgtgttcagctgctgggatggctgagggctggctggtttaggttggcctcactcacatgtctggaggttggctggctgtcgtcctccagcaggctaacatatgtggtggtggcaggaccctaagagacagaatggaagcatgccaggcctctctaggcttaggcccagaatgagcacattgtgacttgcactacatt

SEQ ID NO: 207016 - DNA, 509 bp, Homo sapiens
ctgatccccaaggtcctccccaacacaaagccactctagaaagacaggaggaagtggttatttttttttcaaatgcctaattttccattttaaaaaagcacacgacatacaaaagactaaacaggaaaacatggcttacaaaaatgaagaaaataaagcagtggaaactatccctgaagaaacataggcactggatatactagacaaagattttaccacataagtcttaaatatgcttaaagagctagaggaaaaatggactaagtactaaagaaaatcaggaaaatgatttaaaaacaaatgagaataatagcaaagagacagaaattataaaatggaaccaaacagaaattctagagctgaaaaacacaactgaatgaaaaatgctactatattttcaaaaatatattacaggagctcaacagcaaactcaaacaggtaaaagaaagaataagaaaatctaaagacaagtcatttaaaactactgaatctgagaggtagaaagaaaa

SEQ ID NO: 207017 - DNA, 480 bp, Homo sapiens
ctcgtaaacagttcttctgtagtgacagatggggtgaggcctggattaagtcgctaagatgaggaaaacagtgagaagttacccagataaagatgggactgataaaaaagtgcagtggattccaatttaagagagatcatatatgttaatttacttagggtaactggggaacataactaccttggctatagagatatttagagaaacgtactttggaccaaataacttagcttaggaaggacaaatccttaggaaacccaagtctcagattatttctctaatagatataaaaaaaaaaaaaaaaaaaaacaggccccaaatacccagggggttggggggcccaaagtttttaacttgaaaaaaaaaaagggccctaattaaaatagccgggggggggaggggggggcttttaaactgaaccctgggggggggagaggttccccaaaaaaagagggacctgaaatgggccgggccccggcc

SEQ ID NO: 207018 - DNA, 379 bp, Homo sapiens
agaccttctgcaatgataataaataaagctctctatgacatctgcctcagaaccctaaagctgcccacacctacctacagtgacttgaaccacctggtgtctgcagccatgagtggggtcaccatctgtctgcatttccctggccaactcaatgctgacttgcagaagctggccgcaaacatggtcctgttcccccacctgcacttcatgtatggcttccccctgctgaccagctgggacaaccagcagtactgggccctcatggtgcgtgagcccacttggcagttctttgatgccaagaatatgatggctgcctgcaacctctgccatggttgctacgtaatggtagctgccatgttcaggggccacatgtccatga

SEQ ID NO: 207019 - DNA, 212 bp, Homo sapiens
tgttaacccatccactcaaccagacagaatgaaaaacaaccttctaaagtgatggaaatgacaggaagttattttgtcctttccccccacttataatggaattttaatatggaatagttgtttctttttcaaatagagcagagaccccagtagatagttttgatttttcaaacatccagggtcacttccatcattcaactggattttgtggc

SEQ ID NO: 207020 - DNA, 229 bp, Homo sapiens
aaggagcgatggagggagaggaggaggacttccaggggtggcgaattgtgcttttcttgaaggatgaacagttcatcaaggggtggggaaaggcatcctggcaaagtcccaggtgccccccaaaagtctccgttactgcccagcagccagcaaccttcaatgcggcctcttccccggcgtctcttcctggtgaagctcacgtaggaatgaaaccacctctggaggagtg

SEQ ID NO: 207021 - DNA, 199 bp, Homo sapiens
gggaacccgtattcttagctttcatggatctagagttagaagcaactttcacctcttctcccctttctgaagactcgaatcacatttcctctccactgttatctttctggaccggaaagcccttatcttcattttcctggagctgcctgcccctcctcagttggtgctccctcacccctgcactccctagttcagaccc

SEQ ID NO: 207022 - DNA, 533 bp, Homo sapiens
cttttggaaagaaaaaagacactgaaagatgaaatttcctaagaacagaggaatacatgctgttaaccatggtaatagaatcctggtaaggtaacaactctgtagagcagtgggtttctgccttctgatttatgtactatgtacaccatcttcatttcatatttggtatcagagatctcccaggtaaacagtatttgcttataatttctatagtagagaggttaaaagtatcgtagttacagtcagacagacctgagtttgagtactagttctaggatgtttaaaactgattttgggtaatgatttaattttattgaaggtttgctcttttcatttttagtgtggagttaataaaacctcataaaacattttgaataagatgataaatatgctgtgataaacattaaggtccttggtatataataagtacttgtaagggttattatggtattatatttagcatagcgctagagttagatataaacatataacacataacttcaatagtatcctccttccctccactccccgcc

SEQ ID NO: 207023 - DNA, 606 bp, Homo sapiens
cgacctagaggacccccttctctagacacattgcaatttagagattgcactccagtgttttagaaactaaagtatggtggtcagtaactttttacttttccaaatatggacagttaaaaatccaaaacacaagtactatctactgtcaccatcatttcctcttaaaaaagatcattttaaaactaaaaagtttggaaggatataaactcacaataaagatcatttcatttaattgaacaaatttagctttgtgaaagattcatgatgtctaatttctgatttcagagcttgccaatgaaaattttaccatggactggcttcagtctttgcaatgacatttaggaaccaccaaacgttaacatgacagccacatttattactaagtttttctgaaagcagatgtaacagatgtaacctagatttagtaggcctctactttttccctccctctacatagaagccatattcagcaacttaatgtattttgtccaaaaatagatccaactctacaacccagtgggatgtttcctctaaagattataaaaatatagagaaacaattttacctcacattccacacagcaaagctgcataaatatccccgtta

SEQ ID NO: 207024 - DNA, 1049 bp, Homo sapiens
tatattatgtagttggcatagtatagcccaaaattcaagaatcttctagttggtactgttgccttttctgtaattccaaaagatttcgaacatgatcaagaaatgttattgtttatatgaaaatgaatttaatagttacctaccgtttacaacagacatttcagaagagaaactagtgttcttttttaaccctgcataaaatattgctaccaattcttttgaagaatgaaaccatctatttccaaaacacaaaaatattctttcaaaatcctgctttcttttttctgtatccaccaagaatctcttttcttatgttgtaagcagggtggcacaaaaataaaagatagacaagagtgtatgtgtgctacacttctcttaaccctgcacaattgagtttctcctttcacctttcaaaaattccagctctgagatattttgagttttaactctttaaatctggcataaaacttaacttagtattacatgagcatttctttaaaagacaaaatcagattttagaaaaaatgaactctttgacaatgtaagcattgtgtttacaatctgataacaactgataccagcttctgtgtttgaagtatagactgcagagctactttcaaagtgaattagtgttcaggtaaaggcagattttacctgttcgagtgtgtcctgtttggttccagcaagacatataatattttatgaacatgttttatttaccctaagtttttttaaaaaataacatttgtaatgaccttgagaagatcagagttccgtttctaaagaaggtgtttccttggtcatgttctgttgacctaaaccagttaaattcagtaaggtaagaactaagaaaatatatcaattaatagtgcatgatttggatgaattcagtggtacaatgctttgtgcacagtaccactcaaaaatgttcattgatttctaaatattgagggtgttaaggtgacaaggcttaagaaagatttagaaagagatcttacatttgaaaattgagttaaaaaaaagcaatttttttttttagaggaaaatag

SEQ ID NO: 207025 - DNA, 373 bp, Homo sapiens
acattatattcaggcttgtgctataataaaaaaaggattgcatgaaaatatttactgaagtaattattcatttatttaaagaaagagacttcatgaataaatataatgtgtatttttagaaactattttgcctctgcaaactaaataattcacaatgaattatatgtttatatgtattttataatatatttctgataattcattatattgaatgaggaatattaaataattatgttttagttatcactgttttctcaatatcaataatgttcataattttatgttctacataagacaaacagatttcttttaagaagcctaagagatcagaaagggcatgtgataaaaatggaaataaattgttattgctcat

SEQ ID NO: 207026 - DNA, 1086 bp, Homo sapiens
agtggcactgctatccacattctatgagagtcaattgcaattaacagggtcattcagaaaaggcaggtacaggccagacaaaaggagtgcagacagatcttatcagagcccaaggccaacaagctgggtctgggcctttcagatgttgcttgcagaggaaacaaaaaaaaaatggtggtggaaggtggtagcggttggaaaggcagacccagccagagggggaaaggacagggaatgaaaagagctgggcaactgaatagagaggtttaaagaacaaacacagactcctgggcctatgtcttgggttcagatcctgactctgcccctggccacttaggaaacttgggccattcaacccctccaagccttcgttggcttgtctgcaaaatgggaatacaaatcgagcattcctgttttttaaactgtcatgtaaaataattgccatgggaaacagtgttgagggtagtgcctgatattgggcagttattagaataactaagagaagagcttagcttggattggggaaagcggtacggagaacccagagagaagtggatgatgtgagcaagcttcccagggcaagaactcaaacactgcacagacaggtgagcaagttgaaagtgattctgggtctacctggtagaagaaaccatggagaccccttcccccaactcagaggaaggacggaccctgcaaggaagggatgctggtaccaattacagaggtccccctctgcgttcccaaaggctggaaagtggagacacacacaacacaataggccctggcctgggacaatgttacccaggccctaggtcccctacacatccctccattttgacactcttagctgccaccaaaggtgtttaaagctcctttcaaatggaagggcttaagcacctactccgcgcttagctctgagcccttcatcaaggagcatacaggaaaacaacgtctccagcccttccttcttttatctttctttgatctgggaatgatgtcagtgagtaaggaaaggggatgtagtagaaggttccaaagcaaccgaatttccaatgtcaggtggaccactgatgagttacatcactg

SEQ ID NO: 207027 - DNA, 435 bp, Homo sapiens
aaactaaacacaatcaaatcgcaaactaaaacaaactctcagtggtaataactattattaagcgggtatcagtaatgacacaaggggtaataagtgtttttcacacattgtaataagccacaattagttacaggagcatttgttttgctccatacacccaatgaggcctcacctcttccccaccccggcttttccagctcaaagttacttccaacaaagtcaaagctctgaggtttagaaacagagactttctgtggacagaaattagggagaaggaaaagtgaatcacagagtagccactgagagagacgcgaacatttgctcggtgtctacgttgtgtctcactccatgccaatcactttcaattttactattttagacctcaggtacagagtagttaattatgctcatcaggcacctatttttatttaatcc

SEQ ID NO: 207028 - DNA, 317 bp, Homo sapiens
caggccacatgataccaggtggagcccaattcaaaaaaaaaggtttttacaccccacacatatgaagtgtaggcctcaattagggtgacctcatctcttagtagcatcttctaaatgtcaacgccaacctcagtgatctctatacatttctactgccattcctcagcaaattactgaaagcaaacccatgtgcaaactttcatggccgccatattgtttcaggatggaagacgacaccacaagttgccaaagactctcaaatttgtagagcaccgaacttggttaaaatcattaacttctctgaaaggtacaggcaa

SEQ ID NO: 207029 - DNA, 214 bp, Homo sapiens
  misc_feature (20)..(20): n is a, c, g, or t
  misc_feature (28)..(28): n is a, c, g, or t
  misc_feature (39)..(40): n is a, c, g, or t
aatgtataattaaggagatngtaggganattagtatagnnaggtagagttttttcgtgatagtggttcactggataagtggcgttggcttgccatgattgtgaggggtaggagtcaggtagagaggaggagcagagtgctggcagtggaaagcctagctgagactggagatgcccccctgcccaaagcatctcagcgaggatgcttctccatat

SEQ ID NO: 207030 - DNA, 524 bp, Homo sapiens
ccttctaatggtaggagcattaagagggatgctgttgggctcgcagttcagtccacacagctacaatctagaggtcaggaagctataaagtccactgctggcatcacagtcatttctcacagatgaagttagtggcaatgcagaggcacagaaagtctggtcattaaaaaccacatttaatgttgcacgtacatcaacaactaccagtgaaaactaataggcagccaggcatgttggtgcatgcctgaagtcccaaacatttgggacactgaggtgggaggatccttgagcccaggaggtctaggctgcagtgagttgtgattgtgccactgtactccagcctggacagaacaagaatctttctcaaaaaataaataaatagagagagagaaggagggagggaaggaggaaggtaaaaagagagagagagaaaggaaggaagggaaagaagaggaaggaaggaaggaaggagaagagaaagaaaaggaaggaaggaaggaaggagaaagagaaagaaggaagga

SEQ ID NO: 207031 - DNA, 305 bp, Homo sapiens
tacaggcatgagccacaatgcccagccctgaaaacctgtaatttagtgttgggaataataaagatatgaaaaaaaaatggattttgttaccaccttagggcacattctagagtttattgtgtttatcagtttctcacaacttaagtggaaacggtcttaacagtgctttgacagactgtagccttgcagggggaaacctaatgtgagatagttaaccaaatacacaccttggtgtaaactactgagctacctcccagaagggaagctgctatcttcctgaggtgtgctagattgggtatcacata

SEQ ID NO: 207032 - DNA, 637 bp, Homo sapiens
tatccagtgcgaatattatgtagccatgaaaagaataaaatcatgttctttgtagcaaaatgaatgcagctggaggccattattctaagcaaattaatgcaaggacagaaaatcaaatactgcatgttctcagttataactgggagctaaacattgggtagtcatggacataaaaattgcaacaatagatacatggaactattagatgggaggagggacaaggattagaaaactaaccgttgggcaatatgctaagtatctgggtgacaaaatcattgacaatccaaacctcagcatcatgccatcatgcaatatacccaggtaacaatcctgcgcatgttctcctttatctaaaataaatctgagaagaaaaaagtgtgtctcagtcctctggtgctgctaaaacaaaataccacagactaggtaatttataaataatataatttatttctcaaagttctggatactggaagtccaagatcaaggcactcgcaagattcatcttgcgaagattcagactctgcttccaatatggagacttgaactgtgtcctcacatggcttaaggtctaagggaaaaaaatgcctcgccagttccctctaatttctttattaggtttcaaaacactactagttcc

SEQ ID NO: 207033 - DNA, 769 bp, Homo sapiens
gctctgaaggacagagatggtagctcttgcgtatttagcaggggaggtattgctactcttattttaaaacagagaaaaattaaactcaggctatgtgatcagtccaaaatcacacaactatttaaaaatagagaaaaattcaaagtaatgtattgtgtgtgtctctgaagatgaagcatattctatcacccatgttgactctcacagtttgggaaagtctgtcatgtgtctggcattggaatttgggactataaacaacttttgtcataagtcttttccaatattatacactcaagtgcaaacaattccaaatggcactcaccaacatttatttattgattatctataattttttgctcattggattattactttagatgggtgctataattaggcacatctctggaatgtggacaagacatgactggtataaaaatcaaaataaaggtgtgaaagaagtgagggtaaagtttttggggatgttcgggctacacacatccgtcagctactttttcaaaaggaacagtggagaatctgactgtaaaaagtaaaatagaggttcttcttcaaagactttcctccctgtctaattaggaataagtaataacttctcttaaaagcaaaaggtattcgaagacctgtgctaacattcttaaatatctgctagccataacagagaaatcaatgtactttaagttcttagcttatccacaattgagcttaaatatttgccctggcatgcttatactggtccaagcaagcattgggt

SEQ ID NO: 207034 - DNA, 322 bp, Homo sapiens
tatttgatctttcaaaggtaagcacacagtccttgatgatggcatgtctacaatgcaactggttcctcagaatctatacaactgacaagtccctgcactgaaaggagaaagggacttgttccccagacacctctatgactggcacactctgtccctgggcttttccttgtccacattaccacagtgctattccaagtagaatttgatccacgggtcagagtaaagcatatactggaaaaactgtaaaacactttgaaacagacccaaaaaaaggtctaactcacccttccaagttacctctgcctttcattacctttgagta

SEQ ID NO: 207035 - DNA, 475 bp, Homo sapiens
attccattccagcagtttccatttacatcatcttggccagaaccatatcatgtagccactccgatttggaaaatgttaggtttctggtttatctggatggttttgtttgcttgcttttgttgagcatgtttctacctggaacaaagttaacttagttttgtgataaagaagggatgtggccgggtgcggtggctcacatgcataatcccagcactttgggaggccgaggcgagtggatcactaggtcaggagatcaagaccatcctggctaacatggtgaaaccccatctctactaaaaatgcaaaaaaattagctgggcatggtggcctgcgcctctagtcccagctactcgggaggctgaagcaggagaatcacttgaacctgggaggcggaggttgcagtgagccgaggttgcagtgagccaagattgcgccgctgcactccagcctaggtgacagagcaagactctgtctc

SEQ ID NO: 207036 - DNA, 219 bp, Homo sapiens
tgaattcaaattccaaatagatcatgtagtagctgtgtgagttcaccaaggttttattaacctttgtaagtttcagtttcttcctttgaaaagtaggataggattactcccttcaacctccttcacaagggtactaattccatttccaagattagagacctcctaaattatttccccaaaggacccacacccaatgctatcacaccggggattaagttt

SEQ ID NO: 207037 - DNA, 406 bp, Homo sapiens
tggttaaacacaatcaagattaaatttataaaacgaaaacctccttttgtccatattgccactcccttctgagtgttcttcagaagcttaggaagcgagtgctgaaagcaaacttctcttctcttccagggaagaggggaacgtggggcctcttgacctacaaaactcagtattttggaacatccgtaattccaccaagtctgttgcagtcaaatagactccttttagcaaaccagccagccagggctggagagcaaggctttcatacctaggagttgacaaggacaggacccaagagctccttggaaaaaaaaaagcttgtacttcagtttgcattacaaagtgctggaagagacagatggggccatgacaggaaaagcagttatttcttctgggcttcctttct

SEQ ID NO: 207038 - DNA, 400 bp, Homo sapiens
agattttcgctactaaaatcaaataatggtttaatctcccttcatcccatgctaccacccatacgttttctcaggtataaataacagaatctggtgtgagaagtggtttgagctgagcgcagtggctcatgcctgtaattccagcactttgggaggccaaagtgggtggattccctgagcctaagagttagagaccgacctagacaacatggcaaaatcctatctctgacaaaaaatacaaaaaatacaaaaattagccaggcctggtggcgttcacctgcagtcccagctactcgagaggctgaggtggcaggatcgcttgagctcaggaggtagagctgctgtgagttgtgattgtaccactgcactccagcctgggtgatggagcgagatgctgttt

SEQ ID NO: 207039 - DNA, 274 bp, Homo sapiens
cgactctaaggatcccgcgatcgcttaggtttttatgggtgatcgttttaactagatgttatttttgccttaatatttgactttgtgacatctagtccttccactattaaggcatcaaacttaggtaagcaaatgcagggattaacttttcctactattcaaaagttgatttgggtttcagttttatttcttgattaaaatcgctaaagcacagaaaatccactctcccctcaatgcccaacaccatttatcattctctgaaagttgcttaagc

SEQ ID NO: 207040 - DNA, 518 bp, Homo sapiens
tctccatacagcagccagtgtgatgtttttaaaaatgtcaattagatcacaccactcctctgtgcagaaccctctgtttccttcccattcatctcacccaaaatagcatgcaaaatcctcccgtgatctgaaaggccctccatggtctgcctcacaactccctctctgatggtgtcagagagatcctacttcgtgatctcctatcacaatcttccatgtgcatcccatctgcagcctcaccagcctccttgctgtcaggtgtgtgttgctacagggacaggtacagctggtttctaaccctggtatacattccacagatagttaacaagcctctgtcttcctcatgacatttgggtctctgctcaaagatcttatccaagcaggctttgtgactcacctatctaaaacaggtatcccacgcacagacacagaaacggacattctcttcccttaagcttttttatttatcttcgtattactgtttccacttgacatgttttgtttttttgttacatgtt

SEQ ID NO: 207041 - DNA, 352 bp, Homo sapiens
gacagtgaagagttcaaggccaaatggcctaaagaggtgaagcagaacaagagccagaaagaacaataaattacacactttaagtataaaatgggccccaaaaactttataagctctgggaaacaagagagagaaacataaaaggaaagcggtccggctattagccagctctgggaggctagaacatgatgggagctcaggcaagagaaaagtcaaaccccagaagcaagcctccattgttctgaaggaacagctatgaagaaagctgggccacaatggtagatgtgttataatgggaggaggaaaatttaggcaatgaggaagccaaaggaattttgagactcacagtaat

SEQ ID NO: 207042 - DNA, 644 bp, Homo sapiens
ccaataattagtaaagagattgactcagtaatcacaaacttgtcaaaaaagaaaaacctagaatcagatggcctcattggtgaattctactaagcgtttaaagaaataacaccagtcctactcagactcttccaaaaaattgaagagaagggaatactttcacactcattctatgaggcaagcgttaccttattcagtaaccaaagacactgcaaggaaagaaaactacagaccacttgatgagtatattgatgaaaaagtcatcaacagagccctaggaagcagaatttaacagcgtattgaaaggattacacatcatggccaaaagatttattctggaatgcatggatggcttaacatacaaaagtcagtgaaacataccactttaacaagataaaggaatataccacatcatcatcatcatcataatacagaaaaagtatttaccaaaatccaacactctttcataataaaggcactcaaatacagaaggcttttcctgtgagacaaggcaacacaaggatgcctgcttttgccacttttcccaaatatactactgcaagtcctggtcagagcaattaggcaagaaaaataaaagttaatacagttttgaaaagtagtaaaattatctctgttctttgatg

SEQ ID NO: 207043 - DNA, 634 bp, Homo sapiens
atactttgtatgatagtaatactatcattccaactttgttttcattcatgttagcatggcttatatttttcagtactttttcttttcacttatttgtttctttatatttaatacatttttcttgtattagtatatgattatgctttaaaagaaaaatctatctgacagagctgggtgtactggctcattcttgtaatcccagcacttagggaggctgcgcaggaggcccacttaagcccagaagtttgagacagcctaggcaacatagtgagacccatctctacaatttttatttttttttaattagccagatgtagtgacacgcatttatgatcccatttacttcggaggctgaggtggaagaattgcttgagcccagaaggttgaggctggagtaagccatgatcatgccgttatacttcagcctgggcaacagagcaagaccatgcctcaacaaaataaaatttatttgacgatctctgctttttcagatgtttaaaatatttacatttaatgtgattactgatatggttgcatttcacttgatcatctttctatttgctatttgtcttatctctttttgttccagtttttcctctttattcttttttagattaatattttttataattcc

SEQ ID NO: 207044 - DNA, 406 bp, Homo sapiens
tgaaaatgtgctatgtttctagacaacatggaaaaatagaaaagtacaattataaaaaaaaagcaaatcacagatgaaaacttatggtagactttatataaacccccaaaacaggcaacacgcaaatgtatattgtttatagataaaattgcataaagtaaatgataacacaaaattcagatagtggttacattggaataggaggttaataggagacttcggaggtatccacttctcaggagtgtgtgagggttttatgtagccagactgaaagtttcatgagagtagagaccaatattttttcttcattttatttcctaagcctagcaaaaaggatggcacatcgtgtctgctaacacacacttttcagttaaatgaataaatacacgaccttgtaagcggtcaa

SEQ ID NO: 207045 - DNA, 360 bp, Homo sapiens
ttttttaccttcatagttaaattatttaaacttctctgaccatctatttttttggaggagttgtaataaagtctgatgtaaaatgccagttccttagtattggctgagaaatgagagaagaaaagaaaagagtattcagggtagcaaatactgtcccacaaagccaaaaccatgtgtactgaagccttacctatttttagtttagtcggccttggccctagaaaacagttcctctccctacctaggccagattccattaattccatgtgggctgttgcccactgggcatgcagctgtatttgcagtttgagagtcccaagtaagcctgactaggcttcaaaaatgaatctagatttatac

SEQ ID NO: 207046 - DNA, 193 bp, Homo sapiens
ctcagtgtcactgaccctgtgtcccccaaaaaactcccaaaagagtctcaattcctaccaaaaagcctggccaacacctcaggctggtgaagtcttgttgaagctgcttttttcatgctaactgccacatcttaattcaagtcctcatttccatctttgaaattggttccttagttgcttgcaaaatctagtt

SEQ ID NO: 207047 - DNA, 214 bp, Homo sapiens
tgctatctgaggcagacaaccaggctttgccacttgtttacattgctaccttcgacaacatactctataactctttgggactgtttcctcacctgtaaaatagggcaatcctatcagctcaacttccctcacagggctcttgtgagaaccaggtaataaacaaaagcactttatgtcaatatgagttaaggaatgtactttaataaaataacct

SEQ ID NO: 207048 - DNA, 387 bp, Homo sapiens
catcagtcaataaaaataaagaaaaaaactcttttctttaaagtggggctgttttctgagattcaggttttcaggatttgggaatgagaggcagtgctgatgggggctgatgccctcaagggagttttctgcctccagattttccagtctcccttctgcggcctgtgcacacgtgctctgtggggaccagacgcctttgttgttggcctcatcaccccctggtttgggagagcacggagggtgaccccctgcccctccctgtgctgtggctgcaactgcgaagcctctttctggtgagctgtcatcctttgaatcataaaactgaatatttggcctgttggatggataatttctaaaatacatgggacggaagtttctaaaatacat

SEQ ID NO: 207049 - DNA, 473 bp, Homo sapiens
agctactataaaacacatttaaaaaatagttgataaaaatatttctctggattgtgcaagaagggagactaggaccacggataagacagggtatttgatattaatcaaactaggcttctttctctcttgctgcgttggaggctgaaccctcctcgtttgtcgtttctccattttctgcaggtaaatcttagtttcttggttagctactttgtcctgttttccctttgctaccagttttgctttttgtttgtgcttttttgtctgaagatttatcctttcctgctgtcttttttggcttcgtttccccctttgcaggagcaagtttaggtgacaaccttgtggatagagatggaatctcactgtgttgattaggctgaggtgggaggattgcttgagtccaggagtttgaggtggcagtgagctatgattgtgccactgccctccagtctgggcaacagagagagaccatgtct

SEQ ID NO: 207050 - DNA, 422 bp, Homo sapiens
aattgtctgtccaactggggactcaggagcagcctggctgtctgcagcagctgcaaagggagcaaaggcaagcaggacttccatgagttaggaggtggccttctttggagatgagtgtcctgccaattgcaagtcctcctggtcacaccatcatctggcccatcttttgtatcttagatcggatagggtgagaggttttcaaaggctttactgaaatcaagacacactttctggggcattcccctaatcgactgttctggtgaagctcgtcaaaacaggaaatgaggttagcatggaatgactttctcttagagaacttatgttgcttccttgagaccaccaatttcttcccaaaagcttgtgagccttatttcgtgtctcttttgggttttcttggaacttggaggaagtctgttcttctg

SEQ ID NO: 207051 - DNA, 723 bp, Homo sapiens
gtcgaggctccagcctgaccaatccagggggtcgacaaaacagattcgggacaccatgctacacgcagggcctaccaggatgcagaaacagcagacggagtccggggaaagcagtgcggcatcccagcctcaggcctgcccgtacggtgttcgggaggggaggagaccaatgtgaaaggagatggttatatctcctcgcggctcttctctgagaaatgaagccaggatacgaaacaatcttcaagaagaagctgaaaaccggatatgacaaggatgtccccagaacacagcaggcatcctgaagctctgcctcctgaagctccccctccctcggtggaagtcggctcagggaggtcctgaggacaggactcctgggggtttggctgcagaatgaattaattcactaggactttatataatttttcaaatcatgaaattgcacaatcttttgaatatggaattgggaggcctttcagttcattcagtagaaaactggaacatttttgaagggtgatctgctcgacacctttcaaagagtacaaaaccttgtgaagtagcagatgcaatgattaccaatgtaccttataaaatgactttcagagtttgagattaaattggcttttctgaaatatgtaagtctctggaaaaactcaacatttctaatcttgctttggaaagcctttaagtatgtaaaaatcaatttcttatatcttctctgaaata

SEQ ID NO: 207052 - DNA, 415 bp, Homo sapiens
actctgtgaaagagaagtgaaatttgaggtgaccttcagaattatcctactaaaatgaagttgaatagcagcaagtagaaactgatgtacctataaaagcaatatattttatattaatggcaaaaaacacaattacttttgcatgaacctaatagaataggaaaaactatttggtgcaaataaagcagaaaacaataataggtagaaaggctatcccaggactagaaaggctcttctgtaggttctcaaatctcagttgtaatttctgaacaactagtttaactctttccattatggggctaggtctgtattttattttattttatttttttaggtatttccccttaatttttaccctataattactactctcactttgttctttcttccctgagacttcatagggcagaccaaa

SEQ ID NO: 207053 - DNA, 208 bp, Homo sapiens
taggaagcctggactgtgatttgtattaacatcttataaatcaggtttgaaaactttttccctccctctttggggcatactgaagatgaaggcaacttagtgttcttttagcttgttaatttttgcctatctgatatcatctttcttgagtaattgaaatctttataaactaatgcagttcctgatacaccaccttctggcacttaga

SEQ ID NO: 207054 - DNA, 283 bp, Homo sapiens
atctctgtaaaccacagccatgtccagaataattctacactcccatttccacccctagggaaggaggggagcagtagagaccctcctcctgggaactagcctgtttcctcctgagcaacccttccaggataacaaatggacccattcccaacattgtggtcagggtagactgcccagtcttcctggccattccatccactgtctctgcagctgccctcggtctccatctgcctcttcctctgctctctgccttcctcaactccttcttctctggggcctgggg

SEQ ID NO: 207055 - DNA, 535 bp, Homo sapiens
tgccctggcaaaatctcatgcatcgcctgccagaacacccagggaatctcgtggctccctgacaatgcacaaacacgctgccacattcttttttgggggtccagagagtgggaggtagggtcaaaaaccacgggagtggaactgaaatacccccattcatccaatcataggcagatcgcctccttctttaaattgcctttgaaaaatagctttattgtctccgtatgtaatgcaagtaggcattcccccggcaagttcgggggagtagctgacatttgttgactgtttactgtaggtgtgaactttatatgcaccatttcacttgatccccattttcaagatgagagaattggggctcagaggggtgtagtcatttgcctgggacggaacaggaagatgtctggaataagggccagccctgggtagatgtggtggctcatgcttgtaatcccagcgctttgggaggccaaggcagatcgcttgaggccaggagtctgagaccaacttggccaacatagtaagatcccatctctga

SEQ ID NO: 207056 - DNA, 536 bp, Homo sapiens
agcaatcctgcctcagcctcccacagtgctgggattacagtcatgagccactgcacccatctgagaatattaattctcttttaaagaggcaggaggcagaaaaatctcttgtggaaacctgggcttctgcataaactacataaaatatctgtaatttgttgatcactgaagtgatgaagagaactgggtcacctctgtctgattcaccatcttctagttggatttcagcagtatggataaaggtactaaagtctttagtgtgctagcccagggtattgtttccaactctttcttccattgtccatctacatttattaactcagcagcagagttttatctgatttaagatttgttgtcttactatttctgtttttttttttttcctccttagtatatatggaattgctgcttggattttggctggcttgtaccttttgtttgtggactgcttagaaggcactgcatggagtcatttaagctttcttatgaattatgaatagctatgtagagaggaacttttctagatacatttatgg

SEQ ID NO: 207057 - DNA, 274 bp, Homo sapiens
acaaacctttgcagtaaagttgtatcgtttccttaaagttaatgccattccagtagacttttaaaatgttttattattgctttttaatcaaatcatctgccactgttttttaaaaacatcttcatttgtaccatctttgaagccatctagttaatgagataagaaaacctttgcattccaggtatttggaattgttctcacagctgaggtggttagaattgggactgaaaagagaattgctttctggcatagtgaagtttacagtatcttaagc

SEQ ID NO: 207058 - DNA, 141 bp, Homo sapiens
gggtaacaccttgctatgaatgagtatatgcaaagcacttaaaacaatgcctgtacatggtaaggcaccatacatgtcagttgttatttctctaagttaaacaatgagtataacaatcacaaaaaagtcaaacatatgaca

SEQ ID NO: 207059 - DNA, 990 bp, Homo sapiens
aagtgtttacagttttgtctgcaggtcatccccagcacctagctcagtaatggacacttcatggcactcagcaagtgtttgaactggatttggtgtgtttaccccctagctcatggtcagtgactactgcttctgaattaaaaatagcaacacatgatcagatttaagtggggccagaaagaggctgttagggcataggatattttagcatgaagtggataggatcatgagtggtaacccatgttcttagggcccatgtgcctatgtggtcactgcaaaacaataaaagtggaggcaagaattcaaattagtatatgggagtgagccacttagtgacccagtgcccatgtttcagtgctgctttgtttttcttctaacaaagggcatttttgccctatgtaaaaattggtattggccaattaggacttcacaaaggtctccatatcttcctcaaatgacaagggtcttatgctaaatgtgactctctactgccctgtttgttaacatatgatgcagtacaccaatgcagatcacactgcagttttaggtagtatatagctgaatgcataatttgtattagaaatacaacaaggacattagactcatgtctgcattgacatggatacagcaaaaatcttgaagttagtgtgagagattacagtagtgagatttggaagatggaataatacttgttgattaagtgcatatttttcatttaagttagaaaagccctcataacaaagccacccatatttcatgtgtcaaatggaatgctaggagctttctgtgcattatctcatttgtggaggattctcatttttcacatggaagcagaggggcatttaagttcacacagctgccacttggggtagcttatccctgtaatcccagcactttgggaggccaaggtgggaaagaatgtgtgaacccaggagtttgagaccagcctgggcaatgtagagagacctcatctctaccaaaaaatttttc

SEQ ID NO: 207060 - DNA, 127 bp, Homo sapiens
ccataacaaaaacctcaaacctcaaggaaagaaattacaaccaagccttcagacagctgatggtaatttactcacacaatcccctttatcctttcaacacccactatttatctgtatctgacgttgg

SEQ ID NO: 207061 - DNA, 418 bp, Homo sapiens
tagagaatttgaacagctctagttaaatcaaattcacaataaaaacctttcccacaaataaaatccagccctggattcactggtaaattttattaaacatttgaaaaatatacacgtatatataaactccttcagaaaacagaggaaacttctcccaactgcggtcatggatcacttaatgacagggacatattttgagaaatgcattgttaggtgacttcactgtgtgaacatcacagagtatactcacacaaacctagatggtatagtctatgctcctaggctacaaacctgtacatcattgttactgtactcaatactgtaggcaactgtaacacaacggtatttgtgtatttaaacatctaaaaagagaaaagatacagtaaaaatactgtataaaaaagattaaaaatggtac

SEQ ID NO: 207062 - DNA, 722 bp, Homo sapiens
catctggtcagtggtcaagaggctgcacctctaggagcctcctctgtcactcacccgcccaggcctggacagcctggacactccagccagaggcagcccagagggtgtgggaggggctctctggggacagagcaggaggggacactgctgtgaccctgtagctgcagacatgtgtctccacgaagggaagaggctgctgtccactgtcgctttctgcagtgacactgtgccctggcccgggctctctgctgggttgcagaagtgcctgggtcaggacagctcgcatctgccttcaccgcagacccctctctgcagcccatctgaggcaatgtggcctctgctgtccaagactcacttcgaggggatccttttccttttttagtggaaacctggtgtcctccctttgagtgcttttaggggctggggaggaggtggctattggcggcagtgcgggggcttcatgctctgcctgcgcgcagcagagaacacggcttcattggtgggatttgtctggtgactgggcaggtgggtcgcctggacacgtgctcccagccttcagatgtgacaaggaggggaccatttgcggggttgctgtgtgctggggacagagcagaaaatgccaggcggcaccatttttcccactccccacccgcccgtgctcactcagagggaatgtacagatattctgtttgtaattaaaaagtaatttaattatccgctga

SEQ ID NO: 207063 - DNA, 580 bp, Homo sapiens
gtgtgtctatgtgtgtgtttgtgtgtgtctgcatgtgtctctgtgtgcgggtgtgtttgtgatttcatttctgaggtccctagtgagtgtgtgtatgtgtatctgtgtctatggtttgtgggtgccttcctgtgtgagagtgggtaaactggcacatggcagagacagcctgcctgtatacactgaaatccggatagttgtgttcacatggcttgactggaaggagaggaaatgggggaaaacttgctgaggctcctactggccaagattacattattagatcgtcttcaaggagaacaaggtagaaggatgaatcgtgaggtactggtaggaagtgcattcagaatgacatttcacttaaaagtaacacatgggtggttttttagaggaccagaggaactgaacatgtgaccttcatctctgctcctttcagaacaaaagtgaagctttctccttgcctagcacgcagagggacatcccccattaccaaggagcagaagaagcagtctccatagaacatttgtctcgccaagatctgaaagtgaaaggaaaagagagaggaggaggaggaggagggaag

SEQ ID NO: 207064 - DNA, 1027 bp, Homo sapiens
agcgcgggcgtcggaagcggcggaggtggcagtgtctgccctgggatggccttccctgcacgcgcgcgtttgtatctaaatcgcaggggaccgtctcttcctcagcttgccggcgcgaggagccagagcctcgagttagggccacacgggggaatttggggcgggttgacttttcccgcaacatattttgtcagagaccttggagaaagtcctactgctggcgccttttagtttcctcagatgataacattcccaactccgctcgaagcgtccagtcttaatcccctccagcagaatggtgctgactaactcagatgtctgagatccgcagctgtgtcaataatagggctttctggcaaacttgtgaacgtaggctcgaaattgtttttctggacgcttgaatatcagtatattcagttgaaaacatgtgattttgttgccagtttatcagttcctacctggcctcccgaggtcagtccttcaggactgacgctgcaactccaactcccatgtttcttttaaatcacaaaggaaaatatcttttaaaaatcaggatacactgattaattatgttagtaactaattggcatttgttgaatcaaaaagttttggaagcgttaaatagttttagcctctaattttacaataaagtgaagctcaaagttgggaatttgaccggatgagggctacaagcctatcctttcctcctccctcttcatctttcccaacctgtcaccctggctcgtttatgtctctgtatagttgtaggctttcatcattatacagagaaaataacaaagtaagtagtgtcttctaaacatctagccattaattccaccaatccattccattttcattcaagaaataccagagatgctgagtaaagattaattagctgcctggttccacagatacatgggaacaaatccagaatagtagtagctcaaatccaaatatagtaacaaatagaagttatatattttaaacgaaaatagtagattttcccatgatctcttgaaagaaaaat

SEQ ID NO: 207065 - DNA, 319 bp, Homo sapiens
ctcagcctacaaccccagcacacatgttacctaggggcaaattagtactttgccctcatgtcctcttcacaaagcactggggtagaagtccttcttccagggaccagcagcacccagcccctgcttccccaggctcctgccctgcacagggaccgctgccactgcccaccaaaagctgctggggggtgttggggctggctcagctgagctcacacaggatcctctgatggccaaagtgctggagtggaaatcagagaccaagaagccaatccctgtgccagctgccctggttagggaaatacagaaactaaaaatagtt

SEQ ID NO: 207066 - DNA, 412 bp, Homo sapiens
aagcttggcaccttcagggaattggaagtagatccatcttgcgggcatgtgcagccctcgtggggagtggtcagccatgaggctgggtgtgtgggcactagatcgtggcaggcctgaggaactgtgacaaggaattttgactttataggagggtcattgggctccgttgaagtactttaagggcaatgtcaggtgttttaaagaaagacctcccagtctaggtgtgaagagtcgattggggtcttggaaggcagcggggagcaggagggcagtaaagcggaccaggagacaggcaagaaggaatgatgaacgccaacagagggcagtgatagtgaccgagagaccctcgtgaggtggagccttgcaggcagttccatggatttgatgaggtgacgaatgaaggatggtgctt

SEQ ID NO: 207067 - DNA, 613 bp, Homo sapiens
cagtctctagtctgatttatattttctaatataaagagattggaagtcatcattcccatcctcacaataagaaaaaagctcaataaactgaaaagtcaacaacacttagatccattagagaattaaggttaaagagagaatgcctcacaaattagaaacgcaaatacaaagaaccatagcttacagggagcagaagcctgttgctggagccagtaccaataggaacatttatgctgtaattcctgagttgctggaggctccatgtggatggacttaagaatcaaaagctccagcctggcacagtggctcacacgtgtaatcccagcacttggggaggctgaggcaggtggatcacctgaggtcaggagttcgagaccagcctggccaacatggcgaagccctgtctttactaaaaatacaaaaattagctgggcatggtggtgcatgcctgtaatcccagctgggtttggtggtgtatacctgtaatcccagctactcaggaggctgaggcaggagaatcactttaacccaggaggtggaggttgcagtgagccaagatcacgccattgcactccagcctgggcaataagagtgaaactctgcctcaaaaaaa

SEQ ID NO: 207068 - DNA, 193 bp, Homo sapiens
gctcaaaacaacggtgattgggctcaacccagtggttagattctagaggcaatccaatgaatattgctgtttttagagccaataggaaacatttaaaacaacattacaaccttgcctttgagagctgataaatacttgtaccaaaaagtgtggcaataggtaaatgggccataggaactggggctataggact

SEQ ID NO: 207069 - DNA, 459 bp, Homo sapiens
gggtgacagagtgagaccctatctttaaaaaaatatatttttaattatgagaagagaaggaattatctgacctatcttgtctgattgtaggtcatgagacttccatttctgaaggggtcctgttccatatcctcaagaagggagtgctgcacagagaggccatgaggaatctaagcagacaggccttgctgggtttccccactcagtctgttaatattagatcatacctttttgtccagtcacatttttacatggttgtcaattatgcctgtccagtaaagtctccataaaaggcccaagaagacagagttggagttcctggatagctgaacatgtggaggttcctggagggtggggcacctgggcataaaagctctgagccccttccctcataccttgctctgtgcatccctccatctgtatcctttgtaacattccttataataaattggtaaatgt

SEQ ID NO: 207070 - DNA, 608 bp, Homo sapiens
aatatttcacttagtattgctattactatgttcttgggacagaagttcagcctgtcagatacaagagagtggtgtctccataactgtgcttagaactccgtgctgcatgaatggataaactgttaagcaggaacctaggaaagctagaatgacaaagttcaagtttattaaaactagcaaaacatattccttactgctcatgcatgagtcacggtcataagatgtttacagttaaggaaagcagcttcatgatacctgcaaggacgaactcctacagaaacacaatgtccaagataacctaatatccgatgacaatgtatgcttttaagaagcaggctggtcgcaaactcctgacctcaggtgatctgcccacctcagccttccaaagttctgtcattacaggcttgggccactgtgcccggccaaagatagctttaaatcaacaaagtaataagttttgtcacactgtcagctcaccggcaggtagacataacttagcttttacttaggcccctatgtaagaaaaacttcatgaggaggcactcccccagccttctgaggacaccctactgtgtaactggtagctttcaataaactctcctcactgc

SEQ ID NO: 207071 - DNA, 1018 bp, Homo sapiens
cgagcactttggaaagctgaggcaggaggactgcttgaggccaggagttcaagaccaacctaggcaacctagtgagaccctgtctctactaaaaatttaaaaattaatcaggcatggtggtgtgtgcctgtagtccccactatttgggaagctgaggcgggaagatcacttaagcccaggagttcaagggtacagtgaactaaagatcatgccagccactgaactccagcctgggcaacagagcaagaccctgttttagggggaaaaaaaaatctatcttagctcctatgtgccataaatgttacaacactcatagtctggaggaatcacaaagtctttaagaaaatggagacaggacctatagtgatcactactcacaaatcactagaatcacatgctgaaacactgctgcagaatatcaatgtgtggtctgttcccactgccattaacccaaccatgactttctctgcctgtcctggtatagaccatttagtccttgttaagcacagttttcattattttcaacctttaccaaccaaaaactactaaagaaaaagttaatattctaaggagtacagttaagagatatcctaacattctcactgaatcagccaaatataaaggctaacatgttaaacaggctagagcagttttcttcaaactaaagcagtagggccctggagttaacaagacaactttccaggaggttaggatagtttaaggagaatccggttaaaggtggtctgcttccaccgtactcccagagcttgatctgtctgagaattcttgtggtttgctggttgtccttcccatcctcccttataaatgtattcacttctcccacattacttcctaatcttacaattgttcatttcccagacaggtgcagcgattctacgctgcactgtctgtagagcagtcccattaaaactcatgtgtcggtgaggtacaaatcatgacatctctgaatggtaattcgtgagtataatgacaaataatttgggtatctatagtgcaa

SEQ ID NO: 207072 - DNA, 749 bp, Homo sapiens
ttaagccctaagtgaaaagtaagttaatacgactttggaaattaaaaaaataccgaagaagctatgttgcaatttggatcatgaaggcaattgtaatttgctgcctctgagcaaaatagagaaaatacggcagattctggatgcaggtaggtagaaataaaatgttaccctcagtgttcattgagtttcaaatgtcttaaggacagtttattgaactggaaatatgtatgtatggaactcaaaagaaacattgtaaacaaagacaaaagtctggtcctcctcagtgagtagaactgcacagctgagagaagagaagagaggtagaatgaaattcagaataatctacaaaagttaaagaccaggcctgtacaaagaaggctatgatgaacactaaaaagaataaagcatcaacgtagaaaaaaacgcaaagcagatttctccctaaaaggtaaaatcttccacgactatgaacagagtgtttaatttttatttaaagttaggttttcagatgctgtaaaaataaatgacagacttttagaattttctacagattattaaaaatttggtggatgttggcataattttcctagcaaaattttgaccttaacagggaaggtatattagaaatataacacatttctattttaaaataatgcttagtattgaaagacagaatgatccctaattctccaaaacccattaaataattttattttcactttgggctagcccaaagtgaaaataaccaa

SEQ ID NO: 207073 - DNA, 325 bp, Homo sapiens
accttgaaagcattacactaagttaaagatgtcagttacaaaacaccacatatggtataattatatttatataaaatgtctgaaataggtaaatctatagggacagaaagtagattagtggttgccttgggctggagggataggaggatggagggtcaccataacggtatgagatttcttttggaggtgataaaaatgttctaaaatttactatggggatggctgcatgactttgtggatatactaaaaaagtattgaattgtacttaaacagttgatttttatggtgtgaattatatttcaataaagctattaccaaaataatg

SEQ ID NO: 207074 - DNA, 514 bp, Homo sapiens
ttttatttttgttgaagtattgtaaatgggatggctttcttgatttctttttcagctaattcattgttggtgtatagaaatgctgctgatttttgcatgttgattttatatcctgcaagttcagtgaatttatcagtcctaagatttttttggtgccacttttggagtttagggttttctatatatttgatcctgtcatgtgcatacagggataatttgacttcatgcttcctgatctgcatgccctttatttctttgtcttgcctgattactctgtctcagaccttttgtactttgttaaaaggtgtgaaagtgggcatacttgttttgtttcagattatagagagaaagctttcagcactttcccattatgcatgatgttagctgtgggtatgttacttattacctttattatgttgaggtacgttctttctattattattataattttttttaattttttttttgagatggagtctcgctctgtcgcccagctggagtgcagtggcatgat

SEQ ID NO: 207075 - DNA, 806 bp, Homo sapiens
atcctatcttaggttttgaagcctaagatacgttttataataaatagacttattaaaactaatgtttgcaaacattgctaaacttaacaaattggctaagtttccctttgttaacaagcaatcagttacgctgaagaatttgaaaaatgcaaattaaattgttttttgttatattctgacaccccaaatttattatttggtcttgaaggtaattgaaaattaaattggttattttgtcacataagataaagtaaccaatagtagcagtactggtaccatgtaaatggagactacaagattctggataaaatacaaattgaattttggcattaagagaggtattcaggattgcttagtgaattgtggtatattgaggttttttaaaaatgctagcaagcatctagccatttatgacttagtgaatgagactatgcaatgaaaatttctgcataaaatacaggccctacagtttggtgtatgaaaataaatttattattccaaaatagctcctgacctctctaaattggatgatagactttcctatagaaaatgttgaaaaagaaacattttctaattttttcagtaaaagtttccatctcatccccaaaagctgtaattgaaaaaacatgcttatttttttccttgtgtcttttaaagaactacacatagattttagggtcagtgctcaactacaaattcttggcaaacaaagcctcacactgtgtgacataccgacaacccatgttgagaggctccttacacctcttgatgggtgggtggatggatggatggatggatggatggat

SEQ ID NO: 207076 - DNA, 327 bp, Homo sapiens
acaggcgtgagccaccgcattcagccagatttctcctaactggatattcaggtttctagtcaggggctcccagaaccccagctaggccactacccaggtgttagccgctctgctccctcagctctgtgagaataattgcaaaaagcaggtgatatgagaatgggctgcatggctgaaaggtgatctgggtgcaagtgctctatccccagggtgggacatcatgccggagtcctaccaggtgtacaggaaacactaatcctgtgggaaggagctgggccctggaacaaaactctctgggtctaatcccagcatcagccctgggtgtca

SEQ ID NO: 207077 - DNA, 512 bp, Homo sapiens
tcttgattttgcttctcagagttattgattagtattatgagtatttactctaaaagtaattgagtatgcatttctccactagacatcataccgcaaaatgatgcctgcttgaatttttttcttgcttatcaactacctctacctcctatgatgcttttaaacactggaattgggatccttaaaggtaaatgcctcatagttatttgtttaaataaacataattctgaggctgggggcagtggctcacacctgtaatctcaacactttgggaggcctagacagaggattgcttgaggccaggaattcaagaccagcctgggcaacgtagcaagaactcatctctacaaaaaataaaaaattaaccaggtgtggtggtgtgtgcctgtagtcccagccacttgggaggctgaagcaggaggaatgcctgagcccagtgggttaaggctacagtgatccatgatcgtgccactgcactccagcctgggcaacagagcgagaccttgtctcaagaa

SEQ ID NO: 207078 - DNA, 380 bp, Homo sapiens
agcaagatggaaataaggccgatggaaaataaacatcagtttctatttaaaacaatgatattcgggtctgtttgcaatgtgattatttcatgaagtttaacagaattaccacatggcactgctctgagatgtgaagctgttttctacattttgggagattaaaaaaatgctttcccctaatatttcgagctagtttgaaaattataaatgttctcctttctttccaccaaagtgataaaagaaccaatgagtatacattgggcttactcagcatttattggttgtagttgaggcgttttgaggagatacagaggtgaatcctagtgatacaaaagccgtgacacagggtcaggtgcaatacattctgtgagggtcgcgca

SEQ ID NO: 207079 - DNA, 346 bp, Homo sapiens
tttcagcagagttattgaaggagaagtcaaggagaggagaaggagaggagcagtgaatgttgtcgtgaagaggtgttgtcttgaaatactgtatttttttcctccttttcttttctgaacattcttgtgctgacctttcctctagtccaacagaggcattcacaattgcctgtggagaattaggattgtcgcagcaggtcagcaaggagaaagtcatttttaagattaaatttttaaaaatgttttgaaacttccaaaataagttcttgaacacctatggagaggctttgaggaaagttaagggaatgattttataccacaaaaataaatggaaaaagaataaaga

SEQ ID NO: 207080 - DNA, 477 bp, Homo sapiens
ctcttgataccactcttccctcttacaggagaaagtgaaatgttccaaaaagtcaatacctattggaaagatcctcctctcctggacaagatggcaaatgaatcactctgaccaccaggaaaatctctcagaggttccacaacatatggagtacagtacttgtggggatggttaataagtacaaacagcagctgggggctgggcgcggtggctcaagcctgtaatcccagcactttgggagcccgaggtgggcggatcatgaggtcaggagatcaagaccatcctggctaacacggtgacaccctgtctctactaaaaatacaaaaaattagccgggcatgtgtgcggccgcctgtagaacccagctacttgggaggctgaggcaggagaatggcgtgaacctgggaggcagagcttgcagtgagccgagactataccactgcactccagcctgggcgatgagcaagactccatctc

SEQ ID NO: 207081 - DNA, 369 bp, Homo sapiens
cagaaacagaactgtaagtgattattttctgaaaaaaaaatcactgtgccttaaaatagttttattaaaaaattattcctgggccgggcgcggtggctcatgcctgtagtcccagcacttgggaggccaaggcgggtggatcatgaggtcaggagtttgagaccagcctgaccaacatggtgaaaccctgtctctactaaaaatacaaaaattagctgggtgtggaggcacacgcatgtaaccccagctactcggaggctaaggcaggagaatctcttgaacccgggaggcgaagttgcagtgagccaagatcgcgccattgcattccagcctgggcgcgagactgagactccgtctcaaaaaaaaaaa

SEQ ID NO: 207082 - DNA, 234 bp, Homo sapiens
tctcttgacattatctttgaaggggcagttttaattttaatgaagtcaattttatcaatcacaaaagtttcatagatgaaactttcatagttgtactttagctttacagtaagtattaaagtcaggttgcttagtttctcgttttcatttctgtttaattcctaggttttacaccattatttgttgctagtatggagaagtataataaatgtttctgtattaatgttagagata

SEQ ID NO: 207083 - DNA, 425 bp, Homo sapiens
ttcatatttttttgtgtagttatattacagtaaaaggaatattctttagttttgaaaatcttacatataaaagcagttttctgacgaaaataaagttagtagctaaaaagaaaaattaagaatcccactgagtagtgcaaaaaacatatgtaacagatgtacacatatgactcaaggaaaaattttacaatgtgtcaatgaaacagctaattcttcagttctttttaaaaatttggtttcctgttggttacctgtagccacaacttgctgttcctttaaagagctctctcattattatagagctagctgctttgtaatttacacacactttcaaggtgattttcccccagggtcaagactgttttcccttggaactggaggcaggaaaaaaataaaatggaagaaaaggaaaaacaagaaccctg

SEQ ID NO: 207084 - DNA, 349 bp, Homo sapiens
taggtgcaagtagtttatttgggaagtgatcccaggaagcacaaaaggtggggtgggggggcgtgctcatgagtatgttactgctgtgggtgacgggtggctcggtcttgctgaggacccttgagagaacacaaagacgacccctcaacattgtcccactgagagatggggcagctgaggtgtttacctttcctctcccatctttcactgattgagaattgtccttcggggcataaaatttcaggtattttcaaaatgccatgcaggtgggctaaacaagctcctacagcccctggagaaagccaccgagaggaaaagcaaagaacgaggagttttggggtgggaagct

SEQ ID NO: 207085 - DNA, 261 bp, Homo sapiens
taaaactattgtgctacaaaggacacatcaagaaggtgaaaaaacccacagaatgggtgaaaatatttgtaactcatatcaaatatgggactttacaaaaagaactctacaaaagacaacacaattaaaaaatgcacaaagaacttgaatagacatttctccaaagatacaaaaatggccaaccagcccatgaaaagatgccattagtcagttatcagggctacgcaaatcaaaaccacaatgagatactacttcccaccc

SEQ ID NO: 207086 - DNA, 1093 bp, Homo sapiens
agcaatctcttttgcaacatgtcctctgggtaactccattgcgtagtggagtttgaaaaccactgctgtggacaaacaacctaagtccctctaaggcagtctggcactgactgtggtagcccgttaagtgtggctcctgcaggaccatcccttgttcaccctatctattaaagtttagtggcagatgagaagataacaaatgatagggtacaactttgtatctaaaccataatccgtgaaaaaatctattttcagtcttctaattagaagatacttcactcaaatttaagctattctaaataataacattttcctgaagtaagaagacatagagtcaaaggaccaggcaatcaattactaattagtggttagttaacaagaaataaataaaactattatcagaatgtcatttacataggcaaagcatagccaggtaggtaggtcgtattagaaggactataagatggataactacaaatctattctgtaacactagaaattataaaaatgacaaaaatttaattatcaaatggacaaatattgtaagattccttcacagtggtttatcttcattactggaagagtgcttcagtacaaactttccaggctcagtttggcagaatttatcaagaatttaaaaaatatggccactgacataataatatggttaaacaatcatcttaagggaatagaaatctaagccaagaactaaagaaccaggaactgaaaaggcaaaaggaactaagtgatggaaggagcaagagggagagatgtgagaccttgcaccaaaaataaaacttaaaacaacaacaaaaagtatagatagaccctgttacctgaatatgaacataaaggaaaagcaacagtcaaaattttgtctggaataatggaaattttgaaaaaacaggagagtaagaaaaggaaactaattttatagaaagaatgttaagtttgattttgggttactgaaatgacagcaggccatggaaatgaaaggagctaagtagcagagggaatgggtgatacgaagttttagatggagtggcttccgagtcatcaaataaaaataatagttgagatttcagaggtagaa

SEQ ID NO: 207087 - DNA, 586 bp, Homo sapiens
gacaaattacataaacttgtactcgcagaaaggtttgccactttgtggcacagagccatgcagtaaggacaggatagcctccctaaagcgtatttccttccttattggcagtctgagaaaaacctggaataggaccatatttgataggtttggcctaaaaaaatagtaataatcgtccattgttctccctagtcttctcattgtccttagaagctataatcagcagcctcagaagcatttatatttttcagtttctgtaattaatacatactcttataatcaggaaatttcatatgaaataaatgggctgcttatataaattactatgagagctgttcttctcagcatgatccgtactcactgattccctccctgttgccctaaaggaataactatctgcctcttgtgttatggaacttttgaggacctcttgcagtttttagttagctcctgtttatattaaacagtggttttctgaggcttcaaaagtgactgatctcaggcacagtgaattcaggcaagaacaccatgaaaaggcataagaatagaagaagaatagctttttctagttaaagagaagagagaa

SEQ ID NO: 207088 - DNA, 354 bp, Homo sapiens
tggttcttaaatgtttgaagatcaacaggttatggtcaggaaacttgggttctgggtaatttctatacaaatcagaaaagaacttcccagaggttctacccttgatctatctggagctggaaggctgaaagcttacctttccctaaacatagacaattatgggaaaatttttcattaactcagagtttgagagttctaagttctgattctgactctatctgttatatctgttcatccagtctctgtcttcatttatccatagaatggtaataccccaactcagaagaaaaagggaactcattcaagcgctcaggggggaaaaaagatcccctgctgataaaaggcattcagtgg

SEQ ID NO: 207089 - DNA, 187 bp, Homo sapiens
aggtcactttttacccctcaatatgtcttaatgggttgaggtagagagaagcgtgggtaggtatcaatcacgagagcacacaggctaaaagaaagaaaaaatgagctgggacatctaagttcaacttccacttcctcctatacaagctgggtgaccttttcctatctagaaagtgggagaagtagtt

SEQ ID NO: 207090 - DNA, 917 bp, Homo sapiens
caagattatgcacctatacaaataataattatattccaactctgaagagatgaatctgtctgacatgtagaaaaccaatatacaactcaagagtagagacaaatgacactgagatgagaaaagcaaaagtactttatatgaagaaacctaaattaggatggtaacagtctcaaatattctagcttcacagtatgagaaactaaaatcatgtcactggagtttaagtagcttcaatgctgaatcccaccacctgatgtggcaagtaacaacctgcccttgcattatgatgcctgtgtcccagcagggaagaaccagtctggtgggactgaaggtgggccacaggcagccttcaacaactccatgccagaggtagctcaggcctgttctgaactgttctaaaaatcacatcacttccaatttaacattcaggcacaggctgaactgtgtactaaacttaatgagcatagaccaagaatctgcaataagctctaaccagctgcttcaaagactataggtaagtatgttctcactggcagactcatttgtgaatcaaaattcctctgtttcagattcaactgtttttgctcaacatgtgacactgctaaaacttaatacatttccacccagtataatcattttccaagagtaattggagaatgttggtaaagtactcagaaaaataaattgtacttggtaatcaaattatattaaatttgttatgataaggaaggcaacataaataggctacaagatccgacacaagatcctcatgttttagagaagaatcttctcagttggctcaatggaccaacctcaaagtactaagcactttcaagaatgcacactaaatttgccttcctctgtggtgggattagctctcaatacagtggtgcaagatacaagtccttatatacaac

SEQ ID NO: 207091 - DNA, 375 bp, Homo sapiens
atcaatacctgtttttcattgacttaatgataccctcttcttctgtgttgctccttttctgcttcctcttttttcttttcacctttttcttatctcgtaatttggtattcattcccatcattttctggacacttttttctcaaatatcctgtcaagttcaagggagtatttgctgaagtcattttgtatgttttcactgagggtgatcatcactatatgtcacccctccattttcaaacatttttgcctaggtttttgtaatatcactatatatcgtcccttcatcttcaaacattttttccgtagatttttgtaacaattactctcatttttctaaagccattttcttgactttcttctgttttccttctttat

SEQ ID NO: 207092 - DNA, 345 bp, Homo sapiens
tttcaggctgtgcccactcagacccagccctctccaaacccttctcatatccaccacttgcacgcagctcagtgcatggaggccctccatccccccacctcaccaggcagctgcctgccatgctcagacccctctgcccagccttgtggatggcctccttgtggaacgccatcaggctgatgaaggaaggaggccttcggggaaataggaaggaacggtgtgcagcccaggccccactggccagcagcaggcttcgggcttgttccatggccataagcaacaagcggcctcctcactgtcccacggggcctcagcactgcatgaagctacaggttcatccttctc

SEQ ID NO: 207093 - DNA, 181 bp, Homo sapiens
tttgtcatctagctggggaggggaacagtcagttgggacggggtttagaggagggaagatcataggcaggcctgatcggggaaggcttcctgcaggaggaggtatctaaatcaggcctatgcccatgccatacacctccaccactcctaaaacaacattctttcctttagggctatgcaaa

SEQ ID NO: 207094 - DNA, 145 bp, Homo sapiens
ggaccacaggcaaatgccaccatgccaggctcattttttccacacccatatatatatttttaatgacagggtcccactatgttgctgaggctggtctcaagtgatcctctcacctcagcctcccaaagtgctgggattacaggca

SEQ ID NO: 207095 - DNA, 613 bp, Homo sapiens
gaaggaaggaaggaaatttacattctctcctaggaatgtgtatttctagtggtagggcaacccaccactaatacacatgaaactggtcatgtaaacatgctcttctctttctctcccccagggaaatattgtctgtgaagcaagattctcacatttcttttcaaatcctcttcccatgggctagcccctctgggaatgcacaggtccctggtgacccagctggccagctagaccaaagccactggctgcctttctttttgagcctggatcttcaaaggagatccacttacaaactgtcttagtccctttggactgctgtagcaaaataccataagctgggtatttcaataaacaacagaaatgtatttctcaccgttctggatgctgggaagtccaagaccaaagcaccagtagatttggtgtctggtgagggcacattctctggttcatagatggtgggtttttttggtttgtttttgtttttgtttttttgacacagggtcttgctctgtcccccaggctggggtgcagtggcacgatctcagctcactgcagccttaacttcccgggctcaagcgatcctcccacttcagcctcctgagtagctgggact

SEQ ID NO: 207096 - DNA, 592 bp, Homo sapiens
tcaggggccagctagaccacccagccctccttgattctctaagagtctccttccccttggagttttaccaattactgctattctctagacagatctccaaagaccaccttcccctctgactctcaacctagggtggcatcaatgggctgccaatgcctccttcccacagcatggcctgcatcatagccagtcaggaaatacgtttcagagcatcgctggcacttgagatgcatcttgtttgcctctgtagtttaaaggtgagctgagaactcctcccttagtatgacactgctcatgtagataggatagagccctaaaatgaggcattgctaaaggatgagacagtagactcaaagcttagagctcatgagagtcacttgggaacttggcaaagtttgtcatcctgaacccccacaccctgagattctgactaaggacctaaacctgtgtttcagcaagtactccaggtgattaggatcgggtagtctgtggtccacattttgagaaacagtaggtgagggcagtggttctcaaactagcagcatcaccatcacctgagcacttgttagaactacaaagccctgagctccct

SEQ ID NO: 207097 - DNA, 557 bp, Homo sapiens
aaagtgctgggattacaggcgtgagccatcgagcctgaccttctccttttttctttaaattgttatgttgttgtgaactatatcgctgtgacagtgtattaaatttgtatgtagagtataaagaataataaagctctacatttattaagaaatagaacattaccattaccttaaaagccacctgagtgcctctctcatttgcattttcctccctcatcaccatgagtaatatctacctagattttttttttttttgagatggagtctcaattctagcctgggcaacagagtgagaacctgtctctcaaaaacaaatcaaataaaatagaattcttttgtgaaaacacttactctattaccttcagagatgcagcgtgctcctacttaagacttttacagcagctcatttcaagttaagttatgtccatttcacaccacctgatagtgtgctcatacaggacaaaggaccaacttagtcacctgtatctggtgcctagtactgtgcacattgtagacacttaatgttgctgaatgaggaaacctttttaatccttcaa

SEQ ID NO: 207098 - DNA, 459 bp, Homo sapiens
aagctggagtgcagtctgaaatctcggctcgctgccacctgcacctcctgggttcaagtgattctcctgcctcagccttctgagtagctgggattacagatgaccggcacaacgccgagctaatttttgcattttttagaagaaacgggtttcaacatgctggccaggctggtctcggactcctgacttcaagtgatccacctgccttgacctcccaaagtactgggattacaggtgtgagccaccgtgcccagtcatcaattgatttttgacaaaagtgaaagggtaattcaatggagaaagaatagtttttcctgtaaattctgctggaatagctggttattcctatgcaaaacagtgaacttagattcacaacttatggcatatacaaaaattaactcaaagtggattatatacctacatgtaaaactaaaactgtaaattccctataagaagaaa

SEQ ID NO: 207099 - DNA, 268 bp, Homo sapiens
aacctccagaataacaaaaatgaatgtctatcttagaagcaagaaacagaaacacaatggacaaaaagtaaaatactcaagtaattcgaaaggtagactttatttttattttttatttttgagacacagtctcactctgtcgcccaggttggagtacagtagcgcagtcttggctgactgcaacctctgcctcccaggttgttcaagcaattctcaagcctcagcctcccaagtagctggtattacaggcgtgcaccaccacacccag

SEQ ID NO: 207100 - DNA, 258 bp, Homo sapiens
acccctcagcttgtctaaggacacgggtgcagatagcaggagacccctacagtgagtattcagtgctataaatttccctctcagcactttagctgtataccaaataaatcaaataaataaatcgaataatcaaatcaaataaatcacttctttagctgtatatatcaaatcttgatatatttacatttcattcaattcaatgtatttttaaatttctcttgagatttcctcttcaacccaaggattatttaaaagtgt

SEQ ID NO: 207101 - DNA, 279 bp, Homo sapiens
gctgcacatattcaataaagggagagttgtttttaaaaacaaatatgcaagaaataatatgcattgatgtagtttttctaaatcctgatacatagtacttagcgtttcttagagctgtaggggtaggtgtatttaactgatatctttaatttgtgaaaacttttcttttggaaatttttttccccattacctatttttcctccccccatcaaaaaaagaaaagggtaccatcctccgctttccatttgtggggagtgggagattgattaagatgccttt

SEQ ID NO: 207102 - DNA, 603 bp, Homo sapiens
tgccgattcaatgtgtccaaactgaaaactcttagtgagtgaaataaagttgcctgcactgtgcagaattgaattctgtccctcccagtgcttacttcatttcccttggcataaaaaacatagtcatagtgtccttgaactgcttgtgatacattttggtgttcaagcatactagagttaatgtttcattatatgtgctaagcattttcttttcaaagcccgaatgttgttctggagcatatcagttacgccttcttattgtttactacttatattatttcttttttttttagacagagtctcgctgtgtctcccaggctggagtgcagtggtgagatctcagctcactgcaacctgtgtcccccaggttcaaacgattctcctacctcagcctcgcgagtagctgagattacaggtgcatgccaccatgctcgctaatttttgtatttttagtagaggcagggtttcaccatgttggccaggccggtaatgaacacctgacctcaagtgacccacccaccttggcctcccaaagtgttgggattacaggcatgagccaccgtacctggcctattctttcatttttaatgcccatataagaat

SEQ ID NO: 207103 - DNA, 346 bp, Homo sapiens
  misc_feature (1)..(3): n is a, c, g, or t
  misc_feature (7)..(8): n is a, c, g, or t
  misc_feature (32)..(32): n is a, c, g, or t
  misc_feature (65)..(65): n is a, c, g, or t
  misc_feature (134)..(134): n is a, c, g, or t
  misc_feature (137)..(137): n is a, c, g, or t
nnncccnntttactgtcggcatcatgattggngcagaccggtgagggactaaggggatatgagangtgagggggtgtcaaggacaagcggtgacggagatgatgctggccactggggtggggcccattacaggnttngaccggtgagggactaaggccaatcatgatgccgacagcagaaggaaacagatttgcatgcataaggaccactctgtcagccttatggaggaagcctctgttcgggaggtgggtacaggagggcacctagggccccatattactccactacatcacagtgactgcagtggcttgggcagagtggtcgcagtggagctgaagagcaggag

SEQ ID NO: 207104 - DNA, 371 bp, Homo sapiens
taaaggtcttatccttaccctttttcttttgctttgtcctttctcagtagttgacttcacctatattcatgtttccaaatgtcatccctgggccagtaccttttaaatctctatttttggcttcctcgtctcttctcagttccagacctgaattcccaactggtcgtctgtactagaatgttcaaaactgaagccattatctttgattagtttcccttctttgttccttccctccccaacaacctgttctcatgtggtggttggttctgttaatatgaccaccatccttctagtcattctaactttacattactcttttatttctacctaaatatctgaatagctactcatatatcttttcctgtttccat

SEQ ID NO: 207105 - DNA, 515 bp, Homo sapiens
ccagtggcaagggaatccagaaacgttttctttttgcctggagatgctaatccttagcctaagaataaggaaactggtccatgtaaggactgaccatcctttcacccatctgtctgcccacttgtgcatccatcccattttatccatccattcctccagttgtggacaccagatgactttcagctccccctaccccaaccagaactttgctgcaatggccattcttatatgcccctatggacccatgggacaattctctgggatacatgctaggagcagaattgctgaatcatagggaatgcatgtgcttagcttggctaagcaatgttggagtaaaagcttttggttttgcatcttctcagcacttctagggaggcaccaaaagggaggatggcactgactgagcccacctgagatagctcctagaccccagccctctgtgtcctcagaatcacacactgctgctcatcacttcagcttcccgaagatcatggcaatagcagcatgcctgtaac

SEQ ID NO: 207106 - DNA, 327 bp, Homo sapiens
tatcttacattatattaaatgaaaaaaggcaaggccaggcatggtggctcaggccaataatcccagcactttgggaagatcaggcgagcatgacaccatacctagccttacatgctatttttagcttaaaaaatcggtcacttttgatgtgctcacttcacctccttggatatcggcattgtaaagttaagataaatcctagttattttgttgcctctgagctttcatgtttgagaaagataagaattcttttcacaacaaatctgatagtggattaacatccattctcatggttacttttatttacttcttaatgtttatagagtt

SEQ ID NO: 207107 - DNA, 822 bp, Homo sapiens
gtttaattttggggtgggatgggaattcttgaggtagccttggaagtcacttaccaagagtagtgggcacatatgcaatgagagagcaaaatagtgtgcagggatcactgaaaagaatgggagagagaggaaggagttgcctgaagaccaagggcagaaatcccaaaaggcaggcagagcccaacgaagaagggcagccagacagccctgaaagccgaatccatggcacccagatgatcttctccaagggtcatccccagtccagatatggaaggagcagggggccaagccaaggcgggatctgcacgaagcagcagcagggccacctccgggcaagagtgtgactccagggagtcagctcagctgacaagacacagaaagctgcccgtctgcatgtcacgtgacctgtccacacacagtcctcctttaccaccacgtccttggcgtacccacatcctcattgcgctgaggttgtccaagctaccaagacttgaggcagggattctcacagcaccgtccagtgttaaactgcccttaaggtcactattacagttatgatgagccctaacagtatgttagggataaacagatgcccatctgattccccagtgtccagacacctgggctttttcctaactagaagactcggagttcacccactgcctacttcccatgcctaggattctccctgggttccctgttctggtaagatgccaacacgtccactaagtcagattgaatctctcaccacctgaaggccttcctgaaaccatcggtgagccgcttgcttccctggctactacttggccttgcgatatgcaa

SEQ ID NO: 207108 - DNA, 653 bp, Homo sapiens
cttgtaccaaaatttgattatgaaagtccttgttgacatggcttgtcaactgacagccgttaactgggtgcttaagtaagcagcattttcttcagatgaagaatttctttaatcttttttcctgaggtgaggtgggactacaggaagagaagcccggttggcagctttttaggcctcagaggaggaagggggctgaaggtctgtgttttgtttacatcaactttccatttcatgtgttttgctcctaccctttgccactctagagcctggtcccctaagtccagagcctctgctaatgtctcaggagacttcctttactgtcttctgtgttggtggatgcagggacctggagagcagtgctccatattgaaaccttcaggacagcaaggtccacagctctttcccttggtgtcaaccgctgtctgcactaacctctctgtctttaatctcttagctgctctcatgccttttaaaaatttttctcccaaattaaaagtggctttagtttttctgtagtgaaaacaatcagtacatgtttatacatacactcatgcagttttatgtaagtaggactttggtatctgtttttctgtaactatacattatgtattatcaaggagatctaagctatatgcataatgatttttgtattt

SEQ ID NO: 207109 - DNA, 415 bp, Homo sapiens
aatattctcctgttgttctggggttgaaggaacaagagagtgaggacagagtccaaaatgagagacaacagtgagagtaagggagacgcataaatgaagttagaggaagttttgagatagtccttcaatctgttccctcctcccacactctctgccatccttagtcttgctcaacaatgtttatcattttggaggtaacaaaaaccactagcttatagtacttatcttccatctctcactaatcaatgtagaacatcctatttgctgcagtctatcttcttcttgactatcccaacctggttattttccattccagtatcctttatagcctcatctattgaaacatttctttccataatgtagtcatcaggttccagaatatctttcaaaataacagtgaatatgttttaatatt

SEQ ID NO: 207110 - DNA, 360 bp, Homo sapiens
gtttagactgaggtactcaacacagatttcctaattcatgttactaagaggcacccttaaagtgctccatttccatagcttggtactccaaaaaaccatcctggtcccactgccctgtcctttcaaagaagcataatggccagctattctggacgaagagagagatctttggagattttttcttctagaagattaagaaatctttaagacttataggttcagactcattacagcagtctagattgcttcaaaatatgaaatgaggccgggcacggaggctcacgtctgtaatcccaccactttggcaggtcgaagcgggtggatcacgaggtcaggagatcaagactatcctggctaaca

SEQ ID NO: 207111 - DNA, 523 bp, Homo sapiens
gtgtctcttgcttttggaagcaactccatatataacaaaatgactcacagacccttcctgtttgcagtggtgaaggaatgtctccaatcactatcaaaatgactcaatcactatcaatctgtttgcccaaaaattgagggagaaaggggacagggcttaacaaaatcttactttaatccaccagaagtattactggactaatcagaatggaagagaacctattttcctaacctaagcttaagctctagcttaaacttttcaattcctaaccagcaagacaaaatataagcatttaacccgatcattgtttaatgtttacattttgaatatttctatctactttctctatctatactgagttctaaggttctgagggacaatgacaccaatctttaactaactttatgcagaaacaagaatattctcaaacataaacagcttattagaatttatattaatgatgataagaataataaattatctagagagaggaacagcagcttttcaaggcaagggccataat

SEQ ID NO: 207112 - DNA, 140 bp, Homo sapiens
ccatagtttgttcattcatcttgtgattagtgacaccattgttttcagtatgtatttatttatgtattttttgagacagggcctccttctgccacccaggctggagtgcagtggtgtgatcttggcttactgcagcctcg

SEQ ID NO: 207113 - DNA, 761 bp, Homo sapiens
tgaaaagagtatcactcttggaattcttaacacaaaacattctgtaaaaatctcattgattccaatggcacacattaaacaagcttaactggactagatcagaatgacatagtaaaatgccaaggaaggaaaatgatcatttgctgtcttccagtgagtacgtacagccatccatcaattgctggataaaattactttattgatgtcccatgatagcctggtaactccatgaaaagtgtgaaaactcagtgaaaagtagttttatctacatggcaaacaaccagcctattttttttttcctggctaaaaagtaacctcttcttacatgattagaactaatagttggtcaactttaataaaagatacatacacgtgcacacacagatttaatttgtttgtatagagccctagcatttgctttgaaaaaggttacctgtttggggttgtgggtcatctatttttcaaaaaccttaagccatcttctacagtttccacatttcgtttctgacattggtgcatgaattaaaatgtgtttcctaagcaattttaatagatacttctggacacatttatatcttatggatatatttcattcatatctaatttgacaaagttgtgttagtgacttgtctttatcaagtttttctaaagcattcaactgatttttcatggaaacagcagcttctttttcagttattttatgcatttatgtaaaatctcatttaactacatgatttcaatggctaatgttgttagcataa

SEQ ID NO: 207114 - DNA, 693 bp, Homo sapiens
tttcctagtttccttgagagttatgtttcattttgcttgaattttaattgcctgcttagttaatttattttcacttttgatgatataggcattatagcctgggggcttctggatgtgttggccctcctcaaattatatgcagaattcttcatgtgcatttttttttagggagacagtctttgtatcagattctcagagatgtcaaaccctaaaagggataaaattgcttttatcgtttgagatgtcaaacgctaaaagggatgaaatctggcactagatttaagttgattacatcctacaagtcttgatgcttaatgttttcatttttatttttatactcttggttctttatttcttttttgatccgtttttgttaaggaaaattctcttaaagtctctcacgctgtaatattctcctatgctacaacataatcttgcattctctgaaatcttcaaaacaaggtgtgtcctatttcatgggcagtgttgcctaatataaatagaatgtgaaccatacatgtaatttaatattttctagaagccacatttaaaaagtaaaaataaacaggtgaaattaattttaatatattttatttaaccaaatatatccaaattcttattccatgtcaacctaaaatcaatatgaaaattatcagtgaactatgtagcattcttatttttgcagtaagtctt

SEQ ID NO: 207115 - DNA, 407 bp, Homo sapiens
tattgtgggacttcgtctctgtgactccgtgagccaattcctcctaataaatctccttccgtttatcctactgattgtatctctggagaacactgagtaatgcaggtacccttgggcagtaaacaacctgtcaaacaatacccagcagacttggaaggcacagtgacttcacagagagaagattgtactggaaaggcctagaattgagggcaatggaagggttttctttctcccctctaatgtataaccaagcttcctactcaaaccctatgtgataaaaaaggagaatcaagcggaacctgcatcagtatctaatcaacagacttttttccctcctagaaagggcatttaaatatcaattcaagctaagaaaactgagaaactccagaataaatgctttggcaaaa

SEQ ID NO: 207116 - DNA, 236 bp, Homo sapiens
tacattatctgcatgtctcgtattacttcaacagaaataaaaaatacatttggaaaaagaagaaaaaagaaatgctactgagcttcgttgatttgtatcctacaacttcactgaagttgttgatcagttctaatagttttcttatggagtctttagatttttacaaatatatgatcatatcatttgcgaacaagaatattttgactctttcctttccaatctggataatgtgatag

SEQ ID NO: 207117 - DNA, 639 bp, Homo sapiens
  misc_feature (559)..(559): n is a, c, g, or t
tgtatgtttccatttcttcataataaaaaaaagagtttaaaaagagacagaagtatccagatgtgtccactgaaacttggcgctcagcaggccaaatgcctttttgaggtccccaaatgcaatcggaatgaaagctcgttaaaaggcagtttcaacacccccacaggatagaccttgcttttcaacttggaatgactattcaggtagctgagtaaaaagtgattttgctgatttctacgtaaggaaagcagactgaattatgttacagcttgtgttctgattgtttttatgacaataggctttctagacatttctgctctgctacaatacaggagttgggacctgaaggggcttgtgcatgtgaacagaacagggaaggaaggagggctactggatgccatgacttatgtccctctttgtgtaaatctggagaaacacaggtttacagaaatgctttatggtgcccctggcaagcaatagtatgtatcttcaaaaattctatatggtgaaaagtatcataaataatttttagagatacctgctgaaatagttacagatnaaacaatatgatacccaggatgtgcttcaaaacagtctgtcagccaggaggagggagcatcggtaggagttgagactgtg

SEQ ID NO: 207118 - DNA, 378 bp, Homo sapiens
tgaaattagtcaatatcctgttccttatcaaacttccaactctggtcttagcatccattgactgaatcaagtgcctttgtgtaagtttccacatgatgagtgtctatttccatcattggttctatttttatgagctggtattttactataagaaatagcatattattttctatgcttaaaccactgcaagtttgaccctttcaagctggtttttgtgtccttttgacatattcccattgttcattgagcatttccttattttctggcataagaagatgttccaagtgcaacttgtatattacctgtttcagccctggaatcagacattttcctaaggatccttggtttctttgaataaaggatactatttagaagcca

SEQ ID NO: 207119 - DNA, 284 bp, Homo sapiens
gtccaaacaatttgaaatcttatggtacttatagggattcaaatctgttcctccattactttttggccaaattcaagaggagaaatctctcaaatgaatccaagctggctgttataggtgaaaagaaagtcaagatgcgccagacttttaaaagcttgcagtggttgagagattttgttatttatacactttttattttggctgaaaatatttggtttttgtttaagaattaagagaaccgtgtaggctacaaaatttatttatgtgcgaatcccagagggttg

SEQ ID NO: 207120 - DNA, 307 bp, Homo sapiens
tgccaaactgtcagaagtcagtgaagcaaagaatcgaaggtaaaatgttgattcaaagattgtctcccctaaatccttcatttctttctctgaaatggaactttggaagccatttatatagattagtctgacagcctttatatttgcatgtaagtttacttgcatccttagacttggctttatgcaaaaagaaaatttttattcgttatattgtatttcatctgtctgatttccctggcacattaagatggtcctggtccctcaggatactttttcccttaataaatgtcatatgtaaataaaggca

SEQ ID NO: 207121 - DNA, 444 bp, Homo sapiens
tgccaagggatatgatagtaaaaaaacctacaacacctctgccctcatggaagttaccttctacaagggggtagccatttaattaatggggaaagaaacaaatacaaaggataacttcagattgcagtcagtgccatcaaggaaataagcagaggatagagaggtggaaaggcactttagacagagtggtctaggaaggtctaggaaggggagctgacatttaggtagagatttagtcccaagagcaaaaatctgactttgcctctggagggaaaattctggacttagcctcaggcagcagagttctagacttagcctctggaggaagtagcagaacgtggtgtctgggagctaagttcaggacttcatgtctggaaaaagatattggggcttcaattcaatttttgcagcaaagtttctgactcaatgtgttaattaaaaggg

SEQ ID NO: 207122 - DNA, 501 bp, Homo sapiens
atctcattgttcaattcccacctatgagtgagaatatgcggtgtttggttttttgttcttgcgatagtttactgagaataatggtttccaatttcatccatgtccctacaaaggacatgaactcatcattttttatggctgcatagtattccatggtgtatatgtgccacactttcttaatccagtctatcattgttggacatttgggttggttccaagtctttgctattgtgaatagtgccaaaattctttcaaattatggtcagatgtataaggatatgtctttccaccatgaatggacattacaaatcccatgcctctgcgaaatgcaacaaaggctttctttacaaactctaatataatcaatcccccactcctgccaaaaaaaaaaagcttatagtgaaaagttacagatgtcaactttaatacaaactaaacaaaccatcaaaccattcatagaatattttgtcagaattatctgctttaatttcattcacaagc

SEQ ID NO: 207123 - DNA, 522 bp, Homo sapiens
tttttttttttaagtaaaagcactccacaagtagatttcaaccaaaagtgagagaagggcaacacaacgaaattcagaacaagatgttattctggtaaacttttgggaggaaattattaaggttattaaggtaaacttttgggagaaagtgactcttaaaagtaaatttaaagtcttttgaggaatagtattattttaccaaaggtatagtctcttaagtacaaaaaaaatactttagaagtcagcaaaagagaaaggtttttaacaaacgtactatagtttaaacattacctatcatcaccgttcatcaaaatcatattgaaatccagtttcagtatagaaaagttttaactgttatttcataaaacaatctgctagtaagttttttaaaaaaatttaatatataacatttcaatcataaaatggaattaaatacaagtatttacaaatcttagttgcctgagcaacagaagtgattctagaacagctgtgttcaaaccttagtgtacttgttaaaatgca

SEQ ID NO: 207124 - DNA, 612 bp, Homo sapiens
  misc_feature (448)..(448): n is a, c, g, or t
ggcggggacagcgtccggaggagggagccgcccagacctagcccgggtggggcgaacgaagagcgggcgtggtgggcgcctgctagctccggctcgcggtgttaggccttggggacatcgctcggggacaggagagccccgggcccccgccgccccgagccgtggccgggaaggggaacacagtccatgcgtgcggcgcccgacagcctctccccgcacgcccgagccccagtgcaggcggcggcccggcccctttgtgcctggagtgtcacgcgcgggcgctcctgccgccgcgcctgggagaggcctccggcaccccgggcccctttccaagcacaacagcagccctgccgcggccccgcgctgacccactttccctcctgcctcctcagcccgaggccgagaatccagcggccgccgccaagcaggtgcgagccgtcgggcgggngcgcgcgggaggcggagaggatgggcccctgaaccaccccgcgcgccccacctcagcctcccggggcgagccaggtttccggggcgggggccgcgaggaggaggaggagggcaaggcgggggaacgggagggagaggacccggggagggggagggggaggcgga

SEQ ID NO: 207125 - DNA, 360 bp, Homo sapiens
aatacatgtggggcttaaaacctagatgatgggttgaaaggtgcagcaaatcaccatggcacgtgtatacctatgtaacaaacctgcacgttcagcacatgtatctcagaacttaaagtaaaataaaataaatcaacaaacaaacaaaatagtacctcctataaactgtgaaagaatgaaatgagatggaaacgtatctaaagcattcaacacagtgtcagacatgtactcagtgcttgctaatgctagcttatattattctgatgaatcatattagcaaatgaaaattcacctattcactgaatcttttggggaccactactatattctcggctaaataaaagaggcaaaatgattaaa

SEQ ID NO: 207126 - DNA, 888 bp, Homo sapiens
ctgggttcaggtgattctcccacctcagcctccctagtagctgggattacaggtgtgtgccaccacgcctggctaatttttgtatttttggtagagacagggtttcaccatgttggtcaggctggtttcgaactcctgacctcaagtgatccactcgccttggcctcccatagtgctggaattgggcgtgagccactgcgcctggccccatacccttttttttttgttttttttttttaacatattctttcttgtcatttacatttgtgctccaacactagagttgagtagttggaacagagattgtgtatcctgaaaacctaagctgttactgtttggccctgtacagaaaaagttggccgactcctgctctagccacttaaggtgtttttagcctagggtgggttgggtgaattgtttagtcctgtgatctgaaatcactctggctgtattgtggaagttagatttcaggttgggattggtttcagagcgaatatttagaaaggtttttatagcagtccaggtgaaagataaagagcatggagaagttaaaaaggagagaactgattaacaatatttaggagataaaattgaaaagattttaataggtgatgagatgtgagtgaaggggaaagagtatgagtgtaggatggcttccatatttttatctacaagtacattcttatcaacatataaatatatttattcaaaaatattcactgaatatctctggtaagctggagtttactagaatctggagtttcgtatggagtgtccaggctagagataataaacttggaaatcatcagaatataaattgtattttgcagccataggcaggatgaggtcaccaggaaaatcattgtagatgaagagttgcccatctta

SEQ ID NO: 207127 - DNA, 875 bp, Homo sapiens
ttctctgcattccaagtttctgtgataacacatcccctaaacagcaaaaataaaggcagaagtgatctgaaggaagggtcatgaccaaagcaacgtgggcagctggagatttttgtttgctagtttttgatctttatcaaataggatagccttcgcgtgtagcgtggtgttcgtcctagccttaaggaatagcttctaagttccacttgaaatatcctttgccagcgtagactttcacactgagaatcatgcagtgcaaatcatcgcctacttgttctgcctcaggttggagaggtgggcagtgcggaggcctgtgtgtcatttcagccaaagctcaggtcaggcagtggttagtttatactgtgcaccgcccctgtgtccagggccaggtccttctgctccatagtgagggtaatcaagctcaggaggttcttccttgggccactgtgattttaactaagtgaccaagagtcctatcagcagggccaatgcctggcagaaggaaaaggggacctcttggtgctgatcattggaatctggagcagaaggattaatattttgggacaaggaagtcagaaacctttgagaggtggggtgtcctcttggggtagggagctcaccctagagagagttgaggggttgaggcttccctgggagagtgacttgtggctggcagggagagtaatgagtttgacaaaggacactgttattctaatgccaccaggtcatgctcctattttcttgtcagtgaggactaaactgaacacaccagtcttcctctaagcatcctcagagctgagaggaaaggtcccttcccccatggtaggctttagcaaatgaagacagcctgtcagtggcaggggggctacagccgt

SEQ ID NO: 207128 - DNA, 540 bp, Homo sapiens
tatgaatctattatttcttgactattttcagagcatcacttatgggataagtaccttaaactattgtcatccccattgaacagatgaggaaactatccaagtatttaaggtacttatcccataagtgatgctctgaaaattgtagcaaaagctatgaatctattatttcttgactatttattttaaaaaagccaatgtggattgattaaattgatgcaaccttagaaataggtgtcttttcactctgtacacacttagagtttcaaagtctagctcctttaaaaacttaataccaggtaaatatttatagggttttattatctaactgcctttttgtttataccttcttgttttttacccacaggaaaaggtgcattcctcagggagttctatggtttacatcttccctgggcatctgggttcctagctggctttgtgttccttgaccttgtagcctcattgtctctggggttaccaatatctttccctgacatggacccttcctattaatagcttcttcctccccttatcccccaggat

SEQ ID NO: 207129 - DNA, 862 bp, Homo sapiens
gtcggttcctggcgctctgcgtttcgtgaccttgtccagtagaaggctatttaattttcacaactgcttgaattttgacatacaagatgaagcaagatgcctcaagaaatgctgcctacactgtggattgtgaagattatgtgcatgtggtagaatttaatccctttgagaatggggattcaggaaacctaattgcatatggtggcaataattatgtggtcattggcacgtgtacgtttcaggaagaagaagcagacgttgaaggcattcagtataaaacacttcgaacatttcaccatggagtcagggttgatggcatagcttggagcccagagactagacttgattcattgcctccagtaatcaaattttgtacttcagctgctgatatgaaaattagattatttacttcagatcttcaggataaaaatgaatataaggttttagagggccataccgatttcattaatggtttggtgtttgatcccaaagaaggccaagaaattgcaagtgtgagtgacgatcacacctgcaggatttggaacttggaaggagtgcaaacagctcattttgttcttcattctcctggcatgagtgtgtgctggcatcctgaggagactttttaagctaaatgggttgcagagaaagaatggcacaatcccggtttaatgatcttttgggcccaacagggctaattttatcttctcggaatcagcacaagtgcccttaattgtgggacaactggtggctttaaaaacacctttaaagtggaggccggttgcgagcaagagagggataattggggcaatacaccggaccacgtttctccacaaagaacctgtcctcggttcagaccggttta

SEQ ID NO: 207130 - DNA, 624 bp, Homo sapiens
actagcgggttagtctccggcgagttgttgcctgggctggacgtggttttgtctgctgcgcccgctcttcgcgctctcgtttcattttctgcagcgcgccagcaggatggcccacaagcagatctactactcggacaagtacttcgacgaacactacgagtaccggcatgttatgttacccagagaactttccaaacaagtacctaaaactcatctgatgtctgaagaggagtggaggagacttggtgtccaacagagtctaggctgggttcattacatgattcatgagccagaaccacatattcttctctttagacgacctcttccaaaagatcaacaaaaatgaagtttatctggggatcgtcaaatctttttcaaatttaatgtatatgtgtatataaggtagtattcagtgaatacttgagaaatgtacaaatctttcatccatacctgtgcatgagctgtattcttcacagcaacagagctcagttaaatgcaactgcaagtaggttactgtaagatgtttaagataaaagttcttccagtcagtttttctcttaagtgcctgtttgagtttactgaaacagtttacttttgttcaataaagtttgtatgttgcattta

SEQ ID NO: 207131 - DNA, 779 bp, Homo sapiens
  misc_feature (663)..(665): n is a, c, g, or t
  misc_feature (667)..(667): n is a, c, g, or t
  misc_feature (673)..(674): n is a, c, g, or t
  misc_feature (688)..(688): n is a, c, g, or t
  misc_feature (690)..(691): n is a, c, g, or t
actagcgggttagtctccggcgagttgttgcctgggctggacgtggttttgtctgctgcgcccgctcttcgcgctctcgtttcattttctgcagcgcgccagcaggatggcccacaagcagatctactactcggacaagtacttcgacgaacactacgagtaccggcatgttatgttacccagagaactttccaaacaagtacctaaaactcatctgatgtctgaagaggagtggaggagacttggtgtccaacagagtctaggctgggttcattacatgattcatgagccagaaccacatattcttctctttagacgacctcttccaaaagatcaacaaaaatgaagtttatctggggatcgtcaaatctttttcaaatttaatgtatatgtgtatataaggtagtattcagtgaatacttgagaaatgtacaaatctttcatccatacctgtgcatgagctgtattcttcacagcaacagagctcagttaaatgcaactgcaagtaggttactgtaagatgtttaagataaaagttcttccagtcagtttttctcttaagtgcctgtttgagtttactgaaacagtttacttttgttcaataaagtttgtatgttgcatttaaaaaaaaaaaaaaaaaaaaaaaatttgtggggggcgggnnncngaaaannttttaaaacattgngnngggggggcccttggtacgggcttggcaagggccgaaggccggggggaaggtgggtcacataaaaaggcgggggggggttgaaaaacgg

SEQ ID NO: 207132 - DNA, 668 bp, Homo sapiens
actagcgggttagtctccggcgagttgttgcctgggctggacgtggttttgtctgctgcgcccgctcttcgcgctctcgtttcattttctgcagcgcgccagcaggatggcccacaagcagatctactactcggacaagtacttcgacgaacactacgagtaccggcatgttatgttacccagagaactttccaaacaagtacctaaaactcatctgatgtctgaagaggagtggaggagacttggtgtccaacagagtctaggctgggttcattacatgattcatgagccagaaccacatattcttctctttagacgacctcttccaaaagatcaacaaaaatgaagtttatctggggatcgtcaaatctttttcaaatttaatgtatatgtgtatataaggtagtattcagtgaatacttgagaaatgtacaaatctttcatccatacctgtgcatgagctgtattcttcacagcaacagagctcagttaaatgcaactgcaagtaggttactgtaagatgtttaagataaaagttcttccagtcagtttttctcttaagtgcctgtttgagtttactgaaacagtttacttttgttcaataaagtttgtatgttgcatttacctttcccccccccccccccccccccccccccccccccccccca

SEQ ID NO: 207133 - DNA, 591 bp, Homo sapiens
  misc_feature (475)..(477): n is a, c, g, or t
  misc_feature (479)..(479): n is a, c, g, or t
  misc_feature (485)..(486): n is a, c, g, or t
  misc_feature (500)..(500): n is a, c, g, or t
  misc_feature (502)..(503): n is a, c, g, or t
actagcgggttagtctccggcgagttgttgcctgggctggacgtggttttgtctgctgcgcccgctcttcgcgctctcgtttcattttctgcagcgcgccagcaggatggcccacaagcagatctactactcggacaagtacttcgacgaacactacgagtaccggcatgttatgttacccagagaactttccaaacaagtacctaaaactcatctgatgtctgaagaggagtggaggagacttggtgtccaacagagtctaggctgggttcattacatgattcatgagccagaaccacatattcttctctttagacgacctcttccaaaagatcaacaaaaatgaagtttatctggggatcgtcaaatctttttcaaatttaatgtatatgtgtatataaggtagtattcagtgaatacttgagaaatgtacaaaaaaaaaaaaaaaaaaaaaaaaaatttgtggggggcgggnnncngaaaannttttaaaacattgngnngggggggcccttggtacgggcttggcaagggccgaaggccggggggaaggtgggtcacataaaaaggcgggggggggttgaaaaacgg

SEQ ID NO: 207134 - DNA, 1047 bp, Homo sapiens
tgtttttaattttgaacaaagtacttgaagtataaagcaacttctggagcatacaaggactagtagctactacaaagctagtgttgagtaagaggaaacccaaattaactgtaacttagattttttcgttacataaaagtctaataatctggggcagggataacagctttacagtcaaggactaggctgggtccttacctcttgttgctttaccgttctcaatttacagttgcttctatggtcctagattcctgctctggctccctgatcatattaatgtgcattcaacaagaaggagaaaaagagttcagcatgttctttccctttgagaacacttttcataataagttacacattttcttatatcttgttggcttatgatttggaggctggtaaccatatgttcaacttatattttggggttctcttcctgaagaagattaaggcaactggtaagcattctgtgataagagaaaaagattaatcctatggaaaatgctttctgcttttggattgtgcactcttagctccctaatttgaacataggccatcatatcagaattaaaggtagtagattgcagttctcaatattaaagcaacagagttccttaaggtacatgtataaagcgacagttgtagaaaaggcactggactaacacttggctgtatcttgtaacaggcgcatgttatgttacccagagaactttccaaacaagtacctaaaactcatctgatgtctgaagaggagtggaggagacttggtgtccaacagagtctaggctgggttcattacatgattcatgagccaggtaagctatgctatgttatagtaaagcagtaattgttgaaatattggtggttatggttgtcaaaattttaaaaatatcattgacatcaaatgatatctgaaagtaactgttctgataagtttttttttttaatgactaatttcttgactctggagagagttccaattttatggtaaataaaataccacagcagtgaaagtaacacattattctacttggaaaataatgtaagaagtaa

SEQ ID NO: 207135 - DNA, 531 bp, Homo sapiens
actagcgggttagtctccggcgagttgttgcctgggctggacgtggttttgtctgctgcgcccgctcttcgcgctctcgtttcattttctgcagcgcgccagcaggatggcccacaagcagatctactactcggacaagtacttcgacgaacactacgagtaccggcatgttatgttacccagagaactttccaaacaagtacctaaaactcatctgatgtctgaagaggagtggaggagacttggtgtccaacagagtctaggctgggttcattacatgattcatgagccaggtaagctatgctatgttatagtaaagcagtaattgttgaaatattggtggttatggttgtcaaaattttaaaaatatcattgacatcaaatgatatctgaaagtaactgttctgataagtttttttttttaatgactaatttcttgactctggagagagttccaattttatggtaaataaaataccacagcagtgaaagtaacacattattctacttggaaaataatgtaagaagtaa

SEQ ID NO: 207136 - DNA, 408 bp, Homo sapiens
agttgagaatacttttgaatttctgttgagtatatgaaaatcatattaaaatgattcaaaacattttctttccacagaaccacatattcttctctttagacgacctcttccaaaagatcaacaaaaatgaagtttatctggggatcgtcaaatctttttcaaatttaatgtatatgtgtatataaggtagtattcagtgaatacttgagaaatgtacaaatctttcatccatacctgtgcatgagctgtattcttcacagcaacagagctcagttaaatgcaactgcaagtaggttactgtaagatgtttaagataaaagttcttccagtcagtttttctcttaagtgcctgtttgagtttactgaaacagtttacttttgttcaataaagtttgtatgttgcattta

SEQ ID NO: 207137 - DNA, 1295 bp, Homo sapiens
  misc_feature (1179)..(1181): n is a, c, g, or t
  misc_feature (1183)..(1183): n is a, c, g, or t
  misc_feature (1189)..(1190): n is a, c, g, or t
  misc_feature (1204)..(1204): n is a, c, g, or t
  misc_feature (1206)..(1207): n is a, c, g, or t
tgtttttaattttgaacaaagtacttgaagtataaagcaacttctggagcatacaaggactagtagctactacaaagctagtgttgagtaagaggaaacccaaattaactgtaacttagattttttcgttacataaaagtctaataatctggggcagggataacagctttacagtcaaggactaggctgggtccttacctcttgttgctttaccgttctcaatttacagttgcttctatggtcctagattcctgctctggctccctgatcatattaatgtgcattcaacaagaaggagaaaaagagttcagcatgttctttccctttgagaacacttttcataataagttacacattttcttatatcttgttggcttatgatttggaggctggtaaccatatgttcaacttatattttggggttctcttcctgaagaagattaaggcaactggtaagcattctgtgataagagaaaaagattaatcctatggaaaatgctttctgcttttggattgtgcactcttagctccctaatttgaacataggccatcatatcagaattaaaggtagtagattgcagttctcaatattaaagcaacagagttccttaaggtacatgtataaagcgacagttgtagaaaaggcactggactaacacttggctgtatcttgtaacaggcgcatgttatgttacccagagaactttccaaacaagtacctaaaactcatctgatgtctgaagaggagtggaggagacttggtgtccaacagagtctaggctgggttcattacatgattcatgagccagaaccacatattcttctctttagacgacctcttccaaaagatcaacaaaaatgaagtttatctggggatcgtcaaatctttttcaaatttaatgtatatgtgtatataaggtagtattcagtgaatacttgagaaatgtacaaatctttcatccatacctgtgcatgagctgtattcttcacagcaacagagctcagttaaatgcaactgcaagtaggttactgtaagatgtttaagataaaagttcttccagtcagtttttctcttaagtgcctgtttgagtttactgaaacagtttacttttgttcaataaagtttgtatgttgcatttaaaaaaaaaaaaaaaaaaaaaaaatttgtggggggcgggnnncngaaaannttttaaaacattgngnngggggggcccttggtacgggcttggcaagggccgaaggccggggggaaggtgggtcacataaaaaggcgggggggggttgaaaaacgg

SEQ ID NO: 207138 - DNA, 912 bp, Homo sapiens
  misc_feature (182)..(182): n is a, c, g, or t
  misc_feature (188)..(188): n is a, c, g, or t
  misc_feature (192)..(192): n is a, c, g, or t
  misc_feature (196)..(197): n is a, c, g, or t
  misc_feature (796)..(798): n is a, c, g, or t
  misc_feature (800)..(800): n is a, c, g, or t
  misc_feature (806)..(807): n is a, c, g, or t
  misc_feature (821)..(821): n is a, c, g, or t
  misc_feature (823)..(824): n is a, c, g, or t
actagcgggttagtctccggcgagttgttgcctgggctggacgtggttttgtctgctgcgcccgctcttcgcgctctcgtttcattttctgcagcgcgccagcaggatggcccacaagcagatctactactcggacaagtacttcgacgaacactacgagtaccgcatgttatgttacccangagaancttntccnncaatcaagaggttacctaaaactcatctgatgtctgaagaggagtggaggagacttggtgtccaacagagtctaggctgggttcattacatgattcatgaggcatgttatgttacccagagaactttccaaacaagtacctaaaactcatctgatgtctgaagaggagtggaggagacttggtgtccaacagagtctaggctgggttcattacatgattcatgagccagaaccacatattcttctctttagacgacctcttccaaaagatcaacaaaaatgaagtttatctggggatcgtcaaatctttttcaaatttaatgtatatgtgtatataaggtagtattcagtgaatacttgagaaatgtacaaatctttcatccatacctgtgcatgagctgtattcttcacagcaacagagctcagttaaatgcaactgcaagtaggttactgtaagatgtttaagataaaagttcttccagtcagtttttctcttaagtgcctgtttgagtttactgaaacagtttacttttgttcaataaagtttgtatgttgcatttaaaaaaaaaaaaaaaaaaaaaaaatttgtggggggcgggnnncngaaaannttttaaaacattgngnngggggggcccttggtacgggcttggcaagggccgaaggccggggggaaggtgggtcacataaaaaggcgggggggggttgaaaaacgg

SEQ ID NO: 207139 - DNA, 725 bp, Homo sapiens
  misc_feature (609)..(611): n is a, c, g, or t
  misc_feature (613)..(613): n is a, c, g, or t
  misc_feature (619)..(620): n is a, c, g, or t
  misc_feature (634)..(634): n is a, c, g, or t
  misc_feature (636)..(637): n is a, c, g, or t
actagcgggttagtctccggcgagttgttgcctgggctggacgtggttttgtctgctgcgcccgctcttcgcgctctcgtttcattttctgcagcgcgccagcaggatggcccacaagcagatctactactcggacaagtacttcgacgaacactacgagtaccggcatgttatgttacccagagaactttccaaacaagtacctaaaactcatctgatgtctgaagaggagtggaggagacttggtgtccaacagagtctaggctgggttcattacatgattcatgagccagaaccacatattcttctctttagacgacctcttcctaatgtatatgtgtatataaggtagtattcagtgaatacttgagaaatgtacaaatctttcatccatacctgtgcatgagctgtattcttcacagcaacagagctcagttaaatgcaactgcaagtaggttactgtaagatgtttaagataaaagttcttccagtcagtttttctcttaagtgcctgtttgagtttactgaaacagtttacttttgttcaataaagtttgtatgttgcatttaaaaaaaaaaaaaaaaaaaaaaaatttgtggggggcgggnnncngaaaannttttaaaacattgngnngggggggcccttggtacgggcttggcaagggccgaaggccggggggaaggtgggtcacataaaaaggcgggggggggttgaaaaacgg

SEQ ID NO: 207140 - DNA, 719 bp, Homo sapiens
actagcgggttagtctccggcgagttgttgcctgggctggacgtggttttgtctgctgcgcccgctcttcgcgctctcgtttcattttctgcagcgcgccagcaggatggcccacaagcagatctactactcggacaagtacttcgacgaacactacgagtaccggcatgttatgttacccagagaactttccaaacaagtacctaaaactcatctgatgtctgaagaggagtggaggagacttggtgtccaacagagtctaggctgggttcattacatgattcatgagccagaaccacatattcttctctttagacgacctcttccaaaagatcaacaaaaatgaagtttatctggggatcgtcaaatctttttcaaatttaatgtatatgtgtatataaggtagtattcagtgaatacttgagaaatgtacaaatctttcatccatacctgtgcatgagctgtattcttcacagcaacagagctcagttaaatgcaactgcaagtaggttactgtaagatgtttaagataaaagttcttccagtcagtttttctcttaagtgcctgtttgagtttactgaaacagtttacttttgttcaataaagtttgtatgttgcatttaaaaaaaaaacacctttatgctaactttcatctatcttttactaactttacaaattccccttatatctattctagggggctaattttaataaaaaa

SEQ ID NO: 207141 - DNA, 416 bp, Homo sapiens
cagggagctcaggttaccagtttcctttgtgtttttctgccagtgtgaacaggagaaatattagcctttagagatttctttacagttccttgaaagctggaggggtgaaatcagccagagaattatataacagcaaagctcatttaaagcaacagtgtctttctatagggctgtggtggttccttaccagtttttgttactaactataaagaaaaggatgctaattttgtgaataaaatagaggggcattcccttccctcattactttctgtttgttcattggacggacacaattcctagggtgttgatttaaaaaaaaaaaattgaagcctctttcaaggaagactaggggaaatcatgtacattaacctcaggcagacacggcatacttattcttgttagaagtcagaagaaaa

SEQ ID NO: 207142 - DNA, 288 bp, Homo sapiens
tcaaggaagacttaaaatggcgatgctagtccaagatggcggtgctgctgctctgccagtcatcatcagggcagcacatcacacacagcaactttttaaggacaattcggggttttcaaatgcaccatcgagtcttcgcacatccgaagctgaccgcagtccttggcccatgctagcttatttaatgaacatttgttgactgggtgcagggatgagcaagatagatcagaaactgacaaattccgaaaatatctcaagtctccagtgcaatctagtgaatttgtgaaa

SEQ ID NO: 207143 - DNA, 787 bp, Homo sapiens
cctagaagcagatgctgacatgcttcctatatagcctgtggaactgtgagccaattaaacttcttttctttataagttacccagtctcaggtgttactttatagcaatgcaagaacagagtaattcaatgagaaaggcagaaccactatgagtgagacagaccctaagcaatcatgggagctggtagggcagtttgtgcaaaccattgcccctgtgtgtggtgtgcagcataacataactatgagtcagccaggggagaaaagctaaatgtgggtaagaataaagaaaaactgattgagaagtggaacccatgtccatcttaccacctccaacttccatgtcatgagtaacctgcaggagaagctggtgtcctttgtccagagcttcatgtacatttggcccacaattcagaaaaactgaaggaagagagcctctgagaactaaaggagctacaggcctgactgtggccctgaacccacaaagtgaactggcacattagtaacagtatggacaagtgttcccaactgcctagcactctaaaccaagcttcagaaagtaaaaaatacaggtgtatggggtaccccacctcccctttatagtctgctctgtccataacaccagctggaggctttcctggggccacctgagtccaggccccaatcagatggacattggaaggggtgagaccaggactggcagggagcagttagttgcctttctagtctccctccctagccatgcacttttgcctttagaaaaatgatggggaaaaccttggctccttctt

SEQ ID NO: 207144 - DNA, 317 bp, Homo sapiens
gctacctgggaggctgaggcaggagaatcgcctgaacctgggaggcagaggttgcagtgagccaagatagggccattgcactctagcctggatgacagagcaaaactctgtctcaaaaaaataaatttaaagacaagcagtaggaatcagttgggattatgacaggcagctttgggtttgaaaaaggaagttccagatgtcaaagcagttcagactgaggggaggcttttaactttttaggataacatctataagtttcaatatatggaaaagatatctgcactcccatctttatcgcagcactattcacaatagct

SEQ ID NO: 207145 - DNA, 247 bp, Homo sapiens
gccgtccttctccaaaccattgcccaaagaacataaggaaattctccctgtttccttgggacactaagcaacccagagacctcttgaagtatctgctgacttggtcctaatgtagctttttcacagttctcagaggcttttgtcaggccagccaagtgaggaatgcccaggacactcagtgtgaacagtgacagaagtaccaagagtgcagcagtgcccttggttcctctaggtcggtcttcacctg

SEQ ID NO: 207146 - DNA, 575 bp, Homo sapiens
tgctcacactaagtactgtcatgacatttgcctattctttgaatcattttctgttttcgaattgcatggattatacaaagaggaaaattttttggtctttcttacacatgtactttacctatcacatatggttcatctctcataataattaacacagtaagcactatgaaaattcctcctgcctccccagataaggtgaactttaaatgttagagtaaaccatattacttttatatttaaggaaagtgcatttggctttaaaaggtaaaggctcctttcaaataaacatagatttagtatattattatagcaaactacaaccaaatttgtttgaaagggtgggccggacatggtagctcacacctgtaatacaagcactttgcgaggttgcagcaggcggactgcttgagcccaggagttcaagaccagcctgggcaacatggcaaaacctcatctctattttaaaaaaaggttgggcaggggaggggtgtttaataatattttccttatagtactgatggagaaaaaagaaaagcattacaaattctactctatgttcaaaaaaaggggaagct

SEQ ID NO: 207147 - DNA, 210 bp, Homo sapiens
tttatttttttcccaattggataaccagtcatccttaggtatttattgactaatacatcttttcacatttgatcagaaatacttctttgatcatatattaaattcccacatatatacacatgcttgcttgtctctggaatctattttcttggtaatcttattgtcagggaaatccgccatgtcatatctctaccatattttgtcactttg

SEQ ID NO: 207148 - DNA, 941 bp, Homo sapiens
cttttactccgcatctgtgaagggtggggagcgctttcgggatggaactgcgatccctcgcacgcgcagatcacgacagggctcacgctcctacgagaacctaatgccgctgctgctcggatgggaagtggggttcagggggtgacgcttgctcacccaccactcacctccggctgtgcatcctggttcccaacaggccacggactggtgccggtccatgcccgggggggctggggacccctgtattgaacaacagctccccgtttctccagcccccagctcctggccaccaccctcctactttctgacttgatgaatctaactgctctaagcacctcatccgagtggaatcatgtggtatttgcctttctgtgaccagcttctttcacgtagcctaatgcccccaaggttcatcgatgtcagaattggcctgtgtcggaatataagccgaataatatccgttttatgtaaaggccgcgttttgtgtatccattcatccacccatagacacttgaggtgtttctgttttttggcaagtgtcaataatgctcttaggaatgcgggtatttccccgacaacctttgggcttacttcactcatcagcagcaagcaggccatccttgaagcttaccgtggggtgggcccattgaccagcctggggagagtgggtgggtcattgaccagcctggggccatcatgctggctgggaaggcgtggccctcaggtgccagcttctacccaacactaagccgttggtgctcctggcacttacttacttgctggaagacattccaccttgctttcccgtctttccccagaagagggtgctgggtttctgcttctctcctgaatgggaaaagggcggctgcagcttgccatgaggctggcgtgggtggggttaggagaaaggactgtcaggtgctgtgttgggaagtgtgtgt

SEQ ID NO: 207149 - DNA, 229 bp, Homo sapiens
tttgtaaattcctggaagattgatgtgcttcgtgcagacctttaaaaggggtagataagtggtccatgactctggtccctgcttgttctttaccttcagggcaaatgagtcagacacatctcattgctataaacttcttgactatgcacctggatacttaggcttagagaaactatgttcagtcacttgcaacaattcaagggtggaagagttaagaataattcctgtc

SEQ ID NO: 207150 - DNA, 339 bp, Homo sapiens
actcccgcggctcgggggagagctgcacgcgacccaggtgctggcctctgagcggctcggctcggagactacaggatcaggaggaggttggaggtgaagcgtctggaatccggtgcggaggttgagactgagtattaagtctgttcaggcggaacgcgccgagaagggcggttgtgaaattgtgtttttgtgaatgtatgtcctagcacagtgtgtgtgtgattgtgattgtgtgtgacaccttgtgtacggatgtggggaggactctgcgggtgtcccgtgagtccctgtgttaggactgttattgtgtgactgtgtaacgctgtgtgagggtgtggg

SEQ ID NO: 207151 - DNA, 308 bp, Homo sapiens
tagatgcagccaggaagtacatctgccatcaagaaacagacatcagaaagattggtacactctgagcagatcttcagagtgaagccttgagaatggatgtagcaaggacaaagatgctaggatgaagggggaagatgatagaaaccatgtacagagctaccatgcactgggacttgttcctggattgcagcaactcctggggaaggggtgagttaaacaggtgaggagcaacctactttcaccatggacctctggaatcctggcagcaggagacctcacaaccactacagacacttcagctggcagca

SEQ ID NO: 207152 - DNA, 498 bp, Homo sapiens
ctctcactcccagaacaacttcaataccaactcctgtttacagaatggaggtgcaagaagtgataatacagattgtgtttctcaaatgcaacctcgaaaacacaagtacataattagtgaatagatgcacttatgtggaagacacgctctgacagactgtgttggtccaaatgctggaaacaaggacaagtatgcacagtttgcaagttacaaacactccatttaactcacctttgtgttcttagactttagctaacaccagaaatcacctagagcatttgttaagacatagattgctaggccccattcccagagtttctgattcagtaggtcttaaatgaggttcaagaatttacctctctagtaagttgccaggtgatgctgataatgctggttctgagaccgctttgaaaatcactcatccacattacttatgccataactagtacatagaagatgcccaataagtgtattttgattcattgataatacactata

SEQ ID NO: 207153 - DNA, 851 bp, Homo sapiens
ccctggcccagaagggtggatgaagtagggcctcagcacagctcatcctaccgagcaggccggaccctgagttcctggcttgcactgaagggtctggatctgaagacagcatgtacacagccattccccatagtggctctccattcccaggctcagcgtgcacggcatccaggtctgcatggtgtaggcagggtggagaagctgtaagccggtgcctgtgagctgcaagagtaaccagagacgtccttcttctccgggggacgtcctacacatagtgctgcacaatggcccagaagaggtttcccatcttgcacctgtggataggctcagcagtgtcatcccgggatgagcatggggcctgtgccgtgctggctgtgcacctcaagacgctgctgggagagcgggcctgtgctgcaccgggatggtgcagggcgaatgagtctgacctcttcatgagctacttcccacggggcctcaagtaccaggaaggtggtgtggagtcagcatttcacaagacctccacaggagccccagctgccatcaagaaactctaccaggtgaaggggaagaagaacatccgtgccaccgagcgggcactgaactgggacagcttcaacactggggacttgttcatcctggaactggggccggaacatcttcgcctggtgtggtggaaagtcccaaccatcctggaacgcaacaaggcgaggacctggccctggcatcccggacagtgagcgacagggcacgcccagtggagattgtcactgatggggaagcactgtggaaaatcacaggctgggcccaacctgtcttaagggggcaccgggaaaccccggaaaggaaaccgg

SEQ ID NO: 207154 - DNA, 162 bp, Homo sapiens
actttcctggtggactttagtacatgataaacatggcatttcacattagaaaggaaaagaatgactatagtaaatattgttgggacaactggttatccgtttggaaaaaattatatgttccagtcattctttatatcatatacagaataaattccagtttga

SEQ ID NO: 207155 - DNA, 423 bp, Homo sapiens
cttttccccccctggctactgatccctggataaatgaaagcgtacaccaagctggagacagcatgggttggggatggtggaagatttcaaagtgctactcaatcctgcctgtagcaaagccattctccctgtgagctgactctattgttcttcacctcattcctcggacttaggtgaaaagtttttctcttcctttttctgcgcaatagcccatcaatttcagtaaatttgagtacttgtccaaggactgtggcagactatattactcttctgggctgagaactatggaaactctagttgtcgtgaaacaaaacaaaacaaaacaaaacaaaacaaaacaaaacaaaacccacaaaaccagaacatttgcacgccaaatgcccattttcaaggacttttaaataaagatgttaatatctgtgg

SEQ ID NO: 207156 - DNA, 889 bp, Homo sapiens
cctgaaactgtctgggtctgagctggggagcggaagccacttgtccctctccctccccaggacttctgtgactcctgggccacagaggtccaaccaggctaagggcctggggataccccctgcctggcccccttgcccaaactggcaggggggccaggctgggcagcagcccctctttcacctcaactatggatctcctgccccccaagcccaagtacaatccactccggaatgagtctctgtcatcgctggaggaaggggcttctgggtccacccccccggaggagctgccttccccatcagcttcatccctggggcccatcctgcctcctctgcctggggacgatagtcccactaccctgtgctccttcttcccccggatgagcaacctgaggctggccaacccggctggggggcgcccagggtctaagggggagccaggaagggcagctgatgatggggaggggatcgtaggggcagccatgccagactcaggccccctacccctcctccaggacatgaacaagctgagtggaggcggcgggcgcaggactcgggtggaagggggccagcttgggggcgaggagtggacccgccacgggagctttgtcaataagcccacgcgggggctggctgcatcccaacgacaaagtcatgggacccggggtttcctacttggttcggtacatgggttgtgtggacgtcctccggtcaatggtgtcctggaattctcacaccgggctcatgtcccacggaggccgcccagctgctgtttgaggctgagcggtgagtaagggggacaggggaaagctgtttgcggcgactctctgggcgagaactcgactggcgagggcacacaacgccacactagcttgggaagacaatcgcc

SEQ ID NO: 207157 - DNA, 403 bp, Homo sapiens
aagaatgtgcaatacaaagtctcataatttacttgtatgtggtataaatagtgtgtgctcatggactgtgcttctgccatccccagttcccagcaatccctaatacaaatagacccctgagcaaggacaccttctcgtcttaggatgtccatgagagggcagtgctctgaatagaaaactttgccaagaaacatgtttgcttcattgttttcaaagctaattagttgattaatgccaagtaaactttctatgtttcctaggttttcgtctaaccacaaaaaacaaaattaaggaatctagctgacctgacttcactaattatgacagtttgagtccagctgaaatgattccattgcttggaatcatctagccaagaaagccctctgagtctgtatttgccgtg

SEQ ID NO: 207158 - DNA, 311 bp, Homo sapiens
gattttgaaaatcaattatgggcctagatatcagattaagtaatgtgaactttcgttatgaggctttttaactaaagaaataagtagatcataggatcatcaaggctgaaaatggcctgacaccatgtttcggtgttttctttatcatagtggtgatatattcatgtgtatgctttctttccaagtggtagagaagtgtatgcaaagtgaaaatctagaatgtcattgtccagaggctaccacttgctacacatttttttctaacttcttttattattatcaactctgaacattaaactttttaaaagttc

SEQ ID NO: 207159 - DNA, 431 bp, Homo sapiens
cctattcaggtcctctttcactgtctcaggtctgaaacacgacagtatcttctaaacttcaatcttccttcctaacctactataataacagacacatcttcctaaaaatggctttcctttccttgtctaggtgcctcataactcacagagtgcaaagagaaccaaagtgtgacccaatgacccaagaagttaacgtctagtgttggttctgcctgaaatgccacaaacattgagcaaatcattttgcctctctggcctttaattaccccatcaataaattcagtagatttgctctaaatgattctggatctcttccaactctaatattcttaattttaagtttcacattcaaatgacacatcaaaaacatcattgcaaaaatcgatagccaagacaactgtttcaaataacgatcagaataggaacaatga

SEQ ID NO: 207160 - DNA, 195 bp, Homo sapiens
atgtaaatagaagatgataatttaaaaaatcttgaaatcttgtatgtggattggaagtgtcagtatgcatatcgtggctctgtccataagaaaagcctagaaacaactgccaacctagtagcaatgagcatccctaaattccaattgtgatcttgaaataccatttcccaataaaaggaagcaacctcttcttag

SEQ ID NO: 207161 - DNA, 484 bp, Homo sapiens
ataggggagagggaaggtggtgtggaaggaaaagaccagggggagcactgagtctctcagtgaccttgaagatagcaaggttaaccattccttagctgttttggcatctgctctgttgtcaccacctccccacggcacgggtcagggtctgtcacagcctcgtggccccacgcacttcacctagtacatgcccctgctggataataaggtttgtgtgtgactgatgtgggggatatctttggccagtggtggcatcccctcaagactttgtctcgaatgagggtgggtagggcctgtgtgtgtctgtcttggtcattgcagtcttgaccctcgttctccctgctccagaaatccttgcggacggaatggctaagcccagagctagggccaagtcaggcagggcttctgcattggaaggggcttgagagggttgggggcttcaccatctcacctctcccctgcccttctctcatccatctgcagg

SEQ ID NO: 207162 - DNA, 303 bp, Homo sapiens
caagttcgaggatgggcacgaggtccaatactgccaacgagagttaggcctggggcattacatgcatctgttggaatgaaaaaagcaggttctacttctggagtcactctggaagtggagcctagagccactgacggccgttttatcacatggagaagaaacctgcttaagaatggagccaaaggaaagcagggccaagagatggctccagactggactctggtcacatcatctgagtccctgagaccagtattaacccttgacctttcaagtatgtaagtcaataaaggtctgtgttgcttt

SEQ ID NO: 207163 - DNA, 280 bp, Homo sapiens
  misc_feature (200)..(200): n is a, c, g, or t
cacacatcccttctggctggctgcacattccatggttgatctctgcttcaggagcatgggctgctggaggcagggagggcacccgcatattgatggaggtgaactgaatgagtgaatgaacgtttgggacacaatccatttaaggagggactgcagcttgcatttgcattcatggaggggaaagaatggagggttcaggnaacggtgaggaggcatggaaaaggaggaatggagggtgaagcagcagggaagctgagatcaaccatggaatgtggcaggt

SEQ ID NO: 207164 - DNA, 373 bp, Homo sapiens
ggggagtcaagcccaggtgtggtggctcatgcttgtaatcttggcactttgggagaatgaagccagaggatggctggagcccaggagtttaagaccagcctgggcaacaaagcaagaccctgtttctttaaaaataaaaaataaaaaagtcaagaaccaagtacctttttaatggtggcttcctggtcaataataatagcacaacaaaaaagccacagaatttgcctatctgggcaagggctgtgggaacaaacctttcaatatttattttaactctaatgaaaggacatgagttgctcattgtgcaaaagtctatatctgcctctgtattaagaaatttgccaaagaaataaacatttttgaaaaaatgtat

SEQ ID NO: 207165 - DNA, 347 bp, Homo sapiens
ttggttattttaatagagatgtggatgtagtctcaaaatatacaaatataattctttagcagtcctcctttcataatatggggaaaatgtagatgcttgaatgtttagcattagatagatagttttgaaacattcattgtttgcatttgacttgcttgaaaggctaatttaagaggcctgctcctttctggaagttttcaaatcctcttctgtcaggtcatataggaaaggaaaagctttgtataaagcacatagagggaagttgcaacttagcatagtattatctgtctttaagtcctcatcttcttcctcttcccctctctcttcaaaaggtggttattgaagat

SEQ ID NO: 207166 - DNA, 334 bp, Homo sapiens
taatttccttcatctcccttcctccttacctattaaaaaaataatttttttaatagagacagagtcttgctatgttgcccaggctggtctcaaactcctgggctcaagtgatcttaccttggcctcccaaagtgctgggattacaggcatgagccactgcgaccagccctccttgcttttttaatgataaattcttcagcattttgcaaagggatttcctctttgtgattagcatttctcctgaatgttttctagtattgtcttccccagttaccgtcatgaaaattaatagacaaaacccattaaaaccacgtcttttgggagccatatcaca

SEQ ID NO: 207167 - DNA, 233 bp, Homo sapiens
ctccctagagaccgtgttgcatgacgccgagatggcgtcactgcactccagcctgggcgacagaccgagactctgttctcagaaaaacccaaaaaaccataattgcttaatgccaacatactgcatatcaaagacaaaacaaagctgtgaattataaataggctgtaaactaacagcagagttaactttctcccaagataattgttcacatccattgcactgtagaatcttta

SEQ ID NO: 207168 - DNA, 815 bp, Homo sapiens
cgtgagccaccatacctagcaaaatcaactctgaatctgaatcaaacctttgaaacaaaaattaccaatcaaaaaaacgtgcaatccctgctcctaactttgaaaaagtgacaaggaaggacatttggaaagatgtctctaagcagtcaacaagaaatgaaatcagggagagctttttcagcacctgaaaaaatacatgcaaaaacgcccgaggcgggcagatcaccggaagccaggagtttgagaccagcctggcaaacatgggggaaaccccgtctctactaaaaatacaaaaattagctgggtttggtggcaggcagctgtaatcccagctcctcgggaggctgaggcaggagaatcgcttgaacctgggaggcggaggttgcagtgagcctagatcgtgccactgcactccagcctgggcaacagagtgagattccatctcaaaaaaacgaaaaacagattcagagtttatttccttcccaaatacttcatagatgttggtttgtaggaataacttaaaagtctcactcgctttctgtcttttctagtaatttttatcgtggattctgattgcctagatctgctaattcattgagggttacaaaattgtgatactcgaattctttattcctccttcctttattacctgtaatacttcttaagaaaaactctttctcatcaactctatgactaccctaaattacagatccacatataggatctgtatacatgtatataaatatgtacatatcatatacgataatgcttaattctttcccattacttactaattttcaaaataatgtgattcc

SEQ ID NO: 207169 - DNA, 561 bp, Homo sapiens
tgtgtgtatgggtatgtgtatgtgtgtgtatatatgtgtgtatgtgtgtatatgtgtatgggtatgtgtgtatgtgtgtgtatgtgtatgtgtttgtgtgtatgtgtgtatgtatatgtgtgtatgtatatgtgtgtatgtgtatgtgtgtgtatgtatgtgtgtgtgtatgtgcgtgtgtgtgtgtgtgtgttatcatttaaatgggtcttatgcactacctaccacaaggtcattctataacttgtggcacttcagtctcaataacctctgccaataacagggctcaagtgataataagtttgcctgtgtgactctttctttcatgcaaatataaggcatttgtatgttacggcttaccttttccctgcaatacctggaaatcagagtcagtgagacactgtgtgttttagagttgggaaatctgaggccaaaaagaaaaataaattgtagaattcagtagatgtgtctgttcaagaggaggacccctcttctgaatttcctcatccagtagcacctctttgtggatcttctcatgagtccatatattttcttatttcc

SEQ ID NO: 207170 - DNA, 398 bp, Homo sapiens
ttcactgctcaggtgacaggtgcactaaaatttctactacataattcatccatgtgaccaaaaaccacttgtaccccaaaagctattgaattaaaaataaataagtagataaataaatacaatgtagtgttgtgtatacaccacggaatactactcatccacaaataacagtgaaagaatgtcttttgtagcaacttggatgggactggcagccattcttctaaatgaagtaactcaggaatggaaagccaaataccctctgttctcacttataagtgggagttaagctataggtatgcaaagacttacagagtagtgtaatggaatttggagactccgaaggggcagagtggaaggaggactcaagatgaaaaagtacatattaggttaaaatgtat

SEQ ID NO: 207171 - DNA, 344 bp, Homo sapiens
gtttaaataaacaatctaatgatgcacctcaagaaactagaaaagcaagaacaaaacaaatccaagattaggagaaagaaagaaataatgtagatcagggcagagataagcaaaatagagactttgccagttttcaatctctgcccatcagaatagtaaagaaaggattctccaaaaaaaacatgtgccccattatcggagccagacacagttgagtgtggggacgaaaccagtgctagctgggagcagtgctttttacttttttcccccaggtaacagtaatgacatggtactaatactttttattagcagtaagacctcaaagattctcaaatcactcacta

SEQ ID NO: 207172 - DNA, 232 bp, Homo sapiens
ggaacaccatgtaaggccatagatttttgtattctatctttgttccggctctttggttttccttgggagggattctacgacagacttactaagtgagactctgcaactctgcccccattttgtacccttctcccccaggcatcttgttcacttagctgagtacactcttggggagaagagagaatatggtggtagctcatgaggacacatccagttttcattcacagcctac

SEQ ID NO: 207173 - DNA, 507 bp, Homo sapiens
atgtgtctttctgtgtctgacatttttcacttagcgtaatatcctccaggtttgggaaaaagacaatctcttcaataaatggtgttgtaaaaactggatatccacaacgcagaataatgaaactggacctttattttataccatatacaaaaatcaactcaaaaacgattaaaaacaaacatgtagttttttttttttttttcatgtaaactggatctgtgggactaattgggtgatcaaaataaaagccagtggttttgctctttaaaagtatctcagtacttatttaataattggattaaacttctacttaggtttactgacccaggcatgaaaataggtaactaatgtgtcttactgactgattctgatccactgtgtggtggtctgatcacctgcccaaacctgatcttcaaatatgtgatcttgctgaatagaaaaccactgctctaggttagacaggaaaatggttcaaggaacacattttgtatatgcaattgcctactg

SEQ ID NO: 207174 - DNA, 546 bp, Homo sapiens
ataaaaggaatgacagtagagcattaagagaataaacagtatcactgaaatgtgaggaaacacaataaatgggattgtgtctcctgaaccttagtttcacacttcctcctccacttctgtcagagggtgtttgtgatggccgtctgttatcagccgtgatcaaaataatataacagtgaaactttttatacttatgaaggccctttcatcaaaaatctcacagccatttctaaatatagagcaactgatctttaaaacacttttatgttttaagcaattaatatggtaacttagctgttagactttccatcctgcgtatttgccatttggagcgtggatggaacatttcgtaatctactcagcattaaaactttgctggtattgagtttagaattccaacttttcgatggttcatgtaggtcttttcactgtcatctatcaaaacaaaacattgctttataatggaataaccacattcatttccacatatcaaaacccagattaaggattatagaccaaatggtatgtctagtttaaaaaaaaaag

SEQ ID NO: 207175 - DNA, 474 bp, Homo sapiens
tcattctacaacctttttgactcaatatgcataatgcttttgaaatttatttctaaagatacaaggaactatatagtattccattgtagaaatagaccatcatttgttatatttatccactttcctgaagatttgttctttctgttattttgctattacagttaattctgcaacaagtattatcatacacctcttgttgcacatatgccagactttttctaggacagtgtttttcaaacttagattacaattagtaggttacaaccaatgggatttttttaatgaaatggaatagaatagaaaatatcaaaaagtgttccctacagtatgttagggtaattactgtttcttaaagctttttttttatatgtgtttgtgtatatgtgacataatgtgtgtggggccacattgaagaatgcagttcttcgtgtagatctcaatcaaaagtgttgggaaggtgtcattctattacag

SEQ ID NO: 207176 - DNA, 291 bp, Homo sapiens
ttggttccttgcacatcctgagttccaacggacaggcagggagttcaagtgtccttcacagataagaagtgaatctctctgggttggccattcccggattccttagcttagactctgaacacatattcttcttagaccatacagtcattctcagggtatgcttgagttaatccgtgcccgtccacttgttcgtttttaagttgccatagtcaaccagtgttggatccatgctgattacatgtttcttttctttttttgagatggggtctcactccgtcacccagtctcaaa

SEQ ID NO: 207177 - DNA, 549 bp, Homo sapiens
tctgtgtcctcaccttctctgcttcaattctggtgctgcttaagccgattatcatttcatgccctaaaccaaaaaataaactctacaaacatcaacattacataggacaggatctggcccacaggtaagaaaagcacctacaagagagctgcatggagctgtgggtgcatttcctgttaccaccagggcatcccagaatgctgacaaagagaaaactaagaccttcccactctgatttgttacatgtcataacaccaagcaagtgacagaggagacaattatggggcccagaggaaggtgcctgtatcatgtagacaaaatccaaagcagcttgtttcagacaaaacattttgctttggaaacttttgaaacttccatggccgttgaatatagcagagatgatctaaaaattttagaagcggttgaggtacccgtggtaggggcaaggcatgggagtggtgatccttaaggggcttgtctttagtttgagggccacacacagaggaggtgggcagaaaactgaggtctccccagagcagctttccagac

SEQ ID NO: 207178 - DNA, 371 bp, Homo sapiens
acagagagttggaatctaaatcataaagcaacatgtatgtcaagctgatatgctggcgggggctgggaagagccctgaaaagtaatttccagccacaaagtgatatgaccagaccatcatattaagaagagcattctagtagcattgtggaggatgataccgaaaggagaaaacctgaaaacaattacaatggccccaggtaacagggaagatgatacagattcaagagatattttcaaggggtagaatttccagactttagtatttaatcagatggggagaaggcagggagagggacagttacagaagggagaagtttaggaaggttcccagattcctccagccaactgggtggatggtactaccattta

SEQ ID NO: 207179 - DNA, 395 bp, Homo sapiens
ttaaaaacctttaagcgcaaaatttgatttggaaatattaatttgaacatgagatattttttctgtaaaaaatgtatacataatagttcctagctttgtcaatgaaaaggcctcaaaacaattctctaacctctaaatcgtgggcttaaaacattattttccactaaaaagaaccagagccccttgaagaaatcaccaattctaggtcagaggaaggaaatatacaaaaggagcctgggacatgttgtaacaccagaaagcaaggaagctaccaaagactcaggagccaacttgaaggagattccactggccaaagatgggacagtgtcatgtgtaacatggaaaataagacaatggattaaaacatagaaatgtatacagccataagtccataa

SEQ ID NO: 207180 - DNA, 357 bp, Homo sapiens
tttttataacctgtctttaatttggtccttttgctaaagattgcagtcactgcttatttattataccattgggcatagggtagtaatgcattttcattttgctttactggcagtcctttgattgtatctaaaagaaggctgtattctagaagttgttgttttgttttttttttttttctgacatgagatgttctttaacagtttgggtttggtttttttgttttgtttttttactgtgataattctaattctccctatttattgtttaaaaacaataataggatacataagtagttaaacttatgaatttgtttttcattccatcttaaaggcaaaaattaattccacaaatataga

SEQ ID NO: 207181 - DNA, 597 bp, Homo sapiens
agaatctagacagtggctcaggaggatggagttactggatgacatgggaaggcatcttgaaacagttggaatatatgggacaaagaggaagtctttgtttgtgacaatgagtgaaagttggcttaggctacgtgtggcctgaagttacttaaccaatattctctaatgatccatttcacaactttctgagagctaaagtgaaaatgaccatcattggctatggccactgatagaatgcctgtagactttcctttagagcaactggggattgggcagtagaagccagggttattttaaaaaggaaataaccctttgggctgggcactgtggcacatgcctgtgatcccaacaatttgagaggccaaggtggatggatcccttgagcccaggagttcaagaccagcctgggcaatgtggtgaaatgctgtctctacaaaaaatacaaaaattgggtgtggtggtacatgtctgtagtcccagttactcgggaggttgaggtgggggatcacttgagctcaggaggtggaggttgcagtgagccaagattgcagcactgcacttcagtctggatgacagagtaagaccctgtctcaaaaa

SEQ ID NO: 207182 - DNA, 105 bp, Homo sapiens
tggtttctatttatctttttctttcttgtttccttttaatccttaccacccaatttcactatagtttcttttgtagttgggcaccctgttggagagttgacttat

SEQ ID NO: 207183 - DNA, 606 bp, Homo sapiens
ttagacaccttttcttgagttagcataagataattgccttatgccagttacttcatctatttgagcttcagattcctcatttgtaaactagcccaattgtttcctcactataaactctagcctacctccccctgcagtttcatattatgcaaatgctaggtcatttcagaattccgtctttttgcacatttgttctctttccctggaatgcatttcttcccctggtaaactcctgtcttcccctgacttggccccatgatacacacagcacttcatacagataaaaaatattttgtctagtgatagttgtacaactgtgaatatattaaaaaccattgaagtgtaaaaaaaaaaaaaaaaagaaaaaaaaacaaaaaaaaaagaagcggcagagccgcgaacagaagaaaaatatgaccacgccgagaggaacaccacacgatgaaacgcaccaacacaccagcgttttctgagtaaacaagggcgatcgcacgaaatagggacgccacatataatcactaagaccgagcactcgcagttcaccacgtgctgaacgggacaaaatcggcacctggaaccctggcgaggacccccacctggggggcc

SEQ ID NO: 207184 - DNA, 476 bp, Homo sapiens
aagaggccatataagtgattagagaaatgatcaaaacctctggagggattacaatcaggataaaccttccctgatccctgaagttcttgaagactgtgtctggttcatctttgtagctccttttagtacctaacacatactgggtactcaaggtatatgtagcagattgagttagaacaagtgtggagaataggcctaacttgtaatcttcatgagggcagggccatgtctttctagttcttcactgtctgctcaggacttagcatagtcgaagatgcttagtagtagtctgttgaatgaaaagcatcagtggatgaataaactggtcaatgaatgaatgggccacatgggccctataggacttaaatgcttgataactcttcataggtagaaatcctacttccatccctatgtttccttcttgatctctatagcttcttgcagaaagcaaagtatattggcctccttcttccacc

SEQ ID NO: 207185 - DNA, 368 bp, Homo sapiens
gtgggtgggttgggttcggacctgaccaggacaaggccatgcacttatatatttaatggccctgtcttaacaatctgccattacagcaagcatgaaaaaaacaaatggggacagaactcttttccgttgttgttgttgttcaaactcaacatcaaaagttattgagtgattttgctatgccatagccagaggtggtgctaatagagagaagctctaagctctgctctctgtgtggaaagtagttcatatgctttatcatctcttagaacctgtcaagctcggttagttgagtggacatggattgcctcaaacagcatttgctatgcatttgttttccaaacacactacaccttccttggaaggtttat

SEQ ID NO: 207186 - DNA, 597 bp, Homo sapiens
ggagaattgctgtgatcagaatggtatttaaggctggattatagaggtgaggatttaagtgtagtagattaactatcttacagtaccatctgtcctaaattctgggcttggggagtagtagtacaaataagtggggaggacagagaaagaaataatatgacagagtggaggatgagcagagaagtggagaatagttcccagatgttgaacctgagcagtggggaaggtgatggaccatcaatagaggcgagacaaagagcagttcaagaaagatagtatattgggttatgggcgcatgctaagtttgaagtgtatagttgggccttccatgtggaactgtttggtagagttgaaattttggagatgttgctttgaggatcgtggtagagaaattgttgatactactcaagtgcctgagacagccagagagaaaaatgtaattcccactcaactgccgctcttttcttctcccaccataggtacttctacatccctttcccagagcctgagatgaattttgtgggaccctaccatgtgcccacatcctctgcacaaggccactctatcttaatgataagaatataactagttctgaga

SEQ ID NO: 207187 - DNA, 353 bp, Homo sapiens
gcttctaaggtttcataaattccttgaaaatttatgggggattgtatgctaatataatttttttttttctgggaggaaggtccacagttttcataaggttcccctaaagaaccgtgaatccaaaatgttaggaatgattgtcctagaatctatgctgtgatgttcaacactgtagccactagtcactaaccacacatagctgctaggcacttcatacttgcctagttcaaatgagatgtgctataagtataagatacacactagattttgaagacaccatgaaaaatagaatgtagaatatctcattaatatttttctgctggttacttgttggaatactattttacatattg

SEQ ID NO: 207188 - DNA, 549 bp, Homo sapiens
gaatttatctcatgaacagcaattttgcctcgaaatcttaactcttgagaaattcacccatgagtacagagaatcagataaaagaatcctcactacggcactctgtgtgatttcaaaaaagttggaaactaaatacctattaacaaaaaaatatattttttaaacaactgtgtgttattcttactgtgaaatacagtcatcctttggtatctggggggattggttctggaatgtccctcagatgctcaagtacctgatacaaaatgacatagtgtttgtgtataacctacacacatgctctcccatgtgctttcagcatctctacatgacttctaataccttatagtatgtaagtgctatataaatagttgttatactgtagttttttaatatttatatttttgatccgtggttggttaaattgcatgtagttggtgcggaacctgtggatacagagggccgaatgtattatatagcaatcaaaatgctgtgtgtataaacccctaatacataaattatattgaaaaaatatgtactgatgataaaact

SEQ ID NO: 207189 - DNA, 887 bp, Homo sapiens
  misc_feature (38)..(38): n is a, c, g, or t
tgggggagagaatggcccagtcaaaacaggcacttcanctgagaaatcagccagcagtgttttccaggctgactgagcatttttatattcatatgaattacctgaaaattggcatttttaagtttatagtcagcggtagaggacatttcgggaatcaaagactaaggcctcctcaggtcctctgggctggcccatataggaatgctccctggagagtgtttgagcctcaggttccccccatgacccatggggatagatgagatctcttttttttttttttttttgagacggagtttcactcttgttgtccaggctggagtgcaatggtgcgatctcggctcaccgcaacctccgcctcctgggttcaagcgattctcctgcctcagcctcccaagtagctgggattacaggcatgcaccaccacgcccggctaattttgtattttttagtagagacagtttcgccacgttggtcaggctggtctcgaactcccgacctcaggtctgcccaccttggcctcccaaagtgctgggattacaggcgtgagccactgtgcccggccgagatttttttttttttaatctccagaacacagctctctcagtgtgaccctgaggattgggagtggggagggcgagacatgacttcccttgggactgacatccttcagagagagggcagccagctgaacctgctccctacgcacctctggtcaactttacaagtgaccccagcttcccccaacattgaccttcactctaagtcactgcagagagacaaagagaggcagaaacttctccaccccatcacacaatatgccctgatgggcttctgagggtggagggtggaataacaactcggagggccccaagggagggcttggagga

SEQ ID NO: 207190 - DNA, 377 bp, Homo sapiens
tgccttcagaatcatcagtggagcttttgaaagggcagatcttggggcctcaccccaggagatccgattcagcaggtctgcggggactgaggtatggcaggggaaaccgcccccatctcaagggtgaggttaggacttggctcctgtgtatgtattccacccagaaatactgagttaacattagctgaattaactaaacaaagtatcaagcataatacccacagggtaagccagtgaggatagaggataaatacattattagtctggctttgccgctgtggttatcctcaaacagtagggtttagtgtatgtatgtatatgtattatgtttttgttttggggttttgttgagacagggtctttctttctcacccagg

SEQ ID NO: 207191 - DNA, 464 bp, Homo sapiens
ctggctcagaaacttttaggcattgcttctttaaatctgaggactgtgtgaggcagctttctgcatcaagaaaagcatcaagtttctaactccgcgctggtgtagctgtcaggaggacttatggaggggtgagggaagccctttctaaatacgtgactttcaggagtggaggagaacttggttaacacatactgaggttttttgtttttgatgaggtttttttttttaaattttttatttttttgagacctagtttcgctcttgttgcccaggctggagtgcgatggtgcgatctcggctcaccgcaacctccgcttccctgattcaagtgattcttctgtcttggactctcaagtagctcggatcacaggcatacgcaacctcgcccggctaattttttttgtattcagtagagatggggttttaccatgttagtcaggctggttgcgaactcctgacttcag

SEQ ID NO: 207192 - DNA, 104 bp, Homo sapiens
ttttttggtcctaattatgctctcaggagttaagacagtataaaattatgttttttaaaggaaacttcatcaaatacttggaaattagcaaatattttttagag

SEQ ID NO: 207193 - DNA, 170 bp, Homo sapiens
gactctagagcatcccctccttctggccacgctccttctggcccgtctacccttttctctccaaagctatgatggcctatgccctttattcccacgttcaagcatttgggccatttttttatattaacaagctcagatgaatgttaagtcctggtggtcaaaagggcctg

SEQ ID NO: 207194 - DNA, 235 bp, Homo sapiens
ctaggaaaagtgtttggtgctctggggggccttctgggctgtgcctccaaagaagtgtgcaggggagagattgctggctggaaaatcagaacaacctgggctttagttctaactctgccactatccagctctgtgaccttgagcctgttcctttacctcaccaggcctcattttccacatctgttgaacaatctggctcttagggcccctttcaattctagtgttctggaggtcc

SEQ ID NO: 207195 - DNA, 437 bp, Homo sapiens
gaaaggttccagcctgccaggccagattcacgaaggctgaatcctcagaacacatagaagagggggttctctggcagcacccctctcaggagtttgaagcaaccaggggcagtaaggagcaagcagctgcgagatgtggattcctcaggccgtgccccatgtgctggaaaacaggtggcagaggttactctgcctggtgtgtacacatacatggtttgtttgatcatatccggtataaaccctactcgaaaatatttgtcatccggcacctacggagttcaaaatactaacacagtacagcctgcactgttgtccctggggactgaaaggggtcatttttgggtggcctgacagaaatgtgtcacagagcagtgtcgccaaatagtgccccactctagttttgctcagaaggggccacatcagctgggcagggtgtg

SEQ ID NO: 207196 - DNA, 406 bp, Homo sapiens
tcattctccttggagagtactgctgaagcagagtgcacccacaattccacttactccagcatccacagtcccagccagcccctgacctggaggaatccactcatggggggtgggggggagtcctccaaggatctgcaccaatgtgacctgcctgatagtgtctgtcacattgatagtgacctgcctgatagtgtccctccattgacagggtctctattgtgctaggcctatgagcctaggggcagccaactcacacacaactcgccctgccatgtcagctctcagcttggttgcagtccaggcaccaggaaggcttggtcccgtgcccagtcccaacactgataacattccctacagctgctgcccagaacggaaaaggtaaaagattcctccctcctgagtgtga

SEQ ID NO: 207197 - DNA, 362 bp, Homo sapiens
gcggtgggaagaccttggggggagtacctcaggcagagaggagaagccgagagggtgaggtctgctaagctaggtgtggtggccatgtccagttcccagctggccgtgtcaccttgaggggggactgaccaggttgcagttccttcttctgtaaaatgagggggtgactaaagcgtacacaagttctgattctgggaaaaccacagagaatcgagttttgtaaggtgctgccagcaggggaggaggtggagggtacgtggagagctctattattgcttacagaattgaacgtgaaacgacaatggttgctaaattaaaaagttggttattttaagcagtgaaaggtcgtagggccgttccct

SEQ ID NO: 207198 - DNA, 422 bp, Homo sapiens
ggctagtactgtgtacgaggtgagacttttttttctttttggccttcccctagtgttacaaatcctgtcgagtgtctgaaataccatccatgtgaaggtttcccatgataactgtaacagctgccattcatccattcaacacatatttattgaacacttctatgaggcagccactgttccaggcacttggcaagcagctatgtacaaaactgacaagtccttgccctcatggagcttttgtttaggggggaaagaagatagacaataaaaaagcaaatagtaagacagtcttggcattgctatggggaaaaagtaagtagaggggagggaggttgatgggaaacattgaggtagaacagggaagaggaatttttaattttttttttttttctttttttttgagacggagtctcgctctgtcg

SEQ ID NO: 207199 - DNA, 634 bp, Homo sapiens
tcttttttattgagtggtatggagagattaagcataagggaaatcataaaagatccagttgacattctttttgtctttatcaaatttagttctcaataacaatagcataattggcaaacatttaatgactataaccttcagttttgttttacttaacacagtactgatttgtcaggattttgattttatgatattccagctctgtgaagaaaaggtcatctggtgtgtgcctctcatttggtacacacagataatgtgtgttcactcaatggatatgataccttgacattttagaaaacaaaatgaatgtgcgctctggaggacaatgccttttaattgatacgttactgtcttggtgcgtttatactgctataaaggaatacctgaggctgggtaatttgtaaagaggtttatttggctcatagttctgcaggctatacaagaaagcacacatacacacacacacaaaaggcatggcaccagcatctgtttctgatggcctgcttccactcatgcatagtggaaggtgaaggggagcctgtgtgagaagagatcacatgatgaaagaggagaagagaggggccagactcttgaacaactagctcgtacaggaactaagagtgagaattcattc

SEQ ID NO: 207200 - DNA, 741 bp, Homo sapiens
ttaaaaactttcaaaactctttcttctcatggggtcatctgtcctcccccacacttttcgagtctcatttctttgcaagtacgtcttatccttgtttcacaatttaactgtgatgtacccctaataataactgaaagtaaagtaaaatctggtcagtagccacagacccttctacactgacgttttgtcttatagtataaagtcttgcaaaattccaagggaatgttgagagagaattcaggtcactgaagggtttcagtatttttttcattaacatagtaatcatacttagcatttatatactacttttcaatttagaagtgccttatgttacttttttaatcctcatactacattactacataaacatattgaatgactgaaaaattaatactaaatcaaatgtatgaggtataatgttcaaagtgtattccctaattaataccagggactacatgcatacatagttatatgtaaattagatactttggatttattttttcaccaaggaaccaaaacacaatacagaatagtattgtaaatagattaagatgattgggttgaaaatgtagatactgattttaggttgaccttaaaaaatatatatattcttattaaattatagcttttggagaatataaactttctgtgttcccaacaaaatggatagttttgctgccaggttaccctccctttgtttatcatgagtctttagaggtttaagtaaaacaaaagagagac

SEQ ID NO: 207201 - DNA, 529 bp, Homo sapiens
aggcttattaggaagagaaaattcccgcctaataaactttggtcagacgggttgatctcaaaaccctgtctcctcataagatgttatcaatgacaatggtgccaaaactttattagcaattttaatttcacttccatcctgtggtcctgtgatctcaccctgtctccacttgccttgtgatattctattaccctgttaagtacttgatgtctgtcacccactcctattcatatactctctccccttttgaaactccctaatgaaaacttgctggtttttgtggcttgtggggcatcacggatcctaccaatgtgtgttgtctcccccggatacccaactttaaaatttctctcttttgtactctgtccttttatttctcaagccagtcgacgcttaggaaaatagaaaagaacctacctgattatcagggcaggtcccccgatagtgttgggtggtggtaatgcaatgatgaagatggcaggcatgcctctgccctccaggagtttctaggatacagagggggacaaac

SEQ ID NO: 207202 - DNA, 570 bp, Homo sapiens
  misc_feature (31)..(32): n is a, c, g, or t
  misc_feature (34)..(34): n is a, c, g, or t
atggtaagttcgtcccgtatttctacagagnngncagattacagtattcctctgttcaaaattccagtgcgtccccatttcattcagataatcctataattttacagcagatatatgaagtccaggaaatggtgatatttttcagttgggtatattaaaactctaagttttatttcagaaaagtattcctattttaaggcagctaaattgttttgctttctgccaccaggggatgtacactatacaatatgactctaagcatacaatatatatttgtatgtgtgtatgtttgagtgtgtgtgtgtgtataacgtttactcaaatacagaaaaaaattaaattttaagcctgcatgatgactgactgtggtattgtgctgtgctggtaaaataggcttactaaattgtcatgctttgggaggccgaggtgggaggactgcttgaggccaggagtttcaggccagcctaagcaacataggaagacccccatctctacaataaaaaattttttcttctttttgagacggagtcttgctctgtcacccagtgcagtggcgcaatcttggctcac

SEQ ID NO: 207203 - DNA, 719 bp, Homo sapiens
ccgccaccagtgcaagtgcacatgcacagtccccactgccccatcagtatgggcatgaacctcactgctgccaccccgatgaaatgcttttgccagcaccccacatcagagtgatcttgccagcagactgggaacatctcaggccctcgagcacagcaggtgcttaaatttgaggtcccagataacaaagccgtgggtctggtaccaggccctgtgggttagagcatgcagcccacgagtgctgagagagccttggccccctgaaataatccaaaaacaaagccagtcatctgaacacaacttataccatagtcaaaccttcaatggcatcaaataatgtaaaagtaaaaaactgcatccaaaggacagcagcttcaaagattaaaggaacatcagcccacacagatgagaaaaagccagtgcaagaacaatggcaactcaaaaacccagtgtcttcttacctcaaaacaatcacactggctccccagcaatgatacttaaccaggccaaaatggctaaaatgacagacatagaattcagaatctggatagccatagagatcatcaagattcaggagaaagttgaaatgtaatccaaggaatccagtaaaatgagacaagagctgaaaaatgaaatagtcattttatgaaagaaccaaaattatctgatagagctgaaaaactcactagaaggatttcataatacaatgggaagtatta

SEQ ID NO: 207204 - DNA, 705 bp, Homo sapiens
ccttctccatacagtcctaaaggcattttgtcttgatagtactgccaactgcaagcttccagagaaacttgggctattttgaatgaaaaaaataatgataaagatgtcaagcataagtaatacattcctaaaaatatttagaagttttatgaaatacctaatctaggaaggaaactattcaatataatggatacatataagctacaaattaaatccaagagaactaaaatatgaatataaaatgaacctttgcctatgaatgtaaaacagttgaagccaatccctaagcctagaatgaacaaagctgatgatgaaagcaaataacagggagtcttactacaaccacagaaataaaacgtctctaagaaaataaaattactcaactgtctttgctgtgaaagcatgtcattcaaggacccttttagcagtcaccaaatgcaaatgcaaaagcagataatgcctgagtccagcaaaagcaagtacagtcttcccatcaaagaggaaaagaaacctaagcctttcacttgtccttgatacaaaaaggtaaatggattgtgaaagaactcaaattccagaaaaaaagattccagtccaacctgcataaagctaaaaaaacttcatgttactttgttctaaaattagcacacacaggtccctatactaaaaacatatatacgatcccaggtgaggtgtcaggagtaaagt

SEQ ID NO: 207205 - DNA, 584 bp, Homo sapiens
aacaagaattgtgtctggcctttgtgatagttactcaacaaatcatatctgtgattgttttgattttaacaataatggtttttaaaaaccgtaggtgatcacatactacgcagaaagggaagcagttacagcattcacagcatccgtgagtcatagactcactgcattgctccaaggtgcagattctagttggaaatgttaagttttttagagcaatgaaaaaattgatctctttctcttccataacatagatttcccatctagctcctgggctaacttttgtttagtagttgtattatgaaaacaccgaagaatccttctgccagtctccatagcagtgatataaatcagagcccgcagtttcatgaatgcctcgctgtgccaccaggattttcttggagggagccacggtcagatttcaagtggtcatttcactctttctccctctgggggactgagacatgattaacttgcaataattgtgactccctcattaaaggagagctgtagcaagggaagaaatcattgagactgatcaagacatcccgtgctattttttttttcttgcatatcagctgtgtggg

SEQ ID NO: 207206 - DNA, 393 bp, Homo sapiens
caaaatggttttagtatattgccttataaacaaatttaagatcatgagtttcttttattatcctctttgttttgctcatttccttgaactgtacatccctaacctaaatcagctggagacaggggaagaaagtgttagattcttactcagtttagatcctctgccaggaaaacccactctattcattgtcaactaaattaacgcttttttaaataaaaggagtcatttttaacaataacgtcagggcagcaggcatccatgaaatgtatggtcactgatcattagggttatcattctaatgtgtttactattttgaaactctagggagaagaaaacttatttttgcatatgttggaaaaatgtatcctcatgtaggatatcagggtaatatct

SEQ ID NO: 207207 - DNA, 173 bp, Homo sapiens
aaaagtattaaatcacatttatacttaatatcatctaataaagataacagcatttcttaattaggtgtattttcctctgattttttcccccactgaaaaatttgcatatctctaattataatcatttctggaaaaaatgctgctagggattgacatgatattaatttagattt

SEQ ID NO: 207208 - DNA, 220 bp, Homo sapiens
ttagcttcaaagcctagccatcatttatcccttccgtgaagtttcagtttccttctctgtacaacagtaaggaatgttatgaggactgaacaaattgctacatatcaagtccattagaggacttggtacaaaataagactcaataaaatggagctatggtaataatgataaaaccttccttaaaagggggcttaaatctcataggctagattttatgaat

SEQ ID NO: 207209 - DNA, 601 bp, Homo sapiens
atagcttggctatgacacctccagcctaactgcactgtacatatttctggggtggacacatgatgggtggatagacagatgaacttgattgagttccctccttggactagaacagagaagaatattcctgtccttgcctctagccagctgttctgggaagggtttggaagtacaagttgaaagctgtctcccaagatccatcagttacagcagttctggaatgggcttcgggtttatgtggacaggaatctgcccaggctgcaggtgtggcccagcctgccatgagggtgctctgggttttgtggcatcagttgatctctagaggtcagaattatgttatgcccctggaattcacaattgtctgtgaatccccagtctatctggggctaaggctagactacttacatgaccctatgtttcttcccctctcttctgcacacccactccatcgctgtttgctctggttgctacatctggctgggatgtcacctcctgcctgcagccacagctctttgctctccagcactgactttctcaccattgctggcacgtgcacacattcaccaaagtgctggggtgcctccgagggcattactgactt

SEQ ID NO: 207210 - DNA, 804 bp, Homo sapiens
catcaaatgattctaaaatttatgatgtcattgtttattatctggctttactctcagcctctagaaagtaagttccacaagggcagggatgattgtcatttttgttccctgatatccctgcctatgtatttgataaatatttgctgaataaataaaccaccacctccaacaagagcaggttgttttctctgtgcccttcaaactggctatctaagatgcacattcctccaaagtgaagtctgtttctatgcagtctaccggcagctgaaacctagtgaccctggctttgaactcccagttattggagataatccagaacacagtcagaggtatggctggcactggggaaattcgtaatcccacgctgctttggtacatagatctgaaagtcagtaggcgggtcattcagcccttccatccctcaaccagctcctcctatttccaggggatgggtacacatcaagaggatgagtcaagacctttggagccatgacaaaatgagtctttggagtattttcacatttttgtgagcacttaagattctttcctccaaacaaattttggaggagagtgctatttgtgtcataagaatgagtttatttaactactatttattatctactgtggttcaggaacatataatggagatacagtggtagaagataaaatccctaacccatggaatatggtctagtgtgttattcagagtgaagcaaataaatgaacaaacaaataatagcatttcagaaaaaaaatagaaagattgaagtagaaagataccagggaggtgtgggcacagaaaga

SEQ ID NO: 207211 - DNA, 327 bp, Homo sapiens
aaggctgattcagctgacctaatctatgtacctgaaaacctgaagatgttccacagtttgctttccctaaaggctcacatttatttctgtgggtatgggaatgaaagagaccataaatagaaacccagaaacaccactgcttctttgatctatagaaataagggaggtagctttggtaaacaaaggtcatgggctgtctatggccaacactctccccaaatgtgaaacctccagttccaatcaaatcctttaacaggatggttgagaaatggaagctgtagaatgaacaagttaaaatccggtaactaaagccctggagctctgcct

SEQ ID NO: 207212 - DNA, 624 bp, Homo sapiens
taagtgagacaaattttgcagtccccagagacagagtgggagcacaaaggtggccagcgggaagtattccccacccctctccttgctcgaaggactggggtggccatccttaagaggtcattgtgtgggaattcgcagtgtttaaaaaataataccactgggcctggcgcagtgactcaggcctgtaatcccagcactttgggaggctgaggcgggtggatcacctgaagtcaggagttcgagaccagccaggccaacatggtgaaaccccgtctctactaaaaatacaaaaattagccgggcttggtggtgtgtgcctgtaatcccagcttcttgggaggctgaggcaggagaatcacttgaaactggaaggcagaggttgcagtgagctgagatcgcgccactgctctccagcctgggtgacatgacgaaaactccatctcaaaaaaaaaaaagaacctgggccctaggaattagacctgttagctacttggaccccagggaagtcacttctctgaaccttgaatttcttgtctctaaaatggggtcgttggtggtataatgaagcaccattcttgatccagaaaagtattcagttaatactaactgtagataatactcttg

SEQ ID NO: 207213 - DNA, 368 bp, Homo sapiens
tagggacatatcatcaaacactctaaaatagaatcctggccgggcacggtaggctcatgcgctgtaatcccagcttcttgggaggctgaggcaggagaatcacttgaaactggaaggcagaggttgcagtgagctgagatcgcgccactgctctccagcctgggtgacatgacgaaaactccatctcaaaaaaaaaaaagaacctgggccctaggaattagacctgttagctacttggaccccagggaagtcacttctctgaaccttgaatttcttgtctctaaaatggggtcgttggtggtataatgaagcaccattcttgatccagaaaagtattcagttaatactaactgtagataatactcttg

SEQ ID NO: 207214 - DNA, 650 bp, Homo sapiens
agtgaacaggcaccactaatgagtgaagatgagctgattaacataagagatggtgttttgagagatgatgacaagaacaatgatggatacattgactatgctgaatttgcaaaatcactgcagtagatgttatttgttcatctcttggttatatgcaaatgtgacctgggataatgtgattgaatactttgataatgcaaattaactcatttctaactactgctgcagcattttggtaaaaacctgtagcagtttgttacactggggtgagaagggatcaagagaaatgaaagagaggagaaatgggacatctaatagtccctaagcactattaaataccttattggacaagggcttgctttttaaagcatcctttcaagaatattgaataattggagctgagaactcaggagcttcactgtagtagaatactgctagtttcttaattttaattcatgttaccttaaaagtaaaacaacaggctttgccaattggacgtttttcagtaacagtgaaggagtggagtgaatgccaaatatttgccctggtggttcctatctcttcagttaaacatggtcagtattctctaaagttcccctgtcctaaaagactacttgctctgggcaaatggatatttattagactatttc

SEQ ID NO: 207215 - DNA, 408 bp, Homo sapiens
aactaaattaaaatacagtaatgtaatgggacagtgggataagaaagaaaaccagatgactctgacatgtgaccccaacctgaacttactgcttttctagttttcggtatactcaaataaaaatagagtccagtgtaatgcttgcaggggctggggggactggacagaggaataatatatttagttaatagtggggtatgtcccacattcaatactgttacattattaatatatgtgaaatcagtgtttctcaacaggactcccaacacatcagtgagcgtgccagtagttcatggactatttgcagtccattattatttatcataggacagcatagatgctttgtgttctgatatgaagtaatcattgaatttaataaagctttattttattggtgttgcatgaaag

SEQ ID NO: 207216 - DNA, 482 bp, Homo sapiens
cagcacatcttgttatttctgcttataaaaatacatcgaatctgacagctttgccccactctatagctgccctcctaattcagcgagctggagaggcaattctcggtcaggatgatttaggatattcctaactggtctctctgccatcccactataccctcctgcactgtccacttaacagtgatgtttaaaaagtaaataaatggctgggcgtgctggctcatacctgcaatcccaatacttttggaggcagaggaaggagaattgcttaaggccaggagtttgagacaagcctgggaaacatagggagaccccatgtctataaataataataataataaaaatagccagatgtggtgatgcacacttgtggtcccagctactcaggaggctgaagtgagaggattgcttgagcctgggaggtcgaggctggcactgcactccagcctgggtgatagagtgagaccccatctctgaaataa

SEQ ID NO: 207217 - DNA, 286 bp, Homo sapiens
cattgcctggctaaacatctgagaataagacagacatcgtctctgcccttggagcccatggtccacttgggaagccagatgccaaacagtaaccttggccaggcatgatggctcgtgcctgtcatcccagcatgttgggaggctgaggccagaagatcacgtgagctcctgagactggtctgggaaacatagtgagaccttgtctgtactaaaaacaaaaataaattagccaggcgtggtggtgcacctatagtaggtgcacctatttgggaagctgaggcaggag

SEQ ID NO: 207218 - DNA, 165 bp, Homo sapiens
tccagagaacaaaaggaatttcaaccaaaatatattctacccaattcctgtttgtacaacatcactgccagtacaatccataaccctctcccctccagctcaagttttagaccacaaacaagattgctaccctcaagaataattttaggtagtaagaccctgtcc

SEQ ID NO: 207219 - DNA, 571 bp, Homo sapiens
tttgagttctcccgtttacatctgggatcttgctaggtattatgcgaataagattctaacactctggaacatttacgcttgtgggtttagttgcaggtgcctgctgatagtttccaaacttggaagtatgtatggtgaacagatcctgtcagttgtagctatgtctcagcttggactcatgaagaattaaaaatctcccaacttccactatttttaatatactctgagaaataagtctataaattcacatagtctgatattttacttaaaaaaaaaatggaactgaacttggcaggaaaaaactcagtcattgtcattacaatcttacagaggtggcaagtatacaccacaagagattactattgttcagtttttgcatgttgatattatctcccctttttctttttgagacaaggtctcactctattgcccaggctggggtgcagtgatgcctgcagcctcgacctcctgggctcaagcaatacttctgcctcagtctcctgagtaactaggactacaggtgcctgctaccatgcccagttttttactgttgttgttgttcgtttcttta

SEQ ID NO: 207220 - DNA, 281 bp, Homo sapiens
agccaaaggagtagccaaataggatgaggactgagaaatgattacctgacttgccaatttcaaggtaatagatgactgttgaaagaatatttcagatgagtgccgtgcagcaggagccaatgtacagtgggtccagaaagcaatggagattaacaaagtggtgacaggtggggactacaggtgagcaccactatgcccaggttttttatttttagcagctaggaggtctcactgtgttacccaggctggtcataaactactgtgttcaaacaatcctctca

SEQ ID NO: 207221 - DNA, 366 bp, Homo sapiens
acccgccttggcctcaaagtgctgggattacaggcatgaccaccccacctggccagcttgggcaatttactttatgtctttaagcctggtgtgtaatgttgatggtagagtggggaacaattatacctatccaatgagttgtgagtactatatgagttaaatacatgaagcatttagaatagtgccttgcgcataaatatagtaaatacattaagtactatttaagtgctaactgttgttattgttattaatattagatcactatgagtttgcacttgtagcctgtaattcaaagcaatttgaacggcggaagcataaatagataaatgatcatctaaatatggcatctcttcaacccttgttgtt

SEQ ID NO: 207222 - DNA, 494 bp, Homo sapiens
agatgccccctgcaaccttcccataaatgaaccaactgattctcacaaccgaagggagaatggacacctcccattgagggagaaaaaaaaaatcacactctggcctgctggcaagtcacctgtcatttccagctcatcttcatagttccatagttagtcctattctttagtaaatataaagactattaaaagcttctacgaggtgcaactatgtgtgtctctggggtcagtcttgtgcttgacacagtgaaagttcattttagttcggtgtgaaaaaccagacctcaccaactcatcacaactaactccatcggaagcagaggattgctcctcatctgactcctcctgtgtgagacctgattctcagtcagaggctgatgccggaggatgaggagtttagacaggccaaggtgggagtgtggggtaaaggggtggcttggcctgtggtgggaacagaggcagtcagcgtggttggattattaggagcaagaagg

SEQ ID NO: 207223 - DNA, 554 bp, Homo sapiens
agatgccccctgcaaccttcccataaatgaaccaactgattctcacaaccgaagggagaatggacacctcccattgagggagaaaaaaaaaatcacactctggcctgctggcaagtcacctgtcatttccagctcatcttcatagttccatagttagtcctattctttagtaaatataaagactattaaaagcttctacgaggtgcaactatgtgtgtctctggggtcagtcttgtgcttgacacagtgaaagttcattttagttcggtgtgaaaaaccagacctcaccaactcatcacaactaactccatcggaagcagaggattgctcctcatctgactcctcctgtgtgagacctgattctcagtcagaggctgatgccggaactgagaccatcagccatagagagatccttccagaatatggtgtcattaaccccgcagttcactactgcactttgccgtgattcaggactggaactcttgtcatcgacttgaaagatcctggttgagaggaaaggcaatctgaatgccgggcacatctattgaattaga

SEQ ID NO: 207224 - DNA, 353 bp, Homo sapiens
caaccacttgccatgttaactctgtaaccttggacaaattgaacatcctcaaaatttatgaaaagaggataatatgcgactaccttataggacagttttggaggttaaatgagataatctaaaacattcataatagtccttggagagtggtatttaagaaaaatatattctgttccactttgttcctctggtcataacttctagtgtcaaataactttttctaatatatagttgttattttattaataaagtagatcagagctcagtatggtgagtttcagacagaagtacatgatatcacaagtttattatatttttttcttagctctttattctgaagtaattataaataa

SEQ ID NO: 207225 - DNA, 159 bp, Homo sapiens
aggtcctgcccctgtggtccaggaaccatactttgagaaccatttcctctcttttttcacaaatgggtcttattgtaagtcaaatcgtgtattttctacaccggaactgatttggaaagtccttcagtaacttgacttacgtgggatcctcttatgtgt

SEQ ID NO: 207226 - DNA, 554 bp, Homo sapiens
cttacacccggggtttgcgcagggaattttgcccattttcggacacttagaaaacgcgtacgcagcgggtctgttgcctcgtgccgctctggatgtgaggcttccggaaccccgattttccaacataggttctcacgcgtgtctagcaggggtttactgcccgctgccccggccgggttgtgagcacaggactccgtcacctcagcccatggggtcgatgtgtcccgtccttcgtgcctaccaatgcaggacgtcgcgtcatgctgtcagctgtcagctccggacttggggtggggggcggcccgggatttggcgaagcctgagcttccagagctcttaaggccggttccgtgtcgttcgattcgcgagtgctctactcgtggcgatacacttaggaaacaagcaattttgttccttcagaataagaaccaagactcagagcttctgccgaaatgaatatagcctgactggactgtgtaatcggtcatcctgtcccctggcaaatagtcagtatgccactattaccgaagagacaggacagtgctacttgtcag

SEQ ID NO: 207227 - DNA, 387 bp, Homo sapiens
aattttatatgacactcatattgtttctattgaacagctcagcctcaggctgtctaatttttactggacagccctagaatgattgaatgactaaagactagaagttggaaggggcctttgcctgagtcctctggaaaatagagactcaaacaaagcttaattgttaatattttggggggcgaggttccatctcagaatagtaagagtgtaagaaaagggaagtgaggctgagaaagaggggaagaacatttgggcagttactggaaaagcccgatcccatttgctgtggcatggaacttcatctgagtctgtaatttcccgacgacaattaacactgggcatggaaatggtaagagatgctccactgactcccttcggttccagaca

SEQ ID NO: 207228 - DNA, 368 bp, Homo sapiens
acaggagatgggttatatatagggagattggccaaatacaggcatacctcagagatatttcagaattggttgtagaacaatgcagttccaaaagtattctttggttctagaccaccaaaacgagttacacaaattttttggcttcctagtgcatataaaagttatgtttacactgtgctgtggtataagtgtgtaatagcagtgtaaaagaacgatgtatatgctttaatttaaaaatactttattgctgggccatgtgtggtggctcccacctgtagccctagcactttgagaggccaaggtaggaagattgcttgaggccagaagttcgaccggcttgggcaacatagtgagactccatgtttcca

SEQ ID NO: 207229 - DNA, 477 bp, Homo sapiens
tctttattgttgagtttttggaaaagaagagagacatgaatgatacaaaagggacataatagaaaaggaaaatgatcaataattagagaaaactcttatcctttctttggctggttttcaaacccttcattggagccctgcaagttctaaggaatctaggcaccggggtggcatggaggagatgaggactgagccttgacaaactccagcctctgttcccagctactcaggaagcagaggtgggaggatggcttaagcctgggaggcagaggttgcagtgagctgagatcatgccactgcactccagcctgggtggcagagccagaccatgtctcaaaaaaaaaaaaaaaagccatttccagaaaacaaagataaagagaatttatcactagcagttttacactacacaaaatattaaagaatgcacttcaggctgaggaagatggtcagaggtggatgagaaaacatgaatctgca

SEQ ID NO: 207230 - DNA, 315 bp, Homo sapiens
aggttcctgacatggagcttctaaaactgttggaattttctgagtaatataagtgtctttgttatgttaatgagctaactcatggcagggcctgtagatagcttcaggatggggtctagtccctgaaaagaccaaaaaggtaattagagttggggctttgagccacatgatattagccaacccttcagacctctagggagaagagggacactggagattgagttcaagtacatggccaatgatttaatcaatgatacctatgtaatgaatcctccctaaaatctctggacattggagctcagaggaacttcctgg

SEQ ID NO: 207231 - DNA, 374 bp, Homo sapiens
aaaatttaaaagctggataagccaaatgttggcatagatgggttctgtatcttgatggctgatggggtgtggatgctatagcctttctggaaggatctagggctactaatgctatgacccagcagttatgctgcttagtatatagtccagagacattctcataggatccacaagagcccacaggtttgaggttgtttggtgtggtgtatgtacgtgggagagcactggagccaactgagtgcccaccatcaatgagagaatgcacaggtgaaatgtggcagatgacaccagggtgatgttcggcaatgggaacccagattagataatgcctgtgccacatgtatgagatttcagaacctagcagttttttagag

SEQ ID NO: 207232 - DNA, 853 bp, Homo sapiens
accccagacagtcacatacatgtctgactgtgttatcattcttatttcagctcaaatgtcacctcctccaagaagacttctcagactaccaccaaagaggccaccatattattctgtctcctgatcctgtgtagttccttcaaccctcttgtcccagttgatctgtttcattggggtgtcttcttcaccccaaggcataagtttcatgaaagaaaagaatgttgtttgagtcactgctgtatcctcagagcctcagacagggctggacacattagatgccacataaatgtttgctacatggatgaatgagtagaatagacagatggacaggtgggagggtgcaaggatgttagctcaggtggtcaaactctctagaaaaataacccacccttaacaggcatggttggcttgatctccataaacattcccataaaggaaacgtgggaactgggaagcccaaggctcaaagcaagaaatgactagagacagatcacaggtcactcagtcagcaagggggacagtcaaggatagaagcttccttgggtgaggagggggctgctctgctcccacagtgggctcagggttcatacggtcctgcggaggcctccccaggcctacctctgctgattaaagtttccccaaaaagcaagctcctccttctacttgccctctaagctttcggggtactagaagctaatcatgcaatttttcttttttctttttcttttttttttttgagacggagttttgctcttgttgcccaggctggagtacagtgcgagactccatctcaaaaaaaaataaatagggccgggcgcggtggcttacgcctgtaatcccagcactttgggag

SEQ ID NO: 207233 - DNA, 398 bp, Homo sapiens
gcagaacgtgcaggtttgttacataggtatacatgtgccatggtggtttgctgcacctgtcaacccttcatctaggttttaagccccacaggcattaggtatttgtcctaatgctctccctccttttgccccccactcccctcgacaggccctggtgtgtgttggtcctctccctgtgtccatgtattctcattgttcagctcccacttacgagtgagaacatgtggtgtttggttttctgttcctgttttaatttgctgaggatgatcaatcagctttttaagcctcttactcttaaacataagtagcaagcaaggattaccaaattcctgaggaaagccctaactaacacaaaggacaggaccaaagcaaacagaataggaatggagtgagagaga

SEQ ID NO: 207234 - DNA, 752 bp, Homo sapiens
ctagtggacccactgcatagtgtaactttgggatgaatttaaaagaatatttaagtcacagtcaattttctgttggtctaattttaccaaataaccccctaaataagaagtctgatttatctaaaatagaagttaacatagcatcccagtattgccattctaaaactctggcatgtaaatgggagaaatggaaataagctcaaaatgggtagagtaacccatttctgcatgaaccatagaatttaactagaatttggctggctcatgcctgtaatgccagcactttgggaggccaaggcaggcagatcacttgagcccaggagttcgagaccagcccgggcaacatggtgaaactccatctcttcaaaaatatatatttgtgtgtgtgtgtgtgtgtgtgcgtgcacaaaaattagctgagtgtggtggttcacacttgtaatcacagctacctgggaggctgaggcaggaggattgcttgagcctgggaggcagaggttgcagtgagctgagattgcaccattgcactgcagcctgggtaatagagcgagacaactctatctcaaaaaaaagaatttcactagaatttatatcttcagtgtttgcattagattgtcaccagcactatctgccttgtgactgtcaggactaatccttatatcatttatcttatgtcctttacctcagtttatgtctgtcaccacaagaaacccagacctccctaatcataccatatgccctggtcttaccca

SEQ ID NO: 207235 - DNA, 339 bp, Homo sapiens
tgtaattatactttctaaacgggaaaccatttcccagttaagtaataagaactgcagcgttttcctaaccgcagacctcccagtgaccacagaaccaagaaagtggactgtgttattgcgagcgtcaatttttgggttttgttttgagtcctttctgaaactgtcacttatcaaagagggaggggagaatccactgggaagaggacaggagtagaaatcaagagaattctgtcctagggtaagctcctgatttatggtgggttcttgtgaatgtgtctaatgacctggccgggcacggtggctcatgcactttaaaggaccgaggtgggtggatcactt

SEQ ID NO: 207236 - DNA, 483 bp, Homo sapiens
catcttggccaggctggtcttgaactcctgaccttgtgatccacccgtctcggcctctcaaagtgctgggattacaggtgtgaatcaccatgcccggctagaagagctttatgttcatgatgctgagatgaagttggggccagaagaagagtcagttgataaaagctaaagtatttttagatcctgattaaagaagaaggtaatgggttgacttgagagagaatgagcgttctgttatgggaatgctcatatgggaaatgttctgtctctttgtcaaaaactgcaggaccacctgttggtgacattggaggaattcctgctttgtgtgggagggtgaactagatgcggtcatgttcacaccattctccccttttgtaatttttcacacctccctggctccccttttataatttagaaagaggtttagaagtctgtaactttttgtattagatttactttgagaaatcttgtacttaatttagt

SEQ ID NO: 207237 - DNA, 580 bp, Homo sapiens
gcacgagctgacaattcccttttgaatgtcaactccctgataacagctatcttgtttgtcttgttctgattgtatccgtcataccttagcatctggcatattgtaagctctcatatattcagtgaataattaaaccatgccctgatatgatcaggctctggccttgctatcctctcaacttcccctctaaatcctataaactagtgttactcaaagtgtggcccatgggcctgtagcatcagcagcacctagaagcttgttagaagtaggttcttgggccccatactagacttcctgaatcagagtttctggatgtatggcctaggaacatggatttaagcaacctgtattggccattcttatgtatgctgaggtccgaggaccactgccatgatcatggaaatctcatccacatcaatttttgccttctaaaaaagcctgatctttgttgcagtgtggagtttgctacacatgcttggctgcatggggccctggattatccacaggaacttgattctagaaataccaaagcactgttgtttcacagcagcccgacgagtaggccctgcatggaatgagg

SEQ ID NO: 207238 - DNA, 529 bp, Homo sapiens
gcacgagctgacaattcccttttgaatgtcaactccctgataacagctatcttgtttgtcttgttctgattgtatccgtcataccatgccctgatatgatcaggctctggccttgctatcctctcaacttcccctctaaatcctataaactagtgttactcaaagtgtggcccatgggcctgtagcatcagcagcacctagaagcttgttagaagtaggttcttgggccccatactagacttcctgaatcagagtttctggatgtatggcctaggaacatggatttaagcaacctgtattggccattcttatgtatgctgaggtccgaggaccactgccatgatcatggaaatctcatccacatcaatttttgccttctaaaaaagcctgatctttgttgcagtgtggagtttgctacacatgcttggctgcatggggccctggattatccacaggaacttgattctagaaataccaaagcactgttgtttcacagcagcccgacgagtaggccctgcatggaatgagg

SEQ ID NO: 207239 - DNA, 435 bp, Homo sapiens
tgaatcacctgagatcaggagtttgagaccagcctggccaacatggcgaaaccccgtctctattaaaaatacaaaaattagtcgggcatggtgacgcgccactgtagtcctatctacttggaggctgaggcacgagcaggaggcggaggctgcagtgaaccaagattgcaccactgcactccagcctgggtgacagagtgaaaccccgtctcaaaaaaacaaaccaaaaccaaaccaaaacaaagcatcaaagtctacactgtggcctgtagggcccggcctggtctggcctggtctgtgactttgggcctcgtctttctcttctcccctcctgggtctctagactccagcaacgttggcctccttgctgcctcttggcatgccaagctctctcctccctgcagacttcattcctgctgttccttctgttctaga

SEQ ID NO: 207240 - DNA, 575 bp, Homo sapiens
ccctcacagtctaacagggagacagacagttacacatttgggtgcaggagttgacactttacaattgctcaggcaagaaagtattttatcatttgtggccagatggagtcctttgaacagtgaggcataatatttgtcacccaattcctgttggaaaaaaaccctttgagcctctgacctagatattttaaccattgtttgctttaatttgtgttgatggtaatgtggctgtgaacgacacggaaactggtggacagtcatgtcaaggtctaaaaccgtgggttccctataccccaagacagacagaaatagctttttgtcctgtctagtctaatagactcactttttagaagacgggtctcctggaaaccttggatgttgctaattgacagccactaagtggtccttccttgacagaatatgtgagtgatctcagcctcctcccaggagcagcacaacccactgctggagggtgtgagagagaatatgaagactgctggacctcttttttaagggccgatttcttttagcagaggggaatatacttgtaatctattccctttgtaatcatgaaa

SEQ ID NO: 207241 - DNA, 177 bp, Homo sapiens
tctctcaaaaggatttccaaaactcagattctgaataaaagccaatggcagatatgggtcatcaggaagactagacatgaggccttagcagagcctgtcttagtggattagacgggcgggctcttggagtcagcacagccagagcttagccgtgacgtcggcaccggaggagaggag

SEQ ID NO: 207242 - DNA, 147 bp, Homo sapiens
ccactgaatgcagttcctcaaataaacgtggccttactgattagtataatcacagacagtatactcagagaaatttcccacttaatgtgagaataattaatcagtgtctacattatccttaccacatcttgctcatgcataagtgcg

SEQ ID NO: 207243 - DNA, 210 bp, Homo sapiens
aacatcttggtgagtatgaaaagaataccaggtgtttctgttggtctactttttctgtaaatggataatgcttgttgtcttataggacagtgcacttacaagaatgacaccacaaagtggtgtattatagaaacagaaatcccagtggtcactgtctacattggtgaggagggaatgctattacatgagggaaaatggaagcccagaatc

SEQ ID NO: 207244 - DNA, 600 bp, Homo sapiens
tgagccaccatgcccagccaaacaacttaatcttatgtgaagcagatctctttaagtaaacggaagtgtatgaatttgacaaattctgtgtttattaggagagatttaggcactggtggtgttggggcccacgttcacagctctgcgtgtatatacatgtgtgtattcaagagcatatatattgtggtctggatgaagccgcggctcataaataaggggtggccttgaatgaatgagtcagtctgctactcacaactcttttatggggaataataatggattcgctcaaataagatcttgtgacttctgtcactgattctgtcgtagacctttataatttatcattattatgatgattactactaataattacagtgaacacttcttgagtgcttacattgtgccaggcacttatatttatttagtgtttatgaaatatcatgaggtagatactattattaccttcattttatggacgaggaaactgaaactcaagttaggaaacatgtatagccagtgagccatgattgcaccactgcactccagcctgggcagcagagattctgtctcataacaagaacgtgaggaaaggcaaggcga

SEQ ID NO: 207245 - DNA, 427 bp, Homo sapiens
aaaccccatctctactaaaaatacaaaaattagctgggcgtggtggcacatgcctgtaatcccagctacttgggaggctgagacaagagaatctcttagacccgggaggcagaggttgcagtgagccgagacgatgccactgcactccagcctgggcaacagagcaagactccatctcaaaaaaaaagaagaaaagacagtagggagaaatggatgtgagtaatagtaaatgagagaagctgcatgaaggaggtaagacttgtgctaatttttttaaggatagagaacattttatttgaaaagactcaccagtagaaacatgtatggggaaccagtgcgaattttgacttttttttttacctaaccataaaaatatatctcctaggaagttggagtcctttttggaaaagattaatacactgatgct

SEQ ID NO: 207246 - DNA, 662 bp, Homo sapiens
ggtgcgcacttaggatgtttctgagaggtccatccctgcagcaagatgctaccaccaggccaggaatgagacctaggctggaagcgaactcagaggagacaggccagggcagctgccaccttcagcaaagcttgccctactcctgacccaaaccagagcagctgtggccagagcattctccgaatgtgcaccataggcagaagattcctatcagagtagcatcgtgaggcagctaaaatgccaaatgtcacttcaaaaagaagccaggatggaagtgaagggcctgcacttgccccacatttgcacgcttccagacgaatcattaacattcctcaacacatcattccaaccataccttccgctgcatagtcttcttccttgctcacttgtatttttgcaataggagaaatcaactatgcctacttagcgctttcttttcttaagccttaagatgcttacatacacattttgaaaagtatactataaacagattcataataaacttcacaaaagattttcccacactgaggttattttcaaaacatatgccaaatagacgaccattcgtttttctccaataatgagcttggatttccaagttacccttgtcataagttacactttccaggaaaaagaagtgaacatgtggaaatgatatgaac

SEQ ID NO: 207247 - DNA, 904 bp, Homo sapiens
tggacattccagcgtatcgcagaaccggaattcagctcccattgcccacaacagtgcttccctgcctcagtttcatagaaatgatcccttcgtaactcagcagctcatatacagtgataaagtatcaagtccatcgttttcccaaatcaagagcaatgcatcccacacaaatgggcaagaattgcagctgacagaggaatctccctatctttgaaccttcaggattttgcagtgatgtcaaggtttacacccatgtcttcactcccaaaatttggatttgagcctcagatctactatttactaactctatgatctttgacaaatcactcgaattcctgatgccttaagaatccttttgttcctgagcagagtgacacagtctcctgcagttgaggatcattgatctagagcattgattacaacggaaggcgtctaaaggatgaggcaaaagtgaaagccagattatggttgtatgtttttcctgtaagccaccacaaaccttttgtgcaatgagataggtgatgaataaagcatggatgaatccacgcattagatgagtatgtgaagtggatatggagagcacataagaaccaagagcagacagagccctaaggaaagacctggctgacctgccggaaggaaaataggtattaggaatcctgaaaaccatacttcagaggattatgtttccacgcacagtggggtctaagtgagagtctgtggattcgggttgacttaaaattttatggcggacttccacgccctggcggtcattccggggagtgtcccaactttcttacccgggggcagccggttgggaacaccacgaaactccccgacagggtcttgttttctacactgaacggggctctggttgtcttctccgatgaccactgttttggga

SEQ ID NO: 207248 - DNA, 603 bp, Homo sapiens
aaaaaaaaaaaaagacaaacaacagaccttctcaaatcaaatatcactgtgtctgtggtttggctaaaggataccaaaagttgttccccagtgagacatgcaaggagggtagcaaggcctacccttttacccagaaagatcagcgttaacgagaatcagttgtaaatgtgaataaattaggaaaacagccaggatattgtggtagatagttgccaagatggccttccagaagacgctgtttctaatattgagtagttgactgtaattcctctccccttcaacctgggctgtcctgagtgcttccttgaccaataaaatgatagagaagtctgaacttccaagactaggtcgtatgaaatcttgcagcttcctttagtatcttgcaatggtccctatgggctgtttcttgtcaaaagctagtctcaatgctctgagaagcccaagccacctggagaggttacgtgtaggttctccatttaacagacttaatgggctttcaggcaacagcagcatcaactgccagtcctacaagtaagccatcttagatgtgtccatccagcccagttgaacctttagatgaccaaagatgaaatcaagatactg

SEQ ID NO: 207249 - DNA, 251 bp, Homo sapiens
tggaccagtatttttgaaggaagacggagacaccaggtttcatatatcatggggaattaaaggttgaactagactgaagcaaatggatgaaaaaagtagaatatggtaaatccagaagaagagcaatcttgtcagattacttaaaagaaaagttcgagcttgcagtgagctatgatctcaccattgaacttcagcctggaaaacagagcaagaccctgtctctaaataaataaataaataattaataaagc

SEQ ID NO: 207250 - DNA, 233 bp, Homo sapiens
ggaaggtcacaggcttttggctcagacgtagctggaattaaaggccagctttattacttctttagctctgtgtgtacagggacaactcgtgcaccctccctgagcagctctctgctcttctgtaactgggtcacttatctgtgtatggctgctgagggaattggattgttaaagtaggtaaagggcctggacagagcctggtcctctgttaacatggtaacatctggagccca

SEQ ID NO: 207251 - DNA, 191 bp, Homo sapiens
caacagacagaagaaactgaaatgatcatcaatagctcccatttgtatagtacctaaggccaaagtgcattttatggataaaacattgaatctgacccacataaagagtaattccgccttattaaagaaaagttttttcttcccttattccacaatctaggcttggctatatgagctctgcacggtgggga

SEQ ID NO: 207252 - DNA, 625 bp, Homo sapiens
tcccaggaaagcagcaggagccagcagtgtgaggagcatagaagtgtttctgtcctggtggcacattggaaccacctggcatgctttaaaaaacccaacactgacaccagagagtctgacatgatgggtgtggcgccacctggcatccggctttcgaaagcgccaccattggtctaatgtgcagccaaggctgagaatcaccactagggcaggtggactcaaattccacacccttgacattttgggccagataattttttgttgtgagagccatcctgtgcactgtaggatgtttagcagaatccccgacctatacgcactagatgcctgtagcatgacccctcattatgaaaccagaaatgtctccagacgttgccagatggcttctaagagacaaaaatctcccctcctggagcatggctttggaggatagcaaccccgaacttgcaatcctgactgctatgtgaccttgggggggcgctccttacccacctgggcctcggtgccctcctgggcgaaaggggaataatcctaccttcctggattgttgggagaatatggagggcaataggaactcacatgtattaggtgctcaataaatagtactccacttttctctggaatc

SEQ ID NO: 207253 - DNA, 610 bp, Homo sapiens
cagggagaccattatagtggtagagggaggcaggaagcatgagaattgcatcaacaagagcacaaagggaatgagcaagaagttttcaaggtacacgcattttgtagccaacatgtattgcatgcttgcacatgctgggaattaggccacatagattaactcaatccttacctcacctctgtgaagtaggtattatcactacctgcttttttcatataacgttgttgaagcttagagaaatgaggaacattgctgaaactaggaagtggtggaaccaggattccaacacaagctatctcttccagagttagggaatatacggcctcccatggagaccgagagagcttccctgtcccacacaggtatggaagcccagagctccaagatcaccacagctgcccaatcatccagaaagaggtgtggagagggaaacaatcatgacgcggaccgccacgaggtttctccctgatggacggggaagtcttctttgtggaagacactgagccacgctaagaagccgccaggcttctcagagacggggcagacccagcaaaagggaggtcagagcagaggccagagcacaggcaggatacggggggaccatgccacc

SEQ ID NO: 207254 - DNA, 421 bp, Homo sapiens
ggttttctttatagaacgctcctcaaccgggattggtccggtgttttgctcatggttaaaccagtgaggtgggtttttaggagggagaccacaaagatcaagtgccataactcatcatatcatattaaggttacctacgacaccatgatttaaccttgatcacctggctgaggtagagtctgtcagttttctctatggtaaagttatgcttctcttccttcacccacccctgccttgtaccccctgtagagggaagtcactatgcacagcccacacttagggagtgggatgttagactccccctccttgagggcagaatgtatatgtacatgttttgcaatttttctgcacaggagatttgcctattttattctgtatttatttcatgaatatcagtataaactcatgaatttttttaata

SEQ ID NO: 207255 - DNA, 170 bp, Homo sapiens
catgcttatttcacattgcatgcctgtatcaaaacatctcatgtacccccaaacatattgatatatacctactttgtacccataaaaattaaaaaaaattaaaagatatgtatatacatatacattagtatatatgataattaatacaaataaaaataataaaatgtttg

SEQ ID NO: 207256 - DNA, 597 bp, Homo sapiens
ctcaactttcctaaggttaaatatttaagaaaaaaatatgtataaaaaatggcagaataaaagagattaagatataggtgcattataataaaattttaataaaattaataataaggaaaatacaaaagaaagccatccactataaaattttaataaaattaattataataaaaatacaaaagaaagccatccactaaaattagtaccccaaaacactttatattagttaactagctacagattaacagttgttggcatgcaaagtttcatacatacttgacttctcatctggtctaatttcttccttgaatcctgcatctcattttctaaatagatgcaatgacgcgatgaagcatccagcaaagcttttgttgctgattgtttaagacatcatcttgttttcattgaagctgtctcacagctacctgatgttatttttgttactgattttacaaatcaccttattattaaaccattaataatatttaactctaaagcatacactttgaaaaatatcaccacacagatcgattcaccttcttttcctcatgtgtacacattcctgtgtattactgaatccagttaaggatacagaag

SEQ ID NO: 207257 - DNA, 443 bp, Homo sapiens
ctacggtaccgagacagcctcaagccaaatttaatttaattaaacaatcatcacctcaatcttaatcttggcaaaggaaatactaaaataagatgggccattgaggaatctttgagccttccaagtaaaatggcaaatttcaagttacactgcgttactacaggaactacagaggttagagttttgatcaaagacttaaaaaattgccatccagtgaacagatacctgattaaagttacctctaaagagggcaaatatttaataaatggcaacaaagagctggccgggtgtggtggctcacgtatgtaatcccagaattgtgggaggccgaggaaggatgatcgcttgaagccaggagtggtagaccagcctgggcaacatagtgagaccctgtctctacaaaaaataaaaataaattaaaaaaattaaaataaataagtaaa

SEQ ID NO: 207258 - DNA, 943 bp, Homo sapiens
aggtggcgccgcggagtaagcggcgctgtgtgctggagcggaagcagccgtacagtggggacgaatggtgctctggaccggacagtgaggaggacgacaagcccattggggccacccacagtgagtgcctgtcgatgccagggtgctgtagcccgtgatgttcctgggggatggacttgagaggactgagcctgggaaagaagtgaggactgggagtcctggatttttctctcccatcctacctctcagactctgtccctccctacactgcaactgcctcgcctctgccttccaggtgctcagtgaccccctctccctagggaccctaggtggggcagagtggagtggcctccttcttggtcacgtcacctgcacctctacctgtgaattcctggcctatgctgccacctactggttagtggagggagggcggtgaagcgtccagggacactgggagccgggcagttggctctgctgtgcaaagccctgctaagcctgggtgtgagttgccacttggccgtgtctctagtgcccttccctaacctctaattgactcctggcaagtacccagggtgtgtcaccaggacaagaagtgggtgtggagggatgcccactcctcctctgattcttttatggattcgcctatatcttgtccttccatgagtgatgggggagagccagatgtaacccctgcccctgggaagcttgtacatattttttttccctcaaagtttacgtttacatctttttgaggagagagacataagaaactagccagagaggctgggtgtggtggctgtcacctgtaatccccagaatttggggagctgaaaccggagaattgcttgagcccaggagttcaagaacagcctggccaacatagggagaccccatctctaaaaagagagagagagagaaagaaaggaaagaagtaaagaaagaa

SEQ ID NO: 207259 - DNA, 344 bp, Homo sapiens
gagatcacggtattgcactccagcctgggtgatagagcaagactcagtctcagaaaaataaataaataaataacaataacaacaataataataaattatggttgttcacataggtaactgaaacaaacatacgatttttgagtcaagttacgtttggctgcacattttagaaactatgcttcatgcataaaacaaaccacatcacacattatcttctgtaacatggaagtatattttttgttcatataaaagaaatctctaggtagcaaaggtgtactatagaggttttattatctggctcgcttcttccttctattccactttcttgacatggtttttattcc

SEQ ID NO: 207260 - DNA, 229 bp, Homo sapiens
tgggacttcaccttgtgatcgtgtgagtcaatttttctaataaactccccttcctatatacatatatcctattaattctgttccttcagagagccctgactaatacactacccaaaggaaaagaagtcattttatgaaaaaggcacctgcacacacatgtttatggcagcccaattcacaattgcaaagatacggaagcaacctaagtccacatcgatcagtgagtgga

SEQ ID NO: 207261 - DNA, 177 bp, Homo sapiens
ccttgggaatggtgggagtttattttctggtaacatttgtcaattgccttgcaataaaaggagtctttcaattaaatctatcctttctgtttaccaggtgctgcaggccacctatgggttgggtagtgggagaacagggagtctcagttaacaaagaatagtagaccattaaaaaag

SEQ ID NO: 207262 - DNA, 435 bp, Homo sapiens
tgagccaatcacttaatgcctccatttcaattactttcttaatgccatggctttgaattcctcacctgtgaagtgagatgagtaagaacagaaactatcaagttctttctaactctaaaggtccagggttcttgatgccctcagatgaagatctactgcctgtccctgtctctttgtagcagattacttctcaaaggataagggcaggacttccaggagagcagagcagtgggaggtgtggatggtggagccagaagacccggcatccatcagttgtgaagctttcaggcttaaatacatgtttccatctgtataatcttcgaagaaacaatggcaatataagtaaaaagaaaaacattgtttagcacaagtttgtatcaaaatggatattatagtagctcttgacaatttactaaagacaaattttgagttact

SEQ ID NO: 207263 - DNA, 308 bp, Homo sapiens
actccgtctcaagaaggaaaaaaaaaaaaaaggaatgctagtgttatttttttcttgcacttagagacttgataaggactagttatctaatatctgtatgtttttagaagttgttgagagcagtgaaattactaataacaaccaccaaatgacattaaactttatatgacattttcatacattaggaccaagaggacttgtcaaaatttaacaaattaaagagaattgataaggctgtagaagggacaatccgtgttttggaagtcttaatgttttttaaaaataggaaaaattctgtaagaaaaaaa

SEQ ID NO: 207264 - DNA, 313 bp, Homo sapiens
atacattaaattaaagcaatttctgctgattgctttgtttgcatttttcttacatttgacatgttagcaaagtaaactttttatctctaggtctttcatttgtcatcgtttttggtgttttgcctaagtatttccatatttttattttacttgtctgtggaggtttgctattaagttctgcagttttgtgtgaggataaggagttttgagaatcctgattcttaaacatgtttgagggtaaggaaaaaactttgccttgaaaagtagcttcactacccagacatccaattaatgctaagaagcctttgcattt

SEQ ID NO: 207265 - DNA, 287 bp, Homo sapiens
agggtccggaactcctttcacacatggtctgaagcctccctttacaaggtcttatcctaaagtaggtagacttgagacacactgacccgccagatgagacaaagttgcaaatctcaggtagttgtcacctccactctgcggcacccaactgctgccataaatttccatcatggccctcaaaaactcccagctcacttttcagcccaacgtccatgtgcctaaaacaacttcagcttcacagtccatttctcaaaagtctgcttttgccaaggtctctaatccacaat

SEQ ID NO: 207266 - DNA, 696 bp, Homo sapiens
tcatagtctgggcacaatgaagtaaagaaggcatcaaagaaagttttagtgtgaggggatcatgtgaacagcccaaaagtcactgaaacatacaaatacaaatcctagtaaggcccttcttatgagagtggttttttcgtttgtatttctaaaaaggctaaaaagttgtggctcaaaagattaagtaatccactttaagacatgttgtgtggctgggcgtggtggctcacatctgtaatcccagcactttgggaggccaaggtgggtggatcatgaggtcaggagttcaagaccagccggccaatatggtgaagccccgtctctactaaaaatacaaaagaaaaaaaaaagttgggtgtggtggcacgtgcctaagaaatgagtaatagggccagcatcaagagcctaggaggatcaatgagttacaggacacagcaaacacatgcaggccagaggcactcttcttaattccaggttccacagagaaactagttaagcaggaaaaattgttgtactccataactcctctctccgttctacatatagctaaaacctaagaagaacccaaaatagtctcagtggccctcaaaaactcccagctcacttttcagcccaacgtccatgtgcctaaaacaacttcagcttcacagtccatttctcaaaagtctgcttttgccaaggtctctaatccacaat

SEQ ID NO: 207267 - DNA, 432 bp, Homo sapiens
cgaagacctcattccgggccagggaacggaatatccctgatgggattttatgtgaggggtctgagagccgcagggccaccggggtcacagatcaggcctgctcaccagccctctgcactcacctagtcctggctcatcatgagtccaggcaccgcccggcagtgatgatcaccttattactgaattccactctcgctgaagaacccccacatttcatcaccacccgaccttccagcgggcctggtgagacgtttcctcctgcagcctgaacttggtggagatggggcagctcccaggcctgtggtcagaggttgggtggggagagtagggacagtgtggccagggcaaatgggccctgagctgtgctttggtcacttggctggaggaaaatgtgaaggggctggtgggagtatttttggggggtgtcagaga

SEQ ID NO: 207268 - DNA, 396 bp, Homo sapiens
ccaccatgtgtagacaaagaaaaatagctattttataaagaataaagattaaaagaaaaataaatttgagacacctgaaacataagactgacttagaaagataggagaatttactattaagatactgaaggagaaagctgcctcagttcctacagactgtccaccttccaagtccagttcctcatgagacttagttatgctcctcaccctttgtctccatgaaaaatcctcagatcccatagttattctctctcccactccccgtctgttttgcggaagtcagttttagtgaacttctgttaaacacaatgaacagaatcttaatccatgtttgtcgtgggcagcatccaagatgggccccaatgtatctcctggtattcacactcttgtattaat

SEQ ID NO: 207269 - DNA, 158 bp, Homo sapiens
ggggctacatacagtccacgaaaccgcctcccccttcctcaccccactaccaagtaataatgctaataatgcaattatctgaatgtttcaggtgaaagagtttgggggtttacttcatctacatcacatgcatacatagtcccaatactaaagccaga

SEQ ID NO: 207270 - DNA, 540 bp, Homo sapiens
gtgggcagataacttgacgtcaggagttcaagaccagcctggctgacatggtgaaaccccatctctactaaaaatacaaaaattagccaggcatggtggtgggcacctgtaatcccaactacttgggaggctgaggcagaattgtttgaactcgggaggcagaggttgcagtgagccaagatggcaccactgcactccccctgagagcaagactccgtctcaagaaaaaaaaaaaaaaaaacccagtaatttccaagggtctgagaagctctgtgccagggaccagggacaaagaccaaatattttttattttgccacatctatcttcttagcaatttagattactttcccttaaatataacaaattccattaagcatcagtttaagttgaggcgtaacagaaattattattagcaaaaaccttgagagataagaatactaagcgggagaaataatagaagaactattttaaccctaatatactttgtcaagtctgacttttttaaaaatcgcatttattaagcttgcatagagctgact

SEQ ID NO: 207271 - DNA, 288 bp, Homo sapiens
gaagcttattagtgttaaaatcttcttttcaaatatgaatatttaaggcttcagggtttcacacacgttttaatatgtcctaagtttctttttctttgaaataaggtcttgcgctctgtagtccaggctagagtgtaatggtgttatcatggctcactgcagactcaactttgcaggctcaagtaatcctcccatctcagctttctgagtaggggctacagggggacaccactgtgccgggctaatttttatttttttttgtagacgcagggtctcactattttgctc

SEQ ID NO: 207272 - DNA, 471 bp, Homo sapiens
agaagtgggaggctggaagtagggggctggcagaacatcagggaagccttcttaaagaggcctctgagttgtgaagcacagaatgaaataggatattccaggcagaggggtagagatgtgtgcacgtctgtaatgttctgttctcagggtcttggcggggggcccagctctccaagcccagaccgccctcgtgactttactttattctggtggctgatggccaaccaagcacgaagtcctgaattctttgctctaacacaatgcttctcaaactttaacgtgcttatgaattgcctgccagtctgactaaaaggcagtataagattccttagttctaaggtgggggttgagattcttcgtttctagatggtgccatttattggttacattttgaatagtgggtagtaagaaactcttctttctcagcacaggtccctcatgtcagactgttgtacccaagcgagttagtga

SEQ ID NO: 207273 - DNA, 225 bp, Homo sapiens
gcctccattaatttcttatcagctcaggctatgatattgcactttacacacatcatctttcttcagctctccagtattctggtgagatccatgatactatcaccctcctttttacagatgagaaactgaggcaagggaaggttaggtatcctcctcaccccatgtccttccagcatggcctcctggaaggtcttgctgctccttctaactggatctctgttgatt

SEQ ID NO: 207274 - DNA, 302 bp, Homo sapiens
atgttactaacatgctaactcacattcatttaccccacattttgttccttagggggataccttgatttggtttcatctataataaatgcaagattcaccagatatgacatatttcattagtaagtaagaaatgtcctgattttaaatatttaatttatatatgaaaaaacattctctggcattttatcatttacagtgtatttcagttaaaatttaagatataaaaaactgatttaatttattgatattactaatgttctttctgcactaaaaggtagataataaacctaaactgaaaagca

SEQ ID NO: 207275 - DNA, 467 bp, Homo sapiens
ctgctttgccatagaaatctacttccaggtaacagggtggctccaggtggtgagggaaagtatagctaatcaatatagatgaatgacaggaagccatcattggcaatttctaatgaaatcattgattcaggcaaggatcatcaatggatgctattgtctgaatgcttgtgtcccccaaaatttgtatgttaaatcctaacccccaaggtgatggtagtaagaggtgggactttgggggctgattaggtcaggagagctccctgttcatgaatgggattagtgccccttacaaaagaggcttgaaggagcctctttgccccttctgccatgtgaggacatagcaacaagatactatctatggaagcagagaatgagccctcaccagacaccgaatctgctggcaaccttgatcttggacctcccagtctccagaactgtgagcaataaatttctgttgtttataaatt

SEQ ID NO: 207276 - DNA, 352 bp, Homo sapiens
taggtggtggcagcagcaaagagaggggacatttgaattgggctttgaagggtgcataagagtttaacggggccgggcgcggtggctcacgcctgtaatcccagcactttgggaggccgaggcgggcggatcacgaggtcaggagatcgagaccatcctggctaaaacggggaaaccccgtctctactaaaaatacaaaaaattagccgggcgtagtggcgggcgcctgtagtcccagctacttgggaggctgaggcaggagaatggcgtgaacccgggaggcggagcttgcagtgagccgagatcccgccactgcactccagcctgggcgacagagcgagactccgtctca

SEQ ID NO: 207277 - DNA, 285 bp, Homo sapiens
atatgtttaatgatgtgtgtttgtgttgttgttgtttttttctctgtaatgcaattgtttaacatagatttaacaaagacctcaatgttttaattaaaagaatcctttgaggctaagatgactgcctgttccatttgctgaccttgggttacctttccatgcgtggctctttgaaccattgtggcccttggctgaccaaaaacaggaagccatgtgacgaccgcaacctttccccattagacctgggtggtgaggatcccaagggttagacacagatgagattaa

SEQ ID NO: 207278 - DNA, 169 bp, Homo sapiens
ttacctcatttgattctcaatatacgacacaaaatattgtttctattttacacatgcagggaagttaacagggaaatccacatggtcaggatgtgaaagcaactgttcaggccaaggaccagacttgtctttcttccctcactgcctcctaattctgcagagtcctaag

SEQ ID NO: 207279 - DNA, 697 bp, Homo sapiens
agctgggcatggtggcgggtgcctgtaatcccagctactcaggaggctgaggcaggagaattgcttgaacttgggaggcagaggttgtggtgagccaggattaccccactgcactccagcctgggcgatggagcgagactctgtctcaaaacaaacgtacaaaaaaggaatgaaatactgatatatgctgcaatatggatgaaccttgaaaacatgctaaatgaaagaaggccacatattttatgaatccatttatatgaattgcccagaatcggaaaatctgtggagacaggaaatagattagcggttgccagggaggaggagggaggatggagagtgactgctcacaggtacacggattgtttggggtgatttgggaactagatggtggtgatggttgtacaacattgtgaatgtaccgaaaaccactgaattatatacatttttaaatggctaaaatagtgatttatatattgtatgaattttacctccgtaaaaatggaaaaaaatctaaagttataatgaccgaatgagacatactgattttgtaacaaaaaggcaaaaacagagccggttacattagcacatgcttgtaatcccagctactcaaaaggctgaggcagaaggatcgcttgagcccaggagttcaagtccagcctgggcaacatagtgagaccccatttatatttaaataaat

SEQ ID NO: 207280 - DNA, 152 bp, Homo sapiens
ggattcttaagcacgttctccacgtatgcggcgtgctagctggatgtcttttggcataattgttacacgtttggcatggatagcccacaggttgttgtcttcaaaaaggccaaccagataggcctcacttgcaaagcaactatagctgctct

SEQ ID NO: 207281 - DNA, 546 bp, Homo sapiens
cctcccctaaatgctaaccttttaataaattatttccagtactctaattataaggatgaaccaatttaagactaccagctaatcatgaaaacatacctaagacaacaatccactcaactatttattacgaacctgctaggtcctgttctaggtagctgcagacagaatgacacataaaatagagcccctccctgttctcatgcagtttaaattctggagggacgtttaaaaaaaaaaacaatgatcaaagttacttcagagagacaaaactgcaacgtggagaataagggtctgatggctgaaaactgccgcgggtgggcagtaatttcagtgtaacctctctgaggtgttggcattggaactgagagggaatgacataaaagaatcagctatataacaatctcagggcagagtatgaggcaaagaacaaagtaattaagacgctgagacaggaataagcttgttcagtgggtgtggagctggaatggctgggcacggtgaacaaggtgaaacaagataaggtttgtgaggtggccaggggccaga

SEQ ID NO: 207282 - DNA, 684 bp, Homo sapiens
gttaccccctgccatactagtcatctcctatgacccacaatcctcccctcaatctgcaagtgacacccaaggatatcacttacctcctatatcttctgatagccttcaaacgctggtgaactctagtacagtggatatttgtcttttctaattcatactgtcttctacagccatagtgtggttcaactgagttttgatctcacatttcagggaatgggaagtactgatgagggaaacttatcttgtcatataaactattgttctgcacaacttttagtatgcccagaggtatatacgcaacttatcagcatagaaactgtaatttaaacatacatcttcagaagcaacatgagaactaaaaaagtcttaaaacagacttccaagaaacagttatgaagtccaattttaggaaaaagacatgatccaagtgttctttgcactgacacagtaggcaagccaggtgtctggggccattttacttaagaacctgccctgtactcctttcttaaggtaagtaagtaaagaggcactaaggtaaaatacgcttcccaagacatagactaatcaaatcactcaaggcaggaacatttaaaatgaagaaagagtacaacgaaagctgctttaaaactctaaataagacaagcaaggggccaggcccggtggctcacgcttataatcctagca

SEQ ID NO: 207283 - DNA, 385 bp, Homo sapiens
cttctttgaattgtaaactgagttttaaccaagcagtaaattttttagtaactggttttcatcatctctgggtgctgttaacttaaacacagaaattataaaacatgcagttttcttgtgtagctttaatagtagtgttttttgtatagtgtatatgtatgtgactttctcttaaaacccatactttttataaagttgaatatagtttttaaagatttgtcttgtgtatcttgaaataaggagtatctcctattttcagttttgtagaaagaaagccattggaatgccactttctaacaagtatctcttaaagccattcagctaattacagtctttgattgttttgttagaatgtatttaataaatgaatgtaagtttattatac

SEQ ID NO: 207284 - DNA, 491 bp, Homo sapiens
gttttggggagacgtcaggagaagtaaagctttaggattatatcaaattataaattaaaaatccattataaatccaacaagagctactactaaaatatctttcattcattccctccttttagggagttgggttctcttacctggactatcatattagtttcttatagatcttcctgcttttaatcttcatatctgtccaccctgtactttattgagtggccacagttctcttcacagaacagtcttgttcatttccattttggttttcaaagccttcagtgactcctatttgctgtaagataaaacccacacttcttagcagatgattacaagcaatccccaatctgtggacaatcaattttgacaaatgcatgctgcgttattctcccctgcctggcccccaccccactcatccagggctgtagttccatatgactgtcctcattgccggaatgaactttcatgactccctccccagtctttccatcagc

SEQ ID NO: 207285 - DNA, 480 bp, Homo sapiens
gtccagccactgggcttgtcctggtaccatgtctttctctccaaattttccccaggatggagatctaggattctctatccaccttccccaggagctatttctcagccttgatgtaccctagaaagctggtggaaatattcccacatgtggggttcccaggtctatggaggcaatctcaggcctagcttggagctggcagaacatgctcccacagctcctatctctggtctcaggtctcttcctctaccatatctctcaaatgatgttaaaaagacttctcggccgggcacagtggctcacgcctgtaatcccagcactttgggaggccgaggcgggtggatcacaaggtgaggagatcgagaccatgctggctaacacggcgaaacctcacctctactcaaaatacaaatattagctgggcgggtggcatgtggctatagtcccagctaccggggaggctgaagtggaggactgcttgag

SEQ ID NO: 207286 - DNA, 101 bp, Homo sapiens
ccgggagggtgcagttcgggatcgcgaaggcagccccggaaggggggcgggccggtcggggtcgccacatcttagttcggaacccggccgggggcagaggg

SEQ ID NO: 207287 - DNA, 493 bp, Homo sapiens
taggataaatttaataggagtaagacttaattaactttgttaaatatgtctttacaagatgtatgtctatctatttatttacttattagacatgatagtaagcattagacattgttctaatgagcttttgtgccaacattcaggatttcttctcagtacatatctatatgggaaggaagaagaagaatagtgagcatataaactagaatgaatatgaaataaaataatcaatgctaaaatcaaggtgcacaatagatgacttcatagcactaaacattgctttcataaacatatgaggaagagttttcacagaggtttatgtgagaaaatccttgaaaattttatttgatcacaagttccacaccatatgacaatgtgatgtatttgataaataaattaatgtaatctttgtctgtttcaaaatataaataaatgtactagatatttggagattcttttagaaactaagctattaaaatgagaaaattatatt

SEQ ID NO: 207288 - DNA, 467 bp, Homo sapiens
aacataaaggtctctgggggaggggagaataaaaggatctgtagggttgcaaggtttctgtgttttaagtgaattagtataataataaccctaagtagcctgtaaaaagttaggtatgcatactgtaatccctagggcataaaaaaagtaaatacaaagagatattgctgaaaagaccaatagagcaactaaaatgaaatactcccaataatcccaaaatataatcccaaagaagcagaaaaggaggaagaaaggaacaaaaaaagagaaacagaagacaataaagtggcagacctatcactgttgatatggtaaatatgtcaataattaatcatattaaatattaataatctaaacactccaattgaaaggcaaagattgacagtggatttctttttttaagggcaaggttctatactagttgcctaagaggagaaactttaaatataaaaacataaacatccaaa

SEQ ID NO: 207289 - DNA, 408 bp, Homo sapiens
acaggacaagaccctgactgcaaaaaattaaaaaataagcgaggtgcagtggtgcacccctatagtcccggctacttgggatgctgatgtggaaagactgatcccaggagtttgaggctacagtgagctatgattgtgccactgcactccaacctggatgacagagtaagacctcatctctaaaattaaaaaaaggatgattgtaataatactctggaatatgaaacaaagttaaaaacgagatctacacgtatcaacaagtaaaaaaaagcaaattgcaggataacgtgcaccataacaatgtatatatatttaaatacacagaaatgagtcccgaaggggctgggcatggccagatgcagtggctcacacctgtaatcccagcactttgggaggccaaggggggtg

SEQ ID NO: 207290 - DNA, 124 bp, Homo sapiens
gcctggccttgtggctgtctctgcctcttcctctccggcactgtcagacctcagtggctgtgggctggccaggaggctgcaactggaacctgagccttggctgtacattggcatcatgtaggtc

SEQ ID NO: 207291 - DNA, 538 bp, Homo sapiens
actttatttgttgtttattgtttttgtttttgcttctgttttcagagatagagtatctgtctgtcgcccaggctggagtgcagtggcatgatctcagctcactgcaacctccacctcctgggttcaagagattctcctccctcaacctcccgagtagctgggattacaagtgcccgccaccacacctggctagtttttgtatttttactgaagacaggggttcaccatattggccagactggtcttgaactcctgacctcaagtgatccacctgcctcgacctctcaaagtgctggaattacagacatgagccaccacacccagcctaattctgccttaatacttaaaatcaaagctagtggagtaatttaaggagagtcttgcttagtttctctaagtaaagggccacttttattcaattttttttccctttaaatggaaatggtacatcagattgattatttttttctttgcattgatgttgtttgagtttgatattatttcttctgtggcatcattaataattcctcctcccttc

SEQ ID NO: 207292 - DNA, 467 bp, Homo sapiens
ctgggactacaggcacttgccaccatgccaggctaatcttttctaatttttgtagagacggagtctcatgatgttgcctaggctggaatattttctctttattgctgatttttagcaatttgattatgatgtatctcagtatggttttctttatgtttatcatccttggggtttattgagattctcggatttctgggtttctaaatataaaatgtgaagaattgttggccatcatttcttcaaaggtattttctgccaccccttctcccatcctggactcccactctgtgtgtgttagactgtttggtatcatcccacaggtcactgaacttctggttttttaatttcttctgttcatttcttctctgtctttttttccttccgagctttaatttagatagtttctactgctatgtcttcaaattcacttatctttacttctgcatttttattaaacccatccagtg

SEQ ID NO: 207293 - DNA, 224 bp, Homo sapiens
aatgtatacaacaatttagacagtggcaggctgtatttgaagcctatggaatggctattcgttaaggagaagatgggagcacacactcactgggttcccaggggaagctgactttgatgttgcccgggagcagggctgattctgtgaggtgtaactagagacaggatttaccaggagagtctgcttcctggagaatgttgaaatatctgatgccgtttactttg

SEQ ID NO: 207294 - DNA, 473 bp, Homo sapiens
aaaaaaaaaaaaaaaaaaagaatgataatgtaaagctgcatgtggtggtgcatgcctgtaatcctagctactaggctactaggctgaggtgggaggatcgcttgagcccaggagtttaagtccagcctagttaacatagcaagacctcagtctcttggagaaaaaaaataaaaagaatgataaagtggaaaccaagaaacctggcttctgatcctacctctggctagtctttaacgtttaggcttcattttcttttatggggaaataagaaaattgtgccagaaaattctgagaccacgtcaagctctgttattccatagggtgtatagagttctgtaaatctatattttgccaaatatagaatgaatgccaatagtatgttaagtatagtacagagattagggcttgtctaaccttggaataggcaagaagtctatttctgcccctccctgtgtgtctgcctatcactatat

SEQ ID NO: 207295 - DNA, 2342 bp, Homo sapiens
gaaaaacgtttgtcccatgtttgttgggacaaaaatgctggatatggtacaacattcttcctgcaggttcggttttgttgaagagagtgaggccagctcgaggtgaaggaaaaacatcagaaaggtgctaaagtgcagaaatatcttccagaggcactaatagccgactttagttcttgacctttagctagatccacaaagcactgagttaaaattgtacactgatcccttccagaacaaattaattaattaaatggtgcctcttcccagcgttaatcgtttaaaaggactcaagtacccacacagtttaagcaaactaaaagaacactgacactttctcagagaacagggatgggaactttctatctgcccattagtatctaccccaagctacgaagacttccattcctcttattaagcattcagcaactacatttagtgcctactatgccagtgatgcaagaatggataagacagtccctacactcaaggataacgcctctagtaggtgagagacaaaccgattaattctgcataagggataagtgctgtatgtgggaagcaatccaatgagggctctgaggatggcaaaggaagggttcctggaggatttacatttaactggtgccttgaaaggtgtgtagaagttggcaagatcaaaagggagtagagtccaggtggagaagagaaaagagcagggcaggctggatggcatggctcacacctgtaatcccagcactttgggaggccatggagggaggattgaggccaggagtttgagaccagcctgggtgacattaaaagaccctgtctcaaagaaaacgaaaggagcagggtatatacaaggggtctgccagccttctcagcctttctgtgagaagcgagggtagggtagtacaggagagtggcaggagatgacactaaaagtaggtctgtgttgatctaacgagtctcaactttactgccaaaactaatgaactaggaaagtttaggcagcaagggccagagatggagtctggacttgtattgcagaaagttcctgtgacggcagcttggagggtgaatgagagtgtgggatggaggggtgaatgggtgtggacagactggaaaaatgactcatgcagggaatgaggaagggaggagccttgggagactctcaaatccctggcttagcctactgaattgcttgctacttgcctttttatgtcttcattttgcctcccattgtctgtgatattaaaggcctaacttcttagtagagcaaactttgcatctgctagcaggttggtgccctagctagcttccatgcccctctgcttagaatgcctgcgaaccactaaggactaatcctagtggtagaaatttattttcaattgttctcaaacccttgtagaattccaagttagaactgtagtgttcttttttcatgtgggttagaaaatttgctgtttggagcaacatggtgaaacacaggacttttgaacctgcttatggtgcaaaaggggaaattatatttctacttcaacactggaggaggggggacttctgggagcaaaagagaaatggaaactgagatgagacatgttttttactccatgacagaatacaaagaaatacaaggatgatcctttaatgttagaaacagtagaataaccatcctggtaaataaaaaaggagaaaaaatgttattttacattagatacagaaaaacagaatggctaagaaaactcacaaagcaatggtcaatctataactcgagtccaaataaattgtgatataacactaaattaccactgatttggcctaattgactatcactggataacattataacatgaatgataatatttaaaattttaaagcactgtaacaaacaccagatcatgttaaaactattcaatcatgttgtcagctttcaactgccagtagcatcctaaccacatttcaaactatggaaattactaaaaaatcattattgtaataaaaagttaatagttcctcatttagaataccattgatattccctcagtgccaggagaacattatggtttctcctatttctgtgaagtgtatagtctacaggttcataagtgagtatatccatgagtataaaaagaaggtcatttatgggtggagagggaaattatagaaaacaatttcagatgaaataaactacattttcagataaaggaaagagtgttcactgcaggttcctgaaatatttcagtccattcaagttttaattataccaatgaatctcaataaaaatacagttaaggaatatggtttttatagataatgtcagctccttgtttaccaataataaagataaagataatggc

SEQ ID NO: 207296 - DNA, 545 bp, Homo sapiens
gggaaacactgtgatgggtattatgcaatatgcctttccctctctctctgctttttccgcactgctgtagcacttgaccttctgtggtagtggtttctgtgtgggcccctcagtaacagtgtggcatcattaggagccagttattgctttcaaaccccgcgtacttgtcacataacattgggaaagtcactttgcctctttgagcctcagtttcctcatctgtaagatggggaaaataatatctcccacagaggtgggttggaaactgaaggaatcccttgtttgtaaagtgttcacgttgcatggcatcatcttcatggtaattataatcacagctaacctgttgagcccttgccgtgtgtcaggcattggtagattatctcatttcaatctcacagtaaccagaatgggtgatccattttacagatgaggcaactgagtctcagatagggtaattctgggcaagttactaaaactatcaggaaatgcttggagcatgtttggaactaaattatctgactctaagaagtgttctcttaatgatt

SEQ ID NO: 207297 - DNA, 126 bp, Homo sapiens
gagaaacaagaatgctgccaccaccgtcagcaaaaatagttattgtactttacatttctatatttattaatgactaatagtagaagttgccccatatagtgaccttttgtgattttttaaaacatg

SEQ ID NO: 207298 - DNA, 581 bp, Homo sapiens
actgggaatacaggcatgagccaccgtacccagctagtgttgcatactttcatccacagtatgttaataacagttttcttaggccaggcacagtggttcacgcctgtaatcccagcactttgggaggccgaggcgggtggatcacgaggtcaggagatcaagaccatcccggctaacacagtgaaaccctgtctctactaaaaatacaaaaagttagctgggcgtggttgcaggcgcctgtagtcccagctacttgggaggccgaggcaggagtcccagctacttgggaggccgaggcaggagaatggtgtgaacccgggaggcggagcttgcagtgagccgagatcgcaccactgcactccagcctgggcaacagagtgacactctgtctcaaaaaaaaaaaataaataataataataatacttttcttacacacgtaagaaagactgtctggtacataggcccttaataaagactgttaaataagtaatatatatgttgtatttctatacgctggcaatggacaatctgaaaatagatcaatttcatctacaagagcataaaaaaaattaagaatatat

SEQ ID NO: 207299 - DNA, 268 bp, Homo sapiens
aaacaggggttctttgtaagttcctcttgtgtatatatagtaacttataacaatggcatgtgggcattctttcagtgaattgctttctttgtactaaaatctctagttttctaagacagttccatgtataaaaatgatttatgcatttctccaaggcggtacatatccaaagacatgacaccagggggaaaaagtgcttgtttttctgatggaagcagtggtcttttcttttctttcctctttcttttgtgcatgtgtatgtgtagct

SEQ ID NO: 207300 - DNA, 461 bp, Homo sapiens
atcaatccaacatccaattaacagaaattcaaggagaaaaaaacggggaattaaccatgaaataatacaagaaaataatcctaaaacaatcttcaaatggaaacaggtctgtgagaacccaatgaaatgaacaaattttaaaacgtattcatattcggtgcaatttcataataacaataaacgatcctagaaagctctctgacaggaaataaaaatttcatctacaaaagattgagaatcatcttggaacacttctcattggcaatactggattctagaaaaagaaaaattaaaagtcactgaagtattgaaggaaaattaattgcatactctgccaaatcagcaggcaagcataggatataacattttcacacatgcaacaataaagaaaattaactctcacatatgaaattacataatgttatccagcaaaattaaaatatgaaccaaaacagaggaag

SEQ ID NO: 207301 - DNA, 526 bp, Homo sapiens
accacgcctgttgcctctgtctagagtagttcacacatggatgctgtctctctggtacttgggtgtttctcaggttccagaacatccgttcatcttaccagtccttcaaggttcagcttaaagatcagctccaccaggaagccttcctggatttcccctcttagtttccaacagaatccgtctcttccgttctctgcccaccttgagtagcagtagcttcagctgtagactctcctgtttttcccttacagtctttgttgctgcatcctctttcactgaattgttgatgtgagaccctagactctcttgttttttcgttacagtctttgttgctgcatcctctctcactgaattgttgaattgtgagaccctgtgagggtcggcaccctgtgatactggccaggaaagggttgttgcaaggggatcatgggattgttgaatgggttttgatctggattttgatgttggaaatcaagttcccaaatgttttcaaccttgggtaaaggaacatgtaatggtgttttaa

SEQ ID NO: 207302 - DNA, 2289 bp, Homo sapiens
caggaggccgcggctcgctgatactgcgagctggcaaagccgaagctgggcgggggtccgggcggtgggagccaagtcggatcagggagtggcttgtaactcggcggccgattggacacgaagaagagagcggggtggggctgggagggttgggggtccggagcgggggcgcggacccaagaccacctggagctccgcccgggcagcgcggggtcacggcgggaattttcgggtcgccgagtgactcagccccgcaggctcgaaactgcgggcgcatgaggtgtgcaggtaccggggtgggggtcccgcgccggaaataggggcgactgaggggccgcgaggcggggaggaaacaggggggctgcggttccgggcgacaccgcccccgacgcggccgtggaggcggggctcccccaggtggcggggcggggcagggctcccccaggtggtgggggcggggcgcctggggagaccccgcctcccgcgccctctcagcaacccgcacagggcgcacccggacgctctaccgctcccgccgcagtcgccgggccatgggcctcgagcccgccccgaacccccgcgagcccgccttgtctgcggcgtgactggaggcccagatggtcatcatgggccagtgctactacaacgagaccatcggcttcttctataacaacagtggcaaagagctcagctcccactggcggcccaaggatgtggtcgtggtggcactggggctgaccgtcagcgtgctggtgctgctgaccaatctgctggtcatagcagccatcgcctccaaccgccgcttccaccagcccatctactacctgctcggcaatctggccgcggctgacctcttcgcgggcgtggcctacctcttcctcatgttccacactggtccccgcacagcccgactttcacttgagggctggttcctgcggcagggcttgctggacacaagcctcactgcgtcggtggccacactgctggccatcgccgtggagcggcaccgcagtgtgatggccgtgcagctgcacagccgcctgccccgtggccgcgtggtcatgctcattgtgggcgtgtgggtggctgccctgggcctggggctgctgcctgcccactcctggcactgcctctgtgccctggaccgctgctcacgcatggcacccctgctcagccgctcctatttggccgtctgggctctgtcgagcctgcttgtcttcctgctcatggtggctgtgtacacccgcattttcttctacgtgcggcggcgagtgcagcgcatggcagagcatgtcagctgccacccccgctaccgagagaccacgctcagcctggtcaagactgttgtcatcatcctgggggcgttcgtggtctgctggacaccaggccaggtggtactgctcctggatggtttaggctgtgagtcctgcaatgtcctggctgtagaaaagtacttcctactgttggccgaggccaactcactggtcaatgctgctgtgtactcttgccgagatgctgagatgcgccgcaccttccgccgccttctctgctgcgcgtgcctccgccagtccacccgcgagtctgtccactatacatcctctgcccagggaggtgccagcactcgcatcatgcttcccgagaacggccacccactgatggactccaccctttagctaccttgaacttcagcggtacgcggcaagcaacaaatccacagcccctgatgacttgtgggtgctcctggctcaacccaaccaacaggactgactgactggcaggacaaggtctggcatggcacagcaccactgccaggcctccccaggcacaccactctgcccagggaatgggggctttgggtcatctcccactgcctgggggagtcagatggggtgcaggaatctggctcttcagccatctcaggtttagggggtttgtaacagacattattctgttttcactgcgtatccttggtaagccctgtggactggttcctgctgtgtgatgctgagggttttaaggtggggagagataagggctctctcgggccatgctacccggtatgactgggtaatgaggacagactgtggacaccccatctacctgagtctgattctttagcagcagagactgaggggtgcagagtgtgagctgggaaaggtttgtggctccttgcagcctccagggactggcctgtccccaatagaattgaagcagtccacggggaggggatgatacaaggagtaaacctttctttacactctgaggtctccaaaacatttgttgttatca

SEQ ID NO: 207303 - DNA, 2351 bp, Homo sapiens
caggaggccgcggctcgctgatactgcgagctggcaaagccgaagctgggcgggggtccgggcggtgggagccaagtcggatcagggagtggcttgtaactcggcggccgattggacacgaagaagagagcggggtggggctgggagggttgggggtccggagcgggggcgcggacccaagaccacctggagctccgcccgggcagcgcggggtcacggcgggaattttcgggtcgccgagtgactcagccccgcaggctcgaaactgcgggcgcatgaggtgtgcaggtaccggggtgggggtcccgcgccggaaataggggcgactgaggggccgcgaggcggggaggaaacaggggggctgcggttccgggcgacaccgcccccgacgcggccgtggaggcggggctcccccaggtggcggggcggggcagggctcccccaggtggtgggggcggggcgcctggggagaccccgcctcccgcgccctctcagcaacccgcacagggcgcacccggacgctctaccgctcccgccgcagtcgccgggccatgggcctcgagcccgccccgaacccccgcgagcccgccttgtctgcggcgtgactggaggcccagctgccgcccctccctgtgtccttccaagaagtgccacatgcactggtctcttgtgtccccagatggtcatcatgggccagtgctactacaacgagaccatcggcttcttctataacaacagtggcaaagagctcagctcccactggcggcccaaggatgtggtcgtggtggcactggggctgaccgtcagcgtgctggtgctgctgaccaatctgctggtcatagcagccatcgcctccaaccgccgcttccaccagcccatctactacctgctcggcaatctggccgcggctgacctcttcgcgggcgtggcctacctcttcctcatgttccacactggtccccgcacagcccgactttcacttgagggctggttcctgcggcagggcttgctggacacaagcctcactgcgtcggtggccacactgctggccatcgccgtggagcggcaccgcagtgtgatggccgtgcagctgcacagccgcctgccccgtggccgcgtggtcatgctcattgtgggcgtgtgggtggctgccctgggcctggggctgctgcctgcccactcctggcactgcctctgtgccctggaccgctgctcacgcatggcacccctgctcagccgctcctatttggccgtctgggctctgtcgagcctgcttgtcttcctgctcatggtggctgtgtacacccgcattttcttctacgtgcggcggcgagtgcagcgcatggcagagcatgtcagctgccacccccgctaccgagagaccacgctcagcctggtcaagactgttgtcatcatcctgggggcgttcgtggtctgctggacaccaggccaggtggtactgctcctggatggtttaggctgtgagtcctgcaatgtcctggctgtagaaaagtacttcctactgttggccgaggccaactcactggtcaatgctgctgtgtactcttgccgagatgctgagatgcgccgcaccttccgccgccttctctgctgcgcgtgcctccgccagtccacccgcgagtctgtccactatacatcctctgcccagggaggtgccagcactcgcatcatgcttcccgagaacggccacccactgatggactccaccctttagctaccttgaacttcagcggtacgcggcaagcaacaaatccacagcccctgatgacttgtgggtgctcctggctcaacccaaccaacaggactgactgactggcaggacaaggtctggcatggcacagcaccactgccaggcctccccaggcacaccactctgcccagggaatgggggctttgggtcatctcccactgcctgggggagtcagatggggtgcaggaatctggctcttcagccatctcaggtttagggggtttgtaacagacattattctgttttcactgcgtatccttggtaagccctgtggactggttcctgctgtgtgatgctgagggttttaaggtggggagagataagggctctctcgggccatgctacccggtatgactgggtaatgaggacagactgtggacaccccatctacctgagtctgattctttagcagcagagactgaggggtgcagagtgtgagctgggaaaggtttgtggctccttgcagcctccagggactggcctgtccccaatagaattgaagcagtccacggggaggggatgatacaaggagtaaacctttctttacactctgaggtctccaaaacatttgttgttatca

SEQ ID NO: 207304 - DNA, 2060 bp, Homo sapiens
caggaggccgcggctcgctgatactgcgagctggcaaagccgaagctgggcgggggtccgggcggtgggagccaagtcggatcagggagtggcttgtaactcggcggccgattggacacgaagaagagagcggggtggggctgggagggttgggggtccggagcgggggcgcggacccaagaccacctggagctccgcccgggcagcgcggggtcacggcgggaattttcgggtcgccgagtgactcagccccgcaggctcgaaactgcgggcgcatgaggtcttattagtaggtaagaaacagctgctcctccacctccaccccagccccatggagcttgctttttccaggccaccgtagtcctcaccactgccactttgcttcgagatggtcatcatgggccagtgctactacaacgagaccatcggcttcttctataacaacagtggcaaagagctcagctcccactggcggcccaaggatgtggtcgtggtggcactggggctgaccgtcagcgtgctggtgctgctgaccaatctgctggtcatagcagccatcgcctccaaccgccgcttccaccagcccatctactacctgctcggcaatctggccgcggctgacctcttcgcgggcgtggcctacctcttcctcatgttccacactggtccccgcacagcccgactttcacttgagggctggttcctgcggcagggcttgctggacacaagcctcactgcgtcggtggccacactgctggccatcgccgtggagcggcaccgcagtgtgatggccgtgcagctgcacagccgcctgccccgtggccgcgtggtcatgctcattgtgggcgtgtgggtggctgccctgggcctggggctgctgcctgcccactcctggcactgcctctgtgccctggaccgctgctcacgcatggcacccctgctcagccgctcctatttggccgtctgggctctgtcgagcctgcttgtcttcctgctcatggtggctgtgtacacccgcattttcttctacgtgcggcggcgagtgcagcgcatggcagagcatgtcagctgccacccccgctaccgagagaccacgctcagcctggtcaagactgttgtcatcatcctgggggcgttcgtggtctgctggacaccaggccaggtggtactgctcctggatggtttaggctgtgagtcctgcaatgtcctggctgtagaaaagtacttcctactgttggccgaggccaactcactggtcaatgctgctgtgtactcttgccgagatgctgagatgcgccgcaccttccgccgccttctctgctgcgcgtgcctccgccagtccacccgcgagtctgtccactatacatcctctgcccagggaggtgccagcactcgcatcatgcttcccgagaacggccacccactgatggactccaccctttagctaccttgaacttcagcggtacgcggcaagcaacaaatccacagcccctgatgacttgtgggtgctcctggctcaacccaaccaacaggactgactgactggcaggacaaggtctggcatggcacagcaccactgccaggcctccccaggcacaccactctgcccagggaatgggggctttgggtcatctcccactgcctgggggagtcagatggggtgcaggaatctggctcttcagccatctcaggtttagggggtttgtaacagacattattctgttttcactgcgtatccttggtaagccctgtggactggttcctgctgtgtgatgctgagggttttaaggtggggagagataagggctctctcgggccatgctacccggtatgactgggtaatgaggacagactgtggacaccccatctacctgagtctgattctttagcagcagagactgaggggtgcagagtgtgagctgggaaaggtttgtggctccttgcagcctccagggactggcctgtccccaatagaattgaagcagtccacggggaggggatgatacaaggagtaaacctttctttacactctgaggtctccaaaacatttgttgttatca

SEQ ID NO: 207305 - DNA, 1738 bp, Homo sapiens
gctcggtaccccccgggcgtggcctacctcttcctcatgttccacactggtctcttgtgtccccagatggtcatcatgggccagtgctactacaacgagaccatcggcttcttctataacaacagtggcaaagagctcagctcccactggcggcccaaggatgtggtcgtggtggcactggggctgaccgtcagcgtgctggtgctgctgaccaatctgctggtcatagcagccatcgcctccaaccgccgcttccaccagcccatctactacctgctcggcaatctggccgcggctgacctcttcgcgggcgtggcctacctcttcctcatgttccacactggtccccgcacagcccgactttcacttgagggctggttcctgcggcagggcttgctggacacaagcctcactgcgtcggtggccacactgctggccatcgccgtggagcggcaccgcagtgtgatggccgtgcagctgcacagccgcctgccccgtggccgcgtggtcatgctcattgtgggcgtgtgggtggctgccctgggcctggggctgctgcctgcccactcctggcactgcctctgtgccctggaccgctgctcacgcatggcacccctgctcagccgctcctatttggccgtctgggctctgtcgagcctgcttgtcttcctgctcatggtggctgtgtacacccgcattttcttctacgtgcggcggcgagtgcagcgcatggcagagcatgtcagctgccacccccgctaccgagagaccacgctcagcctggtcaagactgttgtcatcatcctgggggcgttcgtggtctgctggacaccaggccaggtggtactgctcctggatggtttaggctgtgagtcctgcaatgtcctggctgtagaaaagtacttcctactgttggccgaggccaactcactggtcaatgctgctgtgtactcttgccgagatgctgagatgcgccgcaccttccgccgccttctctgctgcgcgtgcctccgccagtccacccgcgagtctgtccactatacatcctctgcccagggaggtgccagcactcgcatcatgcttcccgagaacggccacccactgatggactccaccctttagctaccttgaacttcagcggtacgcggcaagcaacaaatccacagcccctgatgacttgtgggtgctcctggctcaacccaaccaacaggactgactgactggcaggacaaggtctggcatggcacagcaccactgccaggcctccccaggcacaccactctgcccagggaatgggggctttgggtcatctcccactgcctgggggagtcagatggggtgcaggaatctggctcttcagccatctcaggtttagggggtttgtaacagacattattctgttttcactgcgtatccttggtaagccctgtggactggttcctgctgtgtgatgctgagggttttaaggtggggagagataagggctctctcgggccatgctacccggtatgactgggtaatgaggacagactgtggacaccccatctacctgagtctgattctttagcagcagagactgaggggtgcagagtgtgagctgggaaaggtttgtggctccttgcagcctccagggactggcctgtccccaatagaattgaagcagtccacggggaggggatgatacaaggagtaaacctttctttacactctgaggtctccaaaacatttgttgttatca

SEQ ID NO: 207306 - DNA, 351 bp, Homo sapiens
tggagaccactccaaccccaaactgagagctgtaggtgccgggcctctgacagcttgccctgctcacttccgcctctgtcccacaggggcgttcgtggtctgctggacaccaggccaggtggtactgctcctggatggtttaggctgtgagtcctgcaatgtcctggctgtagaaaagtacttcctactgttggccgaggccaactcactggtcaatgctgctgtgtactcttgccgagatgctgagatgcgccgcaccttccgccgccttctctgctgcgcgtgcctccgccagtccacccgcgagtctgtccactatacatcctctgcccagggaggtgccagcactcg

SEQ ID NO: 207307 - DNA, 1799 bp, Homo sapiens
caggaggccgcggctcgctgatactgcgagctggcaaagccgaagctgggcgggggtccgggcggtgggagccaagtcggatcagggagtggcttgtaactcggcggccgattggacacgaagaagagagcggggtggggctgggagggttgggggtccggagcgggggcgcggacccaagaccacctggagctccgcccgggcagcgcggggtcacggcgggaattttcgggtcgccgagtgactcagccccgcaggctcgaaactgcgggcgcatgaggtgtgcaggtaccggggtgggggtcccgcgccggaaataggggcgactgaggggccgcgaggcggggaggaaacaggggggctgcggttccgggcgacaccgcccccgacgcggccgtggaggcggggctcccccaggtggcggggcggggcagggctcccccaggtggtgggggcggggcgcctggggagaccccgcctcccgcgccctctcagcaacccgcacagggcgcacccggacgctctaccgctcccgccgcagtcgccgggccatgggcctcgagcccgccccgaacccccgcgagcccgccttgtctgcggcgtgactggaggcccagatggtcatcatgggccagtgctactacaacgagaccatcggcttcttctataacaacagtggcaaagagctcagctcccactggcggcccaaggatgtggtcgtggtggcactggggctgaccgtcagcgtgctggtgctgctgaccaatctgctggtcatagcagccatcgcctccaaccgccgcttccaccagcccatctactacctgctcggcaatctggccgcggctgacctcttcgcgggcgtggcctacctcttcctcatgttccacactggtccccgcacagcccgactttcacttgagggctggttcctgcggcagggcttgctggacacaagcctcactgcgtcggtggccacactgctggccatcgccgtggagcggcaccgcagtgtgatggccgtgcagctgcacagccgcctgccccgtggccgcgtggtcatgctcattgtgggcgtgtgggtggctgccctgggcctggggctgctgcctgcccactcctggcactgcctctgtgccctggaccgctgctcacgcatggcacccctgctcagccgctcctatttggccgtctgggctctgtcgagcctgcttgtcttcctgctcatggtggctgtgtacacccgcattttcttctacgtgcggcggcgagtgcagcgcatggcagagcatgtcagctgccacccccgctaccgagagaccacgctcagcctggtcaagactgttgtcatcatcctgggggcgttcgtggtctgctggacaccaggccaggtggtactgctcctggatggtttaggctgtgagtcctgcaatgtcctggctgtagaaaagtacttcctactgttggccgaggccaactcactggtcaatgctgctgtgtactcttgccgagatgtgagggttttaaggtggggagagataagggctctctcgggccatgctacccggtatgactgggtaatgaggacagactgtggacaccccatctacctgagtctgattctttagcagcagagactgaggggtgcagagtgtgagctgggaaaggtttgtggctccttgcagcctccagggactggcctgtccccaatagaattgaagcagtccacggggaggggatgatacaaggagtaaacctttctttacactctgaggtctccaaaacatttgttgttatca

SEQ ID NO: 207308 - DNA, 549 bp, Homo sapiens
tgaatccaggtctattgactcaagtctacatgtaaaaaactgcaagcccatactcccaaatttacttcctgcttccacttcctgctttatttttcccttctcaccattgaatatacctatacatttatttattgctttattgccctatctgagtggaaagcaagcaccatggaggcaggaacttcactcattttggacacagctgtttccctagggtctaacaccgtgtctggtagtgcctgatccagagtaagtgctcaataaacatttattaaatgagtaagttgatgaatgatggttaaataaaattataagggcattctgggaaacagttacgagaaagaaaataaatgaactatttttccacaagacttctctcatttctgttggtttatcctgtggactgaagccaggtcctgaaaatgtctgtttgtaaaaaatagtaggatgatttgcacatgcattaaaactgatgaatatagaagtggaaaggcttatccacatgactgctatgagcggaagtgagactgttttaagatctttctcaaa

SEQ ID NO: 207309 - DNA, 651 bp, Homo sapiens
gaaattaatatattggaaagtgctcagtgctacggagaaaacaaagatgaagtggggataggaaatgccgggaggtagggtcaatcgcagattgaggcaaaggggtcagggaggtcccaagatgggggacatttgtacagatccctgaaggaggtgagggtggtgactacgaggaatgtcaggcagagggaatagcaaggggagaggcccggagtggaggttcccgagtgtttgagaacctgtggaagctggtgtggccgagtaagttagggggagagtgatggtgatgcacccagacaaggagcaggaccaaggtcacataaagtcaatgcattaattcacctttcaattcattcattcacttactcaacgaatcttttgaggctctactgtgagccaggacctgctattttagatcctgaaaatccaacattagacgtgacaggcaaggtcccagctctcacggggctgtgtaatggtggctgatccgggagcaggagggaagttactttgttgaggtgagtggggaagcccaatcgccactcgcctctaggtccacaatcccagcagaattccctcttttgtttgctcttaggtgattcttgtcttccccataagcccatttagcagatgagaaaactaaggttcctt

SEQ ID NO: 207310 - DNA, 629 bp, Homo sapiens
agacgggcaggcaatatataagatctgagtagctgggcatggtgtcgcatgcctgtaatcccagctacttgggaggctgaggcatgagaaccgctagaacctgggaggcagaggttgcagtgagccgagaccacgccactgcattccagcctggatgacagagctagaccccgtctcaaaaaaaatctaagaacaactgactcagttctgcagtagagctcaatctcctcaggtagatgtcaagttctcttcctaagatctatatggagataatctagtccagtgctgtccagtacaactttctgcaatgatggtaatgttctatttctaaccatgctagcccaatagacacttcaaacacagataatatgactaagggactcaattttaaaatgtatttaattttaactaacttgaatttaaatagccacatgtagctaatggctactgtactggatggcaaagttctggtctacaccttcatggcagacctaaaatcaaagtagcgtcgaaatgctaaaacaatgcatagtcagtaatttccctatctgatatgctacagaaaaatttaaaaaacaacaaaacactttttaaagagtaatctatattgcctcccggggtcctcttct

SEQ ID NO: 207311 - DNA, 806 bp, Homo sapiens
gatattaataagcccccattctcagtgactctgtccttcccacaaagcccaggcagcctctctgaactgaatgacactctccacaaccctgccatagctgatgggactaaagtgaatacccaactttagctgaactattccagttctttctcttgaatttaaaagacagagactggctgggcgtggtggctcatgtctataatcgcagcactttgggaggccaaggtgggtggatcgcctgaggtcaggagtttgagaccaccctggccaacatggcaaaaccccgtctctagtaaaaatacaaaaagtagccaggcatgatggtgggcgcctgtaatcccaactactcgggagactgaggcagggaggacagcttgaacccaggaggcggaggtttcagtgagcacagattgcaccattacgctccagcctgggcgacggaatgagactccatcataaataaatacacacatacatacatacaaacaaataaaagacacagactaagggaactgggtgataatgaccctggagaagtaagatcatagtaagcttcagagcgaataccatggcaagccaaagatccgtacgagccaaagatatggagaataaaaaaccaagagcctttcagaggaagtgattctgcaggaggaatccataaatatctaaatgaactgaggccagaaatcagaaagagatggaaaagccattacctgctaactttccagattatgtggctattacttcctatgctcggggtacctgaaagtccactgtatcctgccaataaaactcctataaattaa

SEQ ID NO: 207312 - DNA, 298 bp, Homo sapiens
ccaatgacccactctgtccagatgaacagcatgggctcagtgctagggatggccatttctccttcccgaatgcctcagcctccgaacatgatgggtgcacacaccaacaacatgatggcccaggcgcccgctcagagccagtttctgccacagaaccagttcccgtcatccagcggggcgatgagtgtgggcatggggcagccgccagtactcggaaagacagcaaccctgcagaacaacagcaaccctacagcttcccagcctaccactcgtccccctgctgcttctccagcctctg

SEQ ID NO: 207313 - DNA, 314 bp, Homo sapiens
catgacaatctcctgcaccttactccccctgtttccccatcctccaatcctaggtttcctctcttcaatctttaaacatagattagattgagtcacctgctcacctccggacaaattatgggaacacaacaaactcgctggcttattccaaacacaacattccccagagctgatatagggctgatgtatgcgtgtacatgtaagtacaggactccagaaggaaaaacgaaagaatggctgataagcaaacctccttctctataaagttatttggttagagcacttcataattatctgctttccagggaactcct

SEQ ID NO: 207314 - DNA, 765 bp, Homo sapiens
atgatggtgaggcatgacgaggggacaagctattcaaagaagagaaccatagctcagtttcaggcccagcctgagagctgccattttgcataggatgctgaaacgcctgggagtcctgaccatttgcatagatatttgcaatcctgctttccacaccagcttgaggaatgaaaactctggagtggtacccatagagacagcctttccttccccacactgagccaataagcaatgtcattctacccaagatgagaagtcaatggcttaacatgacataagctgctatacaaaacaaaataaatatcggttcaccaagtttgggtcacttaaaattgcacgggcctaaccaatgcagggaaaatggccttcaatgcattctatgaaccagagaattggagtccccagtagtctgtgttctttttctccagagaggcgtatatttatagaaggaacaaaaccccatgcaggatgagggggctggctaataatatgtgtgaatacactgatctgtctgaacagttcttggctgcctgcgctcaatggtaataaatatccactgaaagccgtctgctgtatgtgtttttggtaacgtctcacacttccctgcatgaatacattcagaatgtaagcagcacacactcaacgatagagactctgttgtattccgaattcttaagttatgcagcttagcagctgtgataatgtaatggtttgcaaaataatagactggcaagacgtcaacctggaataacacatcatataatg

SEQ ID NO: 207315 - DNA, 382 bp, Homo sapiens
ccttctataccatccttgtagaggtttaccatgaggctctgtctgttggaaaagcttcgcctggaaacccaggattttccatacatactctggagtctagaagatgaagactccaaagtttctagtcttgtgctctgtgcacctgctgacttaacactatgtggaagccaccaaggcttggagcttgcacccctgaagcagtgacccaagctgtacctgtgcatctttcagccatggctgcagcaggagctacagggatgtaggcagcagtgtcctgaggctacacacagcaggggaccatggggctgggccaggaaaccattctgtcctagaaaaccattcttctgtcctaggcttcagggcctgtacagcaagggctgct

SEQ ID NO: 207316 - DNA, 241 bp, Homo sapiens
atatagaggataccccattgaggtaaggttaccatgaggcttgcagagactatctttaacccattattttaacctgataacaagcttcacactgcctgcataacaatataaacgaaaacaagacttaaaaaaactctacactttaaccttgtccctctgctttttaactttttattgtttcatatctttttgtgctatgtcttgaaaagttatagtcatttttgactggttcatcttttag

SEQ ID NO: 207317 - DNA, 243 bp, Homo sapiens
acaatagtggtggcaagctctcagataaatagacacacaaaaaattaatttagtaaacacaacagagttgctctgattgggaataggctacatattacactatgaggaggtgtttacataaagatatgtattttatcatgtagatgtctagaactcccagcctcaagcattcctcccacctaagcctcccaaagcactgggattacagacatgagccattgcacccagcctattatgcagatg

SEQ ID NO: 207318 - DNA, 834 bp, Homo sapiens
aaaaatggaatgcagtgattacatttaaggagatagatgttaaaactgtaagaataatttgaaaatgttgcgatcataggttatcaagaaaaaagtcatttaaattaaatatctcaaaggtatttggtaaagtttaatacccattcataataaaacattttaaaataagaaaacaatgcttctttagcacgataaaagaatattggccgggcgcggtggctcatgcctgtaatcctaggactttgggaggccgaggcggttggatcacctgaggtggagagttcgaaaccagccatgaccaacatggagaaacctcgtctctactaaaaaacaaaattagctgggcgtgttgccgcatacctgtaatcccagctactcgggagactgaggcaggagaattgcttgaacctgggaggcggaggttgcagtgagctgtgatcgcaccattgcactctagcctgggcaaagagagccaaactctgcttcaaacaaacaaacaaacaaaaaagaaaaagaaacatctctttcacgtgggaacttaggatataagaagattgggagaataatgggctagcaataaaaggtgttgagacaattagctatgcacttgtgaagataaagtcaagtccctactttatactctgcactaaaagaagtgcacttagatccttttgcggttcataatgtgatgactaggttttcatgtccatgtgtgaagtgcgccttcctccaatcctgttaagatgtcagcacatttgccttctgacaggaaagaaaaaaaaagtgaaataaatgagcttatttttgtggcttaaggggccaaatgggaacaca

SEQ ID NO: 207319 - DNA, 358 bp, Homo sapiens
ggggagcagaaaggacatcagtgtgtctggacctctaggatcaaggccagaggctgtgctgtgagttggagataggtaaaacctagagggccatggtaaggaatttggattttatttattttaaaatttttttcccataggttattgggatacaggtagtatctggttacataagttctttagtggtttgtgaggttttggtgcacccatcacccaggcagtatagactgtaccatatttgtagtattcttttttctttcttctttcttctttcttccttcttccttcttccttcttcttccttcctcttcttccttcctcttcttccgtccccttctgccttcctcttcccctcctt

SEQ ID NO: 207320 - DNA, 672 bp, Homo sapiens
aattttcatgctgcagtatcctctgacttctttgtagtttagaaaattaactgtccaaagcgctaactgacaatcaatctggaactgaaatagaatctctcatatgaatcccatccaactggttcctctggttttgttgctgagcaaaaaaagaaaaaaaaaagctctgccctgcggagggatggcacctgctgttttgagctgcgagctccatgggggttccctcacactccccactgttctcctacttgcttcatttcgtctatagtttgtctccattgatataatctcagagacaggacacagagtgcctgcctaagattcctcagaaagatgagtccagaaaaaagatttacagcaaaagaaatcaactcatacttggaatcttagcatatcgcttcatcccgatagaccaatcttttatttttttaattaattaattattttttgggacagggtcttgctctgtcgcccaagctggagtgcaatggcgcgatcttggcttaccacaacctcggctgatccttctgtctcagcctcccaagtagctgagactacaggcatgcaccaccaggcccagctaacttttgtactttttgtagagatggagtttcgccttgttgcccagactgatctcaaattcctgggctccagcaatccacccacctcagc

SEQ ID NO: 207321 - DNA, 359 bp, Homo sapiens
ggtgccgtaagtagatgcggagaagtgtggccgctttttaatgcgaaatctctggggagttctcaccaaatctgtctagaaagtaaagaagttcctcaggtgggtaaagacaagggctattaaagaaggttcagaggtgtagggagacaggagaggtagctcagtcagcctgtagagcggggacggctgcataagagcaggaagaaagggaaatgcatagccaacaattttttactagagaaggattggaggcagtgaggagagagtgggtgaggttgatactatgctggaggtaactagggagaggtagagagtgactggagaataggggcaaggataagagtgagtagaaaagtaaa

SEQ ID NO: 207322 - DNA, 361 bp, Homo sapiens
gtctgcagcattcattccttctgggtatggaacaggaccctctggaatgggggctgtggcctacaacagttaaacaagtgaactaaagggctcccaaaatctctcctgcagcattttccttgagaaggaggaaggtttgcatctctgtgagaagaaacatcagaagcagttgaaagaccaggatgtgggtcctctggggctgaggaggcattctgaatcaactgtgtgttctacacctgtgttttaactgtgacctgtcacatgaggacaagtgtggaatttcccacttttgtgccatgtcagtgctaaaaaagttttggattttggagcatttttaatttcagatttttcagactaggaa

SEQ ID NO: 207323 - DNA, 483 bp, Homo sapiens
cttcaatgtagaatctctaaatttcatcccccatcacctcacctatcaaatcgagaccttattctgattcccctcatctctttatggaaagctttgtttctaacatgtagggtttggggtattggcatgatctcctggtttgagatctcctggtttgagatcaaagtgagactcagagaaaactgggacaaagagcaacactgaggtactgccccaaaagagagtacagaaagaaaggcatgatggtaggcggcgaacactgttcccagtgctgaatcctcaaggctagtaacagccaagtgagtaatcagttacccacccctgccaagctggttgcctgaaaaggcttctaagtttatcattcttttaaactatcatttactgactatttaccacagacctgtgctaagcatatcatatctgatatggcttggctctgtgttctcatccaaattataatccccacatgtcaggggagaagga

SEQ ID NO: 207324 - DNA, 403 bp, Homo sapiens
gggtgaaattaaattatgaatgtcatgcaaataaaagtgttagttgaaattttaagaggaggagaatggttcccgctgaggggaagggggaagtgatgtttgaaatatgctttgaaagacacatagcatttgaacactgacgactcaaagaacaaacaagaatatgtaagaacattgttaaaataaagaccaggaactacatggggacactcaattatttggtgaagggaatgtcataggtgtgagaagagcattgataaaggaatttgaaaaaaagaaaacaaaaaccatcactgggacagactgaggagggattgaatgtaaggctaaggattctaagaagttccatgaggtttttcagaagttctgccctgttattgctattactttgcgtattctgcca

SEQ ID NO: 207325 - DNA, 348 bp, Homo sapiens
tatgtagtttatgccttgagagtacacaggatgtactgtatagctgtcccacacaggttaccacaagctttgttagtttggtggcagatattaaagaaaaatgataacattcagggttcaagtatgagagagaacaatgggaattatcaggcaagactgggactgaattgttaaatgttactggggcagttggcaagattcactgaaacctatatacgtgcagcccaggatgctgcatttagagtcctacagggttacttacaaggagactcagtaagtgcacaaagtaaacctacaggaggtcttttccatcactgcacttctggtggagctcaggaaaatccatca

SEQ ID NO: 207326 - DNA, 289 bp, Homo sapiens
tagttttcatatgtgtttagcccttttggagggaggatagagtaaataaatagaaggcactaagctttatggatgaatatgggaaatatggctttgcctgctgaaagcactcaggccacagggcctgcctacctatgctttcctcatcccggcaacagcagtaatttgtttcttgatacgtttttggatgttcataattatagaaaataaatttgcctttatgatgaaatttagtacctttttttttgaaagttcatccagttgtttatgtaaaaagaattgagtgagg

SEQ ID NO: 207327 - DNA, 456 bp, Homo sapiens
ggaaagctgggtggaggaagagctcccaaatccaacatggaattctcttggcgacaactccccattgaagaatgttcctttcttctggagaaaggagggcacctttcacgtgggagtttttgtctcctgttttccgggaaagaaggaagatcagagtgccctcgttgcatctgctgttttcaagttgccttagcttgagcctgctcatcagaattagccacatgtccctgagccaactacaatggagcctggaatatgcaatcttccccagcatctgggagaggaaagtgaacatggagcattgtcttggctgtggtggccaacaaacattgggacagaacttgattgtaggggcaccagtgggaggcgagtgttatgatccgatggcttcacttgtgatctattcttcatgataatataggctaaacctgagccctgggctccaggacaggcagt

SEQ ID NO: 207328 - DNA, 352 bp, Homo sapiens
tcagggtctcccccatggagaagaaagccaggtgacctcacacctactttgctgtgcttcagccaagaagtaacccacttgattttaacttacagcctgctcatcagaattagccacatgtccctgagccaactacaatggagcctggaatatgcaatcttccccagcatctgggagaggaaagtgaacatggagcattgtcttggctgtggtggccaacaaacattgggacagaacttgattgtaggggcaccagtgggaggcgagtgttatgatccgatggcttcacttgtgatctattcttcatgataatataggctaaacctgagccctgggctccaggacaggcagt

SEQ ID NO: 207329 - DNA, 841 bp, Homo sapiens
cagttttttgccctagcaggtatatagctgatttttcaataacttgtaattttgacataatttcagacacgattgtatttgctttataattctagctacatgttatttttttcatgtactaaagtgcagacataatgccccctaacctctaaatagttattaacaacaagtacattctctttcataaccacattgcaattatcaatgtcagaaaattaatgttgatatggtactgcttgctgtctaatgtgcatactttgagctgggcttggtggtatacacctatagtcttagctactcaggaggctgaggtgggaggatcgcttgagcctaggagttgaaggctgcagtatgccatgatcaaccctgtgaatagccactgtactccagcctgggcaacaatagtgagatccctatctttaaaaaaaaaactgcatattttactgaaattttacctattcttttctaatgccaattataaagcaaaattctggttgaggatctcatccttgatcacatggtacatttgtttgtcaaatctcattttctttaatctgaaaaagttctcacaaacattgtcttttatgacttaattttttttaaagtacagaccatttattttgtattaatagtaagttctccaatatggatttgtcttgatgcttttcattattaaagtaatgtttttgacaggaatacctcagcatgtcctcctcagtacattttatcaggagacacgatacctgtttgtctgatttctgataacgataacttcaaacacttggttaaggtggtgtctgccttatttctctcctataaatagtaccttgtagagagatac

SEQ ID NO: 207330 - DNA, 263 bp, Homo sapiens
  misc_feature (2)..(2): n is a, c, g, or t
  misc_feature (20)..(20): n is a, c, g, or t
  misc_feature (31)..(31): n is a, c, g, or t
  misc_feature (33)..(33): n is a, c, g, or t
  misc_feature (36)..(36): n is a, c, g, or t
cncttgctgcctgcagtttntaggggggggngnggnctttcctcccccttggggtttcaccatgttggccaggctggtctcaaactcctgacctcaggtgatccgcccgcctcggcctcccaaagtgctgggattacagtcgtgagccaccacgcccagcctgatcattcttttcagactccaacataaagtcatttttctggttcctcttatttcaaatttaaaatgctaatgcctgaggaaaactgtttgaatcttgcatg

SEQ ID NO: 207331 - DNA, 489 bp, Homo sapiens
tgagctccctagacctccatccacccagataggtttagctgtcccgtggggactggccccgtggacctctccctccgagcccagatggtggccaggacagccaggcggtgggaggcgccccacaggcccctagaagatgagagaccccaatggggaggagatacctacccccctgggggcacggggagtgctgcagacaggatttcctaggacgagagcttttccaccggctccctctgggcctggggagccttcatcctcagtcctgaaatgaggtggtcacccctgaccagggggctttggctcctggtatttcccggtctgtcacgaaggtccttttcctttaagtgccggccagagcctgagcgctccgagggagccccgtctggccgccttgccttcagcaaaccgagtggttttatctggatacacacgtgcatcttgtatccaagtatgtagaattgtaaaaatgaaagaacgatctgtaaa

SEQ ID NO: 207332 - DNA, 410 bp, Homo sapiens
aagggccccccccaaaaagggggccgcggtgggaggcgccccacaggcccctagaagatgagagaccccaatggggaggagatacctacccccctgggggcacggggagtgctgcagacaggatttcctaggacgagagcttttccaccggctccctctgggcctggggagccttcatcctcagtcctgaaatgaggtggtcacccctgaccagggggctttggctcctggtatttcccggtctgtcacgaaggtccttttcctttaagtgccggccagagcctgagcgctccgagggagccccgtctggccgccttgccttcagcaaaccgagtggttttatctggatacacacgtgcatcttgtatccaagtatgtagaattgtaaaaatgaaagaacgatctgtaaa

SEQ ID NO: 207333 - DNA, 530 bp, Homo sapiens
atattataaaccaatggagcccttcttggaagctaatacaggaggtaaagaatgaaagtaattttatgtgctagtaataagcccatctgtattgctggcaagcacttctaggggccaaattggacgtgactcatttctatgaagttaacttgtggcattgggcctcaaacagtagagtcacttcatcattgaatgggagtgaataaagacactctcaacaatgagacacatttacaaaatgaaaatcaggctattgtgaaatctataaaagattttctttcataaatggagtctagatagtgatcccagattatcatgacaatttggttacttgttagatatggaacatcagcgtctatttgggggggatatttatttacctcagtttgtattgaaataaaagttcaaatattctgaaaatgatgcaatgtgatggaactttgatccaaatataaaatctaaggctgcaatctaagtgtacagcaagtggaaacttctcaataaatggatgttagatcaaaatagtggtt

SEQ ID NO: 207334 - DNA, 298 bp, Homo sapiens
ttgtcagtgacgaagttctagggcctcagccactcatatcgccagagtagcacatgctagggcgtaggatagtggctcggaagggccaagccccgcgcatcgtgcgtacgaagatctgtgtcttcttggactagatggtgaagcccagtagctgggtttcggaggagagaggacttgtcccggcgctgcgagtcgatgtgggtgccctgccttcccacaggctgtttctggggcagcggcgcactgaccttcgacaggcgggcgtcggccaggtcacagccactgacaaggtggcggg

SEQ ID NO: 207335 - DNA, 270 bp, Homo sapiens
ttagttcagctctgatattggttatttcttgttttctgctaagctttggggtttgtttgcccttggttttctagttactttagttgggatattaggttgttgagatctttccagctttttgatattgtcatttagtgctataaatttccctcttaacactgctttagctgtgtcccagagatgctggtatgttgtatttgaaatttctttatataatttaccatgttaaatataacttatagctaataacttcggaatttgaacctcata

SEQ ID NO: 207336 - DNA, 424 bp, Homo sapiens
ctgggctgtaatttacggtgctatcacaaaggggtcctttttccgcatggtgctctgcggtgatgagccagaagctgaagctgaggggtgtgtgactctcccgcacactctctggagtgagcagaatggacgcttaaatggctaagtatagcttgaaactgattacaggccagatcccactattgtgcatcatcagttgtcattgttgagactgaaattgcactgggatgtttctctttgtcaccggctccaagctcatttctaggacaggagtgaaaccgtatggtgagcctcgggcccaagcacagggagaattgttcttctggtgtgtcccccaaggaagagcttggcaggtctttggcagtggaagatgggctggcttcagtcatgatacctataacattggtattgctagggcttccag

SEQ ID NO: 207337 - DNA, 355 bp, Homo sapiens
tagatgaggcacttaggtcagcagtcataaagtgacttgcactagggccacaaaaaggatttacatgtcttaacagtcaaattttttagtagcttcaaaaaaactggcttttttgtttcttaaggaaaaaactgaacaatttgtaaattggtgatttaaattggtatagaaatcagaaatttggattatggtagtcatgtttttgaacaaatgtccaaacattcctagaaggcactcttgaggtaaatcagttaatttaaaaaaagaaacgagagatttttattaacaaatattaatatttggaaactctagtacaaattattggaatagttaaataaagttataggtcttgcct

SEQ ID NO: 207338 - DNA, 825 bp, Homo sapiens
gaggcagctgttattagtcctaggtttaagacaagcctcaaagatactctacaggggcctgaatttaactggattaaactgcggcgacttgtgccccagagcattgtcagaaacaaaagagtggccaggtgtggtggctcatgcctgtaataccagtactttgggatgcggaggcgggaggaccacttgaagccaggagtacaagaccagcctcggcaacatagtgagaccctgtctctataaaaaatgaaaaaaaaaatgagtggttagctagtaaattagtgggtgctaatagtaggatgtgataacaaaagaggttctaactaactagaacctttcccgaaagatcaggaaaaggtaaaagagagccctatcaaaaccactgtccttggggctagagggagtagtcatggtgactgcacacgcccagactgtactctgaggagggacatcagagcctgcatacttcagggtaagtggacttaactgaaatcatccagccaagaaactaaacaagaagaaatgcgctggagggcagagggtaggggttggagggaaattactatccagagctgctgtgacacagtgtctaaaatatccagtcctcaacaacaaactacaagacatacagaagaacaggaaactaatccatacaaggagcgaaaaagcaatcaaaggaaactgagagggtcaataggttggaagcagataaaaacttcaaagcattattataagtgtgttccaaaaaaaactaaaggaaactgctggaagtaaaggaaggtatgcttacaatattccatcaaacagaatatcaacaaagaaagg

SEQ ID NO: 207339 - DNA, 814 bp, Homo sapiens
gactccagctaaagccgagagaagccaagtgcaggatgagcaagttccaggcagtgggaacagcctgtgcaagctctgaggtggccacgggctggcacatggaacggagggcagagggactggtgcagcaggaggggggacggcgggaaaacaggagcctggagggagagggaggagacggtccgcagcgcctgctggctgggagggatgcagattctgcccaagggcagcaaagtaccccacgcaatacacaggctcttcatgctggtgctggtttttcattttttctgacacagagtctcgctctgttgcccaggctggagtgcaatggccagatcttggctcactgcagcctccgcctcctgggttcaagcgattctcctgcctcagcctcctgagtagctgggactataggcgtgcaccgccatgcccagctaatttttttatttttagtagagatgggtttttgccatgttggctaggctggtcttgaactcctgaccttaggtgatccgtccacctcagcctcccaaagacctgggattacaggtgtgagccagtgcacccagccttgtgctgggttttaaagcagctctccctatatctcatgcttcaccacctaccagagtgaggctcagggtgaaactcagagcaaggtgcaagacaacttcaggtatctccatgctcgaagccctgacctactgtattgccccgaaagtcttccctgctgtggctgcatcttttccacgtggataatcttggttcacctctagcacaggaattcttttccggggctcctaggatgggctgggtg

SEQ ID NO: 207340 - DNA, 384 bp, Homo sapiens
tgaaaaccggtgatgctagagccatgacctgtgtcttcttgctgtcatgtcaggtgttgacatgacattgatggctttttggagaccctcttgaaacggtttgcagcaagaccatattgacatccactagaatcccagaagcgagtggaagactgtgttcttgcacctcaccggaacagactcttcctagttcccggcggagcgtggtgggggttgttcctctgccagtggctcagcacacatgcgcatgtttctaaatatagactgttgatttcaggaaatagaattttctgatttgagtgaagttgaaaggtttaaatcaaaatagtgaccagaatatgtattaatgtcatgaagactgattacatgcaaaaataagaattc

SEQ ID NO: 207341 - DNA, 366 bp, Homo sapiens
catgaatagagatgctcaataccattatttcattagggaaatacaaaataaaagtgattagtgagctatcactatacatttatttaaatggctctgattttcaaaagactgaccatattaaatagtggcaaagatgtagaacaaatggaactttcatatgctgctggtgaaaatgcagaatggttcaactactttgggtggggtgggggaggaactaacaaatacgaaaaatttatataaagaaaaccttagaagatgcctgaccaaaattttgattcattaaaaaaatagagtggactttgtcaaaattaagaacttctgctcttcaaaagatactggtaagagaacaaaaatacaggtcacaga

SEQ ID NO: 207342 - DNA, 615 bp, Homo sapiens
ggtcatttcttttacccactttttatgctgaaaacttcaaacctactaaaaggccgtaaaaaaatacaatgaagtacattcttccttcttcatctaaattattcagtctctgaccaattgttaacattttgccacatttcctttctctctttacacatacttgcacagacacaatttttctttggttaacaatttgaatgttacttgcagcatcatgacatttcactcctaaatatgtcaacatgtaccccattaagaagaagagtattttcctatgtaatcagaataaattatcactcagaaaatttaatattcatattacaccattcaaatccattctacaatttctccagtcaccctaataatgtcctttagatctgttttgtcctccagtccaagacccaatgcaggatccactgcacaacacagttaatttccatgtctcgcctttaactttctgtctgtctgtctgtctatctacctacctacctacctacctatctatctacccatgtatctatctagtctttcatgataccaactactagcatttttgaaggcagacaagcttccctaaggaatgcagacaggtgcagcgtagaatggggacctcta

SEQ ID NO: 207343 - DNA, 920 bp, Homo sapiens
ccctgtttctacagaaaaaaaaagaaggaaaaggaattgcttggtcaaaggctatgcatgttttacattttagtacatgttgttgaactgtgctccagagaccatattaataaacaattccttggttgattgtgaatattcttatgtactggggcaagtgactgaaattctctaagtctcatttaatttttctgttcaaaataggaataatagtatctaccatttaccttactaggtagctgtgagatacaaattaaataatacatgtaaatacttttaaaaaatgaaagtgctactgtcacgtatagtattcatactatgaagccatccgttgttggaaggatgaaagtcagagaccctgaatcctctgtgatcttagtttaacactcaaaataaggaatggtggtaacatgagctttaaagacttcctcatgggaaagagaatcctagcttcagaaacataatttattattgtagacataagcacaccaatatgaatgtaggattttccattcaaggacatttagagaagtgggataatttttgttttaatctgagaattgggtaacatatcatccagctccactcctcattctacagatgagaaagcagaggccccgagaagttgaattctcatgttcaaactgctgacatgtggcagaatctaggttagacctcagccctctgaccctctatccagcgtcctttcctctatatcccacagctctaatgatatagtcacgaggtggcgggattttttctctatccctcagatgaaaattaagccagtgttgtaatctagtttgataactattagttatctagaagtgtattcttaaaatcaatgcctgtataggcttactgggctatttgaaagtcaggctactaaattcttattagccacttgaaattcctgtgga

SEQ ID NO: 207344 - DNA, 203 bp, Homo sapiens
agagagctaaagagctcccaccacacagaggcaaatatgttaaattctgtcacccactaagacagccattttgactaagagtgatcttggttctaggggctgtgcttcccactctgcgacttctggtaaggcccacatacatcttcttgccaggaaagtcaaccataacaaagccctagtgccagtcctgtcaggggctgggt

SEQ ID NO: 207345 - DNA, 425 bp, Homo sapiens
cgatgaccttcatctaaagggacagtgcccatgtacacacatggttggcaagcagtagggaatatctgacgttactgagctcgttttctgaatccggcatattttccaaatggatgaataaatgaacaaatgggaaaccccagcaccaacaaagaacacgcaagaaaatgatcagccagtcccacgtggatgtaaaaatcctaaatacagcattagtgagtcaagcacagtaggctattgcaagaccaagaagagtttatctccaaggttgcaaagacattccaaaaattaatatctatcaaaaattccaaagcatttggtacaaaaattctcaggcaaccaggactagcagggactctcccactaccaccttcatggcgaggcaggagaggacacaacctgcccatcatcacagcacacgtcac

SEQ ID NO: 207346 - DNA, 247 bp, Homo sapiens
gattacaggtgtgagccaccgcgcccggccaaaaaattttctaaaaggggggtgtgcactggagtcagaatgtttgcattcaaatacttagatatcatctctctaaatctttcccttattttgtctggaaaatgagtgagataacattatatttcttgagatggctgatgtgatgtagattaaatgagatatttactgtggataatacaataaggtatttcacaaaatgcctggcacacggcacccg

SEQ ID NO: 207347 - DNA, 389 bp, Homo sapiens
tgccagatcagaggtctcactaaaagtaagcaccagaggcatccataaagaaaacaatgttcaccaagaaacaactggaagatttagagatgttattcattaagaacccatacccaaactccagtctttagaaagaatggcctcaaaaactggcatctctccaacagtactacagatttaattcaagaacctcagagcaaaactcaagaaatgaaaatacaaccatattcaataaaaacaacagaagactcaacaataacaattactttagggaagagtggagagaaatattggcacaccacctggatccactaccggtgccagccctgcctctccaatttctataaatcatctggcaccttcagtccaagttagcatgtcccagtttt

SEQ ID NO: 207348 - DNA, 338 bp, Homo sapiens
gggaacactctttcaccctgcttgtgctgtgacatccttgggccctgggagctattcctactctggcatgggtgcctacttgttctgccaaaaaggaaggagtgtacccattccactctctgcagtttaacattagagaaggtaaactaggaagtacagattttctttttcattcaccccaaatcccaggattgtgggggagcattagaggctgtttaattaaaaagaaaaaagaatcatagaatatcaaataacctggagaaagaaatgattgatggacaaaatttcattatatttgagcacttagtttattgttactcagaaaagccacctctgat

SEQ ID NO: 207349 - DNA, 222 bp, Homo sapiens
tcttaacttttatgtgatcaacgttttacatgagtgagatcttgtggtattcgtctttctgtgcctggttcatttcacttaatgtaacatcccccagatgaatccacgttgttgttgcaaatggcaggatttccttttgtaaggctccatcatattccactgtggatctacacattttcttcatccattcatctgaagctgggcacataggtcacttcctca

SEQ ID NO: 207350 - DNA, 394 bp, Homo sapiens
agaagttagctaaagagaaaaaaaatgcaaaaagaaggagtcatggaacatcaggaaggaaaaagaacacagtggatccaatattatcacaagggtccttataagaaggactcaggagaatcagccacagaaagagaaaatatataaggatggaagcacaggatagagccaagagaaggtgctgtgcactgctggctttgaagatggaggaaggggctacaaaccaaggcacgcagtcagcctctagaagctggaaaaagcaaggaaatggattttcccctacagctccagaaggaatacaagccagccgacaccttgatttcagctcagggaaactgattttggatttctgactttcagaactgtatgataaattcatgttgttttaagctgc

SEQ ID NO: 207351 - DNA, 956 bp, Homo sapiens
taaaattttttttcaaaagaaaacttaaaagcattcattaattaaaaaatttatttagcacctgcaatgtgctggcattcttctagatacttgggaggcatttagtaagcaaaacaaagatccatgccctcatggagctttaattccagtggaaagagatagataataggcataacacattgttaaattagttgtctgtgttattgtgtgaataaaaagaatcaagtagtggccagtgaagtcttagatattataccatgtgagtatttatgcggatatggttttccccacaaccttgaggaaataatctattttggttgcttttgtagtaaacaatggtgataaatggctaagggtctaggataaagtagattgtggcattaatgtatgtgttatgatgtggcatatattgagcatttgtaagtttatagaaataaactgattgttctctcaaaaactggttttgacacaggtttgtatataactggttattcagtaatgataattttcaaagttgtcttagtctatttgcactactacagcaaaataccatagagtaggtagcttataaagaacagatgtttatttctttctttttttttttttttttttgagacaaagtctcactctgttgcacaggctggagtgcaatggtgtgatcttggctcactgtaacccctgcctcccaggttcaagtgattcttctgcctcagcctcctgagtagcttggattacaagtactcaccaccacacccggctaatttttgtatttatagtagagttcgggtttctccatcttggccaggctggttttgaactcctgacctcaagtgatccaccttcctcggcctcccaaagtgctaggattataggcatgagccaccgtacccggccagatgtttatttctaacagttctggtggctggaaagtttaagatcaagatgctggcagattc

SEQ ID NO: 207352 - DNA, 372 bp, Homo sapiens
tgagatgatggtagcttggagcagggtggtggtgggagaaaaggaaagaagtaaacctaccaaaatataatttagagataaaactgataggcttggatatgcaggatgagagagaacaggtatcaaggattcctaggtttctggcttaggcactgggtggatggtggttgtggagatgtggagagaggccacattacagagggctctactgtaggccaaattaaggaattttttttttttttttttttttggaaagggagtctaactctgtccccgggctggggttgcaaactctccgggtgaaatgatggtagcttgggagcagggggggggggggagaaagggaaagaggtaacccttcaccaaaatata

SEQ ID NO: 207353 - DNA, 404 bp, Homo sapiens
tgagatgatggtagcttggagcagggtggtggtgggagaaaaggaaagaagtaaacctaccaaaatataatttagagataaaactgataggcttggatatgcaggatgagagagaacaggtatcaaggattcctaggtttctggcttaggcactgggtggatggtggtgcctctcaatgacatacatgtttcagtggaagaggagccagttttagggggaagagtgaaagtccagcaaagtctagagaagagagtctgaagtgcctggaagacattcaaatggacaagccaggttgatagtacaacatatgggtctagaactcagtggaaaggtttaggctggagatactgattttagggtcatcagtgtgtggaggacaatggaaggaagtcatgagtgtgtg

SEQ ID NO: 207354 - DNA, 540 bp, Homo sapiens
ttgcttgatacccatcctgagctgtttatgtccttgtgcctctcttcacaaacctgctggtctccctctgccacctgggatgcagtgcagtggcctgaccacaggttcaaggaaaagttagtggaagccgttatccatgtcaacattgaaccagaaggttctgggatacatgtgcagaatgtgcagagcatgatttgcaagaggaactgctacacattttacacttatttactccaacctttcctgctaattccaggtttattgtaaaaccactgatcccttcatttgagctcgacttccctgcacttttttttttttttttcccctgtccaatagtaagacacacacacagagaagaacaacaagaacaagaagagaattgcaatgatgtgaagtaatgtatatgttaattagcttgaattagcttgattgtggtgattatttcacaatgtacatgtatatcagatcataaacttgtatatcttaaatgaatacaacttttatttgtcaattatacctcattcgagctggaaaagtaat

SEQ ID NO: 207355 - DNA, 456 bp, Homo sapiens
agaaaatgttctttgttttactgtgttgcaaatgggctgctagagttatgggatgctggatcaaggagcagatcattttgagttttgatatcttcgtccatagaaattgtgcttaactatactctcatagcaatgtatgagaatgcgttcccctacacattctgatcttgttaaaccagactgggactctggaccagaagggaaagaccatccctgtatagcaaatatctggatggggagaaagctgctgtcactcattgacttctttaggttaagtcttagtgatcaaaacatagtgaaagatatgaagcttactttggaaactcagaactatttccacagtttgggcaaaagctgtcatcagatccccatcacgttttggagagaatggaagcatgaccgcattcttggctttaaagagcttaaaatcaggccgggctccatggctcacgcctg

SEQ ID NO: 207356 - DNA, 652 bp, Homo sapiens
gcatcaacggcccctggttgagaccatctgactctccaccctctgtctcaaagcatcagacacacaaccacagacaccgtccccagcattcctgtctgcttcaggagtcatgtaggtttggggagacaggctgggtcccggaaggtctgagggaggagacggcagggctgagtcctggaggccttgaaggtataactggacccatctttggggtagggctcacggagcctcagggacatctggctggacgctgccatccactggtgcaagacaggggtggggatggggggtcaggggtaggaggagaattcattcctggactgaggttgaggacacccacttttcaaggttttctgtctcccttatcatgccctgggcaggatctttgttcactgactgttcccactggctccaaacgtctggttagggctatagtcctagcaagcgcatagcacatagtaggtgcttattaaagatttgttatgagtctcttcaatcagacctttagttccttcaaggccttatccctgtcagcaccccacaacaccttgaatgcaggaggtgcccaattaaccctcagtggctgatggaaagatgaatactcactgctctcaagcccaagggtgcatggaaaactgaggcccggctaccc

SEQ ID NO: 207357 - DNA, 134 bp, Homo sapiens
tgaaatggtctaatcttgaccatctaattctgcagtgtcttattctcattctaaaagagaatggttatattcgctgttctagcataaaaagtaatgataaaaataaaagatcccgtattaccagacaataatcc

SEQ ID NO: 207358 - DNA, 473 bp, Homo sapiens
tcagtgctgctctaaaatcagctccatttttatgtttcattgtgctagagaccctagaagcagattgtgagataaaaagaaatctgttattgggtctaggaaggaaaaaaactaagctattactatgtgcagaacatttttgaagaggaaattaaagataatctagagacagctgttagaattaactagggagttcaatgaattgcaggatataaattcagcataaaaattactagcaaaaattagataagtatataagattccattaacagtgaagaaccccacaaggttcctagagatacatgtaataataatgtgcaagacgtttctaataggaggaaatgggtaaactttgttggaaggcatgaaagaagacctaagtgaatggagaaatatgccatattcatgaatagagagactcgttaatgatggaaactatcattacattgatctaaagataaaatgtatttcca

SEQ ID NO: 207359 - DNA, 362 bp, Homo sapiens
gtctaagtggctctacccacccagagcagtgctccatcatacagaacagtgggtgcagtggggagaaaaggggatgaattgtagctcaagtgctacagtctcttgttcttactgagatttagtagatgtgatggttaatattgagtgtcaacttgatcgaaggatacaaagtattgttcctgtgtgtatctgtgagggtgttgccaaaggagataaacatttgagtcagtggactgggagaggcagacctaccctcaatctggtgtcctctaatcagctgccagcatggctagaatacagcaggaagaagttgaagggatttgaattgctgagtcttctggctttcatctctctcccatgct

SEQ ID NO: 207360 - DNA, 974 bp, Homo sapiens
ccccatctccataaaaaatacaaaaattagccaggtatggtggcactcacttgtagtccctgctacttgtgaggcagatgttagaggaccacctgagcccagaaggctgcagtgagccatgatcatgccactgtactccagcctggatgacagagccataccctgtctcaaaaaaaaaaagaagaccttacttccaaataaggtaacattctgaggtaaggacttcatgtctttttttggatgagggagacgggggacataattcaacccataacaggccctaaagtataataaacatggagattattttaatacttctgatattaatggactagcttgttgcagaccactgctccctctgagaactattagaaaagctagacataatatccaaaacagccgcttgaaggcattggaagctagtgaggtagtaaggacttgagaggcttagaatccatagaggagggaagcatagagataagcctgacatttggcattgcttttaccctcaaagcatttgctgatttgcaagtagtggcaaagaaactgagcacaaaagaatggctgagcagcgaagacactgagttgagattgcagcaatcttaacaggtctaaaggaacaaaaactgaaatctggggacaaccaaagaggaggggccttgataaacacctcaggctttcagttgggactcactctctgagagtttcaacctagtaggaagagtgtaatacacacagatcagccttacaaagacaaacccagcctccagtccgctcaatcccttcttggatgaaggtgatctgcctcttccttactacttgccaaaagcaaatgtatgccttctcctatatcacatcactctgaacctcaaattatttcttcaagttttcatacccagttatcaagcatacgaagagacatgactacatgaccaaaaatcaaaaggaaaaatatgataagaagagacccatgg

SEQ ID NO: 207361 - DNA, 119 bp, Homo sapiens
tttttttttttcccccaaatgattaggtaaatccatgtccttatgtattagtccatactgtcaaaaaattcttgtatctttgtatttaaaattaaaattctttgaatattctctgcttt

SEQ ID NO: 207362 - DNA, 343 bp, Homo sapiens
attgtatacctttgacctaaattcccctaatgttaacagcttgcaaatagtacaatgatcagtactaagaaattaacactggcacatgctattcactaaattatggactttactcagattttaccgtttttccactgatatcatttttccgttatttctttcatttcaccaaccccagattcaacattacatgtgttttgtctctctagtttcttccaatatgagagttccttagtctttccttatttttcatgatgatgccatttttgaggaatatcagttattttctagattgttcctcaatttgggtttgtctgatacttatgattagaatgaggttaca

SEQ ID NO: 207363 - DNA, 433 bp, Homo sapiens
cagagaaactcttttaaggactttccaggagacttagcagaaagctaataatatttaaaaagctgcaaatacattctcagagtcactgtaaatagaagaaagtcaacagcaagtatctaaaactctggtgcaaaatttcacgtagccaggcgtggtggctcatgcctctaatctcagcactttgggaggctgaggcaggcagatcgcctgaggtcaggagttcgagattagcctggccaacatggtgaaaccccatctctactaaaaatacaaaaattagccgggcatagtggcaggcgcctgtaattccagctactcacgaggctgaggcaggagaatcacttgaaccggggaggtggaggttgcagtgagccgagattgtgccattgcactccagcctgggtgacaagagcaaaactctgtctcaaaaaaa

SEQ ID NO: 207364 - DNA, 628 bp, Homo sapiens
aaatctgcttgtctatggtaggatacttttactttcatgagtaaaaataagggatgggaacatagcaggctgtttttaaaccacaacatagggtaagattttctagtgttctcatcagcagtaatgttgccaggatacaagacagcaatggcttccactgtctatggagttatgattttgctcctaaattgtcaattcaaactaaataccagtcaagtatgaggccaaactgatgacatatacagacaagcagacaaattcaccagcagacttagttatgtgcactgcaaataaatggagaaaccagatcagatgattcacaggttcacataaaatatagcagaattgctgccttgtgctgaagatctggaagagggcatcgggaagaaagggcaatcgcaagagggctgagaaatgcccttcccaccagggtggtacatggcacctgaagtccaaactcagagtaaggccaaccacacactggaaggcagtcttctgagaaagaggagcagctgacctagacagcagggtctataacatagtcacaagcaagaaaaacactgcagtatcatggggccaaagacgtatttttatatgaacactgtcaagggtgacgctcaaaaagagc

SEQ ID NO: 207365 - DNA, 638 bp, Homo sapiens
ccagatatcccagtaaaggaagtctttactgttggactcaaacacctatgccaggaatcctctctagacacattgaatttccttaaagtattgttttcagtttttagtctgacaaaatctttctagaagacttctacccagagagtgcatgatttctcagaaaaggcttccttctagtatgtataagctctgaatggcagatatgttttgccattttgttcactgatgcatcccaagtacccaggacagtgcttgccatatagggactgatttttaattcctgcccttttttggggctacagagtattgctttcttgggacccacatatcagataaatatttaaaatatttatcagatatcagacaaatatttaaaaggattattgttcaattttatttagcatttctaggtattttgaataggaaacttttttagtcagctgatctctcttagaagtcttttaaaataattcctcaaggaagatgttgatatttcacatttattgtttagggaaaagatagaatttccaggcttctaaagttaataaagtttcttatttatatcattattaaggaaacttattttttcattaatataagttattgtgtgtgacctaatttggaggtctttaattaga

SEQ ID NO: 207366 - DNA, 659 bp, Homo sapiens
gaatgaccactgtgtgctgagaaatactgaaatcaaagactggccttccttgcatactcacaggttgagaggagatcagacatacttgcacaactaatgtcgttctgtgacaagtgctctgataagggagaacagagttgtagccaggcaaacatgtgtgtagatctaaacctgttatcttacaaaagcaggagacaagactcccacttctagaagatggagtagacattctttcttgtagtcctcctgctaagtacagctacaatctctggtcattatatacaaagcaaacacaagaagactgaagagagagaagacagacgggagaggaactttagcacctgagggaggacctgggtttcctttttgcttcacacatcccaaactagataatggggaaggtggcaagctggaagtgccgatcagtgcagaccaaaaagaccctgagaagagctgctctctttaacaaagaatctaagaaggaaaggggcaacctagcaagacagaacatttttagacaataacctctctactccagggaaccaccacataaaagccttcagcctcacatcagcaaacgccaagtgtgaagagcctgaatttccatgctcagcaggccaaatagcaaggcactgccgggccttcagaacaccgtcaaa

SEQ ID NO: 207367 - DNA, 601 bp, Homo sapiens
cagttttcgtgggccctatcccttctgaaaaagcaaagccatttatctttagaagcaggcaacaatgaagctgtaacaggctcaaggaggggtggaggacagcctcgcgtgactcttaccccacactctagtccctctctttctgcaagaaaaacaaatgaatttcttttctgattatatatgtactccttgtagaaatattatatatgtatctgtcttcatatatatgtaaaacagtcacccacagtatctgtgggggattggttccaggacctacaaagatggcagaatccagggatgccctagtcccttggcatggtatttgcatataacctatggacttcctccatgaactataaatcacttctggattacttataatacctaatacaatgtaacactatgcaaatagtagttatactgtattgctttttatttgtataatttttattctttcattattggggagagggagtttggaatgttttctatcaattcaaccaaccacggatatggaacctgtggctatggagggctggctgtatgtttatctctctctatgtatataaatgctaacctcaagcactaagcaatgttcata

SEQ ID NO: 207368 - DNA, 353 bp, Homo sapiens
cacaatttagagaacttataacgtccttggccagatatgcccaaagccaggatgtccccctaacagaagaaacatagcactccttttgcaggctgttcacgcaatcactaaggacctcctagagaagatttgaaatgtgttgggggcaggaatttatcccaaagataactcagggacttctgggaaagttttaatgcctgtaatgcagagaactcccaagccccttgagtatagcagggttggtaaaagcctaagattgactttggtaagatagacatcaaaatagcaaaaacaagaaccattgtagaatttaagagaagcaaaataatgtcttttcttggggctaacactcc

SEQ ID NO: 207369 - DNA, 292 bp, Homo sapiens
agtattacccacatccccatttcacagatggacaaatggaggctgagaggtgatgtcattgtctaagatcccatagctagtaagaggcagagccaaaattagaattcaggactatttgatgacagcatctgcatacataggagtcatctgggacaagttagagatgtaggtttcactcatttccctttttgccttgactgctaggaagctcagctctaactggaatgttaaataatacggctagccttgcctgaacacccaacaaggtcaaaaataaaaaaattttagggtc

SEQ ID NO: 207370 - DNA, 393 bp, Homo sapiens
cagtcagggcccaggcctgagggggaaagccctaggtaaagaatattcctccaaatcccactccagctcccgcagacaacctgatcggggtcaggaggacacactcctaccccaggctgagagcagcctctgataacacaaaaggaccctgagggtggagacctcccacctccacttcaaaacagtgtgttatttatcaatatcttatccccggaagttgaatctatctcccagtgccaactccgagataaatgacttgaccaggcgtgtggcatggattaaggcatgagataggtgttcccaccaccagaacgagccagtggctgcctctcttccctttgagccctccctccacagagacctgtgaataggtgtttctgatccctaggctgg

SEQ ID NO: 207371 - DNA, 299 bp, Homo sapiens
cccaaataccgttgcatcagatatttgcatggctcaattgttcattctcttcaagtctttcctcagatgtcccttttctcagggaggactttgatgggcacctcattgctttccctgatactctccgtcctcctgccttgcttccgttttctccaggcacttactaccattcaacattccctctgccttatttattcattgtctctctcctccatgctagaacataacctggcgaaggcagagatttctgtctcttttgttcgttgcttcatctccagtgtccaggactgtgcctgcta

SEQ ID NO: 207372 - DNA, 235 bp, Homo sapiens
gccagccaggcgggggcagttgagcagttttgacgcggctggtgggagtgtgagctgccacaatcttttgggacactaatctgtattggagtttaaaatgtgtatgacctttggtccagcacttccactttggagaattttttgtacaaaaccatatagacacataaggtgatatgtacaaggatgtttgttgcaaaaacaaaagaatgcgctaaatattgatcgttaaggcaat

SEQ ID NO: 207373 - DNA, 592 bp, Homo sapiens
ctaagattgccagataaaatacaggatgctctattaaatatgaattcggatataccaccaatttttttaagtataaatttctcccaaagtattacatgggatggctacaacattatatgaaataaattgtcacgaaatccttaaaaaatttgtttcacaattaatgctgaccacttccaaatctcagtatccagcctcatcatgtgttttaaactgaaaatctccattgtgaagtcttgcaggcaacatgttgaaaatttaactcataatttgccccgcctgtcttctcactttcagtgatgttgcctccatccatccagttcttgaaactgcccttgaccattccctttgccccacatccattaggtgggcccttttgcttctctccctagttagtctcagcagccagcaatacctttactaaagttacagcacagtctctactgctttcctcttctgtaggtccttccttctaaccgaagtgacttcaaacttcagacatatgtgcatatacagaatcaagttccctgcaaactatacttaccctcacaacttgcaggatattctgatgttgtctaatgtttcttttaaa

SEQ ID NO: 207374 - DNA, 375 bp, Homo sapiens
gaactccaaacccaagatgctagcagggagcagggacatgtacattgaaggctctgggagagaatctgttccgtgcccttctccttagcttctggtgtggctggaatccatggtgttcctggtttgcagctgagtcactccagtctctgcctccattggcacgtagagtttcccggtgtgtctgtctttacatggccgtctcctctgtgtctctctcttttttttttaccaggacactagttatattggattaaaggctctgtactctttgtatgaactccattatatctgtaacaacctgtttccagttaagaccacattcttagttactgggagttaggacttaagcatatcttttggggggttattcagcat

SEQ ID NO: 207375 - DNA, 463 bp, Homo sapiens
ctagagagatcccccacaccacctgagcaccccacctgagtctgttactcaacagctatgtgaccttgggcaaatcaatattggatcctctgttatctgctctgcaaaatggggaccaaacacctacccctatttgctgggctgtggtgagggctcaaagcaaaggtatatatataccttgattgataaatgtaccagttcttactattagtactattaatacttatttataataatagtgctagcactattagtaactgttagtgacattcatcactattaatattagtaatcatagcactagtactattattatagaatatatctgctggctccctaaagaaccaaggttcaccctccagggcaccaaaagccacagtcccgtgatgatgatagtgatagtgaccatggcgatggaggtgatggcaatgatggcagtgatgcttgactcaggtggtgtgcg

SEQ ID NO: 207376 - DNA, 516 bp, Homo sapiens
tctgattggtagcttttgctgatttctgtggtataaatactcctacctttgaccaatttcaaactactaatatgacatcactgaacacagagttatgaaaatttgggccagctccaccataatttggctgtagccaatcttgattatctagattgactcggggggaaaaagtatcattttgtcagaaagcatttttccagtacaattgtgaccctgttacccaatcacttgagtttattttccaaaaatacaagacaactcatttagattttttatatttccagaaaatgtgtgtgagccttatatcaccagcctaatgggcattggtgtaaggaaccaaatatctatatatagcatttaaatttgaaaagtcaaaattggaaaaaaaaaacttgaatttttgctgcattaaatacttacagtgttattatggttggtatgattttggaagttgtagataatcactagaaatcataacatttattgaatctgtccaaagatcagaaaagagaaaaa

SEQ ID NO: 207377 - DNA, 294 bp, Homo sapiens
agagaaggaggaaagagggaagggaagggaagaaggaagggcagaatgaagggaagaaggaagctattgaatgttacctcttaagaataactgaaacttaacctgaagtcatttgaacggtcagtaatgaatctgaccacataatctatctgaaattctgacctcctgcactatttctgtttattgcatgagatcccccctcaaaagaaaaattaagcctttcctggaaagtgctatattcttgcattaatttgggggcagtccccagctgactgattaaccttagggcacagc

SEQ ID NO: 207378 - DNA, 470 bp, Homo sapiens
gagagagaaaccagcaagcagaggcagaatgaggtaacaaatctttccttacaaccccaaattagtcctttactaatcattaatattttatgccattccagattaaacttactgtttagccagtaagcagtattcttacttagaatttaaattatcatttgccatctattcaaagaacatttaaagatacagagttaaaattaaacaaatggcatataatcaaagtattaagcaatgggagtgtggtaaaagagaaaaagcccacatacaatccatttactcaggattctagaatgacactgtcttctttctttccctgtacaaatataacctgtaacttccaaaaatatctttagttcttgggggccactttgctcaaagtgacaagcacgtcaagtaaacctatttccagttacattcttatcttgtcagtgtcaagatggttgtttgatcatctttatcacacactg

SEQ ID NO: 207379 - DNA, 243 bp, Homo sapiens
atggaaatgggccccgtgcactgctacaggcaaagggtagacgaggtatctggaaatggctatgacatcagcatatgatgggcgtggcttttctgtcctagaagtaattgtgccaatgccctttgtatggcactaaggaggggccacaggaaaggaaaggaaaggaagagaaaggaaggaaggaaagaaagaaggaaaggaaggaaaagagagaaagagaaagaaagaagggacggaagatca

SEQ ID NO: 207380 - DNA, 668 bp, Homo sapiens
atgtgggccgggttagatctcttttcctagagacctgcacatagacacacagacacacagagacacacacataccacatggacacacaaagacacagacacacacagacacacgacacacacacaagacagacacacctacacattctctctacatttagactcactattgctgaaagacctaaacactccccgctaactcccctcagtcacatgtcaaaggtgaagaataattctctggtcaaaagaacctgagtctggaacttttgccctcagcactcctacatgcttcccccattgtttcttacatgggacaaagtgacaagggtgaagctcatgccatacttcctcctccaaggacagctcagaatctggccctgaactcttttagatatcttggtaactaggctgacatgtagcattcctggggaatgtataggaaggaggtgaatggcacctatcatttattgagagccttttatgagccaagcactatgtgaagtggtttctatacattatatgatgtaatcatcatgacaacccagtgagatatgtactatcatcatctcctttttacagatggagaaactgaggctcagagaggttaagtaacttgcccgaggccacaaagccagtaggtggcataaaatgtccaggactattaaagaa

SEQ ID NO: 207381 - DNA, 758 bp, Homo sapiens
tatttagtaccaggttttcctaagaggaaatgggggctacttggggtcaaaacaaaggagagtctttctagatagggaaggactagcagtgggtcaaaacttgccaagaaggactatgaagggagctttgcttggggtttaaaagctctgatcacagacttggaggggctcaaacccctcgctttagaaggcagaaaccaagaaccactaaggacctaggacttgctgacggtgtctttggagttaaaggtggaactgaagttagagctgattttcttcctgtcacatccagtaagactgggaatggttgggtgccagaggcaggttccagaaggtgggaagagtcctgtctgcatccccagggtcctaaccttgaggaaagcttgctgtccttttgtcctgcttcacactccctttggttaaaggtttcactcagagcccgatggaaaccttcaggaaaaaagggccccaaaccgaggcgaggacactggggaagccttgggtggtttctgtgtggggcggcccctgctctgtgaagcacaggggaataggactccatcgctgtcatcgtcactcatgccctggtgcagacctgcaggaacattgcctgctgtatacagggcaaatgggcactgtgccgggagaagcctgtaggaagagagacctggagggatgaggagggaactccgaccatgagcatgcacggagctccgtgaaggagggccttgacagacagaggcatggtgggtggagacggg

SEQ ID NO: 207382 - DNA, 434 bp, Homo sapiens
tagacgatcccattctacgctcctgtctgcatccccagggtcctaaccttgaggaaagcttgctgtccttttgtcctgcttcacactccctttggttaaaggtttcactcagagcccgatggaaaccttcaggaaaaaagggccccaaaccgaggcgaggacactggggaagccttgggtggtttctgtgtggggcggcccctgctctgtgaagcacaggggaataggactccatcgctgtcatcgtcactcatgccctggtgcagacctgcaggaacattgcctgctgtatacagggcaaatgggcactgtgccgggagaagcctgtaggaagagagacctggagggatgaggagggaactccgaccatgagcatgcacggagctccgtgaaggagggccttgacagacagaggcatggtgggtggagacggg

SEQ ID NO: 207383 - DNA, 282 bp, Homo sapiens
atgatccagtcacctcccaccaggcccctcctccaacattgaggattacaatttgacatgagatttgggtggggacacagaaccaaaccatattgcatggattgaccccatttgtaaatgacgtatgtgtttggtatcccatattcttgaatgctttcatgttagaatttctcagagtcactgcagaacttgttgttaacattcattttattgtttgtcctgattcttggccccatagaaggcattactgattttctaaaagtctgcacattattacttttt

SEQ ID NO: 207384 - DNA, 612 bp, Homo sapiens
ctctactaaaaatacaaaaaaattagcctggcatggtggtggatgcctgtaatcccagctacccaagaggcagaggtttcagtgagccgagaccacaccactgcactccagcctgggcaacagagtgagactccgtctcaaaaaacaaacagacaggagacaggatctcattatattgaccaggatgcacctcctggcctcaagcaatccatcctcacaccttgacctcccaaaattctggaattacaggcgtgagccactacacctgtcccattgtttatctttgttttttgctgttgttgtttgtttttttgagatggagtctcgctctgtcaccaggctcaagtgcagtggcgcgatcttggctcactgcaaccttcgactccctggttcaggcgattctcctgcttcagcctcccaagtagctgggattacaggcacacaccaccatgcccagctgatttttgtatttttaatagagatggggtttcaccatgttggccaggctggtcttgatcttctgaccttgtgatccacctgcttcggccttccaaagcgctgggattacaggtatgagccaccgcgcctggcccgtttatcttttaaaactta

SEQ ID NO: 207385 - DNA, 205 bp, Homo sapiens
ccagaatgaatatttataaaaattctctattcttcaaaaaatatatgtgtttataatgtcaaactttgccagaatccttaactttaaggcttattagttgaacattttctcacaactttgcttgggagaaaaagattggcttataaaaaatgcttgagggttatttataactattttagaaaagctagttaataaagatattaag

SEQ ID NO: 207386 - DNA, 409 bp, Homo sapiens
tctggtggctatatttgagtattggtagtataggttaattttctatttttatgggcaattctcgtttttgaaaataaatatttattgtacttataataaaatatttctaaataaaaatattaatatataactaaatatacaccaatgacaaaattttaaagctgttttacaataaaagataaaaacaaaattaaaaatatgtactttatctctttccctcacatatctgatgggcaaatgttttttaaaacattagaaaaaaccttttaaaagaaatgttggcagggaaaaagttaataacacctacttttattggaatatattttttatttaataatttcaataaagaaaaaaattctgagtatttactattaagctatgtaaacaaaaaccgatgctattttgtccc

SEQ ID NO: 207387 - DNA, 413 bp, Homo sapiens
gaataagatacgtagaaaatgttgagacttcatttacatgctatccccatgacgatgtgctagaattcttaccagtgtcataacagccagccctaccatctgcttaactacaccagggaatagatcagtaatccagctgactccattagactttctatcactactccctccatccagagataaaaaatgcacatgctctgtaggaggtctgtttactcccagaccagattctatctttttttcttccctttctccttaccagataattttctatggtctctcaatgataaaactgtttgtctcttcattgaaaaagatctttgaacataaatgtttcactgaaaattaaaataatgcctcagttggatggagagaatgttgaaaacatcttggaatccattgttgtcagcaga

SEQ ID NO: 207388 - DNA, 345 bp, Homo sapiens
ctcagtcctcttagccaactgagttagagagaaatggtcgttcattcaccttgtcttcttcaggctgagtcccatggtgggacgagaacaccggcctcggtgttccctgctagatccagatcctgattggccccaggcttcctccacctcccatcccccatggcaccttctccagacacaagccctttcctcctctcaggtctgaaaactgtccagatggccttctggggctgtgccagactcccaaagacaggcctgccaaggtctcctggatctcagcccaagagccagaccctggagaatcacgggtgactccttgtgcttgcggcaccctgaccctgtggc

SEQ ID NO: 207389 - DNA, 335 bp, Homo sapiens
ctagtgagtattatggttttctggtgtgggtagtagaggagtgtaaggaggaagggaactttgaatgatcagggtaacccatcccatatctgtcactcagttccactgttctctttggatccttgaacaaagaattaaattaatctaagggagttctttacctgaataatttacattatagcttgcataagtctgtttaaaattcttgtgcttataaacaatgcttataaacaaagtaaaaaatgtttatattgcaaaatgccagaggtgacacttctgctagtccaaatggcaggaacaatatggggatgagtttctaaatgtattagccatta

SEQ ID NO: 207390 - DNA, 275 bp, Homo sapiens
gattaatagacaccatcatagcaaatctgtactgttataaatattctcattccatttcccatgcagatttttaatataaaaagaacaataaaagataactcataattggtcttttttaaaggtatcatgcatctagtggcttatttgtagcaagtttaattccttgcataggtgttttgatcaattgtgatctgaaagtgtcaaggaaaaaaaaaaagttacttttccagttgaaaccagggtctcaggaatatactcaaaatctcaatattatg

SEQ ID NO: 207391 - DNA, 705 bp, Homo sapiens
ctattggcatcgacatttaatttatcttttccaagacaaaattaatgaagctttggatgacttgaattatatacataaatataataaaaataatacaggtgggttgtctgtagagacagttatattacctacattttgacctcagcctttgtcatttattggtactataaggatacataaatcagtagatatatgtcctgaaaatgactttcctcagttaaatttttttactcttgttattgtaaatccggggctcgtacaatcctatagtgtttttaaaataccatggtttgaaaggttattgtccttgatatatattgcagtaagttggttccttactgctcatctcacaacgaaagaatatgaatttaaaatagttagttatagaagtaatttacaaatcactctttgatttgtgtgatttgatcacatctctctgagttagagttattgtgcgcctaggattacttggttgtatgaaatctatatctttgctcttatgtactatcctccaaccaacttgaagcactagacatggaactttctaggaatgtgaaaatgtgatattcacctttgtatccccagcacctacaacatacccataaaataaaacatgagcttaataaatgatttttgacctgtgttgatctctgctaaaagtccattaagttttgtgtcatcacaacctaaccttttactatgatg

SEQ ID NO: 207392 - DNA, 170 bp, Homo sapiens
ggaggcactgtgagacagggcagacatgtgcttacctgtctaatctgattcttatcatctatttttaacatattccaaagttcacataagaaaagaaatgtgtatattaaagattttaattaatgttaatctacttgcaaatgcactaataaaaatattattttgagtgg

SEQ ID NO: 207393 - DNA, 731 bp, Homo sapiens
gtgaacacctggatacacacctcctcctttctcccatccacaggttcctgtacttgctttagcaatgtctgtccatcccccaccaatttcatcttattttttggatacattcaaagtaaactgcaggtatccatacttttgttttccctaaatactttagatgaatgtatctttatcatgaggtaaacatagattttaactgaaaacataggaaaggactttcattcacccgccattttttggagggccaaggccttctcgttaagtatggtttgctgatgcgctttctagtcgtgtcttaccatctagaatttctagtttcagttatttccaatgggatgtgatttacagactctagcaaggcatacagtatagctttccagattttttgttgttttcctcctagttttttattcatgtcatcctcacttactttgactattgtttgtttcactggattgctgttaattgttctttctaaaacattaccttagttttctttcacagaaacagtgctattctttttgtgttcattttttattggtatatataatacttaacgtgttcactcagcaaacacacgagtgctttactatatgccaagcatgattctaaatgctggggatatactagtgaagaaagcaaagtgcctgccctcccggagctgggaagacagacagaaataaatatacaatatcaaactagttagcgatgactgtgagaacgaagag

SEQ ID NO: 207394 - DNA, 294 bp, Homo sapiens
agcccagaaaatgaaaaatgctgacattgttttagttaaacttccctgttgctgtgagagaagtgacctgcaaccgttatctgagatgtatggcctttgccgtaagcacattctctgtcttacacttgaacttgcctagtgagacaaccatgcgtatcctgactttttctggattgattggttttcctatattccatttgatatttccctatgaaatattaatagaaattttaatgttttaacatccataacagagagccctttattatatctctcttgattttcagtttgggt

SEQ ID NO: 207395 - DNA, 417 bp, Homo sapiens
ccccccagacctccacagagaggagaggggctgaaagttaagttgatcaccagtgaccaatgatgtaatcaatcagacatatgcaatgaagcctgtataaaagcccaaaggatagggtttgttgagttctggagagcagaacatcaggttcctagagggtggcgtgctcagagaggatatggaagcgccacagcccttcccacatttcttgccctgtgcatctcttccatctcactgttcatctatatgctttgtaatatccttcctcataaatgagcaaacagaagtaaagtgtttcactgagttctgtgatccactctagcagattagtccaaacaaggagtgggttgggggaactccagtttatagctgggcaggcagaggtacaggagacaacctactacctgggattggcat

SEQ ID NO: 207396 - DNA, 633 bp, Homo sapiens
ggaggcctccctaggccccctggctaccaacccatccccttcagtcagtcgggcaaccctgttatgagcactgtgccttcctggcctctgtcgtcgatccccgagtcgcctctgctgctgcaaagtcagccctagaggagttctccaaaatgaaggaagaggtacccacggccttggtggaggcccatgttcgaaaagtggaagaagcagccaaagtaacaggcaaggcggaccctgccttcggtctggaaagcagggcatgcaggaaccacctctgatgagcctgagcggatgaggagagcgggaatgacgaggctcgggtggaaggccaggccacagatgagaagaaggagcccaaggaaccccgagaaggagggggtgctatagaggaggaagcaaaagagaaaaccagcgaggctcccaagaaggatgaggagaaagggaaagaaggcgacagtgagaaggagtccgagaagagtgatggagacccaatagtcgatcctaaagaagatgaaggtgccatgtattgaaagtgtgcgtcaaagaacataaatatcagtggattttctctgtgtatatgtgcagtatttatttttgatcctttaaaataaaacttttgcaaataaaaaaaaa

SEQ ID NO: 207397 - DNA, 608 bp, Homo sapiens
ggaggcctccctaggccccctggctaccaacccatccccttcagtcagtcgggcaaccctgttatgagcactgtgccttcctggcctctgtcgtcgatccccgagtcgcctctgctgctgcaaagtcagccctagaggagttctccaaaatgaaggaagaggtacccacggccttggtggaggcccatgttcgaaaagtggaagaagcagccaaagtaacaggcaaggcggaccctgccttcggtctggaaagcagggcatgcaggaaccacctctgatgagcctgagcggatgaggagagcgggaatgacgaggctcgggtggaaggccaggccacagatgagaagaaggagcccaaggaaccccgagaaggagggggtgctatagaggaggaagcaaaagagaaaaccagcgaggctcccaagaaggatgaggagaaagggaaagaaggcgacagtgagaaggagtccgagaagagtgatggagacccaatagtcgatcctgagaaggagaaggagccaaaggaagggcaggaggaagtgctgaaggaagtggtggagtctgagggggaaaggaagacaaaggtggagcgggacattggcgagggc

SEQ ID NO: 207398 - DNA, 577 bp, Homo sapiens
gatagggaactgtgtgtgttctgatggttcaatggggaaatgaggatcgatcatgagtgattttcccgaaatgcaacctgtgcaggtcttgccttcctcaagcacctgcgaggagaagtcgtcactagtggggaattccagcaggtgacccaatcgagacagctgggcaggctcctggagctgatggcttgggaaggagggagtcagaagtggcaggcccatggaggtatgcctgtccgcggatgaccgggatcacaaaacaatgacactgacttgtcgtggggatggtatgaacagacatgaggaaggattggagaagatctctgttgctgacagaggacagggaccagtcagctaggaaacccagaggccagatatgtctgagcgtaggagcaggagcagtgaggtatctctggaagcagcaggcaggacctgggctggaatggctttgtgagattctattctgcagcctcggcagcctgagtcttacagccccaattcttaaagttgaaacatgtgcaaggtactaaatctctgtatcagtcagggtcctccagagaatcagaactaatagtag

SEQ ID NO: 207399 - DNA, 899 bp, Homo sapiens
gagatggagtctctctctctctgtctcccaggctggagtgcaatggcgcgatcttggctcactgcaacctccgcctcccgggttcaagcgattctcctacctcagccttccgagtagctgggattaaaggcgcccaccaccacattcagctaatttttgtatttttagtagagacagggttggccgggctggtctcgaacttctgactcaggcgatccgccgcttcggcctcccaaagtgctgggattacagatgtgagccactgcgcctggccaaatgtttgattgaatgaaggaacaagtgaaagaacatttatatgacagaagaccaggcctttgttactgctcctaggatgcatctccccttagctttgaccttttagggaactgaagtgacatggaaaagattaagcctggtctgtgccacagaacttaagggattttactgaagacactggttcctccatcgtcatgggaaaatgccatatgtcatataattctaacagtgatactaatatctattgagcacttaccgggtttgaatgaactcatttaatcttcacaaatatatggggtagatactaatattatttacaatgtacaggttggaaaactgaggctcagagaagttaagcctagtttagaggagaacatctcaatgttatattgctttctccaatcttctccctattctatttcttccccagtcactgcatcccatgcttcaagtacaaaggtatccagtcattctctgcccatttcattattgaatttccctacctctagagagttattttaagatgttggtctttatattatctaaccgaattccatttatacctttttaaaaaagtatacatgtatactgttgcaaaaaaataaaatagaagttaaaaaaag

SEQ ID NO: 207400 - DNA, 764 bp, Homo sapiens
acatatatttcgtgatgtctccgttgttataattttttttactactagtcagattaagcctctgcagtcactaaactttgttcattaccagcgacgtcatcatttgcgagcatgtggtgttcacccttatataccaccgtctctaaaacgttctaaaagtttgcctcgtttcgagtcgtcttctgtagtatttctgtcttattgattgatctgtcttgttcccctgattattttttcctacatccacccttcaatatgataggtttgctctcttcttacctcacgaattttcctcaatcgtttgttcgacgttttttttctccactgttctcgatgctctcggttgtataataaataaactcgcgaccgccaggctcggatgtccttcttttttattctcttctccctttatgggtggctcctccgtttttctacaacaaacattctgtgggtgatctcctctatttcttttgtcctcctcctttgtgtggtatttttcttttgtttctccccccccctcttttttttttttttttttttttttttttttttttttttttttattacttatcaagtgggtttttattaggtggaaagttggtacctcaaagctttggaaacttgctctatcaacaatcagatgcttgctgcaggtgagtcagtatatttcaatgttttcctttaataattaaactaaataattatacatatcattttcaaaatctcaaaatgtggctctacttgaagtcaatcttccaaaatta

SEQ ID NO: 207401 - DNA, 591 bp, Homo sapiens
tcaatacggtgatcctcccatatatgtgatggaaaatggagcatctcaaaaattccactgtactcaattatgtgatgagtggagaattcaataccttaaaggatacataaatgaaatgctaaaaggtggaaagttggtacctcaaagctttggaaacttgctctatcaacaatcagatgcttgctgcagagcccttgctaagtcacatgcaaatggttacggagatcggggcacccactgtctgctccctctgtgccctcatcactggtgttctactaatgctcctcctgaggaggcagagctgacacaggattatcaattttggagcttcataagagaatcttcaggatcttcctcccttttctgctttgagggtttccatacattgctgttttcaggttctacaataatcacctttttttctctttctctttttggcttgcgctgggatttaagaattagaaaataaaaatacgcagagattaaaaaaaaaacacttgtaatctcacccctcctaaagttaatgttaagattttgctgtatataatgaatgtatattatgaattattcacaaaagtggcctcatagtac

SEQ ID NO: 207402 - DNA, 782 bp, Homo sapiens
tggatggttgtttacatctgttgtttatacatctaaattgcatgattcatttgtaattgttaacatgttggaataatgttacaggtactccatggcattttatatttggcttagcagagttagcacttaactgtatatattggtcaggcactgttgtataacaaaccatcctaaaactaaatggcttaagacaacaattctttatttagcctgcaattctgtgggtcagcagtttcagccaaactcatctgcatggttcacctggacttggctaggctccaccatgtatctctgggcagttgtaggttagctagttggctctgcttctaggggtgctgactgtgggctggggagactcagctctcctccatgtgatccctcattcccatcaggctggccctggcttgttcgcagaggcagggttccagaagacagaacaaaagcacataaggtctccagaggcttaggctaagaagcatctcattactacttctgccacactattggccaaagcaagttataaggtcagcctagactcagtaggtaggaacatcaactcaacttttgttcttcttttaaataaaataaaacgaatctgtcaacttgaaaaagcttttttgtagagatgggggtctcacgtatgttgcccaggctgacctcgaattcctgggctcaagtgatcctcccaccttggcctcccaaagtgctgggaatacaggtgtgagccaccacgcccagccccactcaatttcttaatgggcagagcttcaaagtaataagtg

SEQ ID NO: 207403 - DNA, 644 bp, Homo sapiens
atctagaggatcccaagcagctaatacagtactcactgcacccaatcagcatcacctgcacccattcagccagcatcacctgcacccaatcagaatcacctgcacccaatcagccagcaacacctgcacccagccagcatcacctgcacccaatcaatcagcatcacctgcacccaatcagccagcatcacctccacttggaagctgccccaacttcccttctccaccaagccaaataatcgcccacctctacttctgtggcatcctttgcatgctactaatcagtgtcttcattgtcctgaactgccccccaacacacacccagtccatgagctgacagttctctaaaactcctgagccactatagtctctagcacagtatagtgtaggcttccaaaactggcagcaaacacttgttaattaattgcatgaagggtttcaagtctatagatttcccacatcgtgtgttatagatatcccacttcattttatctaacagatacttaggcagagtcactatgtgctgggctctgttccaaataagtactactatccccattgtccaaggagaatctaaagcatacagaggtcaatgcacctctgctcagccagacagataatagaggcgggatccaaacccaaaa

SEQ ID NO: 207404 - DNA, 237 bp, Homo sapiens
tgtgttaaggaaaagcagaaaacagagttgcctttggttaagagttccactatttttataagcaactgacttttttggggaaagttgctttaagcatttttttttctgtgtgtatgtgtgagatggggtctcactctgtcacccaggctagaatgcaggagcacaatcatggctcactgcagcctcaaccttctgggctcaagcaatcctcccacctcagcctcccaagtagctggt

SEQ ID NO: 207405 - DNA, 447 bp, Homo sapiens
cttatgatccagtcatctcccaccaggccccaccttcaacattgtggattacaattgaatgtgagatttgggtggggacacagatccaaaccatatccaaaagcatttgtttctgggagtcaaagctataagccaagaaaaagactatataagagaaagctgtgttccaagcaccaaggcagagggagtgaagagcacatataatcactaagtttgaaggggccagagctgggatttgagaccaagaatagaaagccaaggattcaaggccaagaggaaatgaaaagagacagaaagctgatcaagaacaagttggagttagaagcaagatgctaaccagtgtcctcaaatcactcaagagttctttgtgactttgaattttgttttagcaaattagtggtgcagggggcagtgggactaggttaaaaggtctaaatggggtgagca

SEQ ID NO: 207406 - DNA, 1015 bp, Homo sapiens
acagtgaacaagatctcttgctgtctcagtgcattctagtggaggacgcaagagacttaacattgtaattacttctgttttggggtgcacacccagtatatgagagcacatagccatgggaccaaagcagccattggtcaattgaagtataaagaacaagtaggagttagcttgagaaggaaagggaggtggtaaagtgattcccaggcaaaggaaatagcatatgcaaagggctgaggctggctgggggagagagagcacggtaggtggaaaactgcagtggctggttcgttgcgccttaagggtaaaattcacccagtgggtggtgtaagctggggctagatgttgaagggtcatatgataaattatttgacctttatcctgaaaatagtaggaagctattggatgctttaaataggggaataacatctgctcttcagaaataaaccctggccgctttgtaaaatgtttggagaagagtaagactagaaataggagacaaggagggtgctgcggtagttccaagtgagatatgaaaaagacttgaaccaagaaatggctttggaggtgggaagaagtgaacagacacaagtcatattattacagtagaatccaaaagacttggttgaacgtggggagctcagggagaagaaagagtcaaggtcctggtgtggtggctcccatctgtaatcccagcactttgggaggccaaggcaggaggttcgctggagcctaggaattcagtaccagcctggtcaacaaaacgaggcttctgtctctgtaaaaaaattttcaaaattggctgggcatggtgatgcgggcctctagttctagctactcaggagtctgaggcaggaggattgcttgagtccaggagttcaaggatgtcatgagctatgatccagcgtaggtgccagagcaagaccctgtctcaaaaaagtcaagaatgagcccaagagcgtcaaggctgcaccactgcactgcagcctgagtgatgagtgagactctgccttcc

SEQ ID NO: 207407 - DNA, 540 bp, Homo sapiens
actttaaattcttgtaggtagactacaacgtggtaatttgttttctaaactattgatgaaactatatatttttagtttgtacatcatccttgggtaactattacccttaattttctttaaatttaaatctttgagtttgagcttttcattttaggctaccagccctcgaagaaatctgcagtttctggtcctggtgtggtggctcccatctgtaatcccagcactttgggaggccaaggcaggaggttcgctggagcctaggaattcagtaccagcctggtcaacaaaacgaggcttctgtctctgtaaaaaaattttcaaaattggctgggcatggtgatgcgggcctctagttctagctactcaggagtctgaggcaggaggattgcttgagtccaggagttcaaggatgtcatgagctatgatccagcgtaggtgccagagcaagaccctgtctcaaaaaagtcaagaatgagcccaagagcgtcaaggctgcaccactgcactgcagcctgagtgatgagtgagactctgccttcc

SEQ ID NO: 207408 - DNA, 237 bp, Homo sapiens
aaactgatctgagttaagaagaggtaaaggtttcctttacaaaggcttaagccctgtcagcacaaggtgggactctggtctcctactctcttgtccatgcctttactgagcatggaaaacagcagttcttgctaaagtgccagtttctaactttttatctaacctataaatgctcacaagacagtttggctatataactgttgaaatccacatcttattcaagccttgacctatata

SEQ ID NO: 207409 - DNA, 126 bp, Homo sapiens
tgcatttatctcgtgggttaaaatcattcattgatcgctaatcacctgtggttgtttacacacaacaggttccctggacagcacaaaaccacaaggaggattatacataccacaggaaacaatcaa

SEQ ID NO: 207410 - DNA, 486 bp, Homo sapiens
aggtaacaggaaatgaccaaaggtgagctcaggtaaattgtttttgtcgtttcagctgtagttaaaatgactcagagatctaagcttctgtgccagacctgagtgaaatatttttttctttgtacattaaaaataacacatcaagaacatttatttttaccttggagaatacaaaacacctataagctttacccaattatacttcatttcccagtcttctaatgtaatgtataacaacgtggtaagctaggcgggtggatcacctgaggtcaggagttagagaccagcctgaccaacatggtgaaaccccgtctctactaaaagtacaaaattagctaggcgtggtggtgcatgcctgtaatcccagctacttgggaggctgaggcaggagaattggttgaacccaggagccagaggttgcagtgacctggaatgcgccattgcagtctagcctgggcaccaagagtgaaactccatctcaaaaaa

SEQ ID NO: 207411 - DNA, 265 bp, Homo sapiens
attcataatagctccacactggaaacaactaaaatttcttcagtagtggaatggaatacactgtggtgtattcacacaaaggaacgctgcacagcattaaaaaataacaacacgtacaacaacaaatgaatctcaaaaacataatgctgagctaaagaaccagatgcaaatattatacactgtttaattacatatgaagtttaaaagcaggcacaattggtatatggtgaaaaaagttataaaagtggttacctgtgggagtgag

SEQ ID NO: 207412 - DNA, 489 bp, Homo sapiens
aggctccaaaagttcatatttatatcagggagattcatcattcttttcgaagagcagtcccaggtcgcttgcctccattgttatgacatttgtcctcagaatcgctcatcaagacagacacggtaatggtcatttcaaacacagcacaaatgatgccagtggcagaggggggccaagccttcagagcctggagttgaagtaagaagccaggctaggggcttgtcacaccctggagggaaaataaataaagctgcaaggtctcagcacacattccggtctttgactgatttgtaagctctccaccagaggcttggctggtgtgtgagtactcatcttaccagctacatcaatgtcactaggtattgacggtgatgattcccaaaaataaattacctgcaagagaaggaaatagcaaaagactcgcaaatgaacctatcactcatttcttgtcatatatattaaaatagatataatctattctactttaaa

SEQ ID NO: 207413 - DNA, 246 bp, Homo sapiens
aaccagccagctacacagaaaatagtgaggtagaaggaaaagcaaagagagggctccacatcattccttgtcctttccatcctcccttactcatcagtaagccaaaggcagagagtgtcatagaatgtgcatacatcaggaggaaataaaaacaggtgagttagtgctgtacggtgtttccacctttctggtaggaacaaaatactcctgtacgatctgcaaattatgcattgtgtcattatcagt

SEQ ID NO: 207414 - DNA, 313 bp, Homo sapiens
tgaaatgcctcccttcccccacatcatcatgggctaaatgcttttactgtttagcaacttctctagcagtggttttccaacagaaacgtacagaaccatatgggagattttcaaaagaacaaggagctcaggttttctctagatctgcaaaattaggatttctggaagtagaacacagacatgctccttttgtttaaaatctccacagagtgtaaaacaccatttccttttaacaaatgcaaatagtattcctttgaacaaaaaagaatggtctttcgtagtgcttggtaaaaacaataaataaaaataacaa

SEQ ID NO: 207415 - DNA, 292 bp, Homo sapiens
cagaaaaaatgaagagagcttcagagaccctttgggacacaaagaaatgcatgcacttgtgcgctctctctctttttcatttttatttttctaatttatatggctaacttgtcaggcatactgatacaaagtgacccatggatgccagccatataagtgaaaagaataaaaatagaaggaaagaaggaagggaggaaggaaggaaggaaaaaaacaggagggagggaggaaggacagaaggaaggatggaaggaagaaaggaaagaaggagaaaggaaaggaagaaaagaaa

SEQ ID NO: 207416 - DNA, 482 bp, Homo sapiens
cttgacagaaataatagaactgctgtcttcttccaagttaaacaaaactttggagctaaaagctagctaggtcaagagaaacaaaatctaatcctcacccaattgagagactgaatatacaaagaatggccaaacctaaccatgacctcctacccataacctcttcagtaatcggccagaagggtcaggacttaatctttaaccggcagcttccctatttcttgcccctgcttccagctctgggccaatcagagaaagccaaatgtgctcctcacaccaatcgcgtaagaagccctgcttctagtatagccctcctccaacttcccgatgccaacatcctccaatcagagccaacctgaagtttctcccttttttcagtatatgtaaagcttttccactcccctgcctgcctatgagtctgttaaatcaagtgatgggtcgcggctgactcttgccagctctgagtaaatagcctattctca

SEQ ID NO: 207417 - DNA, 175 bp, Homo sapiens
tgatagtgcccttaatgctcctttgaatttctgagatattggttgtaatatctccttttccatctgatattacctatttggatctttatcttcttagttaaatctacctaaaggtctgtcaattttatcttttcaaaataccaatttatcatttcactgatctataggagtggtg

SEQ ID NO: 207418 - DNA, 1117 bp, Homo sapiens
gttttataatactttatcatgcgtacttgctttaaggtgatattggttatagaatttaccatcaatttaacaatagcctttccaaaaagaagcactacattaactatacacagtttttagaaattaacaatattacatacttattcatgcaatcacctaccactttcttcttcagcatcgtaattaaagttttagtctaagcgttcttcatattcagagcaaaaatattcttctgagtcactctcagcctttcagagctatgaatagagttacagtgacaaactgcattcataacaccttcacctgtaggacaggcagtataatttcaaggcataataaagtgctgagcttaggcgacttctactttaattacattgcttagtatgtcagacaaacttcagactaaatattacctgtttttttttcaaaactacatcacaaagtaatttatcccaagaaatttcaagcaacaaactaaatttatttaagagtcaaccttgtgggatgcaaccaatgcaaataattcagctgaggtcacaggagtatatatacctttatgtattgctaagttcccatattacaacttattcctgggccttgtggctgacaagtttcttttgacatcaattataaaaggcatctcgatttcagaaacataacactgtgaaaaacacaaccatgtaggatcaagaaaattacatataaatgttatacaaaatcactgtagcctttactttagagcactaggttaactgtttctttgtatttatgggagagttattatcttttattgtcactgctatttgtatacactgcggtcccatggaaaattttatttgaaaattgattacagtattgttttttaaaaaaattgtgaaaaacattgccctgggaaaatgcaagacacaagatagataagatagagcctttgccttgaaggacacattaaaagatgcatattccaaaaaaagaggcaatgaaatggtcaacagagacttataagtcaaaaattattctggacaataatctaataactgttaagctaccattttcttcttctgaaaagtccattttgcatgtctaaatgtttcacttacttttaaaattattcagttac

SEQ ID NO: 207419 - DNA, 295 bp, Homo sapiens
accctgatttcaaccagttcaggttttatctgtaaagtataatcagttccccaatatacaatttccctacaggaagaaaaaatcaatttgcagctttaaaaataaaaagtttgattcaaagccagcctgggcaacaaagtaagacctgtctcaaaaaataaaaacaagttttgaacaccactgatagagatttgggtttggagtttgaatctccccaccctacctctgtgcgtcccttctcttaagtgtaatgagaataatgctgtttgaacatgccagacaggtgctcaaaaaa

SEQ ID NO: 207420 - DNA, 292 bp, Homo sapiens
atttctattttcaatgaataaatgagaaacctagaatttttgttttggacacactttgatcatatctaatgtgttctacttcctctaattatttttatgttattaggatttttaaaaaatctcttagattaaaatttctcagtgtatctttgtttgcgtgtctttttttctctctccacttatgtaattgaagcatttctgacatatcctcagaacacacagattcttatcaggacttaactacccagggcagggccctccttggatttactgaaaataaacactttgggta

SEQ ID NO: 207421 - DNA, 289 bp, Homo sapiens
tggagttctttaaagtagtgtttttatataatctgcctgacaggcaagacaggatggttgaaatttatactcccaaatatgacagagttcaacccagttctgctgtttcataacagtgtggtcttgaggaaatctgaagagattggcaacttggaacttcagttttctcatctgtaaaatggggtcatagaaggactaccacatagggttgtgtttgggaatgagaagagatagaatagcaatttcgtatggagctgcgcatatattcagtaagtggtcgaagtacaat

SEQ ID NO: 207422 - DNA, 739 bp, Homo sapiens
  misc_feature (730)..(730): n is a, c, g, or t
catctcaaaatatatatatatatatatatatatatatatatgccatacgcagtggctcacacatataatgggaggtcaaggcaagacgatcatttgagcccagcagttcaagaccagtctgggccacatagcaagaccccaactctacaaaaaactttaaaaattagccgggcatggtggcatgctcctgtagtcccaactactcaagaggctggggtgagaggatcacttgagcccaggaattcgaggctatagtgagctatgatcgtgccactgccctccagcctgggtgacagcaagaccctgtctctaaaaaattaaaaattaagaaataaacttaatacctaaatatctttattcagtcaaattgttattcaaatgtgagaccataaaaaaatatattctcatacaaacacagcttcagaggcttagcagttaagggagagttatcagatttcatggtaagacttgtcactatccaaaaggagaaaaaagtaatcagaagaacatggcaaatattaagattggaaagaatttgaagcaccactacactatgaagactactccccaggaagatgcgatgtggtaacagctcaccttgactccaactagacaccagaagcggcggcacagttcacaacgggggcgaccacggaaagagatcccaacgagccccgcggacaacaacgctggacacgtgataggacgacgacaacaccacactcactcnggcgcccgc

SEQ ID NO: 207423 - DNA, 110 bp, Homo sapiens
ggggtacccccatttcagttctgggaagaattatttgtagtctgtagaaataagaacttgagaaatatccatgaagagtagaaccaaagagtcagcaccaaaaaaggatt

SEQ ID NO: 207424 - DNA, 367 bp, Homo sapiens
tgttttcttttgagacagagtctcactgtgtagactagcctcgagtgcagcagtgtgatcaatagctcatcgtggtctcaaacttccaggctcaagcagtcctcccacctcagcctcctgagtagctggaattacaggcacatgctaccatgcccagataacttgttttttatttttatttttagaagagacgaggtcttgccctgctggtcttgaatgcctggactcaagcaattctcccaccttggcctcccaaagttattgggaagggattacagcataagttatcacacccagcctctgctgatttaattatctgtgctttataatcccttttggggtgcatagcataagaaagaatggccat

SEQ ID NO: 207425 - DNA, 313 bp, Homo sapiens
gtgttaagattattatttaaatccagtgggaagccataggtgcattatatataaagcagtgacatgaactgatttagacctttaaaagatcactctggtagctgtatagacaatgaattaaaagtataaaacatagatacatgaagtttagagaccgcagtaatacaagagaaaggatagaatgtcctgaactagagaatagcagtggcagagaaatggataaatttaggacacattttgaaggcagaaacagaacaacttggtaatggattagatgtgagaaagtacatgaaaggaatgaaagcaagataat

SEQ ID NO: 207426 - DNA, 542 bp, Homo sapiens
taggtactattttttactattcagagccaagacagcaattccggttttctttctcttacatccgttgaaaagtacagctacttatttccttatcttcccccaaaaagttctccctatagaagagtgcacagggccttctctcatcagaaagaccttttggtgtgattagctatcactgcactggcattcatgaaggaggatgtatggtcagggtatacttttattgatcctggttgggatagataatgaaatatgtgttaggcagctgatcgttttggataaggaaatgacttatgaagggtaaagagaggctcttagtttcattaagtcattgacatgaatacatgtcctcactcttactacctggactgtgaattttccagtccatgttctcattctttccacaaaaaaatactctcgctgggtgcagtggctcatgcctgtaatccttgcactttgggaggctgaggagggaggattgcttgagcctaggagttcgagaccaacctgggcaacacagtgagaccccatctctacaaaaa

SEQ ID NO: 207427 - DNA, 353 bp, Homo sapiens
  misc_feature (89)..(89): n is a, c, g, or t
gttcttgagaggtgatttgctttacatgtcattggctgcttgtgagatgcttaagaacatgtgtgcagcaccgtggaggccctggaggngggtctgttgttttagggaattccctttatagctctatacatgcggggccacagggaggatctgcttggaaactttttaagcagaactttatgaaagctcacagaacatgttcattcaccttccacacatgaaaatgcccatttgtcgggtcagtgttcagtgtgaaaccattgaactaaacatgtcaaaccacaggactaaaggagacctgacacttcatctggatacccctgtctagatcctactcccaccaggcacatggc

SEQ ID NO: 207428 - DNA, 171 bp, Homo sapiens
tctgaggtgatctagaggatcccgtctttgttttctttaaggaaagcaattttacatttttaaaaacattcacagttttaatgtagtttactatgtaacatgaaaaaatgatccagaaaggccatctcaggtcatatcctaataaaacaattatattgtgagcagcgttgg

SEQ ID NO: 207429 - DNA, 609 bp, Homo sapiens
gattttttgtgatctaacatgtcaacagtctgactgtatgtgaatttatttcaggtcatttagaaccttgatttgtattaaatactgttcagctcctttctcatagaatcccagatcgatttcaggaaggagtacctagcagtttttaatagctgctgtgtggcggacactattctctgaacttttcatccatctcatttaaccccaatggtatctatccttcataggtaggaggtggggttcccatttacaaccacatgaactgtgggtcaagtgaagtaatttacgcaagactgcctttaaaaaaataaaataaaataacactttggtgttgccagcactttgagaggccaaggcgggtggatcacctgaggttaggagttcaagaccagcctgaccaacatggagaaaccctgtctctactaaaagtacaaaattagccgggcatggtggcacatgcctgtaatcccagctactcgggaggctgaggcaggagaatcccttgaacccgagaagcagaggttgcgatgagccaagatagcgccattgcactccagcctgggcagcaagagcgaaactccatctcaaaaaacaaacaaaaacagtaag

SEQ ID NO: 207430 - DNA, 405 bp, Homo sapiens
acagtgtacccacaaaaacacctacaaagtacccacaaaaattaaaaattaaaaagttagagaacacaaagaaaattactactgtgatgttatgcatatcccaaaaacctatatatacgatattttccctgaagtatatatatttgtacataaattcatggggggaaaaaaactcttgagaggatcacatcatactgacagaagtagtttgctaggaagggcagaagtttacgcaggggagggtgagtggtcaaccagatgcactttggattctgctttaatctagagtttcatgcagctaagcatctgactgaataaaggaaggaaaaggagtcatcttagcggaagatgatatacagttgacaaaattctagtcaaagatgcaatctccagatacaaaaagag

SEQ ID NO: 207431 - DNA, 119 bp, Homo sapiens
aacttttccaaagtagctataccatattatgttctcactggcaatgtgtgagaattccagtttgtccacatccttgccaacaatggttactgtcttttatgttagccatcctagtgggt

SEQ ID NO: 207432 - DNA, 599 bp, Homo sapiens
tggcccttctgaagaatgtcacaggaaagcaaagctgagagggcctcgtgaactcatccatgcctgtctcccacactgacctgcacctttggtcccagaggtgcttatgaaagacagatgctcagatccctccttagagagtcagattcaggaggtctgatgtgaatcccagagacctggaattttactgatggcccagataatttttatggtcagatactgacctaattccacccagtttcccactaaattttgtaagtgaggaaagcaatgcagaagagttacaggaaggcccagtgttacatgcccaggtcatggcccagggccaagccagccccaaaggtgggaccctggttctcttagccttccctgacacctgtcaccctggctgctgctccagggaaccctctctcgggagaagcttgagcaaatgttgatcttcccagaacaggggtctacagaatccagaggtgtggaaacagtgggatgctaatagctgttagaattttggttcatccatagatccaaactttgaagcattgagacaaaagatagctgtgctttgatagagaaaatagataagaaaagggtgtgaaatc

SEQ ID NO: 207433 - DNA, 361 bp, Homo sapiens
agcaattacagactctgctgtccctaagactgtaaaacacagctttcacctttagccaaatccccctgccatttaaaatcaattctgtctcatgagaggcagtacagcttaatagtctgggctcaggaggctgaggcaggtggatcacctgaggtcaggagttcgagaccaggttggccaatatggtgaaaccccatctctgctaaaaatacaaaaattagctgggcatagtggcatgtgcctataatcccagctacttgggaggttgaggcagaagaatcgcttgaacccgagaggcggaggctgcagtgagacgagatcctgccactgcactccagcctgggcaacagaaagagactat

SEQ ID NO: 207434 - DNA, 727 bp, Homo sapiens
  misc_feature (1)..(1): n is a, c, g, or t
  misc_feature (7)..(7): n is a, c, g, or t
  misc_feature (18)..(18): n is a, c, g, or t
  misc_feature (24)..(24): n is a, c, g, or t
naatggnaaatggggggnctttcncttccccttggtggccatggagagtaggtctaatctgtctaccaccaaaggttgtgaggattaaatggggtaatgggcgtagcacacctctcatggtgcctggcacatagtggcctgcaggtggcctcttcccctctggctcattcctgaattggcccacaggagccttggagcacagatgtgggcagggttccttgttgccgcaggcctctcattcggtactggcccctaagtgccttttacctttaataacttttaattgttttttaaagacaagagtctcactccgtcacccaggctgcagtgtagtgcgatcctggctcactgcaacctctgcttcccaggttcaagcaattctcctgcctcagcctcccgagtagctgggattacaggcatgtgtcaccacgcctggctaatttttgtatttttagtagagacaaggtttctccatgttggccaggctgatctcaacctcctgacctcaagtgatctgcctgcctcagcttccaaagtgctgggattacaggagtgagccaccgcgcctggcctgcctttaatgacttttttaaagggaatggctcagtcaaagcacctgtgtgtgcagtgaagaacgatgggccacctttcgcttcctggtgagaagttcttctcataaaccttggaactgcaggtctgggaaaagccttatcattaatcccactgg

SEQ ID NO: 207435 - DNA, 890 bp, Homo sapiens
tcagtgctacccatatgagaacaagctgatttgttcactgattgataaattgattgctcagtgcattcattctgtcagccaagatttttggagtactctcaatttgaagcatgctgtcacagacagaccatgggttttcagtcactgtaaacactggacaagccacacacatactatctctgaaccttgggtttgttctctgtaaaatgggagtgatgctacttacctcacggggaggttgtgaggattaaatggggtaatgggcgtagcacacctctcatggtgcctggcacatagtggcctgcaggtggcctcttcccctctggctcattcctgaattggcccacaggagccttggagcacagatgtgggcagggttccttgttgccgcaggcctctcattcggtactggcccctaagtgccttttacctttaataacttttaattgttttttaaagacaagagtctcactccgtcacccaggctgcagtgtagtgcgatcctggctcactgcaacctctgcttcccaggttcaagcaattctcctgcctcagcctcccgagtagctgggattacaggcatgtgtcaccacgcctggctaatttttgtatttttagtagagacaaggtttctccatgttggccaggctgatctcaacctcctgacctcaagtgatctgcctgcctcagcttccaaagtgctgggattacaggagtgagccaccgcgcctggcctgcctttaatgacttttttaaagggaatggctcagtcaaagcacctgtgtgtgcagtgaagaacgatgggccacctttcgcttcctggtgagaagttcttctcataaaccttggaactgcaggtctgggaaaagccttatcattaatcccactgg

SEQ ID NO: 207436 - DNA, 476 bp, Homo sapiens
agagtttcatcattcaaagcgaattgtattaagcaccatacttggacttggtaaagttttgcttctagtcatggctttactaccagatgcttacatgtcacagctatttaacatgaaccttgacaagaaaagtcactcaacatttctgagcttcagtttcttggtctgtaaaatacaacatcatagataatcttttacttaaagaagatggcttaaaaaatcagaaatgtgttctcccaccattctggaggccagaagtctgaaataatggtgttaacagggccatgctctctctggaggctctagggaagaatccttccttgtctttttccagcttctggtgttgtgccagtccttggtgttccttggcttgtagctacatcactccagttgctgcctccatcttcatatgaccatctttctctttgcatctgtgtccagatttccatgttagaagaacatcagtcatattgaat

SEQ ID NO: 207437 - DNA, 372 bp, Homo sapiens
ctaaaaaaaacaaacaacatatcttactgactaaacctgaatggaactcataattagtctttctgtatttttccacaaaatagcgaattggtacttgggagacttctgtttttttgttgttgttgttgttgaaaaaactgcctttgttctgaaattatatcacctgtgttctgaactaagatgatgggagttcattttgtatttactttgcagtaagtatcatgtaaatacgcaaacgttgaatgtaatatagattgtgatcgcagtggttttttgggtgatacagtttataaatataccaattatacaccctcatacatttgtctgattttgaatttgtaaaatgaggactactgtttacacatttaatac

SEQ ID NO: 207438 - DNA, 305 bp, Homo sapiens
tgagctagggtctcgctgttatatccaggctagagagcagtggcccaatcacagccacttcagcctcaacctcccaggctcaagcaaacctctcaccacttcaacctctcgaggagctgagactacaggtatatcccaccatgcctggctaattttttctattttttgtagagatgctgacccactatgttgcccaggctggtcttaagctcacaacctcaagcgaccctccttccaaggaaattataactttgtatgcagttaaaactaggctcttttcctttgagactcctcccatttctttt

SEQ ID NO: 207439 - DNA, 243 bp, Homo sapiens
ccttttttcaatatttactatgcctcttctacgtaactcaatgtcctaggtagtgactagattcaacattgaataaaacaaatccctcttactctctaaagacgtgaaggatgaaacacgatagattaaaaataaatatcatgtcatatagtaataatgtagggttggggagggaaacagcaacagtttttgaagaggagtactattatagaggagtcaagaaaggcctctttcaggacattt

SEQ ID NO: 207440 - DNA, 329 bp, Homo sapiens
gtggaatatagttttagctataaatatgtttcacctaatgtgattctggaaaatgttgcttgaaaatttgactgtaaagtaactttgaaaaggttattcttttttttcaattggcttccaaaatgaaaatagatttaatcccagtttaggtcaaagattcagtaaaacctgtgtttaagaagcagtaacattttcttttaagagaagtagtttttgcttataaaatactttatcatctccgatttttagatggtctttataacaaatttatcttaaaaattcttacctatatactaatgcttaatcatcgagaaatgggtcttgatata

SEQ ID NO: 207441 - DNA, 651 bp, Homo sapiens
tgcatgacagttgacaatcactgtgacaatgaacggaagagaccaagaaaggacagaaatgaggtgactccttgattctaggaaaatctccatcccttactaagaaaagcatgaatattcctcaccttgctcattcccttcattaaagatcctctatatttgtaacttcctggttctcagtagctgagaaggtgatttgcaagctatactacttctccaattccatgctatgctcctacttctccaatgccattgaatagagcctgcactgcttgacgctcactcttggtttcatacattggctttgcaataataaacaggaaagagtccctttttggggtgagacccctcagtaacatctgcagcccctctaaatagccatctcaaattataccaaaggagtgtattttggggtggcatattttgggcttcccacatggctaagccaacatatagcattcttgctgaacgcagggtgatcagacatcacctagcagatggtgaaggatgaggagccctattagatattatgagtgatcagctattgaagatggggaattctggctaaattgactgagaaggattcttgctgagattgaacaatgcagagaggaacacagaagctcaatagttgaggcctagtgagaagag

SEQ ID NO: 207442 - DNA, 513 bp, Homo sapiens
tgagccacaggtgaaagcatggggccccaatctagtgccctgcatgcccaatgcccaggcctcaaggcccacgtctgcagagcccaggggaaaggtgccttgaggacgaagctgggtcctggggagccagctccagtactgggggtggctcactgtttcctgtccaggaatgctcaggacaaccagcttcttgcaatcttcccagctcaggctccccagcctgagtcacaccatcaccatactgtggaccctggacaagcctccggacttttctgggcctcaccttccccacctgggagtgcaggtgctaatgcccacctgtgggctgtgtcacaccataggccaagagcttcttcagtgcctggcactcagtaggcctgcaataaatggagacagctgctaggatgcaggcgaaccccctggtgcacagtagggtctcaacccaatcccgctgaccccatagcatggacaaggcgaggttctcaaaggcctctgagagccagaggtgcctag

SEQ ID NO: 207443 - DNA, 572 bp, Homo sapiens
tgttgcagactcctcaaccctgttactatcgttcagagtagccacagacagtatgtaaatgagtgggtgtgaatgtgttcccaaaatattttattggcgaaaacaggcaacaggttaattttaaactgcaagccacaatttgctcacccttggactaggctaattcccaaggctatgaacagcaaacggccaggcacaaataaatcggctaccaatcaatcacattgaccagggattttgaggataaactagagaatatgacataagattccttcaaaatcaaggatgaagtaacaacagttaatttaatattatctttctgtctatccatccatccgtgtgttcattcagctattcctttctttcatatttcattgtgtttgacttctcttctatttagccagaaatatttgtttatattaaggatactaagattaatatagtaagaatacagagaaagaaagaacgggagaaaaagaaagaggggaaggaaggaagagagaaaataagaggtgggagagaaaataaaagaaggaagggggaaagaatgaaagagaaagaagaaagaggaa

SEQ ID NO: 207444 - DNA, 298 bp, Homo sapiens
caataagaactacggtcctgaggacacgcctcccagcctcccttaggtattggggttggttccccttccggatgtaggcaggggattggtggcgcagggtcggaaagatcagtagatacgtcagtaacgcgtcccagagggaagaggggcggtgcctgtctccgaagcgaggagcggattggcttcacggaggccgcgcccccgaagtcacggccggcgggcatttggaaatagcttgtcatttccctccttcaacctgtaccattcttcaagaaacggtttgaatcagactgccttt

SEQ ID NO: 207445 - DNA, 343 bp, Homo sapiens
agtttcttcaaggcacttgctaataggaagacggcacctacttgattagacagtgaacagttattcacatgacaattctaatacatcctaatttccacctaggatttacatactggagaatattttctagaagattctagcttttaaatggtttaatttgaaaaccaccaatcacaggggtagatgggaaaagaattaaacaaaaaggaattactaaatataagatgttctttaaaagtaaataacaagaaagaaaaacaaatatttcaaaatacatcttcaactattttgattatgtatcttactagcaagaatacccattactgcaaacaatcacattgtg

SEQ ID NO: 207446 - DNA, 489 bp, Homo sapiens
ttttaataatttaaaatataaaagagttaggttctgctttgttgagctgtgttgcaaagtgttaatgaagtagaaactttgctttttatagtctattatactatatcttcagtaggttttgagaacatctaaaaacaataagcaaatcatcttatttagaagaaaaggtgacttatcaactcacagtaataagattgagaacagtctttattagacaaatttagaagaagctataaattatggtttatagatcaataaattgattaaacttttatcaaactttaaaaattactactttttaaattttaggatatcttttctaaacagcaaaagaaaagaaaaaacatatttaagaatataggggctgggtgcggtggctctcgcctgtaatcccagcactttgtgaggctgaggcggacggatcacaagatcaagagatcgagaccatcctggctaacatggtgaaacctcgtctctactaaaaataca

SEQ ID NO: 207447 - DNA, 444 bp, Homo sapiens
ctttagaccaaatggaagtaacacatttacaatatatttcatccaacagctgcaaaacacacattgttttcatcaccagtagaatattcttcaagattggccacatgttaagccacaaaacaagatttgatatcagctaggcacagttttgcttgcatgtagtcccagctacttgggaaggtgaggcagaaaggatctcatgagtccaagagttcaagaccagcctgggcaatatagtgagatggcgtttcttagttttaagaactttttaaaaattaaaatcatacaaaggatcttttctgaccacaaatgaaataaagatagaaatcagtaacaatagaaacttttggaattgtacaaatacatggaaatttacaaacgtgctcctaaacaaccagtgggtcaatgagtaaattaggaaggagactttaaaatttcttcagt

SEQ ID NO: 207448 - DNA, 160 bp, Homo sapiens
atgacacatacactcctctaacataagtggtcctgacaactacaaaatcagctgtttacttcttcaaccaaaacgtcaacttttaaacaacactcaggccatccccgacctacaagagcccaactagggacagggttgtaggggtgaggaggcctggtgt

SEQ ID NO: 207449 - DNA, 385 bp, Homo sapiens
ctgtagtttgtcttttcaccccagtactatggaataattagcttttacttaagattaacaccattaagtcttcagtagaaggaagatagtaaagaaaaccgtctcatgtttctcttcttcctgttctgtatgattacgtactgcttttatcccaaatccttcagaataattttggtacattttatggattaaattatcttctataaattatgtctgggtaaattttactctgctattttggctgaaacagtatctagaactagaaaaaatgtttgaaagtttcttgatgtagttggattgacctgtaaattgagcatagtagtttgttacaaataatgctttataaataatagcataatagtttgtaacaactgtagaatagaaa

SEQ ID NO: 207450 - DNA, 701 bp, Homo sapiens
gaaatgtatcttacatggtacagataggaaatcatatacacactgtggcacatacgaaagctattccctaagttcttgccgaaatatatttttatattattttttaattaaaaatttactgaaactcgtactcctgaaataaaatagctattgtctttatagaaaaggatggaccataacatttaatgagagaactcaagctgtaggttatagtttccagaccattggtcacttactcaccatgcttcctactttctgtcttttcttctatttccccccactattaaggattatttggtggctccgtaattgagcaattttttggtctgttctttaataagtgtttacttccccctaccattttattagtgaaatgagttttttataacgctattatatctatgttgttttaaaaagctacatacttcttctcattatttaatcttgtgagagatttgctattatctggagtttcatattatccataataattttgtttgttacataatcaacagaatggctaaaaattaaaaaggtggaaaataacaagggttcacaaaaatgtagcaaactggaactctcattcactgctaaaggagttttatagctgctttggaaaactatttggttatatttactaaagctgaacatatgtatgttctatgacccaacagttctagtgtatactcagcagaaattaa

SEQ ID NO: 207451 - DNA, 171 bp, Homo sapiens
ctaagcccaggtaatggtgttaaacagatagcaattttgaacttggaggcttgtttcattcccagtattttcagtaattctgtctttctttcagcaaatatttactgagtgccacctatttgcctgattctgtcgtagctaagcactggagaaaacaatgctgagcaagac

SEQ ID NO: 207452 - DNA, 597 bp, Homo sapiens
agccggcccacagttatagatcagtaactatgtccctggaatgtttctgatatcttcaaataacaagttccttctgcagacaagattacactgtccattaaattgaataatgggctatttggaaagccagaaactggctcaatcaccacagcaaaatgaagaagaaagtaaactggaatggacttgtacaatgccttaatttcttaaatcatttagtggaactgaaagccacaggacaaggaaagacaaaacatgtgtccagtcaacattatgtaaatgtgaaggggatgctaaaggaaataaagtcagctcctaagaagggaaaatataacagttcaacctaaactgttctgcttatttactgatggtaaatggctacttttagagaaaaaaaatagaaatttaggctgactttaatcaaggttcattctttggttgagcacatgcgtgtgtgtgtgtggaaggggagtgtgaaggggagagtattaatattaccttacacctctcatagctttctttctgtattttcctatctctgatggtatgactcagtcacctaagccaaaaacttaatcagctgaattatatataaagata

SEQ ID NO: 207453 - DNA, 1145 bp, Homo sapiens
aaaattaaaaaaaaaaaagctagggagaagagagagatctcattccaaacaattattggtcaacaatagttttagaccattgaaagaatataagagaatgttgacttgataataaatattgccatttagatgtcaggtgataaagtttattttgttgttaagctctctccattttgccccattcagtttaaaaggaaagtttttgtgtttaggaaactaaaggatgggtgatatgtagcagacccataaggttattttcatgaaaaacctagcttgggctaatctgaaagattcctcaataacagtctttggtgtcttatcctttcttctccatttgcctaagaatataattgtataagctggatgtttattccttggctatcgtttttacctaggaatcaatttctgcaagagctctgtaagccttacaaagcagaaagtcatccatttcttttttctttgttctcatttagtgcctcatttgatttcactttgtgtatctatttattgctccatgttaagtcaggtatgcatacatcatagaagtctgcctctcatttccatcttctttgccttatgtatcacttctcttgtgtcctattagagggagatgatctatgcttaaagctgttgggttatttttgataattatataacaccaacatgctgtgtctatagttcccatttattgattcaactaatatttctgagtatctacagcatgccgggactgggcaaggcatgggggatacaagagattgaggtggctgcaatccctccagtgaaatgctgcaaaataagcaaggggctgagagagaaagtaatgagactgaaacgattgtcagtacagcccactagtccctctgcctagaacgtgctcctgaatgtgctcctgctctgtgtggtgggctgcctttgtctctcccacgggacccagcccagtcatcacctctgcactcagacatctctgaccctcccaagtggctgcatcccacacactccagttatcgcactcatcaccttgcctcattcttggactttgctgccagactacgatttatctcgagcacctatcctagtaactgacactaataggcattcattgtttgtttattgaatggtgactatacaaaataaattatcta

SEQ ID NO: 207454 - DNA, 324 bp, Homo sapiens
aaagaaaggggatggtcatgggacgcgctctagcagggtggcaatctttagatggttattaagaaatgggatgaaaaaagtagaaactgatgggtgtgaagacaacagtgactccatcttgcatgctaatctaccatgttcacttttgattaacctcagtcccacgaatgcctgctgatttctactttacttgctgtccttagtgtaggaacatgtacccactataaatcctgcctttagagcaaagcaaccttgatgttatcacaaaaattacaggctatgacacgcatagcattcttgcctgttctggagcttgcctttgtc

SEQ ID NO: 207455 - DNA, 262 bp, Homo sapiens
aggttgaggctgcagtgagctgtgattgcaccactgcactccagcctgggcaacagagaatgactgtctcaaaaaattaattaagaagtataaaagaaaaaatagaaatttaaactacactgtttacctcataaaggataggcaaaaccccaaaatttgtccacacagtatctctagtgaggctgtggaataaataggtatcttaacctatttatctggtggggctgaagaatataactggagcaactcctacaaatggcaa

SEQ ID NO: 207456 - DNA, 331 bp, Homo sapiens
actttactatgggctagaacttggaatgccagaaggtctctcgtgtccccagtcttctgttcttacagttctttacataacccaatggtcccctaggctggtaactgtccttaacagaagctaggttgtaaatcgtctttctggaatgtggctcctagagccagacacagccgctggtgtggcccacctagtgcagaggagaacagaccacccctttccttgctcttgaatgaggctgggacatcacactctcaacttctgtggaatttctgtttgtgcttctgataagccacatatgccacataatatatcttatataaaccacgttaag

SEQ ID NO: 207457 - DNA, 221 bp, Homo sapiens
gccctcagatattttgtcaggacagtgtaaaatgtgggccaagatagtggttttgggtccaaacagaagggggttagagattttggaggttgaagcctgctgctagaaggagtatagaaagaagaacggggattctgtttgcccaaatacatggttaggctcatcttggacttgtttttgttttatatcttctgttacttctatgcacatattaatagata

SEQ ID NO: 207458 - DNA, 397 bp, Homo sapiens
ctcccaaccccaccccacctcaggtccaggatgaacattccagcagtgtggtctgcccacaggggagacccagggaagaggcctgcacagtccttagaaaaaggcttagggtttgagggtgaggaatcccaggatcccagacacctggtgtgggcttcaggtgggctcgtgcccttggccctcccagctaagtggttctgctggaggaggcagaccagagtgggaccctcaaagtcacagagccctgggccgagacccccaaatgctcaactttaagggtgatactatcctcaggaatccttgcaaagtaggaaaattgaacccagtgattgttttcaagatagctttatgttaatactcaatttaaccaattaaagaaatcgacataaaatcaaaa

SEQ ID NO: 207459 - DNA, 293 bp, Homo sapiens
gaaatactgagttctatttcacgtaagtcactgtacatctaacaagagatttgcaaaaaagaatttataattattcctattttatagctgtataatagaaatgtcacttaaatgtttttaaatttaggacatatttatttgataaactgttactagaataaaaatttctgtactaatatttataagctcaaaacacaatttaattcaaactttagttaatacattaaaaatctcagaagtgtggaatgaaaagttactaaaaagaataaattatattcaaacaatacacaata

SEQ ID NO: 207460 - DNA, 129 bp, Homo sapiens
ccttgcagacattctgacatctcaatagccagctgactgaaggcctgtggggtcaggtttgagaggtagatggggagcaggcaagagagcatttgaagctgaatgtatcaagactgccaagactaagag

SEQ ID NO: 207461 - DNA, 565 bp, Homo sapiens
cccaaaccttcagaaaaaccctgtccacgcactcacaggctcacatataaatgccgtgtgtgtgtggttgtttgcgtggaaattagagaaaaggactgaattagtccatacatgctaagtggggaaacagacaggaagtggatcccccaaattgaatgtctctctagctgaagcaaagactcaggggtggagaatgtgaagctccggagaattagcagaaacgtggggaggacattcatcatcccaccgttggagaatggggtttgaattaattttatatagatcctaacagggagttcccatatgacatctggaatataagtataggcgagaaaaataccaccactgcctgcaggcacttctgccttgtaggcaaactgtaatttttccctacgtttctctttgtttaggaagatgcccttgggggtgaaaggtgaagtgctattgatgtttaagtgggaagaatgtggagtttctagagttagggatagaagggctgggactgggataagatgggaggagtgtctccaggggtcctcagaggacaagcgggagtggaaggaga

SEQ ID NO: 207462 - DNA, 579 bp, Homo sapiens
aaatgaaaacatatattcatgcaaacacttgtatagaaatgttcatagcaacatcattcataatagccaaaaactggagacaacccaaatgttcatcaactgatgaatgaataaacaaaatgtagtttatctatatacaatggactattattcagccataaaaaggaatgaagtactgacacatgctacaacatgggtgaactttgaaaacattatgctaagtgaaagaagccagtcacaaaaaactgtatagtgtatgatttcatttatatgaaatgaccaggaaaggaaaatttttagagacagaaagcagatcagtagttgtctgaaactgaaggtaacaagtgaggattgactgcaaattctctttttgtttgtttgttttgtttcttttttttttgactgcacattctcacaagtaattttctgggtgttagaaatgttctaaaactggattgtgacagtggttgcacaaagctatcaatttactaaaaattattcactgtacacttataatgggtgaagtcttatggtacataaaatatatttcaataaaactaagaaaaagtctcatgaatt

SEQ ID NO: 207463 - DNA, 464 bp, Homo sapiens
tctctatgtggataacatgtagcattaatttgtcatattacatgtacatttattaaaaatcctagcagcaatgttaccaagtaacagtgttactgatattatttcatcaattagaaatgctgaattatttttaaagaaaaatctcgctagtgacctttcatctgacgtaaataagaggcttaacctatatctcaaaaaaaaaatcaagtcaaatttaccacttgtaattttgtttgcattactgaatcatttgacttgtttttgtctctgtgtttgttagtcagctcatacaaacagtttatcctcagtcattccaccaagctctttgcagtcatctagaaagaatcagacattattactaccattcttgtttacccttcctgaaagattttccaaagaaaaggagaaacaggcttgaattatacatgaagaatttcaccataaaatctgaacaaaaaacatcc

SEQ ID NO: 207464 - DNA, 377 bp, Homo sapiens
gttattttgaaatcatctactcatagcaatctagtatctagctgcaagactgtgcagacactgcacagggacagagtagcagcagacaattgaaagttgactgtgaggccgggcacagtggctcaagccggtaatcccagcactttgggagcctgaggctgacggatcacctgaggtcgggagtttgatactagcctgaccaacatggagaaaccccatctctactaaaaatacacaattagccaggcatggtggtgcatgcctgtaatcccagctactcagaggctgaggcagggaaacccgagaggcagaggttgcagtgagccgagatggtgccatcgcactccagcgtgggcaacaagagcgaaactctgtct

SEQ ID NO: 207465 - DNA, 811 bp, Homo sapiens
ggactcttttctcttgcctggaccctacaaatattttgcattgtgacgtgtagctgggtctgccacccaggtaatgtgagtcttccacataagccctggccacaagagtattatgaaataactttttattcatcacctaggtagtgatgtgactcttcatcagcctgtaccctgccacaagggaattgtgttgtgtcagtgggtccagcacctagatgatgtaactcatcttttggctggacctttcatattttacatattagttacatatcactgcatctgacattaggggatgagaggcttctgcctgggccctgcccacagatggcctcgtgacatattttggcatccatcacctaagaaacgtggctctcctcacctacatgcaccatgcacaaagaaaatattgtggcatatcactgggatcagccaccaggtatgtgtctatcctctcagggtgttgctcacagagagcgttgtaacatatcactgggcccagcacacaggtgatgtgacttgtggcctgtgcctatctagcctttttttttttgaggcagagtctcactctgttgcccaggttggagtgcaccgatgtatgatctgggctcactgcaaaatctgcctcctgggttcaagcagttctcctgccttagcctcccaagtagctgggattacaggcatgcattaccacaccgttctaattttggctatcggagtaaaggtgaagttacccatgttggccaggctggttctaactcctgacctcaggtatccacttgccttggccccaaagtgtggactccgaattaca

SEQ ID NO: 207466 - DNA, 782 bp, Homo sapiens
agcctggtgttctgctcagtaccaagtgcagcactttcacatgcttgatgctcaatgaatgttgaaggagagagtgaatggatacagagctgaatgagtaggttcacccttgtgactctctcagaggactgccccattgtctgcaagcctgaaaaccagaagtgcctaaggggttgcatcctccctgcacagccattagccaatgactggcaaaggagagggaaagctcggatccattgcctcgtttgggaaaaactcggagacatgattcgcactctggagttttcctgcaggatcaggcctacatcccctttctgaaatttctcataaaccacggtcccctgcttggctttttccccttccctgcccatcatccatcttcctctacttctctccttcatttcagaatctgcatctgagaaaactgccctaagataaggaatatgcttatcttccaatttgagttctgtaaacaacagccaagagagcaggggtgacgatacagctgagccacaatcaagtttcttattattttccaggcacagaagattccagtccacatcctttcttcctttcattcccaagatatagcaatagaagtctgaagacggtaaactctaataactgttccctgaatagaaaataacaagccttcccctccatacctaacagtccccaatacaattggtgttcataatatgcagtttgaagacaatgatgaccaatgaccaaaggcataatctgaatcacagccctatatcagtgctctggacccacatatc

SEQ ID NO: 207467 - DNA, 323 bp, Homo sapiens
catgcttcgtccttttagttcacaggtctctggatcaacagatgctgtacccaaggagctggacctgtggaattatcccccaggaattttgactgcacctggattggatttagtgtaagaagagtaactgtcatgagcctcaaatgagttctgcagtagagaaaccatataatgaagtaaagaaaaaaacaaacaacaacaaaaaaaaaacctttatactgatcactacatgggcaaaaaagaagacagttgtagaggtatgatggaataaaaaaattgatcagtcagatggcaaaactgtcatcttcatcaaaatgccaaga

SEQ ID NO: 207468 - DNA, 533 bp, Homo sapiens
atctccccaaggcagggagtgaatgcacagaagacgcatgaactgagaatatactctgccagttttcctggacatgcaattgcctttgaacttgctataatatattatgtctgcagaattcagaacattataatggccttcatccttgacccaaaaatcagggcagaagactctccacaagtaaatgtatttatggggaaaacaatgtgttatttgaaatgagctctaccttggacactccaagctatcagcttaccttcctgaagaagaaaaggataggtgtatcctcaccttcagtagcaggtccttccagcaagatgagactcctccaaggaaattgcagaagacttcctgagaaggaacaacagaaaatagaagacaattttgcttatcctggaaaatgtggctcttccatctgatgttaaatatgtattttgagcgtggaacaaagagtataatacagatcctcgtgttcttataattatgttagggtttcagaaaaacaatatatactttaatatccatcaatcaaa

SEQ ID NO: 207469 - DNA, 487 bp, Homo sapiens
tgaaactgcagaaagcaaatccatggataaggggagactactgcatatccaagagaaataaaaacatctgtacacacaaaaacatgcaattcttcacagcatcattattcataacaattcaaacgtccatctactaacaagtgaataaacaaaatgtgacacatccatacaatggaatattatttggccataaaaaggaatgaagtggccaggcatggtggcccatgcctgtaatcccagcactttgggaggccgaggcaggcagatcacaaggtcaccagttcaagatcagcctggccaatatggtgaaaccccatctctattataaatgtaaaaattagccaggcatactggcggatgcctgtaatcccagctactcaggaggctgaggcaggagaatcgcttgaacctgggaggtagaggttgcagtgagccgagaccaagccattgcactccagcctgggcgacagagcgagattccatctca

SEQ ID NO: 207470 - DNA, 571 bp, Homo sapiens
cacagactctcttgcatctctcgacccttgatccttttttaaatttaacccacatacttttgccacctcccccttaggattcttcttatctcgattttaggtctttcatccatgttctcagaaatcatctttcttaagcttcaagagcctactttttcgtttattcaaagattgcctatataaaatatttttcttaatactttgtattgtgaagaagtctcaatacaaagcagtgaacattacattatatttaactttctgatatgatataaaatttgccatgtgtaaaataagtgctcaaaatgtatttgttaataatgacttaaaagtcaagttatcactcagtgacttacttagctgatctgaacagaaatactcttctgttgtactctttgaatcttttactcagaaaagtatattgaatttaggaagcttttagactgaattgtacatttagagaaacttaactatgccacattgattaataaatagcaaatctgtggtagtttgagttttctacaaatctatggtagtgttttgagtttaggtgaactctgcctatttaagagat

SEQ ID NO: 207471 - DNA, 591 bp, Homo sapiens
aagttattagagcaggtgttttatatcattgtattttatataacttaattgtcatgaataggtatacactccctttatcttttatttgtaccaaattgtttagtaagccttgttaaaggtaaatcaagtccagattccagattagtgaagccagaattttattttgattctttttctttatagtccaaaaatgagcacatctcaaataaatataagtgattagggtgaggggtggaatttatacgattattgtcatgtgtaagcctgaccagactgtctatatcttcaaagttacattgtggataacttagagcttaaaaaatttgtgaatttgtgaaataggaagttgattatacattcagtattcagataatttatattggaggttggcatactttctccataaaggggcagctagtaaatacttttggtttttcaggccatatgttctctgtcataactatgcagttctgcaattgtaatgtgaaagcagatacagacaatatgtaaaagaatgtgtggttgtgttgcaaaaaaacttcatttacagacaggcagcatgctgaatttggcatatggaccataagttta

SEQ ID NO: 207472 - DNA, 357 bp, Homo sapiens
cgtggcgtgtcactctgttgcacaggccggagtgcagtggtgcagtcttggctcgctgcagcctccacctcccaggttcaagcaattctcctgcttcagcctcctgagtagctgggattacaggcgcttgccaccacacctggctaatttttgtatttttagtagagacgggatttcaccacgttagcgagactggtcttgaactcctgacctcaagtgatccacctgcctcagcctcccgaagtgctgggattgcaggcgtgagccaccgcgcctggcccatagcaacttttaagaaactcatttgtcgagctttagtgtaatatcaatgaagaatagacagttttctgaaaaagt

SEQ ID NO: 207473 - DNA, 415 bp, Homo sapiens
aagagtctgaaatgtattttaacgctgcacccgggtacaggaacattctaccaaaagatgagtgtattacagttctaatgtaaagaatacataccaaagacatatttaaaaaataacaagatttagaaaaacaactgaaggttgtatgttatcaaatacaatatcaaatctttccaaataaaatttcatttggttcataagagtacgcgttttacaaaaaatatctttcaaaattatgcagaccagtctgccctgccatcctccttgacatgatgcagaaatgttcctttaatccactgagctttttctgacatttttcttaacattgctgagccttatttagagcaccaaaggaggcgtgtgcagttttctttgacactgatgggtatttcaaaatgttacagagagagggggg

SEQ ID NO: 207474 - DNA, 372 bp, Homo sapiens
ccctcttcagctgtgtagagtgatagccccagttcaacagggtatggtattattaaaacacaattcttcggctgggcgaggtggctcacgcctgtaatctcagcactttaggaggccgaggcaggcggattatgaggtcaggaattcgggaccagcctgggtgacagagcaagactccatctaaaaaacaaaacaaaacaacaaaacacatggttgtgattattttgtacgtaaaagtgtatatcctgttcttttcatttaacattgtatcaaatatgtttccaagtaattatgctgctactaaaatgtttataaggcaagaccgtaaagtacatggctttccttatttcttgtgagtctagacctctagac

SEQ ID NO: 207475 - DNA, 226 bp, Homo sapiens
tgctgggattacaggtgtgagccactgtgcctggcctaaaagacttgttttgaaagagactgagattcccttctggctctgtttctatctggttgtgcaaacttagaacctctctaagctttgtttccttaactatgaaggataatgatttaaataattttaagcatttctaaagccccagttctttatagtataagagaaggtaggtgaaggtcatcttccctct

SEQ ID NO: 207476 - DNA, 356 bp, Homo sapiens
cagagcttgcagtgagccaagatcccaccactgcactccagcctgggcaacagagtgagactccgtctcaaaaaaaaaaagataaaatcaaccagctcaagtgctttacgaggctgatataggggaaaaaagaatagtacgatcatacatgaatagtccacagaactgcccactgctcaactccataagcatgtatttgtattggtatacagatctaaatctcacttctaaccttatcagcagataagatcttttccatcctaacttgataacgtaatattgcaaaactagaaataacatgatcatgaacaataccaacacatgtgggctatctttttaactgatataggtgtgtg

SEQ ID NO: 207477 - DNA, 436 bp, Homo sapiens
tgttttgatccatgcctatttttaccagatattcctaattaagctctggattttatacaaaatttacaagaatttttaaacaagacctcacctcatttaggatttgggatagaggagtgattgtgtctttaaaatcgtgtgtttgtgaccaggcatggtggctgacacctgtaatcccagcactttgggaggcgaaggtgggcagatcacgaggtcaggagttcaagaccagcctggtcaacatagtgaaaccccgtctctattaaaaacacaaaaaattagctgggcgtggtggcaggcacctataatcccagctactcaggaggctgaggcaggagaatcacttgaacccgggaggcggaggttgcagtgagctgagatcgcgccattgcactccagcctggcaacaatgtgagactccgtctcaaaaaaaaaa

SEQ ID NO: 207478 - DNA, 468 bp, Homo sapiens
ctagtttttgctcagtcctctcaatattctaaagtttgtctcaaatctacccttattcatgagatagtgctaccctgaagtaactttccatttctcaatcttctaaaacatctattatgacagatactttggtatttttaaaatattatgtatttagtctaaacatttcaccagtataaatcttatttttctaagtaatggaaattgcatttgattcaagtttctatcttgaaacatatatgcattttgaagtagattatttaatgattacagcatgatgtttcaaagaggcattttgaaaggtgaatggagcagcaaatgtttataacagtggtttttgtttcaattcccttgtaagtatttgacgaaaagtagatccacgttgattgatagaatggagtatatcaatacaattagagaaagttgtgtaaaaagaaaaacgctgaaaaattctcagaacatttttct

SEQ ID NO: 207479 - DNA, 391 bp, Homo sapiens
aaagcaaaacagttaaaacatcaggccacgctcctcaaactgcaggattgcaagcagctcacaaacttccagtccccaccccaaggactccaagctgctgtcccctctctgccgcatctgaggctgggaaaacttcctaggagaaggcaagagaaagccaccagaccagagccgaggactaaactttaaggtcgaagacggcagaggggcaggttctcccctgcacaccccaaggcctctcctgcacccgcgaggccttccttgagcgcccaggcccccgaaatgcctgccctccttctgacaaaaggagggggtaggatgtgaaggggtagtgcaaccaacaatgtttttgtaaacacaacaacagggaaatacatggaggaaatctatt

SEQ ID NO: 207480 - DNA, 439 bp, Homo sapiens
cttagtttccagagctgtgaggaatataaatttctattgtttaagccacctgtcatggtattttgttatagcagttcaagcagactaatacaacaatgttctccaaagccatccacagattcagtgcaattcctatccaatcccaatggcattttttttgcagaagtaggcaaactggtcctaaaatttgtatggaatttcaagagaccccaaataaccaaaataaccgaaaaagaagaacaaagttggaggtctcatacttcctgatttcaaaacttactacaaagctacagtaatcaaaatactatgaagccaggcagatggctcatgcctgtaatcccaacacattgggaagccaaggcaggtagatcacttgaggtcaggaattcgaggccagcctggccaacatggtgaaaccctgtctgtactaaaactacag

SEQ ID NO: 207481 - DNA, 370 bp, Homo sapiens
atctatacattggtaagtggcattagtattattatatcaccatatagctgtatcacaaatttaattgctaaattgttaaaaagaaggaggagttttaactgggcatagtggctcatgcctgtaatctgagcactttgggaagcgaggcaagtggatcacttgaggtcaggagttcgagaccagcctagccaacatggcgaaaccctgtctctactaaaaatacaaaaattagtcaggtgtggtggcgagcacctgtgatcccagctactcaggaggctgaggcacgagaatcacttgaacccaggagacagaggttgcggtgagtgagactgcgccactgcactccagcctgggcgatggagcgagattt

SEQ ID NO: 207482 - DNA, 444 bp, Homo sapiens
ccagtgagatgcaggtgaatggggttctagaggctttccttccacagcaggggacaaagcctcagaaagaaaagaatgttgctatttccctctgctttctcctaattcctgccttgtgagtggtcctgatgctgacagatgcagtaggtatcttgcagccacgaggaagaaaacagcatgactaaggacaggaggagctgaaagggggatgacacgtgatttctgatgaaagccttgagccatgacattttttaaatgaaactagatacctcttactgaaatgcagagatttccagttaaatttccagcaaaagaatgaaaaatggaaattaactataaatcacttatttatgtaaaataatacgaacataatttctatttggggttctgtttttgttattgtattttagtaaaccttaaaatataagagatttaaagcttact

SEQ ID NO: 207483 - DNA, 352 bp, Homo sapiens
  misc_feature (56)..(56): n is a, c, g, or t
  misc_feature (122)..(122): n is a, c, g, or t
gattttttcttttctttgggatgaactcttcattctcatggtaaactccggtatanacaaggaccaatttcacacatctgtgacactttttacttgctttcttattgacaggcagaatccanagttctttttatatattttcatttgggcaacaatgggatacattttcattcacttttagttcagtagtttctctcaaacaggcagtgtagcctccatcgcttagatgatctcttttgacaatcagctaaagatacagcatgttagtgatacactttcagggaaagatcatttaataaatattgatacctatattgttagcctgaatctccctcctcccttcacctcccta

SEQ ID NO: 207484 - DNA, 572 bp, Homo sapiens
gacattttaatttcactttaatttttttcatgtgatctattaccaagtatttttccactgagtaaaattattttataatctgaggccggtaagagattcactgatgctcatattttatccatttttgttctcttgtttaaagtaaaaaggatttggaaggtaaatatttaggtgactgtgtattggaatcacagtggtgcaacaaaagctaaatactcttctggtagaaataaaaaataaaacttgatggggcattgacttatgctgaacttcggtggatcttaatatggttctgtgtcttattttaaaatttcaacttttattttagattcagggggtacatgtgcaggtctgtcacatgggaacactgtgttatgctgaggtttggggtacagatgagcctatcacacaagcagtgagcacagtacccaataggcagtctttcagtcttcattcctcttccctcccccaccccactccagcagtcaccagtgtccattgctcccatctttatgtccatgtgtactcaacgagtgagaacatatggtatttggttttctgttcctatgcta

SEQ ID NO: 207485 - DNA, 584 bp, Homo sapiens
tagtgggtgctcagtagatatttgttgattgactaggtctgtttccaccagtctagtgaacgattacttcaaaagtcaccaacaaactccataatacccaatccgggggccttttcctacccttagcctgtattacttatctctaatatttgatcatttcttttcaataaattaatctctttctctgtctgtttccctccctctctttttcttggacttctttttctacatgtttgagaacttagtttctccttattttttcatcctcaaatggtgaccttccacaatattctgtcctctgctcttttcttttttgtgtatatttttgctgtactgttccattcagtatcatacattcacatatccccttttagtaggggtcaagtctcttgagtttgtcttctagttccagctcgtgattagctacccccataggatggtcctgttgcatgttgaaatcaaacccagttttgtggttttgtctctttcctcaaaccagtttgttgtccatttcctgtttaaattttactaccaattttaaagatggtgaagctggagttttctttcccttttccctgccccac

SEQ ID NO: 207486 - DNA, 417 bp, Homo sapiens
gacatagattaagggaagaactgttaaacaaaaaggaactaggacttgataatttaggaaattctcagtctattcagctttcaaaaactgctaaagttagaagatttgattacaagagagtatgctctggagagaatgccaaaggtttggctgagcagtcttttgcttgtgccttggaacgattttagataaggtcagtattttaatcacacagaaaagtgtttgaaaagattaagtatatggctcatggatcccctcacagatctcaataggagccaggaataaaaatgggattatcctgcatatatttgtggaagagcctcttgtttgatggatttactccctgtaacatgtgtgggagacccacaaagtttttgagaatgttgtatcagcagaaacactgccaggggtaccgaa

SEQ ID NO: 207487 - DNA, 373 bp, Homo sapiens
taaagttgatgtcgaccttgcccgctcaggcaaaggtgcatgtgtgcacatacgtttgcgcccagcattttagaatttgagactgtctccattcccttgtctctggtggataccacagatacacctagaccttgggcctgtaggtgttccttccagccctatggtgtgtggttgggtctttccttcctgggagaagcactctgaaaccccacgctctttcatcctggtgtcaaatctcctgttcataggaaccatggaagcatgtggaaactctgtgggaggagccatttatgctaatgtggatggccatggcatttggcttatgctttcaagcttgtccaacccatggcctgtgtgcacttgcagcccaaga

SEQ ID NO: 207488 - DNA, 712 bp, Homo sapiens
agaacttttacccaggggaaggtgagtctttaagagacttggtagatgctgcaatcaagcagctttaaagagctaaaccagatagagtgaatgtgtcatagtgttacccacacccaaaatctttctaaagaaaaacttccttagccaggcaaacaagcctgctaagaaagcattcttatgaccaactacccctcctccaaatccaaagttgatcagaccaagggaaagtaaagctcagactcaaaggcatatgtctacacgctgatcaacagcctatgacttgtaacatgaaagccctccccaaacaaggatgacgtgagaaaattagattaaatttgcaattgggaaaaacagaagaacagaaactcagctgaagtgaatggatacatggtaaaagaacataccacagctacgtaagaagcatgaaagatttaaataagatcaacttgtgaggaataggcacaggagtcagaagctataaataagcaaaaactggccaggcatggtggctcatgcctgtaatcttagcactttgggaggttaaggcaggaagatcacttgaggccaggagttcaataataacctgggcaacacagcgtgaccctgtctctattagttaaaaaataaataaataactgggcatggtagcacacgcctgtattcccagctacttgggaggctgaggtgagagaatcacttgagccgggaggcg

SEQ ID NO: 207489 - DNA, 376 bp, Homo sapiens
tggggcaccccatcccacgttctgattctggatggacttttaagtgaactctgatgatgagtaggctcttaaaactctttctcaacgttctctgctgggtttgtgtgtcacctcccatgccctctctggtgtgtggtgattctcagatctagagcaatgcttcctgccttgtccccccatgcctttgcgtgtgggaagctaaaattcacatgtgcgatgccctcccatgtgccatttttacctggtcccttctgctcactctttattcatatttaaatgcaggtgagttggaatgtcatcttacaggcataatcctgaatctgctctatcgcagacattttaaaactaaattaaatgttagtactaagtagtaaaa

SEQ ID NO: 207490 - DNA, 491 bp, Homo sapiens
tctgcatatatacctggctggtatggttagcaggtagggacctcctctttcggctttgtatcccccctccctctgcctctgtatagggggagcttcttccttctgtcttctcccttccttcttgcctattaaactctcagctccttaaaaccaaaaacaacaacaacaaaaaaacaggaactcatacttttcaattacaaatagtgcatgcaatccacctacttggatgactacaagaagtttagaatctttccgtggcccatcgtagctaactgcatagacttgacctccagcaaccatgcctcaggaccaagataaagcatatgctgctatctctaaaatgacaaagttggctgggtgcggtggctcagacctctaaccccagcactttgggaggctcaggcgggtgatctgttttagcccaggagtttgagaccagcctagtttgagatcggcctgtgatacatggcagaaaccccgtctctacaaaa

SEQ ID NO: 207491 - DNA, 361 bp, Homo sapiens
tctagaggatcccttctatggcaaggccaaggtagattaaggtaaaggtcaaaaagatcatggatgatgaagggccctggaggattttattcaggaaggggacatgaaacgtggagaaaatcatggggcagcagtggggacaagggaggagggaggctactgaggggctaccacagcactctgggcaccacaggctcagcacggacaggacctgggatggatcagatgaggcgagagtcaagggagaggatgactcaggtcacagggaggaaagaggagccctctgtagagagaggccatgaagaggagaaaatgccatggagacactaagttcagcttggccttgccatatgcaaacgcc

SEQ ID NO: 207492 - DNA, 318 bp, Homo sapiens
tcctgggaactccctcagcaaatcaggagtcaagttgggttagcaaggccaaggtagattaaggtaaaggtcaaaaagatcatggatgatgaagggccctggaggattttattcaggaaggggacatgaaacgtggagaaaatcatggggcagcagtggggacaagggaggagggaggctactgaggggctaccacagcactctgggcaccacaggctcagcacggacaggacctgggatggatcagatgaggcgagagtcaagggagaggatgactcaggtcacagggaggaaagaggagccctctgtagagagagg

SEQ ID NO: 207493 - DNA, 481 bp, Homo sapiens
gctcggtaccccacaccacctgagtccatcatttttatatgtcatattcccagtgagactgtgagacattggcatttcacaacttagaagagctttcaaagcatcatccataaacttagagatttagtgagtaactgtatatgatctttctcttctcttttgtttaagggagaaaggaggaaggaacaccatgacgtagtgatatatttaaattctgttttagaaaccaggaaaatagttttcctaccagaaatatgattacattaaatatatgcggtataaagatcacagcaaggagaccatgaatctgtccatctacccctccccgaaataaaattactctacactattcagataaaaagtgacttggttggctgtttctgaaactttctgtttattggcttttggcaagataaatagtaacaaacaccagtgtcttaaaatctaaaaattggtaatccatgtacctactgtttatttc

SEQ ID NO: 207494 - DNA, 304 bp, Homo sapiens
agaagtaggtgaaattcacttgcagagcttcttaaactgcatttcccaagttattccccacctcaaaacccttcaataggttctccccactgcccttaggtataaagatcacagcaaggagaccatgaatctgtccatctacccctccccgaaataaaattactctacactattcagataaaaagtgacttggttggctgtttctgaaactttctgtttattggcttttggcaagataaatagtaacaaacaccagtgtcttaaaatctaaaaattggtaatccatgtacctactgtttatttc

SEQ ID NO: 207495 - DNA, 1178 bp, Homo sapiens
ggccgaggtaggcggatcacaaggtcaggagattgagaccatcctggctaacacggtgaaaccccgcctctactaaaaatacaaaaaattagccggtggtggtggcaggtgcctgtagtcccagctactcaggaggctgaggcaggagaatggcgtgaacccgggaggcggaggttgcagggagccgagatcgcgccactgcactccagcctgggcggcagagtaagactccatctcaaaaaaaaacaaaaaacaaaaacaaaaaaagtcagtatccactctgtaatgttttagacctgtgctgtccagtctggtagccgctagctacatatgggtatcagaacatgagaagaatattttctaagagtagattattttctaaaaacctggataccagtatttagccagccctgtttgggtgtagcatgaaatggtatccctgtttgcaggactgtgcttcctcactttttgcatgtcatggcattcctaaaaagcagcgatgtttgtatggcacactgggatacacagccgaggatgcttacaactagggcttaccgatctgagtgctctgcagcaccaggcaagaccataccccattcttggcatgccggtatgcagtggcacatacggtacaaagctgcttcagcgtgctccctataactcattcctggatgtttttcttggtctatgagcggaatttgaattcattctcccttcttatttcatcatttttatatgtcatattcccagtgagactgtgagacattggcatttcacaacttagaagagctttcaaagcatcatccataaacttagagatttagtgagtaactgtatatgatctttctcttctcttttgtttaagggagaaaggaggaaggaacaccatgacgtagtgatatatttaaattctgttttagaaaccaggaaaatagttttcctaccagaaatatgattacattaaatatatgcggtataaagatcacagcaaggagaccatgaatctgtccatctacccctccccgaaataaaattactctacactattcagataaaaagtgacttggttggctgtttctgaaactttctgtttattggcttttggcaagataaatagtaacaaacaccagtgtcttaaaatctaaaaattggtaatccatgtacctactgtttatttc

SEQ ID NO: 207496 - DNA, 349 bp, Homo sapiens
aggggatattactatagacccttctaagaagaaagggaagcaccataaacaactctacacacatgcattcaacaacttagatgtaggggccaaatctcagaaaagcacaggtgaccacaaccccccaataccaaacaggttctttaaagaacttcataactgttaaagaaattgaatccgtagtttgcaaactcccctcaaaagaggtctctagcccagaggtgtcactcggtaatttaccatatgtttaaagaagaattaatgctagttctacattctcttccagaaaatacaagaagatagaccattccccagtgaggccagtattaccctgacacccaaaccagac

SEQ ID NO: 207497 - DNA, 247 bp, Homo sapiens
tagtctgtgtctgtgtatgatttcaaccaaagtaacaaggccaacaaagtaacaaggccaaataaatttacaccaaagacttcctactccagtgttaacattgttgtggatacagtttgtaaaatataaaaaataaaaactggatgcggtggctcgaacctgtaatcccaatgctttggaaggctaagctgggaggattgcttcaggccagaagtttgagaccagcgtgggcatcatagcaagaccc

SEQ ID NO: 207498 - DNA, 465 bp, Homo sapiens
ggggctctaaaaaacaggtgttaccacctggtattccaaccagaagtgacaaaaattcttggggtcatttagagatgattcgcaatggtgtttcagtgtggcccagagacccatagctggagcagtggtgtcttaaatagactgttcctaagacatgctgtaagcagtgttctctgctgcccctacactccttttttgggggaatggttttccaagcttcccgtaaatcctatgagctttccaattatctgctccctccaaaatatcttttcttataagttagcaatttatctgacttgcacccgagatcccaattgtgatgcatattggtacccactctttatctgatcagctgtggccagcttggttaaccatgtgatcaactttcctcagaaatagctgtatgagtgaggcaggaaaccagaggatattagagaacattaatccgaaactacaaaaagatta

SEQ ID NO: 207499 - DNA, 672 bp, Homo sapiens
ttatgatggcaaggccaagagcatgacctcatgtctaagctcagaaaaaacagttctgcaaggaacctgagagtgtagtttcctgattattcaccaagctccattcagttctagagccaggatatctataaagcaaagttggaaaactggtttcatctcatgagctactctgatgagtaggtctggagtcttgtggggttttgtttttgtttttattttttgtttttgtttttagagacaaggtcttgctttgttgcccaggctgaagtgcagtggcacggtcagagctcactgaaaccacaagcccctgggctcaagcgatcttcccacctaaggcttccgagtagctaggactacaggcgcgttccatcacatctggctaattttagtttttatagagatgggggctcactatgttgcccaggcaggtctcaaactcatggcctcaagtgatcctccagccttggccagggactgtcattgccttagtttattttttctgttttgtttttttttgtcgtttttgtttttttttgagacagcgtcttagtctgtcgccaaggctggagtgcagtggcgcaatcaaagcttgctgcagccttgaaatcctgggctcaagcaatcctcttaactcagcaactaggaccacaggcacatgccaccacgcttggc

SEQ ID NO: 207500 - DNA, 502 bp, Homo sapiens
aggcttttatcctcacattggttccattttgaattctagccttatttgtcagtatcagtctgtagttcagatcttccatgattatttctccacaggatgactggtctcatccatttaatattgattcttcttagcgttctactcatttgacattttctgaccttgccttaaaattctggatatatcctgttttacttccttaggccattctaaagtcctacagtatccagatgagaaacgagagaaagcataagctttggagtccaaagatcaggattttagcgtcagcactccacaccttagctatacaatctcaaagcaggtaagcttaaatccctgtttgttgttttgttttttaatctataaaatgaaggttataataatgctagcccaacctgccaaactatcattgtgaggatcaaacattatactttcaccctttgaaaaatataaaattaccctctcagtcagaattcagacaaggcatagcaaagatggctta

SEQ ID NO: 207501 - DNA, 237 bp, Homo sapiens
tagaggacccccgtatgtctgcaaaaacgttacctggctatgaaggaagggctatcacattatacagatcgggtgcttaaacaacaaacatttatttctcacagttctggaggctgggaatttcaagatcaaggggccagaagattcagtttctagtcacggtcctcttcctggtttatagagagtcaccttcaggctttatcttcacatgacagaaagagatcatctttcttatgt

SEQ ID NO: 207502 - DNA, 732 bp, Homo sapiens
acaccttcattgtgggtgggcaccatccagtcagctgccagtactgctggaacaaagcaggcggaagaagggggataaaagcagcttgtttactgagtctgcttgttctttcttcacatgctatgcccgatgcttggcttcctttccttctgccctgggacatcagactccaggttctttggcctttagactctagaacttgcaccagcagcttcccaggggctcttggccctttggcctcaggctgagggctgcattgtcagcttccctggttttgaggctttcagacttagactgagccatgctactggcttctctctttccccaccttgcagatggcctattgtggggcttcaccttgtaactgtgtgagccaattttccctaacgtgctcccccgtgtatgtggggagcatatatacacacatgagggagcacatgtgtgtgtgtatacgcatacacacatatacacaggggagtacctgtgtatatgtgtgtgtatctcctgttgtttctgtccctctggagaaccttgactaatacaactattaaagtaataagtgagagatgatggtgacttggcttgggttagaatggtaccagaggaagtgatgagaaatggtaggattcttgctaagtttctaatgtcaggccaacagggtttcttaatgaagtgtgtaggagaaagaggaatcagataacttcaaagtttttggcttgagcaactggatta

SEQ ID NO: 207503 - DNA, 375 bp, Homo sapiens
atattcatgctccagatttcttatgattaagagaagagtaggaaggaaagaaagaaggaaaaatattgtggcaatccctgaaatatcaaaggttttcttgggttcccctgtagtggaaaacttagtcacaatttgctagttagcagtacacatttttaaccctataaaaggtttgaagtctccagcatctttgagcaaaacttttagactgagaaaaatggatccatagctttctcagtggaaatccattagtaaatagagcctaagataattagggacagttggattggtacatccttacctgtgttcccaaaaagcctagctatatcaagcacatggcctattagttcatgagtgttctcctcattatttaaa

SEQ ID NO: 207504 - DNA, 722 bp, Homo sapiens
ggtagctcgatcaaccttgtggtgatgacttaaagatccaaatgaactatttcttatgaatgaaagtccaagagcaattaacatgggaaagttactttaagcactttacaatgtggatgaggtttttattctgttgctgaagtactgcaaaaattagaagtatgtatatatatcttcagagataatcaaggaaacaacagatatttaagataaaacatagaataggcattatttgtgagtgtactgagttttgtaactgtggtttaggcagcagtcattttcaataggtccttgggaaattctctaggctgtaggcaacaactttctcctttctggctatgccctaattgtttcattcaggattgctgggaactcctagctccagggaatttgtagtgttgatcgagcatcacttagtagacagaaatcttatcttccccttaaagtagttgtcatgccatacagactttttaatattaacaaaaataaagaaaaacatccttgaaaatatattatcagaggaattgtagagtactgaacaggtaagtcacccggcagccagaaatcagtacacttgttacaaggcgtgacgtgtcctagatttccatgcacagcggtgtgcatctctagaggatacccgctagcacacaggattatcaacggcactacactgtactatatgcatcacccttgcctcactacatgcatcatacggtaccgac

SEQ ID NO: 207505 - DNA, 350 bp, Homo sapiens
cttcctgtagatatctgcatcctaccgtggtttttctagacctaaaggacaaaaattgtattcctgtgttggattaaataggcataataaaaaaagaatgaatgggcgtacaagttattcagggagagttaaaaacatgtttgactgtctatcaaacaagaaagaattgaagatgtttaatgtcataatgagagaattcttgaaaggtacaagcctgatggggcatttgaggtcaggatctttgaggacaatatttcccctgattcattctgggaggctaacatgggaggatcacttgagcctaggagtttgaaaccaacctaggtaacatggcgaaaccctgtctctac

SEQ ID NO: 207506 - DNA, 359 bp, Homo sapiens
gaaatattgcttaagaataattgacctaatttaaaatgatacagatcaagtaacctaaaggccattaggagtttccattttttcatgaaatttggctctaacccttcgccccctggtgataaatacatttggtttattttgtgctcacaggcactttaatgttttgttatgtgtgtgatgcccagatcctttaccctgatgtgacccgcaccagagttcaaggaatactttgcatttatgatactcagaggatcctttaaaaacctaagtgtgttacagtttgaagagcttagaatcacttgatgaagagttgaggaaaaactatacaaaactgatttttgtgagctgaatagttgatt

SEQ ID NO: 207507 - DNA, 607 bp, Homo sapiens
ttgagtctagaacctgttcgacatataaacaagttatttttttgcagttttaatatacactaatattacaaaaatgtgactactgtataaattgatggaagaccactgctactcatggtatctgagtccccagatcggtctcagccttgggactgttggatttgtggtgcctttacataggtatacaaacgtattaatactccattgttttctagtgtagtcagccttaggcattatacataactgaacatatatcttttctatattatgcaccttctatttctcctatgcatcacagagtgctatactgtctgctacttttttaaattataaaagtaggtaggttatatttatattcattttaatagagggaatgttacacaaatatttgtaataaaatgaagatgctgcatctgatttgttgcaaagatcgggcctacatgtttaactgtctgaagacagaagacagtatccgatgatctctttgggacagtctggtcctagatgatggaagggaacatttggaacaacttcacttgagaactgctttactctatgcatatataaatatctaacctctgcatattataaggctcttccctttatc

SEQ ID NO: 207508 - DNA, 144 bp, Homo sapiens
gagcttactgaaagagtggatatgtgtgtgggtgggagagtgagagagagagaaagagatgaagatacatgggaacctatagacagacaaacagatacagatcaatgtaatatacaacaggtaagaatctgtcaaagtgtgact

SEQ ID NO: 207509 - DNA, 181 bp, Homo sapiens
atcatttgaaataggagtagacagatcattttttttcccctggagctagaactcatttaaatatactgaacatttaaaagtattgtgccatctggctagcacccagtcctcctgatttcaggccaataatctttctgctacactactttaatgtgtatgttggggctgtgggggtcaagga

SEQ ID NO: 207510 - DNA, 140 bp, Homo sapiens
taaaaggaaatcgtttctatttaataccaagagtagggcagggagaggaaggggtgaaagggaactttctggtttttcttattgcccacaggtgattaaatcatttattaatatttaggaaggaaattccaagatgaaaa

SEQ ID NO: 207511 - DNA, 342 bp, Homo sapiens
agttacttctaagagagtgagatcatgggaaactttcaacattaaatagtctaccatgttagaatactatatttaattctgttacattctgatattcataaaaagaagtaacattttcatatgcatctgtatctatataaacaagtttagctgtttccagaggggagcaaaaccagttaatataattagtgtggtaacaattggatagaagacaatgcctgctcagtgagacagtaatctgagagagtgaactacaactaccttttttttttttttttttttttttttttgaaaaaccctcggttaccgaccccaattccgaaaccggggccatagctgttc

SEQ ID NO: 207512 - DNA, 235 bp, Homo sapiens
aaagagccaggcaagcaaagagctgggggaagagcacagagatgagaggttaagggacctaacaaaaggccaggtggtcactggagagttttgagttgggaggggtaggggtggctaacctgatcatgttttgcctttaaaagatcgctctgttgggaagctgaggcgggcagattgcttgagcccaggagttcgagacaaggctaggcaacatggctcaaccctgtctctacca

SEQ ID NO: 207513 - DNA, 497 bp, Homo sapiens
ggttgaaatatgagaaagtgatttcattattatcgtcagttgttattttattctttctattactgaagaaacttcggaaccccttctaaagagaataaggagtccaattgttttgctctacctgtaccttcaaatctatatttttaaataggaaatttcttatatatccactgtttactcatactaagtacttggcaatgtgatacgttctgggactgagttgatatgataagaattgatatgtccccatttccttatgggacactactctctggcaggaggtgttagacaaataattatacaattatatacaacagttgtggtaagctctacaaaaacagattaggtagtacgatattgcttataatacagtgggtaggataggggagaggtcaaggacgccttccttgagtaagtgaatttgagctgagatggattttctagggagagggaaaggccctgaggtgagatgaagtttgcagctgattaaaccaatg

SEQ ID NO: 207514 - DNA, 383 bp, Homo sapiens
cgaggatccctatgctcatccctccttacagtagttagatagtatttctggagtttaagaatgagttaattatcaaatctataatcaaacttttggttccatactaaatctgcggcctcttgcaattaatcccatttatcctccttaaaattagaaaaggctcctgagctgagattctgccactgcactgcagcctgggtgacagagtgagactccatctcaaaaaaaaaaaaaaaaaaaaaaaaccccttggaaaaaaaatttggctttcctttggggccctggtaaaaattaatagggggttttttagggcccttaatggaaataaatttccccaataccatttttttttttttattggggggaatttttgggaaaagggg

SEQ ID NO: 207515 - DNA, 515 bp, Homo sapiens
caacaaacagcctaatgacctctgtatgatccctaataaattgtcaaagtaaggagatgaaagttctctttttttcttgatgctcacagtgtttaaatattgtatttaggataatttacatgccataaaatttgcatatttaaagtgattttataaatttattgggtggtgcaaccatcactacaatctaattttaaaacatttgcatcacgtcagtgacatcttccttgcccatctgcagtcagtcttcattactactcccagcatcagacaaccactaatctactttctgtgcctatggatttgcctatcctgaaaatttcatctaaataatgtctccaaagtttattaatgttgtggcatatataaatacttcattcctttttatagctgagtaatattccattgcatcagtatactacattttgtctatctagtcatcagttgatgaacacttggattgtttctatcttttggctattatgaataaagctgctatgaacgtttgtgtgcaa

SEQ ID NO: 207516 - DNA, 407 bp, Homo sapiens
cagcacttcgggaggccaaggcgggcagatcacttgaggtcaggagttcaacatcagcctggccaacatggtgaaaccccgtctctgctaaaaatacaaaaaaattagcatggtggcatgtgtctgtaattccagttattcgggaggctgaggcaggagaatcccttgaacctggaggtggaggttgcagggagccaagatcacaccactgcactccagcctgtatgacagagcgagactccatctcaaaacaaacaaaaaaaaccacacacacacacacacacacacacacacacacacacacacacacacacactagtgagagatcctatatggttcccataaaatccatccaaatgacttaaaagaggaagtagaaatggaataaacttatcagtcttgaagaa

SEQ ID NO: 207517 - DNA, 337 bp, Homo sapiens
ggcttaggcaatcctctcaccatagctgggaatacaggtgtgtaccaccatccccagctaaatttttttatttttagcagagatgaggtcttgctgtgtttccaggctggttttgaactcctgtgctcaactgatcctcctgccttggcctcccaaagtgctggttttttttaagagacagagtctcactctgtcacctaggctggagtgtagtggcacaatcatagcacactgactttgaacccctgggctcaagtgtttcttctgcctcaatttccctagtatttgggactacaggcatgtgccactgtgcctggctattttttgtgtgtgtgta

SEQ ID NO: 207518 - DNA, 429 bp, Homo sapiens
aaaataatttgtaatattaagatgtcattgacttttttttgcgtgtgaccatctgcactgatggtgcaaaagcaatgggaggtaaagccactagcacttggcacagccccatctgtagcaacaggctggaccagtggtcactggattcttcactgccatacattttaaataattaatcgttttaaaataaataaggtccttgaaagagcagcagaagttactaattttatgaagcctcaatctttaaatgcccatctttttaatattctgtgatttgaaatgggaagtaagcatcgcctggctgcatactagagtgtgcaggctttctcatggaaaggacttgtgtgattgagttgccagctgaactagcagcttcttttggagcaccacgtttacttgaaaaacaactgataggcaaaactgtggtca

SEQ ID NO: 207519 - DNA, 204 bp, Homo sapiens
gtctctaaaaacaaataataagtaaataaaaaataaaataaaaataaaactgtgtcttataccaacttccacctgagatcatgatagaaatctatttattcatgataaatagctactggctaagcctttggccctaaacctcagtatagtgcctgaggagctagaccaaaccaaatgtaggactctgttctgattcccttaagt

SEQ ID NO: 207520 - DNA, 594 bp, Homo sapiens
ttttctcttctttttatttatttatttatttatttttgagatggaggcctgctctgtcgcccaggctggagtgcagtggcatgatctcagctcactgcaacctcctcctcccgggttcaagctattctcctgcctcagcctctggagtagctgggtttacaggcacacagtaacacgcccagctaatttttgtatttttagtagatatgggatctcaccatgttggccaggttggtctcgaactcctgacttcaagtgatctgcccgccttggcctcacaaagtgctgggattataggcgtaagccaccgcacccagccttgacaggcttttccaatacaccatgtcatatttcatttttgccaattatgttacatgctttagctttattttatttttttctttttcttatggaaaatggaaacagaactgcttttacttttaaacttatattggcttgttttaactcctcttatgttttatcataaaacactcaaaatatatatgcttttaattccaatccgctcattgtcttaaattgtattttcaaggaaagaatggaatgcacacaactgctttgattgtcatttctatt

SEQ ID NO: 207521 - DNA, 604 bp, Homo sapiens
caagttgtaaacgtaaaacaagttcttgaaaggaaattaaaagtgctacttccagtgaacacacgaatcagaatgaaatagccttatttcatttagtggtctggatagaagtttggagaaagttttagtggtctgaagaacaaaccagtaacaacattcccttagccaaaccctaatccagagcaaggccctaattcccttcaattctatgaaggctgagggaagtgacaaagccgtagaagaaaagtttaaagctaaaagaccggttcatgagatttaaggagagaagacatctccatatcataaaattgcaaggtaaagcagcgacatgatttggctctgtccccacctcaaatctcatcttgaattgtagttcccacaatccccatgtgttgtgggaaggacccaatgggaggtaactgaatcatgggcgcagttacccccatgctgctgttcttgtgatagtgagtgaattctcatgagatctgatggttttataatgggcttttctcccttttgctgggcacttctttctgccatcatgtgaagaaggatgtgtttacatccccttccaccatgattataagtttcctgaggccttcct

SEQ ID NO: 207522 - DNA, 777 bp, Homo sapiens
ttaacaaaagattctccttaaaaatgttagataataaactgcattttatgggtctggtttaaaaaggttatttgtggggaaaggaccaacaagctgtattgtggttttctagattgtttcctcaagccttgtaacctcctagctccttacattcctagtgggaaatacttgctgcaaatgccttgggctgcactgtaagcccaagtgtgctgcaccagtgtgatgccctatactaaaacatccagaaatcatcatacatatgaggaagaagaaataaagcctcaaaccctttggaataataggatataaaattgccttttgtaactgaatcttaaaaatggaaggttaccatgacttgtcctattgcaacctggttatcagaataacttattttttttaagatagctattctcaaatactgaacatatttgcatctttaaagacactttattctattcaattataggtaaagtagcctatttctaggtggttaggcttgaaaagatagactgaaaagataggaaattttgtatgcctttttgcaaattgtatttacttctaagaccgatgctgttttagcttaacttttaaaaaagtgttcttcaaataattgtaatattttacacgatcttgaagttcttcaaataaacagagtttagaaactaaaaattatagtgggattttctggttttgaaggcttggaatgtatgattcttactaatagatgttttattcttgtgattgaaaataaaccaaattatgacatggaatataata

SEQ ID NO: 207523 - DNA, 782 bp, Homo sapiens
gtctttctccctgatgtctttttacccagcttgcacccatctcaggtagaagaagagagctgatcctgatggcctggtttcagcatttggaagggattactttttccagggtggaactgtctaaggcatttacacatccagcaattacagtgtcttgctgtgttgtccggctggagtgctgtggtgcgatctcagctcactgcaacctcctcctcctgggttcaaaggattctcatgcttccgttctggagtagctgggatttacaggttaaaaaagaaaagaaatgcaagactggtaattcaaatgcttttgggtggcatttatggacacaactatacatatgtaccggaatttctactaggtgttcattgccattgcttcttactcagctgagaaacgaaagaattactcacccctcacaaaaaaaattgtctcctttattttccttttttctgcggaatttgtcaatagcacttgatttgacatcttcataaactcccttcgacttcatatccatgacccatttattgctaaattctattccttctctcttatcatattgacacaaagggcttaactttttaaattattcttctttctctccttggccacctgaaaagccaaagctattttctccattgttaaagctatttaatattcttccagataaaatatcaatctacacatttaccattcctcatcttgattaatgtaaacttctcctgttggccttacttataaatcactttcactgccaaaaatttcaatttcattgccaaaa

SEQ ID NO: 207524 - DNA, 716 bp, Homo sapiens
agaaatgggaggcgatgaatctcccagccatcgctggcagactatggtgttgggcagcttcggtctggtctcgtctgggtggtacctaccgttttgccccagttaggaggactggggagggaggacaggagaggtgagagtaattgttactgggaagactagtgaggagggcgggaagagggagggaagagctgctatcttgcctgagcagatcaggagggggacgcagtgggcggggggagacatcacccaaagtccagtttagcaagttgttgattcttctggtgtgccagcccgttactcctcctgctgaagctgaaggttggtggagtgatggagcgtggggatggtaaaggaggagtaagtagctttccacagactcccaggtctctggccccttcccagcttcttgggaaattgagagccctccaggcagacagagaacagaactagaaggaggggtggtgcttagtcttaaatagctcaaggaggcaggttggagtgtgaaactgctgttcttggcaacccagaaggctactctgcctgggggaaggctggaaactcacctgcttgtttttatttttccgagaagatctgtgctgtctccttgagcttataaaaacagaggaagcacagggtggcctcctcgcaaagtcaaggctagaagactcccttctcctgttctcttttccactcatgccctcccttatttaaaa

SEQ ID NO: 207525 - DNA, 518 bp, Homo sapiens
gaactgtcttaacatacagaaacggtccagtggtggcaggctggacaggagaactgccttaatgttcagaaacggtccagtggtggcaggctggacaacatatccaccttcctacagtctggtggtggcagactgggcaagaaaaccacaactgcaaccgcctgcgaacatcatgcagtttacgcagcattttcatttagcaccctcctcctaacagccctcacctggcaaccttcatgtaacccaagcttgtccaacccaaggcctgtgggacgcatgcagcccaggatggctttgaatgcggcgcaacacaaatttgtaaactttcttaaagtgttatgagatttttttttttagctcatcaactatcattagtgttagcgtattttatgtatggcccaagacaattcttctttttctaatgtggcccaaggaagccaaaagattggacacccctgatagtaacccaaaactcagggcctcaatcccctgtacagcccgtgttccacaggacaggc

SEQ ID NO: 207526 - DNA, 608 bp, Homo sapiens
ggacatggcagccatatatgtcggtgttcctggctgactttcttagagaccctggaactggtgacccttttctctgagctctttctgagcttcttccatctctggaaatctgtccgaggatctggagcagtgttgttttggatgggaaagtaaacaatgagtgaatactgctattctcgttctgcataggttgtgtgtaaaaatagagttgcttatataaagactccaaaatggaattttatctgtgcatttctgtgtcatcccttccccttttagactataaccatccaaactgtatgacctcgagtgagttactcaacatattcaagcctcaatttctgcaaaatggggataataatagtgcttacttcctaggatggtaatgaggattaaataagataagtaaagtaatatgcgtgaagtgctcagcacagactggaccagtgtgtgcacagctaatgctgacagttcatgctattttgtcattattgctatcatcctgagctcttccacaagacaaaccatattgtatttattttttgttgaaggcattcaatagatatttgttaaattgaactgttttaagtaaaaataaataagaaaaagga

SEQ ID NO: 207527 - DNA, 536 bp, Homo sapiens
ccatcccgggagcccaccaggcgttcagcttcccttgagccccctggctgctcgaacccgggtcgcagaccggggcgtttccgggggcttctgaagcaggcgaggggcagggcgggcgaaggccattcggctgtccttctggctccagaatctcctaacgcgcaggtgtccaacgtgaccagcgcgattcaccgctctaatcgctccggttttccaaggccttgctcagtcatcctgccggacaagccctgaggctggaaggcacaggggaaatttgttgaaggcgcccttcccatagcgcacagtaaaagcagtagttcttgtctctgtggcgcaatcggttagcgcgttcggctgttaactgaaaggtctcacaaaacttcttatgaagagctccaaattaataaaggatgcctttcataatgagctgatgggagatgaaaatatcaaaaactatgcctataaactggagatgtcgcttactggaaacaacatcaaataaaatactccctccaagtccactggagggcaccacg

SEQ ID NO: 207528 - DNA, 284 bp, Homo sapiens
cagtgatggagatgaagatgtaagtttgggagttctatataattttcaaaatcaagggactgtttcaattcacatagagaaaataccttgaaagtggaaagaagggaggctcagaaagagagtcctgtgattgccagtagtcagaagccaatgagaagagaaaaggcaaacaaaaagatggagaaggaacagtcaatgaagaagtaaaataaaaacagaagtgtgctaagtcttgaataagagaaaaaaagtgaagatgcggaggttaattagtgtaaatttta

SEQ ID NO: 207529 - DNA, 459 bp, Homo sapiens
agtaccttatataatacaggttagttttatattatatgttgacaatttccccccgttccttgctttgcaaatctactcgaaattatataacttccctccctaacccctgctgaatatatgtgaattataaaaagtagaagctagccaacaacaacaacaaaaggccataaaaaagtatcaatgattccacccactcacagctactgttattgacactttggtgtaaactcctacatatatcacattttttcccacaaaaatatttttttcactctgcttttttcatttaacacattcctctgtcactacatacatatctgaatggctgcattttgttgtatgtgttcactctatttacactgttctccaacatgtatcacttaggctgtttccaattttgtttctattaaaacagaattggtataaacaaccttatagctaaatttccattcctttatt

SEQ ID NO: 207530 - DNA, 304 bp, Homo sapiens
tcaataactatcctcctaccattaatttttatccaattgctatacaccttatggtaaaacaaaaatggccttgcccattagtgacacctcagacaagtaagtataaagatcaaaattctagaagcccataacaaactcaatacttaagcaaggctgggtgtggtagctcatgtctgtaaatcccagtgctttgagaggccaacgcaggggtggaggggtaagggagggtagagatttgctggagcctaggagtttgagaccatcctgggcaatacagaaaaacctagctctaccaaaaaaaaaa

SEQ ID NO: 207531 - DNA, 306 bp, Homo sapiens
ccgagattgcgccaccgaactccagcctgggcgacagagactccgtctcaaaaaaacaacaaaaaaaattcattgtttgcatacataccgtgaatatcgacatgaagattaccttgaatttctgaaagtacatcataggagtatatcttgaaaaatgactcatagcaaaatgagaattacaaagtgttaacattaatgataattagtttaggtagtattattttgagttctgaattagtttatagatttatataataccagacatcttagtatagaggtgaattgagtaaatttttcagatgtttc

SEQ ID NO: 207532 - DNA, 445 bp, Homo sapiens
gacttttttctgaagttgtttattgccttgcagagcaagaggaacttaactctcacttaaagcaggcctatataatttaatatgataatcttcctcaattagactcaacatgcttacccgagtactgtgcatccaggaaattttagcttggacataattttctcagagaagccttctgtttctctgcactaaaacagccatgctaccaacacactctctgatcatattttaagtcctcctagcaccctaattttctttatatgactgagcacattttaaattcttactcaattcttgtcttttccaccaagtttaaaactatgtcaaagtaaactatcatctgtgctttcctagtgttgtttcctcaggaccatgcatagtgctttgcacatggctggccttagataaatgtttgctgaatgaataaaattgatgcattaactgt

SEQ ID NO: 207533 - DNA, 453 bp, Homo sapiens
aatattgtgcttgtcaattttgcttgactattgaagtgactttttaattgtttgtatttttccatagaagtaaacaatatatagtgcccttgaaaaaaatgcaaatgaatactttcttatatcaatttaaaccggaactccatacagctgaggcagatagaagcaccattttgcctttggaacagctcttttagtaaaaggattatttaacgatagtttgaaaattttattctagaaattagagtttcataattgaatctcaaaatagatccaagtctgttttaaataaaaacaaattaaaagccaagccacaaaaaaataattcagagatttggaaccaactcaagaaatgtctactaagaacacctggctacagtaggggaaggggaagaaattggacaagtgactctaacatcatttcaaaataaaaaatttaaaaatacacggaactgt

SEQ ID NO: 207534 - DNA, 1055 bp, Homo sapiens
cgggctgggctgcggcccgcgcgcggccggcgatgcaggggggcaactccggggtccgcaagcgcgaagaggagggcgacggggctggggctgtggctgcgccgccggccatcgactttcccgccgagggcccggaccccgaatatgacgaatctgatgtaccagcagaaatccaggtgtcaaaagaaccccatacaacagccaaccttcccttttgcagttgcaaagcaactcttgctggtttcttgagctggagcacttgagccacgtgcatgaaccaaacccacttcgttcaagaaaggtgtttaagcgtactttgccgagacgttaatcaaacatggggctgctgtcttctttcacttgtagtgacgagtatagcatcattgcaagataatccacaacagagctattactcacttaatgaggtctgctaacagagaagagtccgtcagggatccttgtgaggatatatctcgtatccagaaaatcaggatcaaggggaagtaggcttggaagacaaaaattcgaaggtaatttaacatggaatttggaagcaaatggcgcaccttaggcaaaaggtgagatagggagaagtatacaaggcaggagttcatcaagatgggcagtataatgcaaatagaaagatcagattaaggggtgaactaaaagagtttggatgaaagggtctagggaagtgaaggtgatgaaaggtctcagagccgaagatgaagagaaataacgagatgggtgacatgttctgtaatagccaggagaaagctgcctgagatgaacatctcgggagcgggctaccggccacggacaggggaaacagcaaggtgtgaaacaatgataaaactacggcaccaatgatgcagagaaacaggagacaaaggcgggccctcgaggcaacgcacaggcggggagcgcagtgcagagaggaacgccccgcgccaaagagaggaagcgaagaacgcccagagcaaaggagccgagaggcggaagacagcagcgaggggcgcgcacgggcggacggccgccaccacgaacaagtacgg

SEQ ID NO: 207535 - DNA, 684 bp, Homo sapiens
tgtgtcatttcttccagttactgtggatgaagagcacaagaatggtgtgttagtttcttagggctgccataacaagttaccccaaacttggtgccttaatacaacggacctttattatctcatacttctcaaggccacaagtacaaaatcaagctgtaggtagtagagaactctgctctgcaggctgtaggggagaagcactccttgcctttgacagtttatggtggctgcaagcccattctttagtttcttgttgcgtaactctcatttctgcctcggtcttcacctggccttctcctttcatctctgtctccctcctttgggtgtctcttctaaggacacttgtcactggatttagggtccacccagataatctaggatgatctcatcttgagactcttagcttaattatgtttgcaaagacccttttgtcacgtaaggtcatgttcacaagttcctgggttagatgtggatatatatatattttttaaggccacaattcaattcacaaaaaaaaaaaaagaaaagagtagaggaataacgaggcaaatatcacttgttatttactttaatgacatgtcatatttggacaaacacaaagctaagcctggaattccaatatcttgggaaatgaaagataaaagcagtcagaaaaaagtagaactatgaagacagttttataaa

SEQ ID NO: 207536 - DNA, 546 bp, Homo sapiens
cagtggtcccataagattataatacattatttttactgtacctcttctgtgtttagatacacaaataccactgtgttactgttgtctacaggcacagtaacacgctgtacagatttgtagcctaggagcaacaggctataccatatagcctaggtgtgtagtaggctataccatctaggtttgtgcaagtacactctgatgttcaaacacaatgaaatcgcctaacaatgtagttttcagaatgaatccttgtcattaagtgatgaatgactatatatttgtataggcatagaaaaaagtctagaaaactatatatttgtataggcatagaaaaaagtctggaaaagtcagatatcaaaacagagagaaatgagaagagtgagcgatgaggaagggacctttactttttctttaggtttttttagtactgcttgaattattttacagtaagcattaattattgttacataaaaacttcctttttaatattaataataaagtgttcttttacaataaatgtctcatgaaacatcaattacacctcaa

SEQ ID NO: 207537 - DNA, 313 bp, Homo sapiens
tggatgggtctcttgaggtctgtgtactattcacagtgaaaccttgtccggtattgtttggtccagtcttctccagtcctgaccggtcttatccggttcggcccagtctggtccggtcctgaccagtcttatctggttcagcccggtcttgtccagtcctgtctggtctaatctagtccggataggtcttgtcctatctggtttgggccagtcctgaccagtcttatccggtttggcctggtctggtcctgtcttatctgatgctgaccagtcttacccggtttgctgcggtttggtctggtcttgtctggtc

SEQ ID NO: 207538 - DNA, 178 bp, Homo sapiens
tgggcagcaacagcagggctatttcaagacctcactccattgtaaaggtgttatgtgtccacacagatctataaatcaccatgcaacatctttccagaagtatgtgctggtctgcagaattgctagatatgtccaggtgggctgggatcactggaaaggcctggtacatcttgcctga

SEQ ID NO: 207539 - DNA, 333 bp, Homo sapiens
gctctcccccgtctgggtcccccttgggcggggcagggccggccggggagggggcgcggggcctttgttagggagccaggccccagcccccgggacaatagagacaccctcccggactcctctccccggccggccggggctgctggcgggcggggaaggagaggggctgggacgcgtcccactctctgggggtcggtctgtcccggcccggcgccggccccggcggctcggctgtcctccccccagtcggtatgatgcagcagcagtgccgcagggacgggggaagagccgaggcccggcctcctacccttcccagtgcccccggctcattcg

SEQ ID NO: 207540 - DNA, 198 bp, Homo sapiens
tccggctattgccccatttctttgttcctttgtagcagaactcctaaaaatagtctgtgtttcatgacttcagtttgtctcttcctgttttctcttaaacccagtgaaacgagtttcacctccacattccagtggaatggctgttgttgaggttggtggtgacctccctgttgccgaatccagcatttagtcctgtgg

SEQ ID NO: 207541 - DNA, 745 bp, Homo sapiens
aattgtgagtcaattaagcctctttcctttataaattgcagaatcttgggcaggccttcatagcagcatgaaaacaggctaatacaccccaagaccatctttcctctgggtttgagtcaccctagtgaccctggggctccccattttgagccctgaggtaccagctttgagactgtattctgtatatgattgagggctgcaaggaaatcactgttcgacttgtgtttttaaataatgatagaaaaacagcctattacctttaagctgaaggaacttctggagctcttgagcaggggcaggctataaatccataacttactaggagctgcagtataatgttcattttgaaccgttattgccgcctaaggattccatgaactaaccaaggcattacccctgagctgaggggtgaaatggactgctagaggaagttgttggaagtgtctacttgaatactagagaaatccctgcctcaaataagttggtaatggtgacatgattgatacaaagccattcagattagtaaccagtaaaagtgatttattcacttcttaggatggctggaaaaccatgtcagcagcatagatgaagatatccatcttcctccttgctgtgactcaaagtcagcaacatattgaaccagtttttaaaaaataaaagctaaaatgtcagaggaacagaatacaaaggtggcatagagtattgacctagctggccgtgaaagtcaaatttgaatttttttttg

SEQ ID NO: 207542 - DNA, 498 bp, Homo sapiens
agaacataccaattttgcagtagatttattcaagtaaactatgacaagtcagcagtgaaaaattgcagaaacaagcaatgagtggtcaagaaagtgtaagatgaacctcaatgtggaaaagtatagtaatacatttagagaaacacatgccaaactatataaagagtattatcagattattacatagcactgcttgctgccacaccagagaaatgattctgtctcgatgggtcaattcttagatcatttaattatctgtcatcgaaaatgtagcaaacttgacagcagtaatatatactataaacgtgcaatagcaagagcattgagcgctgaactagaaatcacatctgaatttagactgagctcagctgcttactgtgattttgagaaaattgattagcccctctgtgtctcagttttcatatctgtttaatactttattgtcatggtgattatgaagacccaataaactatacataaatttgtttgcttaaagaa

SEQ ID NO: 207543 - DNA, 505 bp, Homo sapiens
cagttacatatgtaactacgtaaacattttggaggatatcgaaaagatctgtcaccctaccctgatacattttttttttgatatattttgtccccactgtttctgtgacttttaaaaaaaaaccgtagttctgttcctagtggttgtacagtgctctgactgacgttcagattgtcggcacatgaaagaaatgtagcacaaaatggagaagtcgttcaaccttgaccctgtcagagttcttatttgaaagccacattgctgctagtgttcttattgtgttttggattctgtttcttgccctttttcttattagccaagtagtaacttaaggaagcagataagaacaatgaattttggactaaaggaagtaagaacaatgaaccagaaatcagataggaatgtggtgataattgtgacatggtcacatagtcatagtgggagctcatgtgagtaaaaatagcttgatacatttgttaagaggcttgtatcctctctctctctctca

SEQ ID NO: 207544 - DNA, 405 bp, Homo sapiens
gggaaagagaaccaagaaaagtgagtttcccagactttgcccagtttacttcacctgcaactcccaaacagatctttgggtgggggtgtggggagctgggataaggcttttctctagagaccctcaagagccaactgggctctctttggttaaattttcaggcagaaactgctgacatcctagcagccaggagaaaaatgtcctgggagagacaggtacttgttccagcagtgaaatgggatgctctgggctcaggtacaaacaagggtgtttagaaacgcggatctccagggctcatgtgcccatttcagagtgcagacacgcagctcacccacagggaagacagagaaagctctgaccccaagagaaaccgacatcatacacacacacacacacacacacacg

SEQ ID NO: 207545 - DNA, 340 bp, Homo sapiens
tgagctgaaagattgtgtgtcatcagggctgacaccaaagatggtgaattattggcaatactgacaaggaaagctaaatttctgtgatttttctcaaggttaatgagtcaccagtcaaccacatccaaacacttcaagctgcatgtctaggtcttctgagaggaataaaaatgaaagagtttatgtttgtattctcgttaaaatttattttatcttaggcataatttcagacttatagaaaagttgcaagaataactagttattttgtagaatatcccagatttggctttctctgatgtttcatcatcattagattccgattatgcccttttagcatcac

SEQ ID NO: 207546 - DNA, 777 bp, Homo sapiens
acttgaatgtgtcagaatttaaaacgtttcccaatcaactgtagtaaaatgatagctcattttaatatatagtttcctgatcactataataagcctttcttattatgttaattggccatttacatttcttcttctgtgagtgttttgatcatattttctgttcattttcatattggatttttttttcttattgatttggaactctggatacgaatcttttctcagttacgtgtattgaaaatatattctcctactgtcttttaacctcttatgataccttttattatatcaaaaattttaacttcaatgtagcaaatgtgttcaattttaatatattgctctttcttttgaaagataatgcatacagcacatagcttaaacttcaagaggtacaaaagagcatatagtaaaaggtctattctctgcctcttcaaatcacccaattccctttagtgtcctcccagaattatgcacataaaagcaaaatacaataaatattttcacttttttaatccaaaaaagagagaaaaaaagaacgaacagaaacaatgtttgtgggcggcatgggcccgggaaaacgttcttagacccttctgttggggcgcggcgccacaatggcatagggacacgtgcccaaagaggtcacaagggaactcgggcaaaaaacaaggagggagattccccgacataaaaacgccgggggcaacagaggtcttagaaaatccaagagagcctcgaagcaaacagggacaaacacaggaccaaggaccgatatat

SEQ ID NO: 207547 - DNA, 405 bp, Homo sapiens
tcctggctgtttaaccagagccctgggtagagtctccctggtgggacagctctcaccaagggcccacatgtccccaacagacacagtccatctgtagggcagtgcaggacacaggccttttttaggccctcatgtagctccagaggtggcatcatcaatccagcacctctgttcctcaaaatacaagcttttttgtgtgtgtttttccatcgaaaaatatatttttttccttgaggcttttaaagcctgcagagcttagctgttctgaatgtaaggagagaatcttgttctagtgaagggctgtaattactgcaatgtaacatacagcatggtggtatgagaatgcgtcggcaagggaggcagacagagagagactgagaggagacaggacctgggcttaaatcc

SEQ ID NO: 207548 - DNA, 496 bp, Homo sapiens
aggcagtctggtgagccagtttgtgtaggtgtctgtttgtggagccctgctcattgatagttacttctggtattatcactgaatttctgctgtgaaagttgtcattatgttaaccttgaggctttaggaatataaacaatgcttcatagataatagagatcacatttaagaaagattcatatatatagctaaactttttaaaaaggaatactgtggccgggcacggtggctcaagcctgtaatcccagcactttgggaggccgaggtgggtggatcacgaggtcaggagattgagaccagcctggccaacatgatgaaaccctgcctctactaaaaataaaaaaattagccaggtgtggtggcatacacctgtaatcctagttacttgggaggctgaggcaggagaattgcttgaacctgggaggcggaggttgcagtgagccgagatccccccattgcactccagcctgggtgacagagcaagactcagtttcca

SEQ ID NO: 207549 - DNA, 572 bp, Homo sapiens
gagttcgagagcagccttgccagcacagcggaaccctgtctctaccaaaaatataaaaaaatagccaggcgtggtggcggacacctgtaatcccagctacttgagaggctgaggcaggagaattgcttgaacctgggaggcagaggttgcagtgagccgagatcgcgccactgcactccagcccagtgacagagcaaggactccgtctcagaaaaaaaaaaagaaaaaattatagattataaaatgcggtattaagggaataaaagaattacatgaaaattatatgtagttgctggaagtccattgtattaatagaaggaatgcacagggacactctcttatatctagtgtttctgctgagacctgaaaaatgggactaagcttgccatacagaccttgaggaagaacattcctggcagagggaagagcaagtttataggccctggagtatgttcaaggaaatggaaggctgtcatcatggttgtagaggaataaataaggaggaagtggtatgctctttaagaagccagcattggcagcagccagttgtggagggccttgtgcatcatcgt

SEQ ID NO: 207550 - DNA, 233 bp, Homo sapiens
gcttttcctgacagcccatcagtgttctcactgaccctgtagtatggcctgcagaagcctgggttctacatgattatcatcactgccatgcctcatgttcaattcaacttagtaaaccccagttgagtgccttctgtttactccttcaacaagtttcctctttatcatcaacttctctggaaaaccttgtctgactcctccaggctgagtaggaaccctcttcccactgaaga

SEQ ID NO: 207551 - DNA, 191 bp, Homo sapiens
ggagctgagggaaaatccaggggaagttagagcaactgcaggcacaagccctgctactgcttcacaccaatgaagtgagtcagcagatcagcaataatgtaggtgtgagctacaaaatggccaccgtttccctaccaccctccaaatttctcaagaatcttccttgtgacccactctaactagaagcatac

SEQ ID NO: 207552 - DNA, 534 bp, Homo sapiens
gaaacacggtggtggccttgaagtggtagaattatgagtgattttcccgactttatgtattttcttaaatggtcgtgtttttgctatttgtttttaaaactcacgctttatttaaaaataaatttgttccacattttgtggaaacttgtacatttcggctttctgtggatattttaaatttttctttcgttttctacgtggaatttgccatataagatgcagtttttccctttacagaaaatcattttaatgtaaaacttactctaggctgatcttactgaatcagttactaatagtccaaagtttgaacctagagttcattgcaccattttcgagttacataattgtgtttgtgtgttaggtttgggctttgtaacctgtattattttaatcatcttttttgccattaactctattattcagtgtcatcgtcgtgaactccatttttagcttgtggcctgagtcctgtgcatacctttaccacgtttttcgggaaaatgcctttggcacaatgtagtgagtttccataagcac

SEQ ID NO: 207553 - DNA, 577 bp, Homo sapiens
aagaatcacctaagatcttgtgactaatatagattctagacccctctactttccaaatatctaggaagtttggatggggtctgggcatctgtatgtttttagagctctccagttgactctgatttacattggtgaaccactgtattaaatctttgactgacactctgaatcttgttgtggacctgttggcttttatgttccgaggctacacattaagattttggtaataacttgctattctagttattcattttacttataaggctgcttagttgaagtttgtaggtaaaccattgcaaagtcaccatcacttctggaaaaataactcaaggcccaaatacccctcatggtggattaggcgaatcattctactatgcagaagacacatgccatttgcatgtgtttccaggtgaatgcatgtttttcattttcaatatttcctctctcttactttctgctcttcacactttgagcactatcgctacaggcctgaaattcattgtgttcatcattctagacaggtacctaatgcaggatgtgaggcaaaagcagaaagaggaagctttgttttaagaag

SEQ ID NO: 207554 - DNA, 700 bp, Homo sapiens
cagttctcctgcctcagcccaggaggtggaggttgcagtaagcaaagcagagatcgtgccactccacctcctgggttcaagcagttctcctgcctcagcctcccaagtagctgggattacaggtgcccgccaccacacccggctaatttttgtgtttttagtagagacggagtttcgccatgttggccagggtggtcttgaactcctgacctccagtgatccgcctacctcggcctcccaaagtgctgggattataagcgtgagccactgcacctggtcctaagtgctttttaaaagcataagttggagggtcttcaaagtcttttggctaatggcacatactaaaacttaagcgaaacacttttttttcttttttttttttaactgagtacgtgatagcaaataatatttatgctaaggcacatcattgcaaaagtcaacactgaaaaaagcaaataatgcccttagtattatcatgacaataatttgggcctcctggacttcctaaagggtctcaaggatctctgggggctctgttgacctcactttgagaagttcttttctaaagtatagtatgtatatatatctgatcacttattcaagaaatttcagtgctgtatggcagcacaggtctgggttccagggatatacccctgaacaaatgatgagacagcgaccgaaaaaattgctcattattccg

SEQ ID NO: 207555 - DNA, 474 bp, Homo sapiens
tctgctgagcttggcccagcttggcttagcctgatacaacctgctcagcccagttcagctcggctcagcccagcccagcccagcgtagctcagctcagctgagcccagcccaggttagctcagccccagtccaggtcagctcaactcagcccaaaccagcctggctcggcccagctcaccctagttcagcttagctcagcccagcccagccctgcccaacccagctcagctcagcccagcccaggttagcccagcccagcctcggcttagctctgctcagctcggcccagcccaggttagcccactgagaagctgaggttccagagaggcttccagagcaggagcagtgcagggacaggaggatccgggagctcattcaggaggggcacatgggcaagggcaaggggctctgttggggagacctgactggacactggggctgctccacagcatagggaacacgccaagtgctgc

SEQ ID NO: 207556 - DNA, 472 bp, Homo sapiens
gtcttgattttctgaatggagcgtggtagcatgttatagagtccaaggaatttgccaaatccgtgtgagaagatttgcctctcacatgtgagagaattttttgagaaaaaaaagatcctgaccccgtccctctgccaccacccgagtgaggaagactgacagagcacattggcttgctgtggagacaagatcagggaaagcgcccctgaaaagaaagcattttggaagtcctgaaggtggagaaggagatttagaggaagagtgataaatcagaagtcttcgtccaagaattagctttgcaccatctacagacctaagcagctgcagtcctggaactgtgtgataacttgcccagaaaatcttcttgtggaatctgtctttacatggaaaagacttggcaatatttgtacagcaactggaagaaaggtctttgctgagatatacaaagaggcagaatgtgtgtggatcaccg

SEQ ID NO: 207557 - DNA, 698 bp, Homo sapiens
tttaaaatgggggagggctgggggctggagtacctgaaccatagattcattgctgccatcatccttttggaagcttagctcggaaaaagaggagtgagatttattgcacttgtaggtctaattaggggggaaggggggcttctggcccgttcactggttccctctcttcttcacggagctggggccgcctcctccagagctgtggccttgttttcacccctctactttgaaaggaaagtttgtgactgaaccgtgctttcatagttgtgtcattttttttaaagcatgatactcgttttatttcttcatcaaactccaccctctgcttaaatactgcatacaaattacaatttacaacggcatttaccgatccttctgatttggccgtaatgcatagactgcagctagcatgagcttccacatcatttaatccctgtgttgtatgggtttgttttttttaaaaaaaaacacaacttttgatgttgtatttggatatgcttcatgttcatgtggcaagagatgcagtacttttcttataaatatatttagccgtttacagttaaagtttatctcttgacaatcattaaagatgtcttatagtcaaattagcgaaccagtcaattttgcagaatgcagattactccttcttgtaattgactttaaaattatattttatatgccacaagaaaagaaattga

SEQ ID NO: 207558 - DNA, 254 bp, Homo sapiens
tccaatacttatttcaaacaggcgtctctgggtctttttcaaactccctcccactaatgcctttcaggcatcctccccagcttagcctcccctgggaccagcttcctgccagtcctgaaatgcccacatacacggggaagattcctgcttccacatgaccagcccccagtgacatctccctcagactccagacctcgtctttttttctttttcttttttctttttttttttttgagacagggtctcactctgcc

SEQ ID NO: 207559 - DNA, 496 bp, Homo sapiens
tcaatgcctggcttcaaagcttcaaaagacaggctgactcttgttaggagataaagcagctgatgactttagttgcagccaatgttcatttatcattctggaaatccttaagattactcttataaatggaaccaacaaagtctggatgacagcacatctgtgtacagcatggtttactgaatatttaagtccactgttgagacctactgctcaggaagagtcttctttcaaaatattactgctcattgacaatacacctggttacccaagcgctctcatggagacatacatgaagattaatgttttcatgctggctcacccaacatccattctgcagttcatggatcaagaattcattgtgacttccaagttttttaattcaagaaatatatgtcgtgagaaaaagctcaatatcactgatcattagaggaatgaaaatcaaaaccacaatgagataccatctcacaccagtcagaatggctattactaacaaacc

SEQ ID NO: 207560 - DNA, 110 bp, Homo sapiens
gtcctgtcgtctgattcccttttcattaaactaatgtgcctccgtcactactgctttctttttctccctgttgccttatttctttccggctctgtcacctgcttctcttt

SEQ ID NO: 207561 - DNA, 295 bp, Homo sapiens
gatcatgcaggatgcttttcagaaacaggtgtgaataatcttctgaatacccttgacccagtgatctgattgccagcttcaattatttcaccttaaaagtcaagagctggtcaatacactgaatctggaaaggactaggcaaaattgcctaaccattactatcttcaaatatgggcattgagctggaggcataattccagtaacccccttgcaacaatatttacctgagcagcctttatctgggctaagtcaagcacttgggcagtcctacaggaatgaattccttatcactgaa

SEQ ID NO: 207562 - DNA, 159 bp, Homo sapiens
ttaagttgtgcaggaagggtgtgacatacacactaaattgtgaagacttagcacatgagaaaaaagaacatacacggtctcagtaccttactgcagcctcaaacgctgaggtttaggcgatcctaccaccacagccccctgagtagctgagactgtagt

SEQ ID NO: 207563 - DNA, 663 bp, Homo sapiens
aaggaacataggagagacagtggtgtggaatgagcagagatgatattccttacttacctgactgttgagttatcttggtatctggaactctttattcctccagtcttcaaagcagaggagatgagagagattgctttttagagccctatccccagatggccagtctgttttctgatctttgcatctcatcacctcttgtggctccaggtcctccaagtttccatgtaatctgctactgtcttcatcatattttactgttcgactacctccagaaatgtgcctgtaacagcatacttgtattctccatttccttttctgagaaatagcaagtcagaataaattactgagggaaacagcatttgtatagaattcagacctgtatcttcttaatagtaggtataagcaggaacatttgatgaaggaaagtttgcctttgttgactaaaattggcccaatggctcttttcccctacgataaccaagtgttcggagtaacacttatctggaatcctttgcttagagacagtttcccaatacacctccctcccaagggcaaatcccacatgcgattaacttcagaatttctctttcaggttcttttcttttttgtcttcataattttctgttttattatttttttttagtgaattacagtcttaataat

SEQ ID NO: 207564 - DNA, 181 bp, Homo sapiens
tatcagctgcactttctgcagtgtcctttatactgaggttgaaaccattgactacctaacatttcacccccctctcatttttattacctacctgacccctgaagggtttgccttttccacctctcggtcagggtggggacaaatcagaaaatgctgagtgccaggctgagcagggtagact

SEQ ID NO: 207565 - DNA, 536 bp, Homo sapiens
gacccttggatatctaagattttcttcttaaatccttgtaagagtcactgcacatgtgtgtgtgcgtgtcgcgcgcgcgtgcacctcaggtcatcaggcattaggttctcataaggagtgtacaacatagatccctcgcgtgtgcagttcacagtagggttcgcgcttctgtgagaatctcatgccaccgttgatctgagaggaggcagagcgcagatggtcacgctcgctttagagtgcttgggagctcctgtgtaaggacagtaccctcccccaacccaggctacctggagggagagcttctgggaatagaaagttaggaatagggaacaacaacaataacaacaacaggcaccatttattgagtgcttactttgggccaggcactgtgctcagttttgtacatgtagcaactcatttcatctttatgacttctgctggttcttgataagatgtttctaatttaattttaggatactagcctccactgagtgttgatcctaacaagctcctcgaccctcatccgctgttccaat

SEQ ID NO: 207566 - DNA, 717 bp, Homo sapiens
gacccttggatatctaagattttcttcttaaatccttgtaagagtcactgcacatgtgtgtgtgcgtgtcgcgcgcgcgtgcacctcaggtcatcaggcattaggttctcataaggagtgtacaacatagatccctcgcgtgtgcagttcacagtagggttcgcgcttctgtgagaatctcatgccaccgttgatctgagaggaggcagagcgcagatggtcacgctcgctttagagtgcttgggagctcctgtgtaaggacagtaccctcccccaacccaggctacctggagggagagcttctgggaatagaaagttaggaatagggaacaacaacaataacaacaacaggcaccatttattgagtgcttactttgggccaggcactgtgctcagttttgtacatgtagcaactcatttcatctttatgacttctgctggttcttgataagatgtttctaatttaattttaggatactagcctccactgagtgttgatcctaacaagctcctctcattttaaaaatatacacttgaattcttaagctttttgcaacgagtgggcttagttgttagttcatttggtctgcaaagctatcttcaacatgccatgctcctactatttaaagggtctttgtgtgctttttccctttgcttgtccactagtggttaagaaacaaccagtgcgtgttcgtcctttattttgtcagttgtagg

SEQ ID NO: 207567 - DNA, 545 bp, Homo sapiens
tagtagagacagggtttcaccatgttggtcagggtggtctcaaacccctgaccttctgatccacccgccttggcttcccacagtgctgggattacagataggtgtgagccaccgcgcccagcctaaattttgtatttttagtagagacggggttttgccatgttgcccaggctggtcttgaactcctaggctcaagagatccacccacctccgcctcccaaagtgttgggattacaggtgtgagccaccgcacctggccagtttattcttttggcaaagaagttactgagcttggctaacacagctttccttggttcccctcttaccactgattgcttctcttccagctgttcttcctgccccttaaatgtcaagtcttccccaccattctgtccttgggcctctcctgctctacttactcttaaactcccaaatcactctgtagcccttttctcctgaaatccagctctaattgtccactggagatttttttcccaagaaagtccccttgacaaaacaaaactcattctctccctttctttcat

SEQ ID NO: 207568 - DNA, 803 bp, Homo sapiens
ttgggtaggctggctacaggccaggttgtgggtagtgatctcattgtgggggctgcgctggtttgcatttttcaggaggctcttgtgtcctctggcaagaatccctgaacatggcttggactccagtgtgggccctctagtgctcccaggtgaggcttgatttccctttgctttcatgtgaagttcttagtgcgcctccacaacactcctggacacctttttaggcttgcaatccccccagatggacactgagacactctcaacctcacatgcccctgtgagaatccagatccaggtgtgagtcctctgctgtgccttggacttgcctttggggtgtttcctgcttttcccagacagccatactgagaaggagcagcaggaatatactgataaatactcaacatataaagttggtgagttgcaattatgtctgtgatatttccaataaccatggtgaaaggaagacactgtattttaaatgtagacaaactgatttctctggagtcggaaaaactgaaagacttcttggataacatcatttttgctcacaacataatgacatatagtaaacaaacttccatgaatagccctacattaattgtggcatattgccttaaaatgtttctcagtcagagtagaggagttcaggacctggtttaaatagtcaattatctgatggcatcaacctttgttttgatccagtcagttggaaacactatttctgtaggatctatgatgggacacttcagatcccattgaggactgtagtgaaaaaactaatatcccatgataaaaactagaaa

SEQ ID NO: 207569 - DNA, 773 bp, Homo sapiens
tggaataaggatataaggcagtaattattattcctacatttcagtagagaaagctgagattcatacaagttaaggacctacattaagtaacagaagtagttataggcaacatcaaaaaggctattcaagtctcctaatttctataatagtttgaacaatttccaaacaggcttgaatacacaaaagcaattccagtccattacaagatattactacacacctagtagaacatctaaaattaaaaaatagtggcaataaaaagtttggcaagggtgtgtaaaaactggatgtatacattgctcatggaaatttaaagtggtatagccagtacgaaaaaatagtttggcatgttcattaaataataacactaaatatacactgactatacattccagtaatctcattcttgtatatttgtcccaaaaaatgagaatttatgtcaatgcaaaagtctgcacacacatttttacagcagctttatttgtaatagctcaaactgcaagcagataaaatggcttacaacaggtgaaaagttaaacaagttgtggtacatctacaccatggcatactactcagcaataaaaaggaacaacatattgataaacacagcaacatggatgaatctaaaaacacactatgctgagcaaaaaagctggtctcataaagctacatattctatggttccatttaaataactgtctcaaaatgacaaaactgcagaggtggaaaacaaactgatgcttatcaagtgttgggacgggtaggggaaaaag

SEQ ID NO: 207570 - DNA, 573 bp, Homo sapiens
ttcatcagtcccatcttcaatgaaggtgaatatgtattatttcgtgaaatatttaataagaggccactctgtgcagcactcttcaaggcatagaagatacaacggtgaacaaagtagacaaaagattcctgcgctctggtggagctgacattctagccatggagaatgggtaatcaacaaacaaatactgtacataacgacaatatagtgcaacagatgctgatagtgaaaaataaagtaaacccaggaaaggaagaggagagctgagtctactgcttgggactgtggctcctccaggcacctttgaccattcccaataaggtaccgtgagaccctgagctgccatgcgcagccaagaaaatttttagagaagggaaagacacagtaatgaaaatgatcttcaaatacctgaaaggatgttgcttcagaggtccaaagcagattcagtttaaattactgaggtacaggtctcattcaaaatgagagataaaatacttagagccatctctaatgaaatgggctgcttttggaagtaatgtttcctatgactagtatgaagtactatgttacatg

SEQ ID NO: 207571 - DNA, 554 bp, Homo sapiens
acatgttcactgagcatttcacacacggtaaataactagggaaattagttcccttgtcatagtatgtcaaggaatttatcctacagtgcttaaaggaccccatgaggtatttaacaagcggaggggataattttgaaaagcaccagagaaaatacggaggacggatcaggcaagaacctgtaacaggaaggccaggtcaggggtgggaagtcacaggtgctaatgcccaacttaaggcaatgccaatttggagaggcaggaaagcctccattcaagggatattgagccagtcgaggcataggtcttagtatccatgcagatgtagggagtaaaggagaaaggaaccaaggatgtctttaaaatgccttgcctttcaccatgtttattgtcattgacattataagatatatctggtctttgtttgcttgtttgttttgttaactgccttcttgaggcctttggtgacttttctctctattgtatttcatgaatacatggctaaaactgtacctagctgatattaaatatgcaatcagtatttacgactgaattaa

SEQ ID NO: 207572 - DNA, 361 bp, Homo sapiens
aatgttcttcccccttctcccctgaccacttagctctaagtcctgactgtcctttttagcaaggcttgttcttttccttctgctcttagattctgcccagttcacttgacatcaaatattatattacctgtcttatactgggggagaatgcttttttccctacacatttctagcatataatacctctctttccatctcttcatttactctacccaaggggaggttgagtgacatacatgtctaatgggcaatttggggaagcatctcctggactcagctcttgccttctctctgcagggagtagggctaccatccatgaatatgaattctcctctgatcctccagcaaataatttgagttg

SEQ ID NO: 207573 - DNA, 763 bp, Homo sapiens
cctttagagtgagtgcagggtcatgtttctagcaagcttgctaaggttaagagttacaccagtggaaacctctgcttgtggcattaggcccatggtgccatattttggtaaacttaggatttttagagacattttaactcttcatgtaattttctgtaagaatatgggtagataaaacaatctatgacttgccttctttatttaccaattagtaatcaactgtgtgttttttgatcatgtattatttttccagggttgttctaggaggaatggtggggaaaaagcagtccccaaccattttggcctctgggaaccagttttgtggaagacaatttttccacagactggggaggggtggatggtttcgggatgaaactgttccacctcagattaacaggtgtgcaacctagatctggcatgcacagttcacagtagggtactcctatgagaatccattgctgccgctgatctgacaggaggcagagctcaggcggtaatgctcactcgcccgtcgcacaccttcatctgtgtggccgggttcctgacaggccacagacaggggttgggaaccccttttataaaccatgttctttactttaaagaagctttttctctcatatttagagaataattaagtgataaaccgtggcctgctaatcatatagacacctaaggggtaaacaaaggagaaaacacagtgtgggttaggagagactttgtggagtaggcatgtgtcttagtcagtttgggctgctatagcaaa

SEQ ID NO: 207574 - DNA, 392 bp, Homo sapiens
tacttcttatatcctccctattaggtcataagatccttgatggcaagaccaatgttattctcatctttgtattctacagcattcagcaataaagaagtttgcacatagcagatgctaaataaaatttttgaatgaacgaaacctcagttctatcagtagctctttcagttttgcactgtttattacaaatgggaaggagagtgagataggatgcaccctaataatcaatccatattgtctcagagtataggatcccagaagacatctactgcagtggttctcagccaattttctaacctgatacacctgatcaatgacacacacatgtgcaactaattcttcaggccatatccagatttttctttttctttttacagatgctaggactgaat

SEQ ID NO: 207575 - DNA, 227 bp, Homo sapiens
ccaagctgctcacatatttatgatgagctaaagttgatggtaaacttttttttaaagagtgggtagcagtttaaaccaaaggaagaaaggaagtgttttgcttttcagggaactgttatttgtagaagatatgttcaaatataacagataagtacaaatcagcattggcaaacccttgttatcacttctagttctttgttgcaagaatattatcccacgtatctgag

SEQ ID NO: 207576 - DNA, 476 bp, Homo sapiens
tcaaacatttgtttaatacattaatagaatacattaatggaattgataaatccttaccaagactgataagaaaacaagaaagaaaatgcaaattaccagtatcaagaatgaaacagcatatatcattataggctaaatggctaataagggaacattattaacaactttatgccagtaaatttgaagcatacatgaaatggacaaaaatccagtgtatcaaaaatagacacaagaactagaaaatatgaatagccctttatctatgaaggaatttgaatttattttgtatccacacatatacatttaaagaaaacgtttcgccaagattattttactagtaaattttgtcaaacttttaagaatacaataaaatcactcacacaagctctttcagaaagtagagaagtgtggaacagtacctaactagttttatggggctaacattaccttgataccaaatctgaaaaagacattat

SEQ ID NO: 207577 - DNA, 354 bp, Homo sapiens
ctcattgcccagccccagcccccgtcgtagtacctggattgctgtcagcaaccaagaagccatgtgcagtgaatggacatggggtcctgtcccagagcagctcccagcccacaggggagagaggcgtgtctatgaatgagctggaagaacattctggcacaaaggggccaggcacagtggctcacacctctaatcacagccctctgggaggctgaggcgagtggatcacttgaggtcaggggttcaggccaggctggccaacatggtgaaaccatgtttttactaaaaataccaaaattagtcagatgtggtcgcgggtgcctgtactcccagctacaagggaggctaaggcag

SEQ ID NO: 207578 - DNA, 217 bp, Homo sapiens
taacagcactaggtaccagttacttccctgaccctctgtttccttgttttcaaaaggacaagagcgtcaggtgccagttgtgtcgaggagagaccctgtgagagaggctgtgggaaaagcacagtgcctggcacaaagggagaggtctgagtaaaagtcaaggtggcttcctggaggaggccactgtgctctccggcggcaggagaagcaggaatag

SEQ ID NO: 207579 - DNA, 846 bp, Homo sapiens
gggctggcagaagggcagagggggtggcagcatgtggagggccttgtacccatcaccaggactttgtctttcacttgggactcctctggtcctttagcccagatccaccggctgcctcctcccgccagttctgcctcccctctccattctgggcagtggagcctgatggttagtagcatgggcactggcctgcctgctcaggttctgagctgagcacagaggtctgggcctcccctgggcttctgctccatttggcccagggtggggccatggactcccatttccaatggcgctgctggctctggcatattctgacccctccactggggacacctcccagtgttccttgcctggctcatttctctctcagggccatcttcgttgttgctacctctaggaagccttctctgatcctcatccccaaggcctgtgtcgggatacgtcctactccttccctttgccagttgggatcccctgggttcctttatgctcccccaccaggctgggtacttgggaagtattcgcagcccccagcattaagcctggcatgtagttgccactcagtgagtagtttgatgaggggctctttgctgtgggaggattaggctgcagggttaccccataacccccagtggaggtgacttatgtccatcttttggggacttttgcagtgagggagtgcattataatggagaggaggaagccagattcctaaaactttcaatcacattttgctcctctcagaaacaaaaacaaaacaaacaaaaacacaggccgggcatggtggatcacgcctgtattctcagcactttgggaggccaaggccagaggatcacctgaagtcag

SEQ ID NO: 207580 - DNA, 600 bp, Homo sapiens
actttcacttattttcaatcggtctacttagaaaaagaaaatcggcattggctacgctgtgaccaagacagcttagggaagaagggcagggtggctgctgaccgcaggctctcaacagacctgtgtacaatgggtgggcaagcaagtgtccatgagtgcagagacagacaagcagatgtctaatgaaggaggagacaaccagcatcgaacaaatgaccaagaaatagatgcctagtgggtgaattgatcagcaaatgtatacacgtgtgcataaacaaatcaatatctaatatctaaactaataaatgtatgaacaaatacatgcctaatgagtgaatagacaaatatctcatgaatgcgtggacaaatcgatatctaatgaatggacaaacaaatgcatatctatgaatggatgaacaaatacatatcgaataaataaatgaataaatacctaatagatatatgaacagatatatctctaatgagtgaataaacaaatatctcatgaatacgtggacaaagcgatatctaacgaatgaatgaacaaatgcatatctatgaatggataaagaaataaacatctcataagtgaatgaacaa

SEQ ID NO: 207581 - DNA, 130 bp, Homo sapiens
ctctacatgacaactaaaatattagaaaccataacaggaacacctctctttattgtactttgcattattgcactttgcagatattgtgataattacacattgaagatttgtggcaactctgtgtcaagta

SEQ ID NO: 207582 - DNA, 434 bp, Homo sapiens
gttttacaaaagttgccaaattaagacaggattataactgctcgagtccttgtcagggctgaaaggttgggagcctcaaatatgccccggcagtgttgatgaaaagcttaaaaagtaataaaagggagaaaagagcgaggaaagtaacatgtaaaactcttattaaagagaagagccacagagaggttgtgaacttgaatcactgtttgaactttaatttgttcattaacaggatttgccccttactgtgaatgttattacttccctttgccactcagcaacaactctgggcataataaaagagcctggcaaaaagttaaacgcctggtaattaattcatttaattgaaaaaagggggaagagagaaagagaggtcccaatgcaaaagcagaaggcagagaggttggaggagggggcaaggctgaaataacatt

SEQ ID NO: 207583 - DNA, 1285 bp, Homo sapiens
ggtaaaacattctggcataagcagttgcattgatttgtagagaggctagtaaaatggaaatggtcacttagtgggtgacaattttctctgaaaattgatcccatgccaaaagggaaggaagtaaagaagaaaaatgatgaccacagatcctgcttgggacctgccatggcatcaagttttagaactgtttctaggggttttgttaatcctgcaggaatgaacagatacaactttccagtatggcttttctgggattatatgctgagagaactaggatggatttttagaagtttactaacattctgtatttcatgtttggaggtcactttgggaaagactttttttttttttttgtattttaacctttgataagccttttgggggccttatttgttaagtgggtatcagccaacataagagattatttctatagcattttcctctcttctgtgaatggaatctaatttccaagcataatctttgtactgattggcagttgcttttgtcagatgctaatctgtttttggtttgtgttttattcaatagactagattctccactaacatttatctttcattttaccctattttaatcccatcagtgtttcttttcacattaagttgattgaatcaaactacttaactcctcttctgttcccaaaggtagtttatgacccacagacactgtcaacaatttttccctttttttatgtcttcgatggttgtgattaaagttcttaaaagcatttgatataaagagcatttgatatgaagtcggagggggaggtttctattcaatagaatttattttctgagttccggaagaaccttttcttaaggtcatttcactttactatatattagccatatactgtgggaccataattgtagtctttaatggagcttcagaacatttttatgtttagttatttaccaaaaattattggggactgtgtgctatggatatagcagcgagcagaacagttgaatgggggttatattctgggaaatgtttgttcttagagtgacatctcagtttttgaaaatgtgttgtctaaactccatccatgtatgaaactcatgaggacaaaattccctcatattactggtgctttttcggatacttacccattatttaattctctgataagctgtaatatttatctccagcaataaagcaaggtaggtgctcagggattacctctttccctcctttctattccctccacacatgtagctgcatcaattatgtgcttactcaaaatctgttttgttctgttcctttt

SEQ ID NO: 207584 - DNA, 345 bp, Homo sapiens
gatttttatagctttaagtttcacagttaagtttttaatccattttgaattacattttttatatggtgagaggtacagtttcaattttctccttctacatatgattaaccagttttcccagtaccatttgttggatagacaatttttccttgtttacttctgttgactttgtcagaaaaaagttgggtgtagaaatgtaaacttatttcagggctttctcttctttctattggtctacatgtgtatttttgtagcaagccatgtaatatggattactgtagctttgtagtacaagccaggtaatgtgaggcctccaggattgctttgttgttaatgttgctttgg

SEQ ID NO: 207585 - DNA, 562 bp, Homo sapiens
  misc_feature (219)..(219): n is a, c, g, or t
aattggggctggaatcccaggcttcctatcccagggctgagctcatccccatagtgttattctgtctcataacataggagacatatttagggaaagcagccacccaaaagtaagatagaacacaagggacctgtaagcaactccttcactgaaatgagcctgggagtgtgaagagcagaggatggagagccttgcttctgaaggccttggtcacacccntcacactgttcaaagtggaagagattcattaacttttatcattatataagatactacttatttctttaaatctcacctcaacccccaaaactgaaagttagcaggagaacacttttggccaataagaaaacagaaaataaaattaaaatggtagattcagtttcctgcaatacctcagtttcatgcaaagacagtggctctgtgaaactcataataaaacttttaaacatcccagaaatatctttaaaaacataaattttactgtttatctttccttttataaaatggtacatgttcattatggaaatttttaaaaaagacaaaattatgccaaaaaaaatga

SEQ ID NO: 207586 - DNA, 669 bp, Homo sapiens
tgagagaatgttcctaacaccaaacaaagtacaaagtataaactgcaaaggaaaatactgataaacttgaccaaaatttaaaacttgtgtatcgcaaaagaaacaataaagttaaaaacattagaaaatttgtaactcatataactgagaactttacaaaatataagaacagataaattgaaaaataggtagttctcaaaataggaaatgcatatagccagtaaacacatgaaaagattctcattcattaataatcaagaacttgcaagtgaaatcagtgttaccattttctacgcatcagatttgtaaaattaaaaagccttatgatttgcaaaaagtgcaaggtgaaaagaaaaatcttatgaaataccaaatgttggtgaggatgaagtaaaaggaactctcacacattgtttgtagtagtaccatttggtacaactaccccggagagcaattctcaactagaagagatgaagtaaagatgaaattgcataacttaaaacccataaagagatatcttgcatgtgtgcttgaaacattatatgtaatagcagaaaattggaaacagcctaaattcctgtcagtagcagaatgaataaacagcacgtaaatagttacataatattgtggtgtactacataacagttaaataaatgaaccagatctata

SEQ ID NO: 207587 - DNA, 161 bp, Homo sapiens
cctacagttgttttcttaaataatagtaaccataatgccatgatcacagctaataaaattatcagtcattctttaggatcacttactatccagtctgtgtaactaagtattcccaattgattcaaaaaggtattttaaatggttttgttcaaattggtatc

SEQ ID NO: 207588 - DNA, 385 bp, Homo sapiens
aagaaagaaagaaaactatacttgtgccccttacattgatacaaaaaaaaaaacaaaaacctttctgtgttcaaattactatgtggtttctctcttctgactagactgatgaaaacaatcagttttaaaacttttggaggagcaattgattctggggctggtcttgaatgggttcaggggtatagtcttcctatacaattattgccacgtttcaactgtatagcaaatcaaatttctgttataaagataatttctggatgggtgcagtgcctcacacctgtaatcccaacactttgggaggctaagatgggaggatcacttgaggccaggagttagaggccagcctgggcaacatagtgagatcccatctctaaaaaaaatttaa

SEQ ID NO: 207589 - DNA, 402 bp, Homo sapiens
gatcgtcacaacttggcagtttatgtgcaatattcagagcaagttcctggttacagaagtatctgagtatctgcattaggagggtccttgttttaaaatttcttaaagaagccaaataggccagtcgtggtggctcacgcctgtgatcactttgggagtcccaggcaggctgattgcttgagctcaggagtttgagaccagcctgggcaacatggcaaaaccctgtccctacaagaaattttaaacaaaattagctgggcatggtggctcacgcctgtcatctcaactactcaggaggctgagaggtgaaaggatagtttgagccagtgatgttgacactgcagttagccaagatcgtgccactgcattccagcctaggaaacagctagaccctgtctcgag

SEQ ID NO: 207590 - DNA, 401 bp, Homo sapiens
aaatgagcagatgagattcacagaaacaggaacagactaggctcctacagatataacactcaacctagcgtactactataaaaggaatagagtatcaaagtatacgaagacaggctaggcatggtggtacacgcctataatcccaacactttgggagtcccaggcaggctgattgcttgagctcaggagtttgagaccagcctgggcaacatggcaaaaccctgtccctacaagaaattttaaacaaaattagctgggcatggtggctcacgcctgtcatctcaactactcaggaggctgagaggtgaaaggatagtttgagccagtgatgttgacactgcagttagccaagatcgtgccactgcattccagcctaggaaacagctagaccctgtctcgag

SEQ ID NO: 207591 - DNA, 727 bp, Homo sapiens
ctgaataaatatgagaggtaagacataaaattcaatataaaatgtttctggaaattttatctaaaatggttctgacctgacagtgaccagcctggccaacatggtgaaactctgtctctactaaaaatacaaaaattaggcaggcatggtggtgcatgcctgtagtcccagctactcaggaggttgaggcaggagaataacttgaacccaggaggtgaaggttgcaatgagctgaaatcgcgccactgcactccagcctgggcaatagagtgagactctgtcttaaaaaaaaaaaaaaagaaaagaaaagagcagggtcctgtgatacagtacactctgaacctgatgggaaccagtccttctaataaactagagatggcttttacagtaaagcaaagacatctcttatcaatcacctatatccatgaatcaaaagagaaaaccaggtcaggcatgatggctcacacctataatcacagcattttggtaggttgaggtgggcagatcacctgaggtcaggaatttgagactagcctggccaacatggcaaaaccccatctctaataaaaatacaaaaattagccgggtgtgatggcacacgcctgtaatcccaggtactcaggaggctgaggcaggagaatcgcttgaacccgggaggcagaggctacaatgaactgagatcaccactgtgctccagcctgggcaacagagcaagactccttctcaa

SEQ ID NO: 207592 - DNA, 832 bp, Homo sapiens
tggttagtaatattcagggctgtctccatgcgagactgtaaatacaaagtacactgtattcccgccaaggtctggcacagtgtctcttatatggtacatacttagaaaaaaattttggactgaacctgattaccaagaagcagcagtatttcaagttcatcaacctaaagaggttaggtcaagtggcaggttagggagctctcctaaaattagaagagcttcccacttgcaaaactgaaggcaagccaatcctcctcagctggaaaaaaaccattattttaataggatttcaataggaatctattcaacaaagttgctcctacaaagggaacttttcaaaggaaacagctatgcacacaggatagccttctgtgtaaatcccgtttacagaaatatactttcaaacctgcacctttaagattttgctctttttatggaggatgacaacgaggcttttctgtcttatcttaccctaggcatacattaactgcttaaaaaggcatagcctattgagtttttattactcaaataatgtatgttcaatcatctcagctcaaatatgtcattattaaacaatcgcacccattatagagaacataatgacaccatttggagtggaaagcttttctcaaccctgcggtaccccttgagtaaagggcttttgtgtcatagaacactttccacttcatctcatcatgaaacgttaatacactgcaaggagttgtttgtaaattagtctggtgggtgtaaatcagagaacagatagcacaaaaagttgttgttcagaagcgtgaaagacatgaaactagaacttctctctgtttttaataat

SEQ ID NO: 207593 - DNA, 395 bp, Homo sapiens
ttcaaaccctaagctccagtatgactgtttggatataggccctttatgaaggttgtcttagtccatctggggtgctacaccaaaatatcttaggctggaaaatgtataaacaacagaaatttactgctcacaattctggaggctggaaagtccaagatgaaggccccaggggattcagaatctggtgagggttcactttctgcttcaaagatggtgccttcttgctgtcttcacatggtggaagttgagcaaacaagctctctcaagcctcctttataatggtgctaatcccattcatgagaaaaaacctttatggccgaatcacctctccaaggccccacctcttcataccaacgcaatggggattaggtttcaacatataaattttgggaggg

SEQ ID NO: 207594 - DNA, 248 bp, Homo sapiens
agaacctgctacaaaggataattgtgaaatatcactggacccagcacctaggtgatgtgactctcctttttgcctgggtctcacataatttgggtattgtgatatattgctgagaccaacatctagggggtgggaagctcctttcttgaccctaaccacaggagctttgtgacatatctctgcatccatgatctaaatatgtgattctgtgtttctgcctgcaccctgctaacagagaagattacgac

SEQ ID NO: 207595 - DNA, 616 bp, Homo sapiens
acctcaggtgatccacccacctcggcctcccaaagtgctgggattacaggtgtgagccactgcgcccggccgattttggggttttaagcgatgaataccaaatgtcagtttaggaaaatattaagtggtcacggggttagtttaggtttgatattttatgctatgactccggttttgctcaactatgtgactccccttaaactaagtccacctataagtacttctgaaagcctggctttacactgtgcttgttatgtcaaactgatgaggaggataggggaataggaaaacacgaaatttgctgctttaatttatcagctgtaataatgcttctgtgtatcccaagatattattcttaagtgttcttattaccatgggttcagtgtgtaccatagaggccaatgtagtgcctctgactcccagtctatgtatgacttgtagaaagatacttttttttcaatctggttatctagtagatcagtaaaaccctttgcctgcactctctgttgacacccagccaggagggaggatgatatgctgggcccaactagtaattgtaaatgaagcaggataatgaatcacaggacttcgagctgctcaaatttaattcccatta

SEQ ID NO: 207596 - DNA, 595 bp, Homo sapiens
cagcttcctgcatttcctgtgcatggcacggagctcgggtctccagagactctgcatctggggtgcagcgaccgatgagcccgtaaaccagtcgcacactcggagcgtggatgctgcgtggggtgcgctgtcagcgcggacaggctgggagaacgggggacgctggggacagggagagccggtgaacttcccagaacgtccgcctagccagacccagctgcgggtactgggttttgagacgtggtccagtacccaggaactcagtctgacagggagacagcgcctacacagtgagcccagtactgagggaagacccgctgggaggggcggcctggatagcccctccacagagaggtcagatgtgaggtggccttgagggaggtatgatgtaaatcctgatcattcgttgtatttgaggctgtccgttctcctgtgcctcctcggtcgccttacttggatctgttcccattgccttggtgtgattttatccaccggaaactgtcttcagctatttccccagtaacctctaactaaaaacctgggtcttgcctggtctaccctccctgctgaactccagagccacatcccaactgct

SEQ ID NO: 207597 - DNA, 638 bp, Homo sapiens
cccttccctaaacagaattctctacctgttaccatatctagagtgtagggctcagggaagacagtaaaggacacagactctgagaaatgaacatgaactagggcttagatgaataaatggagctacaacaatagttatattttagtgcaacttctgaaaattaaactaaaggatccacgggtgtggaagacacaataccagggtgtgagtcaggggatgagtgctcaagaatgttctgtgtttcccaaatccactatatgaatggcacgaccactttcccaggcaactcagtctaaaacactagttagttctaacttctcacctccacgcagtcacttcctaatcccacctctacggcctcttttattatgcctctcttttcccctcgccttccccttgtcaagctttcctccctgccacactctagttcctcctcagcacctccaagccagctgattgcaacaggctcctaacagagcttctgacctccagaatgagcaacacaagccaaaagatctaggtccaattctcgtcccaacactcactaatttgatcaatttgtataaaaaaatcatttatctctctgagcctattttatttctctgtgaaacaggaaaataaaagatacttcaaccagg

SEQ ID NO: 207598 - DNA, 236 bp, Homo sapiens
atttaaattttgataggtattgcattgaatttgtagatctgctttgtagtataaatgttttagaaatattaattcttctaatccattaacatgaaatatcttcctacatatttgtgtctttaatttctgtattagtccattctcatgctgctaataaagacatacaaaagcctgggtaatttataaagtaaagatgtttaattgattcacaattccacatgactggggaggcctca

SEQ ID NO: 207599 - DNA, 239 bp, Homo sapiens
tctcactacaacacccacccctttccaggtccactcagaaccttacgctcagatttttttttcactgcaataagtgaacacaacaaaaaattacagttactacagggacacactggtcccaggttgcctcatgagaaaagcaggtgagtaggcctgctggagctttgcactaactctatggaccctgtggaaactgcatgcaatgcaggctacatggagggtcaccgggctgctcacta

SEQ ID NO: 207600 - DNA, 572 bp, Homo sapiens
cataccacattgaatttctatgatctctcatatgttgtgtcccgtgatgtgaaaagcactgcctaaaggagtgaagttatcaggaggttcagacatcagttagcaggttatataggagagttctaagtataatttctaagtagaatttaaccagtactgtccctagaactcagctgcttcttcctaacactctcaggtcacactatgccacaataaggccaaacaagtgggcactctacatatttataaaactgtcacctcagacatcttatatctcttacctaagactaagctctaaatcactttaatacattttcaaataaccatattacctaaccctgagccatatacatcatttccgtttctggttttgagagaagtagagtcacataggtctgcactcctgctccatgccttcttctccgattaaattttctcattcaataagcagcaccactgtcccctctattatccaaatcaacaaatatagatgttatccttaactcttctctttccttcaccttcaactactaattgattaccaaaccagttgattttacctcctaaatgtc

SEQ ID NO: 207601 - DNA, 586 bp, Homo sapiens
tttcactataagaaaaaaaagcatttttgtttcagcatataaaagaccatgtcaagtatctcactctagtttggagtgactgaaatagtatggggaatctccccaatgaagtcaatcagtaaacacgctgatctttctaataactattactttagaattcaattttctgttacaagttattcattatattaaagtaccttaacacttctaacacttcgagctggataattttttgttatgggagattatcctgtgcactgtaagatatttagcagcatctctaatttctacctactaggtgccagtagcacaccccaaggtgataaccaaaaatgtctctacacattggcaaatgttacctggggatggggctggagggatataaaattgccccagttgagaaatactacacagaacaataattccaggaaaaggatagaatcatccagatgattatttttaaaagcaaacttttaacctaccaactatagaacaatttatattccataaatgcttcttagttaacatagcagctaagcctttgatggttcaccttctggatatttaccttatcatctaatctatt

SEQ ID NO: 207602 - DNA, 565 bp, Homo sapiens
caccatgtttgtcagactggtctcgaactcctgacctcgtgatccaccggcctcggcctcccacagtgctggatgacaggcgtgagcccccgcgcccggtccgtgcatttacagcacaagttcacgcttatctacaaagcatccacctctcaccgcaccttccgggaccacgggatttaacgcctcaccgcccgatgacagcacgaggtggaaagggcagcgacaatgctcgcgcgtcccctcccggcgatccggagcacggcagccccggagcgcgcggccactcctcgctcccctcaggagctcgtaagagccccgcgcggggccgaggcgcgagagcacgcgcaacgcttcctgggaaatgtagttgggtgtcggattagaactacaaatcccggtactcaccgcgctgcagccccgaccgtgagggcgctttctggtgaatctgaatctcgtttgtctgtgacatggggaaagctgtccaagcccaattccattttcacaagaggctttctttttggaaacatgatagcggtctcgctggtgtgcgcaccaggagcgttgc

SEQ ID NO: 207603 - DNA, 468 bp, Homo sapiens
tgtatccctgccacactggctgccaagattggagatcataaaatttcctgaccacttctcagcctaacacagggctctcaaccttgaaatcccatggaaactttgcaaagctgtggaagcccaggtcccatgcccagagattcacaggttcacatctaattcatctggggtgaggcctgagctttcagaaaattccccaggtgattttttttttttaagacgtagtctccagcctgggcaacagagcgagactccatctcaaaaaaaaaaaaaatgttggaagagggtgtgcttgtttatgtacaaaatgtcgctagatttaaacacaataaactggcaaagatggttgtctctggggagaattggggacttgggaacaggagctgaagaacaacttttcagtgttgtgtttggaaccatgtgaatgtattatgtattcaaaatgtaaataaaaatgaagttaaagag

SEQ ID NO: 207604 - DNA, 482 bp, Homo sapiens
gggagaaccacttgagcctgagaggtcaaagttgcagtgagccatgatcacgccactgcactccagcctgggtgacagagtgagaccctgtctccaaaaacaaaacaaaacaaaaatatgtctataggtcagtcctcctaaggcggggggtgaatacatacatacggcatccttgtgcgcacaaacacagggtgcacatgcaggcccctccctcccacgcatgtgcccacaggttcataggcatcagcatctctagagccagccccctccactccctcccgaccctgctctgtagaattcctatacaaggttcttgtggatttgtatcatcccttgcacctctcacgtgtcgcaggacagaacactcggcatcctgggggcttccttatcccacagccccaaattccgggaacagcatggatgtgggagggggcatggaatccagacctggattcttgtcccggacctacccctcacccttg

SEQ ID NO: 207605 - DNA, 1350 bp, Homo sapiens
atgttttttattttttgagacgtagtctcgttctctcgcccaggctggagtgaagtggcgcgatcttggctcactgcaagttccgcctcccgggttcacgccattttcctgcctcagcctcccaagtagctggggctacaggcgcctgccaccatgcccggctaattttttgtatttttagtagagacggggtttcaccgtgttagccaggatggtctggatctcccgacctcgtgatccgcccgcctcggcctcctaaagtgctgggattacaggcgtgaaccaccacgcccggccaaggtctaactcagtttgaaggcctttgttctgccatttggaaattctctatttcttaggtaataccatctcctaaaaaattctttttaaaacttccatgattcagatggtgctctgttttctcaggggattctcaactttcttgaattctgaatttttctttctcatgttttaaaaacattctcaactgattttttttaaaaataacattccgttgtttgatgttctgtgattttatttttctctagaattactttattttggtcttgttctttactcggattcttcttgtcgtatttctggttgttttttgtttttttgtttttgagatggagtcttgctctcttgtccaggctggagtgcagtggcgctatctcggctcactgcaacctccgcctcccaggtccaagcagcccttctgcctcagcctccagaggaactgggactataggcacgtgccaccacgcctgtctgattttttgtatttttagcagagacggggtttcaccttgttagccaggatggtcttgatctcctgacctcgtgatctgcctgccttgacctcccaaagtgctgggattacaggcatgagccaccgtgcctggcttatggcttagtttttaaattatcctccaaaaatttgggcctttttctgtggggaaacaagtgaagctgctcttcagcatagacactacctttatcccatcattttagtaaaaactaggttggtttcacttctgaggtgtcttattaaatgtacttcatctgagaatttggtgatctttaatgttcgagctaatattagaactggccattagacaaacatgggatactacatgattctatccagtattccctgtgcaatattgtacacactggatctaatggattttttgaactggaccggggggtttggagtacccattaaatatctcgcggattcgcttattgtaactccgaccgcttaagggcatccagcccgtttgtcggaggagcaacaaccgtcaccctccctcagagcctgcacccaggaccccaactgctcgtcaaaac

SEQ ID NO: 207606 - DNA, 491 bp, Homo sapiens
cagtatcatgaacctctacatatccatcacatgcaacttctttttaattcgcttaaatttaaaaatagatacgtgaaataaagcatttggggcagaagttcattgcaaaatcaaatgatagaatttcacagctcctaggcaatcaaatactccccttgtgccataaggagatttaggccttttatttccttttcttttacaatttgttttctttgctatcattcatatgtagagttctcctgcagtatgtagaaggtggacattgtcattttcaaaaatggagtaattatggcctatctacctgactgtgcagctatcaataataattattattataaaggccatataacagggaaaagcattattgattagtgttaataaacggtataaattgtacataaacagtgatgtctactgtgtgaacatatactagatatgcatgtaaacaaaaactagaggtaaattgaaaaaataaaatcagtttttgcatc

SEQ ID NO: 207607 - DNA, 410 bp, Homo sapiens
gcatatctctagacctgtggttatcaaaagagcgtgtgttagaatcaccggacagacttatgaacaaacgaaatgctgggccccatctccagtgttctgactctgtaggtctggagtggggctgaagatttgcctttccaacgagttccaagtgatgctgaggctgcttctctggggactatattttgagaactactgaactaccattctaggagggtgggaaaatgggttttcatcttggagcacaaattatttgcatgaatttaagcaagtcatgaatattctattcttcagtttcttcatctgataaataagatcaataataccagttcagcctactttgttgagttcttgggaggagccagtagaataatgtataagaaagtgcttttgaaaattaaaagaaacac

SEQ ID NO: 207608 - DNA, 368 bp, Homo sapiens
tgcactgaaataataactgcattagtaacaataactggattgaaagacatcaaattaatttgatgtctcatatgttatgtgatatatctttcacagtgatacttttaaaacatcattggccacctttggaagatgctagggagccaactcattgttttgaaactggtaaatttaaaaaaagaatcaaacatttgtcctgcctttcctatatgaattcaagataaccaaatggttgatgagaaatttctctgtataggaatattctggctaataaaatgaagaaggaatgagagaattggacaatcaacgttttgcaacctctaatgcaatcaagaacctgagcaatggtcactagcagctgtggatat

SEQ ID NO: 207609 - DNA, 348 bp, Homo sapiens
aagccatgccatggaatgctggcagccaccagagggagaagcaaggaatgaatccccctgagatcctccagagggagcgtggacctgccaacactttgattttggacctctggcctccagaacggctagagaataaatatctgtttatttaagccaccaaagtttgtgactgctcatcaagttggcctcaggaatctaagacaccctgctgcttactgtgtgtcattttttctgggagtcccagctcatgtggatctaggctttggagattatgcctgtctgaactcctgcagcaggtttgtgtgaatctcccatttgacaatttacaaattttcaaccttgtggtat

SEQ ID NO: 207610 - DNA, 280 bp, Homo sapiens
gtgattctgaatttaggaatcgctgtgtaaacagacttcatgagggctaggactttgtcctattcaccactgtagtcgaagtgcccatcaccaactgaattttgataatgtattgttaattgggggatatctgtgtactcctacctgaatgaccaagtaaataatatgaaacaaacctgcacacaatataattcagcatgctcatgaagctgtgaatattcttgtttattccgatttgagtatgaaacaaagtcatcaactcccataaaggaagtagaaa

SEQ ID NO: 207611 - DNA, 308 bp, Homo sapiens
tacaaagtaattacttataactatcttgtattaggcacacttctaagtgctgtgaacaatacaagttgattaagactttagaagtgtgcctaatacaaagtaattacttataactatcttgtgattttaactatatgtctactgatattagaaaatcccaagcagtgttctttctcatgtggaagagaaacaaaagtgaacttctcagcctcagaatacaaatattgacatagttaaccaactaacctagtttatctacctaagttacaatacacatgctgttccaagctcatatttcttatgaacta

SEQ ID NO: 207612 - DNA, 355 bp, Homo sapiens
ctttgggcatttacattaagctgcagcatcacaaaaatgaagctgaaaatgatctgcctttttttctaacagaacacaaatcatatattgaaattttgcctaatagttttcaacctcaagagtatgggatgcatttctagaaaattatttgccatatagtttgttccatgcaggaaaatagaggggacttgaagtcacagccatttttcactgccacctgtgattatactacatgatttacatttcctatttttgttggaaataaaatagtttcctattaggactggaggtagatggatttaagtagcccagtttcctggcaaaggccaggatattgggagtgtttgacttaggc

SEQ ID NO: 207613 - DNA, 344 bp, Homo sapiens
ctgcctttccccttttcccaagctattttttagcatgagtgaagtattttataaggatgctcatttccaagactctcccttatgatctgacagaacacctcctgttcctgacataaacctctagggtagcactgtgtaatagaatttctgtgatgatgaaaatgttctgtacttgtgcttttcactgctgtagctctactagctatatacatggctatagagcactttaaatgtggctaatgcagctaaagaactgaattttttctttttttttttttatgagacagagtctcactctgtcacctaggctggagtgcagtggcacgatctcagctctctgcaac

SEQ ID NO: 207614 - DNA, 449 bp, Homo sapiens
agtgccccttaacagagaaggtcttactcaagaatattgtgtttttccctgcccctattatagactggtatgtctgcaattcaactgctgaatatttgatttttttctttgtccatgaaatgaaaacacaatacccttgacaagaacaatagtacattacattgttttgataaaatatcattgttttctctatattcaagagtggaaaatatatgtaattttttataaagggtattatacagtggcacaagcactaaactaagcaactctgggttctagtctctacttggccacttttaaactagtgttaatttaactctaaagttgtacatgcacacaacccgcatattccaagagcttgttaggtacaaggcttgttacaaagaccagcagtctccccgctgtcactcctgccccatcccttgctctctgagctcaactcttagagc

SEQ ID NO: 207615 - DNA, 871 bp, Homo sapiens
tcttgattggtatcttctagttttcatagaaagatcctcaatcaagatcattctggaatgtgcagaaataaaaagaaatgggatggcaaaacgcagagaaagcaaggcaaatgaaagctacaaacctctcccttagataatgtacattccagaatgatcttgattgaggatctttctatgaaaactagaagtattcccaagaatgctttaattttgttaaatatcagggcgtaggttataatattgtatcactctgggacggacagggttaggctttggagtagaaagaccctagcctcaatcctgcacttactctgccacttactgttctgaaccttgagaaaatgacttaatctctcagagattcagtttacactgaaactcagttttacacatctgaaaaaagaggactattaatatctgcaacagatttaaggactaacaaatatgaagtatataaagcacctatgttatctactttactggatacataagtgttcagtgaatgggaaccatttaaaagcttacaaaaagcaggaacagtaattgaagatatcagtctatagagtaaccactatgtttattcattatttgttactctaatacttgcataagaacgtatatgtgcattcatgcgtgtatacatattggccatcattaccttttgtctgttgtgtataatacagattcttgttcttctgtgtcatcaccaacatgtaatattgtcagaatttttattttttgtcagtttattggttttaaaactcttatcttgtgttcactttgcattccttgcaggttgaggatgttttgttttctggtcttagtctcattcttccttctttttcctgttggtcttgttcttttcttt

SEQ ID NO: 207616 - DNA, 897 bp, Homo sapiens
tgagaggccatggatcctgagcctaaccaggaccacagaaatagggtgcgagagaggtgacagctgccagaaatacacaagaggcaaaagtggcaagatctggtgattggttggatgttggggggacaatgcagtgggagaaacttaggtggatggtgattttgcagcaaaaatgaggaataaaagccagtttggggaataaagggagtttatgaattcagtttttgacatactgatttggggaagcttatggaatatacaaatgtgttcagcagacagttgagtctataaagctcagggagatgcaatacacaaatgtttgggagtcaacagcatggaggccgttaagatcacagagagtaggtaaagacgaaaaagcaagtgtcaaggggagaaccgtgagcaacatcatcatgaatgtggtgggcagaggagccaaggcaagagatgggaaagtcactcttcagcatcttccccccactcccactgagtgttccaactcaatagagatggaaagggctataaatatgtcagtcacatattctgaatcaaggatccacaatctggctccaaggtatgagaaagtataacagtggggccaaatatttaaaatcaagaccatctcagaaaatgtggccatgtcaactgtaaaggcatatgcaaattgctaccagaagctgcccagaacagaggacatgtgactcaggacttgcatgggaggaggaggaggagggaaccacaattcttgtgagagaaacacgtgcacaaagacacaggacaggaaagctccatatggcacaccatttagaattaatcagtgatttcagattgatgtgaccattggaagatttcaagtatgcatcactaaacttgaaaaattagtaaaacaggaataat

SEQ ID NO: 207617 - DNA, 1026 bp, Homo sapiens
tgagtctttcctaaagagtatgataaatgtttctttcagcggacttgagagatcaagagattttttttctttttttgctttatttatttatttatttatttattttttgagacggagtctcactcactctgtcacccaggctagagtgcagtggcacaatcttggcttactgcaacctccacctcgggttcaagtgattctcctgcctcaacttcccaagtagctgggactacagacacacaccatcacacccagctaatttttgtatttctagtagggatgggctttcactgtgttggccaggctggtctcgaactcacgacctcaggtgatccacctgtcttggcctcccaaagtgctgggtttacaggtgtgagccactgcgcctggcggagatcaagagattaacatgaacatttttaaatgagcattacaggtgtatattcaagtttactacattgtaaatagacttcctttaatttgatctctctgttgtcgtgagccaaaagaaggttgtctagtccaaaagaaggtctcgccccaatttgtgatttagatttactaggtctgcagtgtatatgttacaggggattattaatggaaaagaattgggccagcacaagacagttaaaaccacccatttgtgagtcaaagaggaaaaaggtcatcttaggctattaatggtgaaaccactagatttgtatggatgatacaaaaatattcacatagaaatagctagtatagtcatttattcctcatcatttcaagtattattctgtatggaaacagacaaaaggcactgatttctgtctcccagtactgaattttggtttagttccagtggttttcatatttctaatatcttataagaaatcccagtttaggccgggcgctgtgactcacgcctgtaatcccaacactttgggaggctgaggtgagtggatcgcctgaggttgggagtttgagaccagcctggccagcatggtgaaaccctgtctatactaaaaatacaaaaaaattacatgg

SEQ ID NO: 207618 - DNA, 360 bp, Homo sapiens
taacatccatgcacccaccatccagcttaagacaaatcctcacccaaagacttggagctccatgtggtctttgccccagagctaactattgcaccaaattttggatttatcacttccatgtactttgtggttataacagtcacgatcacaagcaatatgtatttcttttgcctcttttagctttatacagtggaagcattctatattaatacttctgtgacttgcttcttttgctcaaattacgttagtgagatgcatcaatgtcgcgccatgtaaactgagttcattcatttcactgatgcatgtgaataagtcacattagattgatctattcttttgtcataggacatttggatgttt

SEQ ID NO: 207619 - DNA, 458 bp, Homo sapiens
tccttaaagaatcctgcaaagtagatactattttacagaaaaggagactgaggtaaaaagagttaagtcacttgtttaaaatacaaggctagtaagtgatggggacacaatttcaaccacctggttctaaacaaagtccattcaatgaactaacactctactgcctccttttacctgtgagagatcctatccactatcctgtttgccctgacatcctgaagtcattgatttacctttcttcctttatgaccttatttacagcagctggttctggattttacccaaatctggatgcagtaactgctttctataaaaagtgagaagcagaaaatctctatagatttatacataattacaggggtctatatacgggacattgtcacaggggatgtgacaaccaaagtgaagagagatgtgaagatgtgaggctgctggctttaaagagaccatgagtaaag

SEQ ID NO: 207620 - DNA, 346 bp, Homo sapiens
cacctgacagtctacagaacctccatccaccatcatatccactgatgcaggccagacagatgtctactctacataggaaacagaggcaaatcaggcctttcagtttagtctctgagctgccagttgtccctgtaactcaccagggagtcataaagcagaaaatgctccaaccaccaggtgggctgttcagcctgaggccaggtccctgtaagctgaccctccctcgtctaggtgatgagaaaagtcctaagatgcaggaacctggctgtcctggagacaaacttttgattccagaaatgtcccagaacttaaagcaatgcctaggcctgcctcaccagcccaagtt

SEQ ID NO: 207621 - DNA, 339 bp, Homo sapiens
tatgatgttcacacaatgaccaatctgcctaacgatccatttctcagaatgtatccctctcgttaaaggacacatgtctgtatggacatcattgtccttagactttggaaaactacacataatggaccttggaatacaggtatgatattggccaaacgcggtggctcaagcctgtaatcccagcactttgggaggctaaggtaggtggatcacttgaggtataggagctggagaccagcctgaccaacatggtgaaaccctatctcaactaaaaatacaaaaaaattagccaggcatggtggcgtgtgcctgtaatcccagctacttgggaggctgagg

SEQ ID NO: 207622 - DNA, 291 bp, Homo sapiens
attctaaggaaatgaccagggattcagacaaagatttaatgcatgaggttgatcatttacagcattgttgatgggagggaaaaaaaaaaagggaaatgctcgtttttttttttttttttattttgagtcagagtctccctctgttgtccaggctggagtgcagtggcgcgatctcagcccactgcaacctccgcctcccgggctcaagtgattctcctgcctcagcttcccaagtagctcgaccggggattacaggcttgcgccaccgcgctgggccctgccttcagggtg

SEQ ID NO: 207623 - DNA, 295 bp, Homo sapiens
ccagatgcccttctctctacatctgcctggcaagcccatctcggacccagcgtggctttctcatccactctgaggccttctttgctccctgcagacacagctgagctccctttcctccaggcccccaccgtgcacactcctgaaaacatagctgcaaatttgattgtgccaaagcggaaggaaagatgggcgtgctatgagggaggcacgaaggtaaaatccttagtgccagctctctgttgagcacagccttagacgatggagctctggtatttcgcacaaggttttgctttat

SEQ ID NO: 207624 - DNA, 317 bp, Homo sapiens
ggcaggtctactggtgatgaattcctgcagcttttatttacctgggaaaatcttaatttctccttttttttgcagtggcgggggctcagctggagtttcactcttgtgacccacgctggagtgcaatggcatgattttggctcaccgcaacctccacctttcaggttcaagcaattctcctgcctcagcctcctgagtagctgggattacaggtgtgcaccaccacacccagctaatttttgtatttttagtagagatagggtttcaccatgttggccaggctggtctcaaactcctgacctcaagtgatccgccca

SEQ ID NO: 207625 - DNA, 155 bp, Homo sapiens
tcagttttcacagttcaccggctgccatctgcacccaggtcgtgtttagaaacccttgactttatgctttattgactccactgggacaaaaactaaagtatcaaacaccagtgggagcatttttcagaggtaaacagtggtaacattttacacat

SEQ ID NO: 207626 - DNA, 476 bp, Homo sapiens
ttatggggctggtgagtccaagtggacatttcatagatacatctccagaatatcagggcttggaagtgaccttagaccctgccagctgttcccaccttgtctctctactgaagatccctgttacaggttctcctcactttcacagcctggacatttcccagagttcttcatggaagcaccttaatgagtgttccatggataaagaataccaacgcctgtaatcccagcactttaggaggccaaggcaggcagatcacctgaggttaggagttcgagaccagcctggccaacatggcgaaatcccatctctactaaaaacacgaaaattagcggggcgtggtggcaggcacctgtaatcccagcaacttgggaggctgaggcaggagaattgcttgaacccaggaggcagaggttgcagtgagccgagattacaccattgcattccacctgggtgacagagtgagactccatctcaa

SEQ ID NO: 207627 - DNA, 219 bp, Homo sapiens
tagaagcattgcaatttgtgcttgatatgtttccaaatgactaagatgagtatgtttgatcaactactatttttgaggtgatattttctttaaaaatatgctcattcctaacctggaaaataggtaccttttttagaaaagtgtcgatattttggctgcatttcaaaactgggcaggagattaccagtgttcaatctaccagtcatctttcttcaaact

SEQ ID NO: 207628 - DNA, 169 bp, Homo sapiens
agttttaaaaagatgcatgttctagtcacctcccttttgtctcttcggattcatttgtttattgaatgtgtattatgtgctgccctctgtgctcgttttgtgtaaatctcacagccagccccaatagggatgaggaaacggaggctcaagatgtggcagttgattaccc

SEQ ID NO: 207629 - DNA, 321 bp, Homo sapiens
tttgtctttattcacaaaggtaatttcaagagctcttgtgggttccacttctggcatcccgctcctcagatacctactattaggcaagagcagagaagtaaagtgcatttggcagcagtctctgcctttcaaagcagagctaaatcatgtaaaataggttattttccatccaggcattctcttgagaaagaaaaccctgtgtgtgtcttcccccatactctcacttcttgccagttcagttgaaaagtgttcccttaatgttattaaataggtattttcactcactgaagtggattatttgatttctgcacggtcttaaga

SEQ ID NO: 207630 - DNA, 353 bp, Homo sapiens
acagaacctgggtagtggatcttgctctactagctttatgagctttgatctgttttcacctgtctgggccttggtttcctcgtctgtaaaatgggtataatcaaaccattcgggatcattcaagataagtatgataaggcaactagagcacctaggacgttccctgtacctgagcacctgccaccaaatggaggtattaaatgagttcaagtgacatgctgtgtgcagcacagactcaggacctggcttttgcctctcaagacagaagcttcctccctctcctcctgcccagttaaagacttcgcccagcagggcaatgaaacggggaggggagtcagacagggatgaggtgt

SEQ ID NO: 207631 - DNA, 615 bp, Homo sapiens
aataaaaggaagatagaagatatgatctctcttctcaagaagcttataatcaatccatttaaagatataaaacaagtatttagctagattccaattcagctaaatttacagaatgcctacttcatgacaggaactacgactgatgttctcacatacaccactcatttaattaatcttaaaataacagtgcaaaaacatggagcctggaaagaagtaaaagagagaataaaaagatcttactagaaaagtcctgtgagaagcagtaatacaaaagtcacaaaagtgctaatcttttttccctcttacattttagcagttaatatctgtagtttcataggtataacacaatagcattaaaaagcaaattggtgaatatatttcttttttcaaaagctataattggggatatttcattggagaaaagaatgaaaaaagtagtcaatatgaggtctgtgaattatatgtggatgcccttgttactacagacaaatgaaaagtgggaatgcattgctttatgcttctctcaagtctcacatttctggcttacatctaaaataggtaaactgtatccttttaataataaaattaatatatcatttatcaatatgtgtctta

SEQ ID NO: 207632 - DNA, 369 bp, Homo sapiens
tgctgagattacaggtgtgatcaccgcacccagtctgcttttgggagtttaaattgaagcaaagttttggcaaatagttgccattctctactaaggttaaagattcacacaccctattcacaagtggagaaattctgatgtgggaaaatgccatcaaggcaggtgtacatgcatatgctgtggaccaggatgtatacaagaatgtgtagagaagcagtgtttgtaatagccccaagctggaaccaaaccaaatgctggcctgtcatagaaagcataagaattagagccacttaacaacagcatggttggagttaataaatataatgttgaagaaaagaagcaagacacaaatactcagagtcagggtcc

SEQ ID NO: 207633 - DNA, 338 bp, Homo sapiens
tgagcccttgagcttcagtttcttctgaaaggtgggcagtacttagcacttaggtttaaaggattcagctggttaatgtgaaacattcagctccagtattatgtctcaaagtcactgtgtcagtgaaccggcatccctcatcgtggaaagactgtcttaaacgagtgctttattctgtccgtacgtcttccacttgtgaattacaactgcaaaaatgtatctttctatagtaaggttgaagtgaagtgaagctatttccccgcttcggattctttggtctttccggagctgccaggggtctgtgaccccatttggtaaggactcagtgccgcacactg

SEQ ID NO: 207634 - DNA, 388 bp, Homo sapiens
gccaacgtgatgcaggcagaggtgtgaaaagagcattcaccttaggacttgccccttcctcctgctctttggacccccaagaccaccaaaaaagaggcttgggctagcccctgggagaatgagagatgacatatcatgaagataccagtcccagctcaggtccttggaccaaccaacctgccaaagctagaaatgtgagtgctgccacaacacgagggcatcctgagtcggcctagctgtaggctgacctcaagacctaccacctggtctagaccgaaggatcagacccaaggtcccttagaattacgagaaatagcaagtgtttcttgtttcaagccattaaattttagagtaatctgttatacagccaaggctaacaaatatattt

SEQ ID NO: 207635 - DNA, 517 bp, Homo sapiens
gtatgaggggatagatgccagtgagctcttctaagagggatatttcttcgacttctgggcattcctcatgcttctcttaaaatgcctgtaacagaagaaagaatgcttggagctgctttggagatttctgttgtctatccctcagccaaccagactgaatagtcctgccgtacagcatcctgtgtatttgaaacttgtcacccttaataaatactgatttctgaagtatctgagactatagtttgtttacttcaggtagttcctcagaagggcaaccctcagtgagagattatacaaacgccgagtcagaattttttggggggcaagaagaagactctttctattaacctccagcctttgcaaaaattgttagtgtcctaacacaagtaattgtagtagcgagaggactcttggcctaataattcaagtcaaatgagaaaataaaatggaagtcttcaggaaaatagaggacttgttattttatagaatttcaataaaatatctagaagtcttcact

SEQ ID NO: 207636 - DNA, 1043 bp, Homo sapiens
gaagaaaagagtttcccatacgtggaaaatttctgaacagagacaagttaaaagtgtggttcagtggagagaagggggaaagatttcccggctgacaatgatagaacactgctttctagcccttacctaggattagagaataaagtacctatcaggtaacaaatctcttagagatgtgtgtctctacctttaatgtataatacctatgcctggagatctggataaaatacagattatgattcaagggtctgggtgaggcttggattctgcatttctaacaagctcccaggaatgctgctggtccatgaaccacactttgagtagcaattctagaggttagggaagactcctgtgtagcaaagatgtttaggctgagagctgaaggatgagaaaaatgtgactaagaagctttttaggtgcaggaaccagcttgttcaaaggcctcgtggcgctgggaaccctagaagaaggtctgtggctggagtgcagagagtttggggaaagaagtgagatggaactacagacagcatgtgaccaggcatgtagaaccatgtatgaggtatctagatttttaatattcactttgacagtgaggagacaccactgaaggctggttagcaggaaagatacatgatcagatctgtattttgaaaagatcattctatctgactataaatgacatatgggtgataaggaggtataaacaaagcggacgctgaacaccagttaggaattagggagctaaagtggtctttgcaacaggtagcttgactaataatggtagagatggagagatgtgggatgtctgagaatatataggaagtaaaatgggcagaattttgtaaagaattcaacatggataaggaagagaaagctctaaaggctgttgcctgagcatttggccacaatgcgatgttgagggtgccattcgctgcagaaaaaagcagtggaagccaaccaagttatgggggaaaagcaaaaatttcgtcttgaacatattgagtttgaggtccctgtgagtcatccaaggtgaaggtcaaata

SEQ ID NO: 207637 - DNA, 414 bp, Homo sapiens
aacagccggaccgctcgcgttagttgtgcagaaatgtaagagccgctattcataacagccaaaaggtggaaacgactcaaatgcccatcagctgatgaatggataagcaaaatgtgatctaaccatacagtgaaatattcttcagccatgaaaaagaatgaagcactgatacctattgctacatggataaaacctgaaaacatcaagctaagtaaaagaagccaatcaaaaaaggccacatttatatgagtccagttatgcaaactgttcagaataggcaaactcatagagacagaaaccggtgagaggttaccagaggctgggggaagggaggactggggaatgactgcttaatgggtacagtttccttttctatgtaatgaaaatactctgaaattagatagcagtaatggt

SEQ ID NO: 207638 - DNA, 621 bp, Homo sapiens
  misc_feature (1)..(1): n is a, c, g, or t
  misc_feature (54)..(54): n is a, c, g, or t
  misc_feature (178)..(178): n is a, c, g, or t
naaggcatgtgcagcctgtccctcaatacccagttttgcacaggaagatgctgntgctgccctgactgggatgagggtaaagggtgacgggtgtggccctggatgtggtggttttcccttggccattagcccatcttcaatgaccccttaatctgcagcagctcacaggctgggggtnaggagtccctggcttctcttagcctgagcctttctcccaagttccagagcctctccgggcctcagtgctgccatctgtacaatggtggagtgagtacgctgtaaaggaccttccattcattttgctgaattccagagtccttttggaaaactgactttagtctgctgggctgtattgacctctggcaggctcgaagcctcactgggtatgcagtcaacaggatgggcctggagatccgtgaactgcaggccacgtacccatgacgtaaacggcggcactggagcaagctggggcggggggtgggtaaaccctcactgccagcaggccccaagtggcttgtaaatcattctcctgtgatgtctgtgggcctgcgtggggacaacaggggcacatgacatctgcctgggccctgaccaataaaccctcagacccaggacccagga

SEQ ID NO: 207639 - DNA, 632 bp, Homo sapiens
agaaatcttagtcatcatcatctctaacattacctatattgcttagccacagcactcatagaataaatatttactgaattcttgacaatgtttattttctctacatctatatgtgccaggaacaagtaaatcaaccagaattttaaattatacttcagtcttaattagcctccagtaaaatgagaaagtatatttataaataggacattcctcaatagtgctacacttctgtggaactttcttcctgtacacttgagctgttttaagtactactccgttttcagttaacagtttccattttaaaatcactgggggtttttttgaaaatagaatgaacacagttctcttttggtgaggacccaagaacaagtgtcaacacaaaccagcagctaggcactagaagaaaaaaacttaaccagtcccaccgcacatttaaatcccttggtctccagagacattaagaagctgctctatcctaggcaagacagaacagttttactgaatcagaattttagtacatctgcctcaatgaggtctttgatagaaagtaatttaaaacaaagtttcatcttgtatgtttcattgacttgttcatctccccgatatatatcgctaatgttagagaacaatgc

SEQ ID NO: 207640 - DNA, 571 bp, Homo sapiens
cacccatccctgtattctcttagctccaaaccacagaaggtaaaatcctcgtgagtgcaaccaggggatcataggttcccatcctccacccaccgcctattcatatagtagagactctactccaggtgccacaagttgagaatattagagccttgattgcccttatcccagctcattcatacggcagagattccacaccaagctcccacttccactcagtgtctgactcataaagtaggggtgtcattctgagataaatgggccgctttccctgcctacctctctacaacaggagctcagatattttgcccagcggggagagataatccaaaagaacagagttctaaagctgtccccacaggaacgaactttatttgaaatagagtgtgtgaaaggacagcctaagattgctctcaagaacaatggagaatttagtggtaagcaactaaaaggattctggtaactccattagagcaacaaatgaacccataatgcagctagtttaccaggaaaaaacagaaaacaaacaaacaaacaaaacaagaaagagacagctaagagcagcccttct

SEQ ID NO: 207641 - DNA, 505 bp, Homo sapiens
catttaataaatctggattaattttaataaagtagacaaattacctaaaggttagaccattagagaatcagtgtaacaatcaaaaaggataaagacagaggagaagccttacaactacattttaatcttttggttttcctgaattttgaattttaacaaatgtctctcaaatgtctgggtattcttctacatacactgtagcaacaaaagaagccatcttcaactatgaaaagttgaacaggatgtcacagaatttcatagtttaaaagtctgaggtctagattcagatccttgctctaatacttaagctacttagctacttagtaagctatgcgacacctcaagtcactttacttctgcgattcagattcttcattgatacctaaaccttattaagtttactacaagaattaaacaattcaatacaagtgtagttgcttgaaatgtactcaaatccatccattaattttgttcagggcactaggcctatttttgcttggttgca

SEQ ID NO: 207642 - DNA, 295 bp, Homo sapiens
tacctcctttcatccttccatattctcccttttggaatggcactgtctatagccattatcctatggctgtcctgccattgcatttggggtgcagagtacttgttttctagtttcacagatccaaaaatggagaagaattttgtcccaggattgatcacacccaaagtctcacccataactgattagatgatgacattgggacatgtgagttgctgatcttcagctctgattttggacttgaattgttttgcagggttgagacttttggggatgggggaatgaggtgaatgtattt

SEQ ID NO: 207643 - DNA, 566 bp, Homo sapiens
caggcattcatatcaagaacagaaagtgatttcttcttgcatcatcctctaccacccaaatgcccacattgtttccatattttttctaacatatatcattctcccagtttcaaaacaaaacaaaatgagaaatataacttctgatgtctagagctataccatccaaaatggtagccttagccatatgtggccatttaaatttaaggtgattaaaaaaattaaaaattagccaggcatggtggcatactcctgtaatcctagctactgggcaggctgaggtgggagggttgcttgagcctgggaagtcaaggttgtagtgagctgtgattgtaccaccgtactccagcctgggcaaaagagcgagaccctataaaataaaaaatcaggtctttcaaatcagaggttgaaaacggctctgcatttatatctttctttagaaatattttattaatctgaaatattactgacaaaactaggaggaatttagaaaactatacctctactaatcttttttctcttcttttgattttttttttttttcccttaagacagggtctctctctgtc

SEQ ID NO: 207644 - DNA, 228 bp, Homo sapiens
taacatttcgacctgttaaataaaatgggaagccacacttcataccaataaaagtagatactgaataaattaaaagtttgatgagaaacaggatatttacacagtttcaaagtactctcccacaaaatacatattattaattaccattattacatacatgtgatacaggttcattctgcccgcatgccataaatccatcactgtgacaggttttgtaaaagagaaaag

SEQ ID NO: 207645 - DNA, 428 bp, Homo sapiens
gctggttaccctgtggaaaacttcacaaccccttctcttccaggtaggtgccttccttttctatgtgcagccactggctgtctctgagacatattttctgggttttcccacaccagcttgctgcttttgctgtgtctacagacccctctactccctacccactcctaatctaccctcccttgcagtgtaatctgggagtggctgcagatgtgacgtgggatgcagtcctcacatgccatataaagagaagacccaacagtaacacccttgagccaaaatttcagtctctcactcaagaaaagaattttcaatgtgtctcctggttaatgtgaaaattggagtaatggactcagcttctggttcattcttggtgccctggccaaaactttccctctatgtgatttaggatttctggaagatggggccaa

SEQ ID NO: 207646 - DNA, 441 bp, Homo sapiens
tgattcttgcctcataaaattcttgtgaccaataaatgaaattctacacatttttatgtgtctaaaatcccaagactagtatctgacacatggttagctctcaatatattttagctactgctattatcattattggtagtactattaaacattttgaaacagaaaatcacttggggctggtcacggtggcacacgcctgtaatcctagcatgtggagaggccgaggcaggtggatcactggagctcaggagttcaagaccagcctgaccaaatggtaaaatcctgtctctaccaaaaaaatacaaaacttagatgggcgtgatggcatgcccctgtagtcccagctactcaacagggtggggtaaaaggattgcttgaacctgggaagttgctgcagtgagctgagatcacactactgcactccagcctggatgacagagc

SEQ ID NO: 207647 - DNA, 375 bp, Homo sapiens
gccagtagcatccccactacccccttgtcacaatttaaaaagtctccagacattgccaaatatctcctgggcaaaattatcactgctctaaactttttgaagtgcacatattaccatgtcatgcctcctcctttcccccattgagagtgactgaatgatagtgtcaaccattttaatgtgtcacacaagactgaccttttcccacttttcctgccatgtcctcacctgcactttgtgctctagcttagtacaactctttggcagttcttagaatcagccatgttggttttcatccttttgtctcctcacatgttttatttctccctggaatgcccctctgttttctgtacgttgtacaaatatctgtttatcctt

SEQ ID NO: 207648 - DNA, 329 bp, Homo sapiens
ttttaaaaatcggttcttattatgctgcctagaccagtctcacctcctggccttaagcgatcctcctgcctcagctttccaaaatgttaggattatgggaatgagctactgtgcccagccttcagtgcttgtttacagtatgacggatcaggctggagggaaccctgtcgcactaattgcaagtaagcatcattacccgctacttttgtctcaagaacactgtgcactgaggaaggacatcgcaagtgctaaaagtcgaatgcgatgccaggctgcagattgtaaaggtgcatgcaagaggtggcagggctcagtggtgaaaagttctg

SEQ ID NO: 207649 - DNA, 1203 bp, Homo sapiens
ccttcggcctttttaagcacatcaggagcttaacactggcccagtgactgtgccctgactccacccggcattcagacttgggttcaaattcccaccatgccccgccccctatgtggacaaattgagaaagcaagtgtgggcaccccaccagggactgcgaggaccagggctgtcccctctccaaggtgctgaactcccgccttccaggacccaacggtggtgggaggacaggaaaggaaccctctttgcatgggcctgagttgccaacccctttccccaccctgggcaggggctgggctagcggacgcatcagggagggaggccccactcccagccgaggcagccaccttggagccctaactcacccgggtatgttttctgggacaccagagtaagggggattcagtttcgccatcaactctggcttcaggccagtcatagccctccagtctccacctgccccccactccccacccctgtgaattcaccagactgagcaccttcagacctttggcccatcagcagatctgacctcaggctaacttctccaggccaccctgacctttcaaatcagtctggggagctggcgtctgcccccgggccttcatagtctcagggaaggcccgagaggagcagctggcgttcaggtgggttggcaggggctatttctggagcctgacaggccaggctgcagctgggtgggccaggcactttcatttaaccttcacaaccacctgcccgccaggcattgttcctgctgcacagaggcaaggcgatgtgcctaaggacacacagccaatcagcagccaccgtccgacgccactccaccctgctcaccccagggtctcctgcatctcaggccaggcactctggaggtcccggcatggatggtctctctgacatctactccctggccaagatccaggcagggaatgctgcccccttagagggacgatcccgtgaccccctaagtgtgagggcctttccccaagggctctggaatcggtccagatctcaatctcaactctgcctccctcagctctgtgacctgcagccacgcaggccctctgccggttaccccgatgtcagagggggagcacaccgtccctgttaggaagctttggtgagaagcacgtgcgacgcagccctcaaccagtgccggcccgagagaagggagggtggaccaggttgtggaaacagccg

SEQ ID NO: 207650 - DNA, 252 bp, Homo sapiens
gaaaaagactgaagattgggagaccagttagggaactataaaaacaacaaaggtaagaattaataaggggtggagttaagaaagtagagtgggcaagggcaacatatcttggatgtttaggaagcagttctcaaagtatagtccatggatcctgggggtcatcaagaccctttttaaggtgtccattggtgaggtcaaaactattttcataataatatcaaagtgttatttaaatgttatttgacctctttc

SEQ ID NO: 207651 - DNA, 696 bp, Homo sapiens
gtcttggcctcccaaagtgctggagttataggagtgagccaccatgcctggccccataagagttctttatggggataaggaatctgtcacttgaaattaacctgaatcaattaaaataggcacaaataacaatgtcttgatagtcagatttcttccttcttccttccacctgctttcctcttagctgccttcttaatttcaagtaatagaaatggagcttctattaatataatgtatctcaaagttggaaaagcgacagatactcttttggtctaacaaagtatctactaaaaagaattgagaaaatcagtcattttgtattgcaaaaattactctccttctggcatacagtagataccttatcagattctcccaacattcaggagcatctttctccatttcattctatttctgcccccattgataagcagatatgaatgaaacagaaaaagcctgataatccaagctagaggccaggcattagaggaggcagaaacttggtggggaatatgaacaaaagagataagaggaccaaggaaaaatactgggagtgggccaatagtaaggtttaacaggaatgctctctcttgagcatagtgctatccacacagtatcttctgagggccttggaataaggcctctgtatcagcagactaagcccaggaacaaacagagcaagttatgtctcatcaacat

SEQ ID NO: 207652 - DNA, 449 bp, Homo sapiens
acttttttttaagcaaattccagctcaaaaaatgggttctgatatattcgagcttaagaaagaatgcccatttgtgaaattccagaaattggtaagctgctaaggacatttgttcctttgtctcctctcctcccccttccccttccccgactccattttctgtggggatgttgtcaaggcccaggaaaccaaaaatcaaattgtctaaggaggaacccattcctggattagaagattttagaaccattttgtcacagggtcctgattctagctctctttcttggcctctcttttccatgaaccctcatggcctgattcctggtttctgttataactcaatgtaggttctaggtttaactcctgcctgtatctatagggctgggcccattgtcttgggttaattgaatatttgttaaataaacaaccacccaaaaaagtgattagactaa

SEQ ID NO: 207653 - DNA, 271 bp, Homo sapiens
tatgtttagtgggaatacttgccaataagcctgattttctatgataagcctcttcttccttcaattggttaggccattttgttcttctctatactacaaatctgttacgaaatgaaatttcagagctatattttctgaaaaggataaatgtcctttgctccaaattcattttatttttattcctatccacttcagtttgtataaaatacagaattctaatcttcaccagcaagaatttgtggtttttcctaatacaaactggtaactgtaa

SEQ ID NO: 207654 - DNA, 513 bp, Homo sapiens
aagggtcttggaggtaagtgatcattcagcttccaacatcctgatttttacagatgtagaaactgagggacagaacgtttcaggggtttgcttaaggcaagaaaattgtttagtgacaagggtagcaccagaatgcaggcccccttaattttgccttgatctgcagtctttcatttctattctcaggcacccttgaaaattcaccagccacaaggagatccttattaatggtgtttgttatgggatttctcttagaattcttcagtaatctgatgaaaacttggaggacaacctttgcaaaaataaatgataagtaaataaataaaagcatgtacacaatttgttatatggtttcaggggctgacacacacctcccgctaagggcatcctcagacttacaaactcttgctctgggagtttacattttgcctgtttgtttagttgggtaggtctgtggagctgtttagtctaagtaggagttttttgaacctttcaatttggccctaaggggtt

SEQ ID NO: 207655 - DNA, 431 bp, Homo sapiens
agcagggctcagatcaacacccaggggtcttagcaccatcttagcgctaggccagggtgtgtgtctgcgtggagaggctcctctgacctctccccaggaggcacattaaattgaacctcggaggatgagtaggattcagacacaggaagacaaggaggtacagggagggcatttctgatggcaggaacagcacgggccaaggcacagagctgagagttcagctgagggcatggatctgtagaaaaccgtttaccaaacggagagaggccacatgctaacgggcatactacaaatcaaatgcctctcgttcataagttcagggaacactggagtaaatgtgacccagctcgggattctacattgcagggcttctcagggtctttggggtgctcgtgtggctgagtagccagcaaagctctggtctgcaggga

SEQ ID NO: 207656 - DNA, 454 bp, Homo sapiens
tgacctgtcagttcttgtcagtctggctccatggaactggagaagcttgtgtaacaaaatggagatatttggcttgtgtaacaaaattctgacattctgtcagaattccaaggtttgtgaaaaacaaagcaatgtggtggggctacagagtcatatatcagatcacaggcttcagagagctacatgacagagccgctctagagaaggagaggggaaatggttggagaaaaggaagctggcaggtggccacaccctccttggaaattgtcatcggtctcccccgccgtattggaagctccagaaagacagggattatgtatgtcttgttcactaccatatctattgcaattagaatagtaattaaaacatagtgggtactcaataaatgaatggatgtgaccaacccctgccctttgaccccacaaatattcaataaaactgcaaaagttataaa

SEQ ID NO: 207657 - DNA, 154 bp, Homo sapiens
caagaaactgaaatgtaagtgaagatcttggactgtagggaaagggtgagacgattcaagaagtgaacctagcaacaatcaagtctccgatgttagaggtgcagatgaacaagatggctaagtggtttctccctcccttggtcccgagtgtgtc

SEQ ID NO: 207658 - DNA, 445 bp, Homo sapiens
catgtcagagaactgctctggtgactgatcattcccggagatattcattcagcttaaccaatgcacactttggttaaaactccacctcatttatcactaaacccccataagtaccctcttgaccagtggaccatgtgactttctgattctccagttaagattattagctcagagccagtgtcccacagtcctctaaagtcttcatatttctgtttcactatttcctagcagctttggtaagtagcctcccatcccttcggggaaggccgaaaggaaggtacttgtggtattattgcaggatccttcctcaacaataccaagcttatgcttgtttcaagtggtacaaaatcaatgctgtgcttcatgctttgcctattatcatgatggttctggtcaggtatccaccagacttgggttttggttaggctaatgaagtagcccctta

SEQ ID NO: 207659 - DNA, 625 bp, Homo sapiens
gtgagtaattcaagagctgcttctgctaaagaagccagaataccttttttgatgcagtcttagaagtcatacactgtcacttctgccatactctgctcactagaagcgaatcacttaagtgaagccatgctaaaggtgaaggggattaagctccacttctttaagggaggaatatcaaagaaattgtggacatagtttaatatgaggaaacttaggaagggaaaggttaagtgatttgtccaagtgcataccttgtgagttgcagaacctggatttgaatcccagcagactccatgtgtttttggttgttctgtgaaccacatgctttgagcacttaacctcttgaatgcatattcgaactcacaaggtttggtggcccaagcctgtaatcccaggacttggggaggtggaggtgggtggatcacttgatcccaacagttcaagaccagtctaggcaacatagggagacctcatttctacaaatacagaaaacaaaaaaattagccaggcccgctgtaaactgccctgacgctaccctgacgctgtactgccctgacgctgtaaactgccctgacgctgtaaactgaccctgacgctgtaaactgaccctgacgctgtaaactga

SEQ ID NO: 207660 - DNA, 1019 bp, Homo sapiens
aatgtgccagactttccagagaagaacagtccaggagaccctcagcataaagtctcctgaaaacaacacagtctgacagtcctgaaggccagccctgtctttgcagggacttgtagagaacaccattcccagctccccattttacagaagggaaaactgaggcccagagatcggatgaagcttagcaacacaagcaaaatctgtattgtccatggctgttcagaagcattgcggttacctcaccaggcagtgttgaagaggctatcacagaagcctcagggtagtggttttcaataggtgcccccaaaccactggtgttcctttaaatggtccttgcaagattgtccccagctcactgaatcagcgtgcgaactcggattcacttacagctggcattcaaaaggagacacagggctgtgacttgttcacaagatcaggcaaggcacaaaccagcttgtagtggcagcttgaggatggcatcaggtggtgattgtaattatttttagagttacaagatcctgggtaaagtgttaaaatgccaatagccacaacacagagtatcttcttagagaaccaagtgagagtctgttgagtcaagtcctaggctgtggatggggactaggagatcacatgtgatagtccccttcagagcacagtctgaacagtctgaacaggaaggaggacttcggaggcatggtagccacggaaacgtgagcctcacctcttcagtgctgcccccagaaatccgccaccactgcacgtgcttcccagtgcaccatggacagcaccgctaagctcccagtgcaggactgttcctgggagacacggggccctccgagtatgcatctgacagcctggctgagcgcacctagaaatgcagtgcagtcttagatgtaccccaccttcgctgcccccctcccctgtgccctaactgtgttgatgtcctccagtgctcccagctccctcctgccctccctgtcttccctcacaggcttagtccctaatcaatctcttaccta

SEQ ID NO: 207661 - DNA, 310 bp, Homo sapiens
cagttgagaaaggttgaaaaggcagagagagagagctgcttctgcaagtgtattgaacaatcaaaggcaaataattcgttacagctgggcattctgtacatgtagattagtgagagatgactgcagaggtcagcagacctcgtgccataaagacaacatggaagcagggagtcaagttctcatacctttgggcattcattctgaaattgctaaagaagcaaataaatgtctgtctgggctttcccgccatacatgactgagaatatccagacatttctctatattaaagaaaaaggagagagcagtcatt

SEQ ID NO: 207662 - DNA, 841 bp, Homo sapiens
aatatatttgttatgaagtcttattgaaggcttgactaatcaagtatctgggcccatacagatttagttttcactgaatgctttttttcctttagtatatttcactttcatatgtttttacatgtctaataatttttggttgacagctggacattttaggtagcatattgtagcaactcaattttgttttatatctaagggatttgtattgttttaaatttagcattttgactggactcaaattgtggaatctatcttatatatgatgtgaagttattgctgtctgtgctcagtttttaagttctttatttcaatatttattcttgcttgctaggggtagttcctgtgtctgcatagcttagcagtcagccaatcatttggacaaaggttaagatcaaacacttgagtctataagccttccacccactgttggttgttctgtgtgggatgggggatgcattcattgtaggaggcagttcccaaattccccttggtttttacatttgccatgctctcttgagtctcccctgtgcatgcatcatttcagtttgccaaagatgtttggagagctcatgttacccttttctgcccttctgtttccaggaccttgttaaatgtctggctgctctgttgctcttcaagaactaggactgtaacctttggttagcaactacagatactccttgtccattcctaagtgatttttttacttttgacttacaaagttgtaggtttatacctctgctgtaaatcaagactcctcttacggcaaagttgctagtttttcagttagctacagccagacaaaactgtagtttttaccaatcaacctaggggtggg

SEQ ID NO: 207663 - DNA, 403 bp, Homo sapiens
atattctcagtgaagtttgtgacagcaactcccacgctcccactactctccctaaacccccagctcaaaagcaaaacagcccagatcaaagtgacttggcttgtttggaagaattgtttaaccatctgaccaggtatgtgggagcttttgaaacatggccgtcattgaatcaagctggggagggactgcaaaagctgctgaggagaaggcaagaccagtcctgttgtatcaacccttctgcaccctggcctagcaccatccttagaaaactcagttaaaatgtacatctcaagaagatttaaggggaaataggtcaactgcactgcatttaatttaaaagaaacctgttatgttttaaaggatcccatcgagaagatgaaaaagaaaacccacagaatgggag

SEQ ID NO: 207664 - DNA, 416 bp, Homo sapiens
agctataccaaaatgttactaatgtatcttatatttcaggcatgtctaaatcaacttttagtatgcctcaggcatttgtcaccaaccttttatattaacatgaaacttagaaaatttttgatagaatcccagagttcaaaaggtattaggatttttgccactgaagtaaaaaagagaaaaaaagatatttatgagaaaactattgaacagtgactgtgttgtacccgagcaagttagaggaacgccacactttgagacgaatttaaaagtcctttatttagctggcagccaagaggtggctcacacttggaattctctcagctccgaggaaggggcttgattttcctttatactttggtttaggaaggggacgggagctcagttgcaacaattctacagaagtaaaaacatgcaaa

SEQ ID NO: 207665 - DNA, 448 bp, Homo sapiens
actcatctgttaattttggagtagaatttaacctttttattgtcagtttgctcattttaaaaatacaggtaatatatctacttacttttattcttgaggactgaattcaataatgtatgtggaaatgctttggaaagtattgttattacagggaattttatctttataagaaataatgtcgccggacacagtggctcatgcctgtaatcccagcactttgagaggccgaggcagatggaccatgaggtcaggagttcaagaccagcttggccaatatagtgaaaccccatctctactaaaaatacaaaaattagccatggcgggtgcctgtaatcccagatacttgggaggctgaggcttgacctgggaggcggaggtagcagtgacctgagatcacgccactgcactccagcctggaagacaaagcaagactctgtctcaaaaaaaa

SEQ ID NO: 207666 - DNA, 318 bp, Homo sapiens
aacaaaaaataaagcaccaagaaccctaatgaaaaactggcaaaagacatgaatatttcacaggaaacacatatgccaataaacataagaggagatattcagcagcagggctcagggacctagaaaccaagttcccaaagattccattttctacccattcacttggccaacagcaaatgttggtaagactgtggagctgcaagacacaggacactgctggtaaagtggatactggtataagcactacattcaggaaatggtctagcaatagctacgaaagatgaacactgccgagcatggtggctcatgtctatcatc

SEQ ID NO: 207667 - DNA, 521 bp, Homo sapiens
cagttgtagcccatgaatttttttaagaagcagttttttaagtttatatttgatgtttgccttttaaaaggtcaaagttggacagtaaaagatggtacttagttcaacaaaataccaatgtagctactgtattttgatacaaattttaacatgagacctcaagaataattcatatgtacaagtttcggtttaatatctataattatattatttgtaattatagtgcaaaaattaaattggtattacattcatgaaatattgaaaaaagttgataataatattgaaagttttaataaacatttacagtgttgtccccttctaggtacttttcatgtactaatttcatccttgtaacaatagatactattatgctgtccatatttttaggagaacaataagacagaactgtttttaaatgttttgagcaggggttctcaactttggcattattaacatttcaggttagatcattctttgttgtcttcaagctgtcatgtgtattttataatatttaggcattg

SEQ ID NO: 207668 - DNA, 375 bp, Homo sapiens
tcagaaatgggcctggaggtgtggtagtctggaatgcccatgcaagggtaatatgatcttggaagcctgcagagcctgacttctatttgacacaaaaaaaggcaggttatctccggagtgggttaagcctcaatttgcaggcttggctagtgttttcggcaagccacaagccagagtctctaatgaccagtcttactgtagcaagtagacttgaggatggttgcagcttctcacctccccttgtgagatcactgtggtgtagagatgtctttttcttggtatgtaaggaacattaagaggaggtttgtctggggacggggaaaagagaagtgacttgcttcctaataaacttgtgttctctgctttctgttggca

SEQ ID NO: 207669 - DNA, 719 bp, Homo sapiens
gcaaaatatataagttatgactgtatgatcagatgaagtatgagttcttttggtttgcatccttaaatagttagagatctctgataaaaactttggaatctttgcaaaacaatacaaaaatgccaaaatgtgagcatgtcaatgaaaactaaagacaaatacttcactctttttcatactattataagttattctggtattaaatatgttaataaaagtgtttttgttttgacatatttcagttaaatgaatgaatgctggttgtattttatttgaatgagtcatgattcatgtttgccatctttttaaaaaaatcagcaaatttcttctatgttataaattatagatgacaaggcaatataggacaactattcacatgattttttttaataccaaaggttggaagattttataattaacatgtcaagaagactttatagtaagcacatccttggtaatatctccaattgcaatgactttttaatttattttttcttttgctgctttaacattttctggatattaaaatccccccagtcctttaaaagaatcttgaacaatgctgagccggcagctgaaaatctaactcataatttatgttgtagagaaatagaattacctctattctttgttttgccatatgtaatcattttaataaaattaataactgccaggagttcttgacagatttaaaataaaagttaatttctagacctcga

SEQ ID NO: 207670 - DNA, 400 bp, Homo sapiens
caaaactgtttctaattatttttaaataactagagttcaatctaatgtaaactatatacaaaagccagatagcaatcactaactttgttacatcataggcatagataattttaatgaaacatatccaccaagtatgtccaatttctctgatgacagtgctaacttacatgcgcatcaaacatttgataaatgaatatgttaatgactgtaatgtcttttctgggaatgcctttgttggggctcaacacattgttaaggagaagaaagcagatgactgagaggaggtttgtaaagtggggatggggagagtagctggaagccatgaacaaattcattctcagaggcacagatccccctacatgagctaggacctatgctaggagctagattcacagatatg

SEQ ID NO: 207671 - DNA, 763 bp, Homo sapiens
cacagatgagaggtccagatgtcaaagagaaagtcagttcttgacatgggatttgggaagctatgttccagagaaaatagtttttgggaagctcagtttcttttctcttgctctcacataggggcatcttctttatgctcttaaattctctaaaaattctactttcccatcagtgatcttccttcaagtttactgtaagccaaagtcctctttatggcttataagagactgcacaatctgactgatgttccattgttttagggacacacaaatatctgcaaaattttgagaaactgttattttttaagttctctttctacatcacgtctgaaatgtgtgtgattagtggtttcttttccatttttttggttcatttttctgcacatttcatatttttattattatagtcttttttgatagtcgaaatatagttcgaaattataaagtataatgtccttctttgttctttttcctccagattgctttgactattcaaagtttattgtagtttcatataaattttaggattttatttttcattgctgtaaaaaaatgccactggaatttcgatagggagttcattgaatccatagattattttggataatatggcactttaacaatatttatgctttcaatccatagacataaaatactttaaaatttatttgcgttggccaggcacagtagctcacacttgtaatcccagcactttgggaggccaaggcagggagatcacttgaggtcaggagtttgagaccag

SEQ ID NO: 207672 - DNA, 639 bp, Homo sapiens
atatcttatattttctactttcattctggtggtttggggcccaaaaaaacttcaattcagtcacttgaattccagatattttattttctaggaaccaaggcctattctctttgatcatgaattttataagattggttgtctattgccacctgccttcccatagtgtttttgtttttgttgtttgtttgtttgtttgtttctggtaactagcatagcatttagtaactagcatttgataactagcatagcaggtaggctctcaattaggcattgtctgtggtattcagttcttcagcagccttgtctaaccaaggagttaaggaagaattcaaggaaacacacacatccattttaagtagtaaagagaaaacatcccataggagttcagagaaggagagtgtgatttggaggattttatgaaggggtggaattttggtgtgcactgagatatggttgcaattttgtcaaaggagaactgagggattttaagggaagaaaatataagacaaaacttagaggtagaagagaccgtgtcttctatgggcaatgggtagtagccatatattgaaaattttaagggtgaaatttgctgtgctaagtaggactaagggtttgactttgttgtagagctgattgtga

SEQ ID NO: 207673 - DNA, 492 bp, Homo sapiens
ctcagtatgattgatgcaaaaattgaaatacatagagtgactaagtgtgagaaaccaaagaaagcttcaagagagaataatatttgaacatagtattcatacaattataaggagattaccatgtgaaaaaggtagagctatttatagattctcattacaattgttaaaatgccaaatttgtttctagatggtagttaacttgaactatcagaaatcagtagttccctgtgtttagtgcttagagctttccgttttcctgtattttgtgtattttgtttgcttgtttgttttttcgaactgattttttttctgagtagacaaactatcattgcttatcctgaaaccttcttaaggtttctcatcatttttgttctttagcctttcaatgaaagattatttctttgctgaaattttgtgattcagatgccatgtacatttgttgtatttgtctgtacatctacatcttatgaataaatccatgttttcttacca

SEQ ID NO: 207674 - DNA, 377 bp, Homo sapiens
aaggacagtgcccccgtgcagttccaattcagagacagggtctcaatctgttacccaggctggagtgcaatggcaccatcaaattacctatgataacctatttaataaaccagtgttatgtacctgaattggagaagcataaattggtacttatggtattaaaatttgtatttaagaggctgtaattccagtgtgaagcatgcactcatggagacactggatggccgcctgatccttcctgagttcttaaaatttccattactaaaagctctgcattccacgactcatcatagaagagataaaatgatccaaattatgaaaaaatattgatgaggtgactgttctaatggtttataactaatatttgatttatcaaa

SEQ ID NO: 207675 - DNA, 409 bp, Homo sapiens
tttaaatgttcgccttcaatttatttcataggtcactgttataccatctagtaagataattaaaaacatgcaagcagctggtactacagctaaacagattaatgtaatagtctgtagtcatatgtgctggcaaggggcttgcctcttttggcgaggagaaggtcagctgcccttgggaagaggaggagaggagtggcctgtgctacagtcactaagttaaacatcttcagcaaactgataatcaggaaatgactttccttctttcacacccattcatgttcttctctcagttttaatggttaaataaggaacagagaaagctcatataatttggcagacaacattaacgttggtctttaaaaagtacaagatatatttcacaaaaccaacaatgtcttctcaagtctta

SEQ ID NO: 207676 - DNA, 556 bp, Homo sapiens
tgaataattccaacagagaccatgaggcctgtaaaacctaccatatttactaccaggacttttacaaaaaacatgtgccaacccctagaatattcaggtggtagaattctacctggccacaaaagccatcattaaataaaggatatttaatgacatataactttgcagtgtattagtgaaaaaagaaagttataaaatagtatgtaggaatgattcccattaaaaaattaaatgtgattttaaaaggcatatattcaagttcatgcacacacacatgcacacacacagaaagagagaaaaagacaaagatgtatgccaagatatgaatagtggcttccccttggtagcagaatttctaagtagtttttatttttcttcatacacattctaattttctacaattaatacacattactgtcaatctcgaaaacaagtggggtataaatattatcttttagaaaacaggaagtacaatgtgtttacctgataagatataacacaaatatatacataaaatttagaaaaaagctaggtggggacaagaatctaaggcaac

SEQ ID NO: 207677 - DNA, 511 bp, Homo sapiens
tagagataggatctcgctctgtcacctaggctggagtacagtgctgcaatcatagcccactgcagccttgacctcctgggctcaagcggtcttccccttcagccttccaactaactgggaccacaggtaagtgccaccaggctcagctattttattttttgtagagacaggtctccccatgctgcccaggctggtctcagtctcctgggctcaagtgatcctcctgcctcagcttcccaaagtgctgagattatgggaatgagctgtcgcaccggcccacaacaaaaatttattttctcctgattctggaaggtgggagtccaagatcaaggtgtcggcaggactgggtcctttgaggctgcgggaaggagctatccaggtgtctgtccttgacctgtagtcagctgtcttcactccctcttctcatcaccttctctctgcatgtgcctgtctccaaatttcccttttttataaggacatcagccatactggattaaggcccatcctaatg

SEQ ID NO: 207678 - DNA, 150 bp, Homo sapiens
tgaagttactcatttctcatgaactttctcttgttagaaggctttcctaattactgtagataattaggaaataattatcagatagttatatccatttatgcatgtacctaatatattttgagcacatgaataatccaggcactgtgctag

SEQ ID NO: 207679 - DNA, 455 bp, Homo sapiens
gagatcccccagccgttttcagggtggttgacatgaaatactatgaatttcatttttaaatggtatatgccctatactcaaattttaaagactctccattgttctttttcattggtctataatacatatgaaaaccaaggctttgggctttatgcttctctccactcagacaatattatcgagaaatttatgtaccccaacacaggtactattatttaagggattccagagtaagtatttccataaaaatattattcactatttattctatatgtttttttccaataatatacacatcatgcttcaatttcacaggccttgaatgcacttggaagaatgcgcaagagcaaaatatcaagtctccacttgtggcttgtagaccacgggcagaactgaaggacagtggctcagacaggcacagcctcagggccaccttaaccttgggagtcggcagg

SEQ ID NO: 207680 - DNA, 203 bp, Homo sapiens
ctggctactgcaagagagacatacacgctacctatatatctctgcagcacatcaatttaaatctgttggaacaactttttaaccctcatttcagctcaaggtctttgaagttgaccaaatgatgaatctagcctgatttcttgtttgtatgaaccaggtttcttcttttgctgtctgtagctcaggttttcattctctatagt

SEQ ID NO: 207681 - DNA, 611 bp, Homo sapiens
ccactgagaatccctgacagaaataacaatagcaactatgtaacacttcctacatgccagagtctcagctaatattaataatcacagcagcatttcctgaggttcaagagcccccaggaatcaacagatgaatttacagactaagtttcagaatttaaaaacctgttttctaacggtgatgtgagcctctagttccagctactcaggaggactgtctgaacccaagagttccagtccagcctgggcagcatagtgagacactgtctctaaaaatttttttaaattaaaaacaattttgattttagtcaatgaaaagcatatagagatgtattatctatacatatcaatatatgtatgatatggatgtgtagctatatatatctatatgtgcttttcattgaactaaaagcaaaattatatgtgtcaccacatattttatatatgtcactgtgtgtgtgtgggggggtgtatgagataaagatacagatataggcccctcctcactcctcatcttccatgttccccattttccacccacctggggagccctgagccactgcctagaggagaaatacccaagagagtcacctggcctacatcagacaaatgtg

SEQ ID NO: 207682 - DNA, 420 bp, Homo sapiens
agttggggtctagacccactgcccatctccccagcacctgctgctctgtgattccccagacccccgtcaggacagtcagtgtccttagcaatgggcagggaggtaccgctcagcccagaatggatgtaggtttggtcctgagcttcctgaccctcaggctgtgtagtgatgaaggggccatggggtggtgcaaccattgctggttttaaatgtttgtgctcaatttatcaaagtttaaaaatcatatcttacaccgacaattaaagttatatctattaacatataagtgtgcatattatacttattcctaatatagatgcacagtatatccaaatgtataaatataatttatatctaaaatattatatgtatatttaatatgtaagggttacattacaaatatatacctatgcatgtaat

SEQ ID NO: 207683 - DNA, 118 bp, Homo sapiens
ctgctgaggcttgagtagcagttttactcacagtataaacaaagccgcccagaagttcgaactagatggagcgcaccacagctcagcaaggctgctgtggccagactgcctcttttag

SEQ ID NO: 207684 - DNA, 327 bp, Homo sapiens
gtaaggcgttggacaggagaaatgttctataaccttacaactaaatttcatttttttaagtgggcctgactttgtatgctgtgatcccttgaactacttcttagcctgtttcctccccttaagtaagataggaagctgagatttactaattgccttctcccttaggtcagataaggctctgtaaaatattttcccttggagagtaggctgttgttatgaagaatccttcgtgtgtatttcaaaattgttactttttcattagacaagtattacaaaatggttacttttcttccctctcccacgcctactccctaccttcacttaaac

SEQ ID NO: 207685 - DNA, 959 bp, Homo sapiens
catacccccttctatgtgaaataggtaggtaatcataatggatacagacatatcttcatacaaatacattgaagcatattgagataaatgggtagcagaacactggggagaagagacacaagatatcttgtccaagataaaaacttaaaccatgggctgcctggaggaaggaagtcaagcatcttctcactcgatccaaatttgtgctcacagagtgagttattacagggtttcccacattttataggacattttaggataaaggcagcagtgaagcatgagtttctgtgcctttttgtgagagtatactcatacctaagcttcagtttctctgtcaatttttctaaattgtggtaaactacatataaaattgaccatttaaccatctttaagagtacacttgagtggcattaagtacattcacactattatgcaaccatcaccactgtctgtcttcagaacttttcatattcccaaactgaaacaatggccccattaaacactacctgcccattctctctctcccagcccctggcgcccatcattctttctgtctctatgaatctgactactccagggacctcagctaagtggaatcagacagtatccgtcctcttacgactgggttctttcacttagtagaatgttcccaagcttcatccatgttgtagcatgtgtcagaatgtctttcctttctaaggctgaaagtattccatgtttttgtacagaccacattgctttctgcatccatccatcaatggacactgaatcatctcatcttctggcaattgtgaatgtgcagaacaggatgtaagtttccatttgatattcctggaattctgagtaatggctctctgtaggcttctgggagaactgaatgcaagaatgtttacaactctacatagtctcatcattttaaatcttatcaatttgtcagtcttttccttttaaaaaatgtc

SEQ ID NO: 207686 - DNA, 121 bp, Homo sapiens
ctgagtcttcctacccctcagcatgctccacctgccattatactttcacagggatgtttttgtttttatgtagggttgaaagttttacctatttcttaagtttggggttttggtgtgtgtg

SEQ ID NO: 207687 - DNA, 245 bp, Homo sapiens
gattttttaaaggatattatgcttatgtttttaaaaattatcttttagcaatacatactaatattatttacaaatgaaatgttatgatgcctgggaggtgctttataataatttgtgaagggagaatggctagaggagcgaaggccaccagttaatggttggggctgggtaagggctcattatgccatcctgtcttcttttgtgtattcaaaattcttcataataaaaagttaaggtgtatgaga

SEQ ID NO: 207688 - DNA, 217 bp, Homo sapiens
aattatctgccctccaaaagtcctttagaagagccagtgcgagggtgaagaccaaagcgtcaagaacacgccagactctcagcttcctctggggagaatggctagaggagcgaaggccaccagttaatggttggggctgggtaagggctcattatgccatcctgtcttcttttgtgtattcaaaattcttcataataaaaagttaaggtgtatgaga

SEQ ID NO: 207689 - DNA, 749 bp, Homo sapiens
atctcaggccatgaggcaactgtaaagaccaaagtcacaagctgaaaccagaagagtagaaggaagaaggagcccgagtccctgatgactgtggggctgccacaccatcggtttactcagtgacatgctaggaagctggctgtctgagaaaaactttttttttttaaatccccaacagtgccaatttccatggtgtaaatgttcccactcaagtggatttcaagctatcagtgtgaagtagtagttggacttggcattgggatgagatgcacacaatcagctctcaggagccagtgcaacctgccgcagcacacccacctggagtcctttcctagagacttgtcttacatgagagagaaacgcaccccatctgactgcagctacttcagccagggctctgttactaacagctgaaagtcattcctaacattcgtgtgcagcttgagcggatacagtcctcggagcagaggaatcttgtttgcctaagagagtagaaagaccgctcctcaggtgcctctgacagccttgggctatccagcctgggacacagtgtggctgagaggcagatgttgaggagatgggccaagtgctacaattctccccctggtggcccccatgggtccacagaagacccagccacccaggcagctcttcaggatttctgagaaactgccttggagtctgccttcctcacattgctcagggcacttgagaaacctggacatttcctccctgattttgcagtcagg

SEQ ID NO: 207690 - DNA, 340 bp, Homo sapiens
attaaaattcaatcttctaaatattttttaaagccaagttgtaatatagtaatataaggccgggcgcggtggctcatgcctgtaatcccagcactttgggacgccaaggtgggcggatcacctgaggtcaggagttcaaaaccagcctgaccaacattgagaaaccccatctctactaaaaatacaaaattagccgggtatagtggtgcgtgcctgtaatcccagctagttgggaggctgaggcaggagaatcgcttgaatctggaaggcagaggttgcggtgagccgagattgtgccattgcactccagcctgggtaacaagagtgagactccatgtca

SEQ ID NO: 207691 - DNA, 875 bp, Homo sapiens
ggctacttatgtggaaaaccttcgcttactaagggcttgctttgaggagacaaagaaggaagaaattaaagaggtaccctttgagacactagcccagtggaatctagaacacgctactttaaatgaagcaggaaatttcttagtcgaagtcagcaatgatgtggttggatcatctatttctaaagaactgagaaggctgaataaaagatggagaaagttggtttcaaaaactcaacttgaaatgaacctgccactgatgataaaaaaacaggatcagcccacttttgacaattctggaaatattctatctaaagaagagaaagcaactgttgagttttcaacagatatgtcagtagaacttcctgaaaattataatcaaaatataaaggctggagagaaacatgaaaaagaaaatgaagaattcacagggcaactaaaagtggctaaagatgttgaaaaactcattggacaagtggaaatctgggaggcagaagccaaatctgttttggatcaagatgatgtggacacctcaatggaagaatctttgaagcatcttattgccaaaggctctatgtttgatgagcttatggcaagaagtgaagatatgttacaaatggatatacaaaatatttcaagccaggagtcctttcaacatgttctcacaactgggcttcaggcaaagattcaagaagctaaagagaaagtccagatcaatgtggtaaaactcattgcagcgttgaagaacttaactgacgtttcaccagatttggacatcaggctgaagatggaagaatcccagaaggaacttgaatcatatatgatgagggctcagcagttactggggcaaagagagagccccggtgaactcatttcaa

SEQ ID NO: 207692 - DNA, 331 bp, Homo sapiens
ggctacttatgtggaaaaccttcgcttactaagggcttgctttgaggagacaaagaaggaagaaattaaagaggtaccctttgagacactagcccagtggaatctagaacacgctactttaaatgaagcaggaaatttcttagtcgaagtcagcaatgatgtggttggatcatctatttctaaagaactgagaaggctgaataaaagatggagaaagttggtttcaaaaactcaacttgtaagttcttttgattggttgcagctttatttagatatgattcatgtaccacacaatttactcattgtaagttcataaccaattgatttctgg

SEQ ID NO: 207693 - DNA, 350 bp, Homo sapiens
tccccactgtgttatagctactgtatggcagagccggaatttgaaaccagatctatttgaccctagaagatgtgaccatgagatgttaattttgaggataacttttttagtattatggaattttcaacatatattttttaggaccaaagataaactaggcacagagtctactctttgcataaattatttaaaagagcttcgcgctccattttgtcatctaagcactgtaaaattctcacaagactaattcttctttttaggaacgatatagttgtaaactttctattttttttctttttttttttctccctccaccatccaagtagttgtgaattttctagagccaaaat

SEQ ID NO: 207694 - DNA, 582 bp, Homo sapiens
tacaagttggtgtatgttggacagctgtgaggagtctgacaaaaaaatctgatgctaataataaagtgttaggaaggccaggttttctagttttgtttgtttgtttaagcaccatattctctattagagcaggggccagcaaactttttctgtaaagggccaggtagtaaatattttaggctttgcctgccataggttctcttgcaattcttatctctgtcattgtagcgtgaaagtagcgacagaaaatgagtaatgaatggatgggttttgttccgataaaactttatttccaaaaggcaagatttgggccatagtttgttgatgccagcattagagtgacaattcttgttctttgtgtattcatttatacagccctgctccatggactactcatgttataataaagggatagagaagggcatgatgacgatgtgcgttcccagtgtgctagctgtggctctacccctttttctctcacttaagaaaacttcccagaaacccgagaagtgagagcattttcccccagggaaaaccttgaattgtgtaacatgtaaatccatgggaatcttcagcacttta

SEQ ID NO: 207695 - DNA, 268 bp, Homo sapiens
aaataaattaccttacagtgccaacaaaacctgaagggttttaatttatggaggtgactgagtgacaacacaaagaggctaatgccattgaaagaatttattactcagttcccaaggaagggagtatgctggggcgtgccacaccatgccacacagggcaacaagaaaccttatcacacacagggaccgagaagctgagaaagagagagggaggaactaggagtgtacctttatgactacagtagtcggggagtaaaggggtggggat

SEQ ID NO: 207696 - DNA, 303 bp, Homo sapiens
agctcacttttgcttagaaatgtaaaaggtaatctctgaatatattcagaaaaagaattcctatgatgtaggataaagtctttattccattcatgggttctattgtgttaaatgtccaacaaacatgtgaatgatcactatgtattaaggtattatatattacgatattgtacttctaagaagcctttttgtaggtccaatctaaaacccctttccccactgttgactttcacattgcctgttaactgtcctcctctacatttatttacccctccttctaccattagtattatatctggtggt

SEQ ID NO: 207697 - DNA, 600 bp, Homo sapiens
tctcgttccacccaactttttggtttcaactaatacttatagctcctggaaacactcatccttttcttgctcccattactgcactcttctaattttccttcaccctctctcttaacctacatcctctttttccttccattctctatctgaatataacccaagacatcccctcatctgcttcctgttcttcctctgtttaatacttcagtaggcagctttagtcaaccatgctgataatcccacatgaacatttcccaactaagcccttcaggtgctacagaagcaacaccattttttttttcaatcacatccacaatcaagtccacatcttcactgactgcctaattcctctggtccattcttcctaacctgtatcttgtaattggcataatttcttctttaggaaaaaccatctaagcccttatcacctcacatacagattaaagcctacaattacctaagcaatctcacctgcattcatttattccccaacatcccttcctcacaaatccttcttgtacaaagatgccagtgtcaagtctccctaaaacaagacaggaaacccaagagaaaaagctatacgagtcctctctaggtgat

SEQ ID NO: 207698 - DNA, 137 bp, Homo sapiens
tgaacaacttctaatttttaaagataccatgctaatcatttcacgtggattatctcaatgtaacctcacaaatgcccaattagttaggtacattttccatttaagggaacttagagaggtgacatccctggcctggg

SEQ ID NO: 207699 - DNA, 554 bp, Homo sapiens
gctgaggtaagaggatcacttaagcccagaagggtgagacttgaggctgtagtgagcagtgattgtgctgctgactccagtctggatgacagagcaagaccctgtctcaaaaaataataaaaataaaaataaataatatataattaataatatataattatatatgatatataataatatatcatatatataaaataattttaaaagaaagattaaaaaaacttcagtgactgagtgacataccagttactgtgataaaagcatggggaattgccgggcgcagtggcttatgcctgtaatctcagcactttgggaggccgaggtgggcggatcacaaggtcaggagatcaagaccatcctggctaacacggtgaaaccccgtctctactaaaaatacaaaaaattagtagggcgtggtggcgggcgcctgtagacccagctacttgggaggcagaggcaggagaatggcgtgaaacccgcgaggtggagcttgcagtgagctgagattgtgccactacactccagcctaggggacacagagagactccgtctca

SEQ ID NO: 207700 - DNA, 463 bp, Homo sapiens
cccaggtggtcgaggctgcagtgagccaggatcacaccattgcattccagcctggatgacagtgtgaggccctgtcttaaaaaagacaaaaacaaaccaaaaaaacccacaccctagtgggtaaggggcagcagaggtcccacccaagagtgaaatcatttttggtgtcagtaatcagggagagtaatataccctcaggccagaaactagaggtgagtgatggctcacgcctataatcccaagtgctgggattataggcatgagctaccgtgcccagccaccctggaaaaattttacaaaatgaagtataaaaagaagaaaagaggggcgggcatggtgccttgtgcgtgtaatcctagaactctgcaaagccgaggcaggagatcctttgggtttaggagtttgagaccaacctgcacaacatagcaagaccctatttctacaaaaaatacagacactaggc

SEQ ID NO: 207701 - DNA, 324 bp, Homo sapiens
tccatgggacctaaagacctaggagcctgtgatatgatacctgtcagtgtgaaagggctggagtttgctatctgagccagacctacactccaagacaggtctagtgctgggattataggcatgagctaccgtgcccagccaccctggaaaaattttacaaaatgaagtataaaaagaagaaaagaggggcgggcatggtgccttgtgcgtgtaatcctagaactctgcaaagccgaggcaggagatcctttgggtttaggagtttgagaccaacctgcacaacatagcaagaccctatttctacaaaaaatacagacactaggc

SEQ ID NO: 207702 - DNA, 765 bp, Homo sapiens
aactacgaggtcacctggtacacatcttggagcccttgcccagagtgtgcaggggaggtggccgagttcctggccaggcacagcaacgtgaatctcaccatcttcaccgcccgcctctactacttctgggatacagattaccaggaggggctccgcagcctgagtcaggaaggggcctccgtggagatcatgggctacaaagattttaaatattgttgggaaaactttgtgtacaatgatgatgagccattcaagccttggaaaggactaaaatacaactttctattcctggacagcaagctgcaggagattctcgagtgaggggtctccccgggcctcatggtctgtctcctctagcctcctgctcatgttgtgcaggcctcccctccatcctggaccagctgtgcttttgcctggtcatcctgagcccctcctggcctcagggccattccatagtgctcccctgcctcaccacctcctctccgctctcccaggctcttcctgcagaggcctctttctgcctccatggctatccatccacccaccaagaccctgttccctgagcctgcatgcccctaacctgccttttcccatctccccagcataacctaatattttttttttttttttgagacggaatttcgctctgtcacccagactggagtgcaatggcttgatcttggctcactgcaaactctgcctaccaggttcaagcgattctcctgcctccgcctcccgagtagctggaattacagacgcctgcca

SEQ ID NO: 207703 - DNA, 239 bp, Homo sapiens
catgatcgagctcggtaccaccacttctatagataagtaggtgtggtaaatagtgagagggagtatagggctgtgactagtatgttgagtcctgtgagtaggagagtgatatttcatcaggataagaggaggatggaggccaagtctgatccatcgggtctgtgtcacctcacaggcatacatccttgctgtgagcagttcactacacagttctgcaccctacaaatgtgaaagtcaag

SEQ ID NO: 207704 - DNA, 469 bp, Homo sapiens
ggggtccatagctcatgaagtccaaacatatctatacattcccagcaagcacctctggcttcccacatcgggggccaccttgatccaaagcagggctggcgagggtctcaacttgcaggacctgctcagacatgaccatcatctgaggggctttggtaagaaactgatggctgggcgcggtggctcacgcctgtaatcccagcactttgggaggccaaggagggcggatcacgaggtcaagagatcgagaccatcctggctaacatggtgaaaccccatctctactaaaaatacaaaaaattagccaggtgtagtcccagctactcaggaggctgaggcaggagaatggcgtgaacccgggaggcagagctggcagtgagctgagaccgcatcactgcactccagcctgggtgacagagagagaccccgtctcaaaaaataaaaaaatacaaaataaaggctgggcgca

SEQ ID NO: 207705 - DNA, 188 bp, Homo sapiens
ataaaactgcaccccttaagtagcacagttgacttaaaatacttttggaaagcaaaacatgtatacaaataaacatgtgacaactgactgttgaactgctcacactcacacacctctggcaggtaagataatgatggcttcaaccccctcacccactactgccccacatccagtccacgcaattcacc

SEQ ID NO: 207706 - DNA, 276 bp, Homo sapiens
ctcctggattcaagcgattctcctgcctcagcctcctgagtagctgggattacaggcatgtgccaccccacgcctggctaatttttgtacttttagtagaggtggggtttttccgtgttggtcaggctggtctcgagctcccaacctcaggtgatccgccctcctcggcttcccaaagtgctgggactacaggagtgagccactgcgccgggccttggaatttcctacctgccttttctccttaattgttgccttctttgaactgttgctcccttg

SEQ ID NO: 207707 - DNA, 339 bp, Homo sapiens
agtacataaaaattacatcacttccttgttgatgagattaatcaaatttgagtatcaagagaccttgaatctcaattaagttttgctaaggtgctccgtatttttgtggagtattttgttttgttttgttttttaatcattataaaatgcttgctcccatcatagggattcaatcagcaaaaaatagcctatcaatcatagtaggttagacaacatcataacaaacatttccaacttacctgacaatgctgaaactagattaaaatgtaccaaaaacaatcccattgatttttagggccttaactgaaaacagttacagagatatagctgtcattttgg

SEQ ID NO: 207708 - DNA, 113 bp, Homo sapiens
gtgacgatgtgttttcttttatgagttcatatgttcaggaggctggaaaatacctagctgaatgtgtgatacacatgataagcatgctaaggcatatgggcagaagaagagat

SEQ ID NO: 207709 - DNA, 576 bp, Homo sapiens
gggttttttgcatacaagtattaggtctgatagggttcagaaagttagacagtgagcagcttccattggagacagctataaagtaacaaacagaaatttttcaagtgtgtagaatatggagaatatttagcacagggctttatatataacagatatacaggagctgttgtttatcaaataaatggaaaagacctgtcagataccctaagcaaggtaggaatgaattgttggaagggacagtcagaagtccagggtgttggggccaatgacccggtttgggtaacaaggacaaataaggatacttactagaactagttagttgttattgtattctcaacctgggagttgatacataactggcaggtaatatttattgaaatgtattttgtgacactgagagtggaatgagatgtcgtcattgtaggccccaactcctgaaccttggaagggaaattggatttgtgacaattgtttgagtcagtcccatgaattacacagattttggcagatgaggtctttttattatttgaataatgtcttctaagttgggaaccttgctgaaaacttgaaggattg

SEQ ID NO: 207710 - DNA, 900 bp, Homo sapiens
caggctctcactctgtatcccaggctggagtgcagtggtgtgatcgcagctcactgcagcttcaaactcctgggtccaagcaatcctctcgtctctgcctcccaggtagctgggactgcaggcacatgctcagctaatttttgtatttttttgtacatgtagggttttggggtttcgccatgttgtccaggctgatctggaactcctgagctcaggtgatctgcttgcctcagccttccaaagtgttggcaccatagacgtgagccaccatgcctggcctctttcttcttttccttccccttccctttcctttttgtcttgctctgtcacccaggctggagtgcagtggcaggatctgggcttactgcaccctcaaccttctgaggtcacatgatcctcccacctcagcttcctgagtagctgggaccataaacatgcaccaccatgtccagttaatctttgaattttttgtggagacagaatctcaatatgttgcccagactggtcgtaaactcctgggctcaagcgatcttcctgcctccttcccagagtgctgggattataggcgttagccattgcacctgacttttatttctttagtgtatgtttttaatgttttaaacttttttattgaaatatgactaacatatgtgctttctgggttgaaattcttcatttgttgcatttgccaaatttaatgatgtaaatgctgtcctcaggactatttgtaatctactgacagtttgacaagactcacaaaattactgttaaacagttgtctgtcataaaccaatatgaaccagcttcaacacaccaatgcaacatgcttacagaaaggtatacaaatcattactgtacagctcattgtatgtcagtgaagtgaatacaccttagaccctt

SEQ ID NO: 207711 - DNA, 430 bp, Homo sapiens
tgattggtgagagaggggttaagttttgaaaaacaaaatactctcctttgttgtcatgatcctttatgtcatgtcctttcaacctattaccttccaaacacgttgttgagaaggcgctacttttgcaaacttgcttaagtggggaaggtacaaggtaagctaggctactgctggagaattccaggcaggattcaactctgtgagtacgtgtggtttgctagggtgctttgaggattcagagaagggaaagttcttcgttaaacattacacaggatatatgtgacgcagctagccttgcattaagaaaatttgatttgtgaagtaggatttggaaaagatttgtgaactggcttgagagtcacagctttccatttgtcaccagagggctggttttcaatatataaaacaggaaatcacacttcttttgata

SEQ ID NO: 207712 - DNA, 583 bp, Homo sapiens
catcaagccagctcacacagggctgttcagtagttgttaagtgttgggctagcttctttctacccccatctgtgggaggagccataggtctttcctcttccctgaagggtttgccactttctcgagcttcgtttacctagacatctttataactgatctggctttttgtagcaaactttttgcttgttagggtgggagtgatgatcttttgctactttctgtatctaaaccaaaagtcctgttcaaatatgtattaaaactgatgattgtggttatcaaatcatttggcatttagattccattagtttcacctaaaaatgacattttgatttgattttaaaatatttatataaacactatgtcaagaattatatccttcagaactgtttaagcttatgatgaaaaattttagatgtcaacttaaaaatatgtaagggaatatatatagttcttcattattctattgggagtacatgagtgaactcaggaataatagcaaaggtaatctttttattctttcttgattagggcagtgtgggtgactggctttgctttgcttcacactgtgggtcttctgggctca

SEQ ID NO: 207713 - DNA, 476 bp, Homo sapiens
gaattttgcccttgttgcccaggcaggagtgcaatggcgccatctcggctcactgcaacctctgcctcccaggttcaagtgattctcctgcctcagcctcccgagtagctgggattacaggcatgcaccatcacaccaggctaattttgtatttttagtagagacagggtttctccaagttggtcaggctggtctcgaactccgacctcaggtgatctgcccacctccacctcccaaagtgctgggattacaggcatgagccaccgcacccagcccataggcagtttttattcacatttttattagaaattcaatacagatgcattatacaaattgttctttaatttcaaggcagaagtgttgcttagggaaattttaattgagactattttgaaatgtgaagagcatatgaaacagataatacagagcacagagaaacagaatatgaaagataggaactgagaggagcgtgctga

SEQ ID NO: 207714 - DNA, 678 bp, Homo sapiens
tcccagctctacttgggaggctgaggctgaaggattgcttgagtccaggagtttggcgttacagtgagctatgatggcaccactgcactccatcctgggcaacagagtgagactccatctcaaaacaaaacaaagacaagactctgagaccagaaacaatttctaggacaacagttttgcctttaagttacttaaacatcacagaaagccattaaagggtgagtactaaaaattcttaactttgtaaaccctgaaatacttcagttgttattagcaaagaagtaatgcataaactatgcatggtgaagtgctcttcagttttcaagtgcttatttctaaatgttccaaacagctgggtgaggtagatggaaactgtggatccttccaacagattaagaagctaaggtacagggaggctgtgatttacctacatggagactggacgacagcccagccttgtggctccccaaattcttgtctatcatgttccttcctcaaagaaatatttaaggttcctgaattgaaacttcagtatctacccaggggttacaacttcaaatatttatttaatgtcattttttgaaacttttttcttttatggtagaacattttgacgatgttggctccttaatttggctgttagcttttttttttttctaaatgaatacttaaaagaat

SEQ ID NO: 207715 - DNA, 408 bp, Homo sapiens
tgttacagatgaggaaactgaggcacaaagaggttatgggatatgcccaacatcacacagctggcgagtggcacagcaggcattggattgcagccctgtgggaccccaggtcccatatgtccagagattgtccctccaatgggaatgtgaggaaggtggattcagggtggggaaacatgggtggcaggaaatgacctccctgcacaccagcagaaaaatagggggactcagccacccactgtggacggcccctgccattactgacctgatagtttcctgtaaatcctctcgccctttttaaagatgtcaatacatgtacttaagaaggaactccactggccaggtgcggtggctcacacctgtaatcccagcactttgggaggccaaggcgagtggatcatctgaggt

SEQ ID NO: 207716 - DNA, 247 bp, Homo sapiens
ggagtgacgtgcccagagatagaggaagatcagcagggagtggatatgagaaggaaaagcatgattctggtttcacacattgggtttaggtttggcctggaaatccagaggcagatgtctgccagcagttggagtttctgggctggcttgggcataaaaaccaggcctgcaggttagtgaattatgtgtctagaggtgagggctgaagccaaggatgccagtgaacatgaagaagggaggagggcca

SEQ ID NO: 207717 - DNA, 758 bp, Homo sapiens
tatcagaaggttggaacacaaggcctgtgacctgcccagggatgatttgaaactagagatgagtgtctctgccacacagatagaaacagccaaatcagagaagaacaaggacatgagaatgacaggaactaaaacaaagcctagagtccctgtctggggatggagaggagagcagaacagttcccctcctccagtcaatgcttttgcccagagttgactctgaagggtgctccctaagggtgggctttcaggcagaaatacatctatagagtgtgcaggtacaagacccacttcaatcctgggcttccaagtctgagtcccctgaatccctgcgcctatctaaattctctgtttccctcactggatgatctgatcaatacagaatgagtcagcactcatgatggttcctggcttctgggaatgccttggtacttgtcccatgcctttttgccactgaggcctggctcacaattgcatccttggggaagtcttagtaataactcctgtctattcctgggcatgtgctgggggtgagggatcagggagaccctttactcctattggaatctttcaaggactcttggtaggcagtcgtgaatgttggacctatgtagagcaagaaagcctgagacttggtggtagtcagagagcctgcaggaaccggaattctgttacataccttggtcatgctgacaccacagaactaggacatgactccgttgaagactctgacagatgctttaccaagtagagttgtg

SEQ ID NO: 207718 - DNA, 472 bp, Homo sapiens
gcttcactgttctttctcttcctcttaggcagcctctgtccctacccccaggctcctgccaatggaaatatctcctcctcatcagcggcaggtcccattcctggcccatgggcctctctaaaggacaactctgtgtccctgccatgttgggatgaaacaaaatttcagcagctcctatatagctaacatgaatggttacctatataggagctactctcagtcagtagaggggagtccctcagtaaatgaaatttacagtggacttacataattggtgaacataggaggcttcaatgagagtcctcccaggggaggtcagcactgcttgtcccacatagaaatgattaacacaggctgggtgcagtggctgtcatctgtaatccctgcattttgggaggctgaagcaggaggatcgcatgggccctggagtttgagacgaacctgggcaacataaggagaccttgtctctaca

SEQ ID NO: 207719 - DNA, 439 bp, Homo sapiens
gatgcttttcttagattgaatattcctgtgacttaaaataagtagcttaaaaatgttgggggttggggggaagagtggtgctagccaggaagaagccagtaaacatgtaaatatagtgcaacccagtcgggcttttttttttctccaggtatcacaaagaaacccagaatgcattgttatgtagtagccatccatcttggagtctgatcctttgtattgtggatgcacacagctttacctactgtactggtagtcttcacttctatcttttaagttacaaactgttttatatatttgaatcgctagtcacttttccagtcttttggaaaaaaatttcagtccgcacaagatgatataattggagtattttaaacactagaccccaggagcttggctgaactggaaagagaacatacaaagctctgagaaatgtgttcaa

SEQ ID NO: 207720 - DNA, 141 bp, Homo sapiens
caataaaatcttaaagtagataatatgttgtacgggctattacggcttttaaaataatatgtgcatacacctatatgtatatttatatttattataatacaattctctcagggatatatttaaagatattagtaaattata

SEQ ID NO: 207721 - DNA, 424 bp, Homo sapiens
agttatttcatgcattttccccaaggttctagcagtttacagtggaaaggcaactgtcatattagtttctccatgatcagaagcaaaaaatttgtcctgtgtaatttgaaaaattctaaactagagaaattgtgtagatgtttcagacttacttttatacttgagtcattaatttccaataattaattgagagaatgataattaattcataagagtttaaaaaattataagtctctaagttaaattggtatttagtatccaggagacaaatagtatgcaaatcatttgagaaggaagaagcttaaattaagtagaatattttaaatacagttgaatcaagacacaatgagtaatattatattgtgtttaatttagcaaaaattcttacttggctattaaagaaatggtccgtacctagttcctc

SEQ ID NO: 207722 - DNA, 562 bp, Homo sapiens
tctctaaaaagaaaagtcaaacaaaaaaatttaaggacaggcacaaggactcacacctgtaatctcagcactttgggaggctgaagtgggacaatcacttgagcccaggagacaaaatgagacccatgtatagaaaaaaaagagaaaaaattagccacgtgtggtggtatgcacctgtggtcccaaccactcaggaggctgaagtgggaggattgcttgggcccaggaggttgaggctgcagtaaggctgtcacaaacctgggtgacagagtgaaaccctgtctccaaagaaaaaattaaggaatagacaagaaaaaactaccagaaattaaaaatatgacagctgaaaaccttcaatataaaggtaaaaagataaagtcaaaggaatctcccaggcagtagaacaaattaacaaagttggaaggacctggaaaggcccacccagtacccagaacaacagatttataaaaaagacccacctaccaaggtacgtaattatgaaattttttattaagaacttaaaaaattagaaatcttccaaagataaactaggctactataa

SEQ ID NO: 207723 - DNA, 465 bp, Homo sapiens
taccatggctaagcctaacagtgtcaacagagactgtctggagcacaaagcctaaaatatttactatctggtcctttacagaaagagtttgcctacctctgttctagagcgaagcctgagccttgggtgctcactatgccacaggtatctgttactgtggtttgcagaagcttcaggtgagagggagagcttctaggagaatgcctaccacgaaaagtgaaaatcccttccttcttggcatcactgtttcccaaacccacctcccactcttcccaaggtagcttcatggtttgcttcgtcacttccttcctgggctcaagtgaacctcccaacttggtctaccagagcactgggattacagacatgagccactatacccagctctgatttttctctatagcacttatcagatatattccatgcttatttatttatttatttttaatttgtttgagacagagtctc

SEQ ID NO: 207724 - DNA, 151 bp, Homo sapiens
aattctgttttcatttttaagagaggattctttttatcctaaatgttttatttttaaatctttttatctgttattacatgtgctgctgaagggagcactgttatgacctagagtagttacataatatatctattctatttatagctaggtg

SEQ ID NO: 207725 - DNA, 531 bp, Homo sapiens
ctttactgggtgatgaaaatgttctaaaattgatagtggtgatggttgtacaactctgagaacatactaaaaaccactagacagtctattttaaatggttgaattgtgtgatatgtgaattatatctcaatacagctgttttaaaaagttctgaattgttatttcttcaaaacgatggatgctttgctaaattggcaacatacactaagaacatgaatgtcattaaatacctttgcctagtggctgaaccagaatcccaaccccaggactactgttgaggccacattctaggtccccaagagtgggctccttcacaccaggcacagtacctcactataaactcagcctacagacctgatggccaagcagttccctgctgggccaaggaagggctggaggaggatggcagggccacttggatgctagccaggagcaactggaatgggaaattcttaagtgtctctgatatggcacagaatgacctcaaaactcaggtgataaaattcttggataaaaagaattgctgggtgt

SEQ ID NO: 207726 - DNA, 405 bp, Homo sapiens
ctccaggagaacgaagctgcacctgaggctgcttccgccagcatatgtgatttctcttgccagtcagcatcctcttctcaaggcctaacaggatcctggcctatcgcaggattttgctcttgtagggcaaagtttctttatatgtgccagctcattctatctcatgcatattctgtgaattctgtatgtgtgtagtggcagctaatagtatttccacctggacagagggaggccagagtccctgacattccctgcactgatttgtctactgagactaggtcaattatcttcaaaaaggtatttgaggccaggtgcagtggctcatgcctataatcccagcactttgggaggccagggcaggaggatgccctgagcgcaggactttgagaccaccctgggcaacac

SEQ ID NO: 207727 - DNA, 366 bp, Homo sapiens
taggaggttgcagcaattatctaggcaagagataatggtaacttggaccaagataatggtgtggagatgttgagaagtagtcagataccagttatatttcagaaggtaagccaatagcctatcttgatggattggatgtagattgtagaggaaaaagcagttaaggatgaatccaaggtttttgttctgatcaactgaaccagaatgatggttttgtcatttacagagatggaaaagaccataaggaggagtggttattggaggaagaagaccaagagttcagtgtagaatataataaaaatgagatgcctattggacgtgcaagtgggaaatttgagtaggaagttggctatatggatctggagt

SEQ ID NO: 207728 - DNA, 648 bp, Homo sapiens
gtggggccttggagaacctgggtgtggaaactctgtatctaactaatctgatggggatgtggagaacctttgtatctagctcagggattgtaaacgcaccaatcagcgccctgacgaaacaggccactcggtcctaccaatcagcaggatgtgggtggggccagataagagaataaaagcaggctgcccgagccagcattggcaacctgctcaggtccccttccacactgtgggagctttgttctttggctctttgcgataaatcttgctgctgctcactctttgggtccatgctgcttttatgagctgtaacactcaccgcgaagatctgcagcttcactcctgagcccagcaagaccacgagcccactgggaggaacgaacaactccagatgccccgccttaaaagctgtaacactcaccgcaagggtccgtggcttcattcttgaagtcagtgagaccaagaacccaccaattccgaacacattttaactcagatatagtattacgtcgcatgaatatactttaaatttacttatccatattctcccagctaacagtaaagattttaaaaattaataatctagtatagattaatggtaaagggcagagaggatatatattgatatgttttggaaggtcgttttcg

SEQ ID NO: 207729 - DNA, 1432 bp, Homo sapiens
acacctcagttgctgggactacaggtgcatgccaccataccaatctaatttttgtatttttttgtagagttggagtttcactatattgtccgggctggtctcgaactcctggcctcgagtgatccacctaccctggccttggcctgccaaagtgctgggattacaggcatgagccactatacccggccccggttagttcattgtttcaagctgggacctggctcagcacatttttgaggtgtgggcacaacagcacctcagaaatcctggagtccctagattctgagcatgcaactcttctgtgttctcttcattattgatggtagccagctgtagtctttccagtgcttttattcatcacatttcccacaccacactcctgccttctctgtcctagttttcttcagtcagtatgatgaacatttcttcacctagtagctgagaacagcaaatgtggacatttatgagcctgccaccggaggggaaatgtgggaaaaccctggacttgagcccagcaccagcgagaccaaggtcgaggattttgttcccttttcctccccccatttgctttgctttgttctatggccacagatggccacacaagccccagccgtttgttttaactgaatgctggcggtcatacaggacagagcaaaggactgtggttagatcagcatagatccatcactgtttactggaaaaaccacttaggagagcatgctctaccaactgtgggtcgagaagcatagtcacatagtaatagctactgttgttaatgctcaccgtgggccaggaatggagctggatgttttatgtgtgtcatctttaactgtcacattaaatgacattaaatagcagcaagcaattagtatttgctattttcctatctccaagttttcttgccaccgtctcattatattgaactagattttgttaaaaggagaaaaagatatggtccttgtccttgaggagttgacagcatagttgggaagaagagatttaaggacacttgagtgtaaatgattacagtacagattgatgacataagtgctgaggagactctagagaggagttttgggagttgggtggagatgattaggaagcttctagtctgagacaactctggcagaggacagaaaaaccgcagaatgaaagcccagaccaatatagactttgacagtaaatcatttgcatcgaagtttggttacgggttcagtgcagttacgggcggaggctggaagactggggagaggtagagtgattgtgaaatttctaattccagggaagctgctggcacttactagaatggggaaggcaggggttttagccagaggtgattgatgggagcgagcttgataagcagtaggtgggagacaggctagacatctggcttgactggggagagggggacagagatgaagagagtttgaag

SEQ ID NO: 207730 - DNA, 326 bp, Homo sapiens
tatttctggatatttcaacaaaaagttaaacaaagcttacagaacaattaagaatccattgttacaaaaaaaaaaaaaaaaaaaaagcctattggtggccgggcatagtggctcacacctgtaatcctagcgcttcaggaggccaaggcaggtagatcatgagatcaggagtttgaaccagactggccaacatagtgaaaccccgtctctactgaaaaagcaaaaaattagcgaggcatggtggcaggtggctgtaatcccagctatcgggaggctgaggcaggagcatagcttgaacgtgggaggtagaggttgtgctgaaccaa

SEQ ID NO: 207731 - DNA, 338 bp, Homo sapiens
aataatgcatgtaactaccacccaaaacaaaaggtagaacattatcaccccagaacattcttccgtgtgtttccagtcaatctcctccttccctgccctcctcacaaataggcaatcactcttctaatttctatcagtatagattactttgtctattcctaaactttaagtaagtgaaatcatacagtatctggctaatttcactcaatgcagttttaaaaaattgatacataatatatggacatatgggttaaacgtgcaattttgttacatggatagcaacaaaataatgatcatataatgatcaaatcagggtatttaggatatccctcaccttg

SEQ ID NO: 207732 - DNA, 525 bp, Homo sapiens
agtttattacaatctgagagaatagcagaccagtgccaaattacaggagttcaggaagaagcttggatgaaagaggtatgtacgtatctgtttgggtgtgtgtttaagggatgaggcataaagccaaaaatatatcatggagttgatcctggaagctgtggctgggaagacagtatggaagcagatggtaaaatatactaactgttgcgaagattctgaccagcaggaatctgtgatttgggccatgaggatcattcctcagattttctaattttcttgagggttgagctcatgctagcattttcatcattgtctcatcaacacctagtttaatttaatgtactaaattaaagaagaaatatatcaaaatgtaactccatgtccttacaggtattcatcaacaccacagataccagtggctgtgataaagagacctccgtctttccccattaaagcctttgccctatgtggcccactcatctttggcagaagttctgatcataaagaccgagacctggcatgctt

SEQ ID NO: 207733 - DNA, 710 bp, Homo sapiens
taatcagcaggtcaggtgcccagcagtggcagtgcacaggtcagctctggagggggaggtccatgctgccgtccatgcccagcctccacccttcccccactccacacttggagcccatcaaacatgcacgggagagctgggaaaagaggctgatgatgcctgcagagggggcagctgtggagatctgagcaccgagagcccctctgaagcgaacagacctcagagacacccgcccggcacagctatccccacagctgtccatctggtacttggtcccagaactcccagacaccttgctcccaatccattcatttccaagtccttaaccatcctaaccatccagccagacattcacaactgctcaggagtcagtgtggatgcatgtgtgcaatactatccagggattaggaagaagtgaagggctggaacatggcggtaaacctgagaacagtgtacacaaagtacacggattatatgactccctttctgtgaactgtctggagcaggcacattcggagagacagccagtggatttgcggttgccagaggctggggttgggtggggtgggctggagagtcatggctaataggaacggggtttcttttagagagatgaaaattttctaaacttcagttgggtgatggttgcacaggtctgtgaatatactaggaagctttgaattatacactttaaataaaggaatcttatg

SEQ ID NO: 207734 - DNA, 302 bp, Homo sapiens
agtgatccccggctatcacattatcttacacatatctagtgaaagatgtgaaaacataaacattcatagtgaagggtatacttatgctttgttaattcatcatgtttcatagctttaaaaaaatcgcaagaagatctgtgtatccctttttttctggccctacacttttcttctgccacccctatagactatcagcctgcacactgaaactgttctcacaaaacaaaggcattatcaacttctcaaggtttaggtagtgatttaaggctaacagaccccacactcatgtgataatgtgatag

SEQ ID NO: 207735 - DNA, 277 bp, Homo sapiens
caacacctggagagacttctagtgcccgtggttgagtatccacagaaccattccaagccatcctacaagttagcattcaggcacccttgatcagatgtggtgagcctccgagcagctttccttaagaccacagacacacagaagaaaaagcatgcgacgtggagtacagaagactcaagtctaacctcaactctcaaagcaaattacttcagctcttctacatgccatctgctccctcatttgccagcaggaacagcaggaacaatctaagaattgc

SEQ ID NO: 207736 - DNA, 891 bp, Homo sapiens
cctcccgcctcagcctcccaaagtgctgggattacaggcatgagccactgcgcccggcccaggcattgtttcttgaccttgccacaggaatgccttggtatgcaggagtcaaacatcagtcattatggcagttttgcttcaaggtggtgccattcttgcaacagggtcttttcctacagaggaacatcgacaaactgcaatgctccctagaggaggggtccagggtgagcaggctcagatcgagttatttgaagacaggacaagacaataagattgttttccatagaaaagagatttaagagagacccggttggctttaaaatatttgaaggagtattgggtagaaagctgagacacactgaagtacaaaggacaaactaggaccaatggcagggagtttcaggaagaccaattaccattcagtgttaagaactttctaatagctgttcaacaatagggtggccttgtagaagatagtaattccctgtcactggaggtgtgtcagcagatgtcagaaaggttgtaaaggggattcctgcattgtgtagaaagttggatcaggtcacccctaaggtcctttccaattatgaaaatctgtggttggctactggagacctatgggggcttgctgctgttaagtcagccctggtctccccagcatttgggagggagagctggtgagttcttctttctcctccctagataataatgacaaacacctgatcacctaccagtcagtggtcagaggcagagccctccaacagttcttatcttagctcaaccctgagggacagactcttgggttggaagatcacaaaaaggtcgctcttgtgctgttttatgttctctgaacgtgtaccttgagacaaggacctgtatgtaggtggctga

SEQ ID NO: 207737 - DNA, 438 bp, Homo sapiens
tttctgcatacttatcagttttcaagcttagagcaaggactgatagatttctctccttagctgtgcttatactagtaacacgatctctttcaagaaaaaaacatttaaataccattaatgagtgttatcattttaaagttttaggaaacttgaactaagttacatactcgtgaagggcttacaacaaccatacctactttgaacactgtgcaactgtcagaaatgtttatctcatgagtgagttttaaagtttaaggaggttttgaagtcacagagttttgtatattctaaattgtaaagttatattttacacatccaaattactttttcatttctttttctttcttgtttttttttttttttgagataaggtcttgcttgctctgtcacccaagctggagtgcagtggcatctggctcgttgcagccttgacttcat

SEQ ID NO: 207738 - DNA, 173 bp, Homo sapiens
tttttttggtagctattctaaatggtattgagtttgtgacttggttttcggcttgatctttattagtgtatagaaatgctactggtttttgtatggtgattttgtatcctgaaattttactgagtcatttattaaatctaggagtctttggaagagtcttttggatcttttag

SEQ ID NO: 207739 - DNA, 713 bp, Homo sapiens
tgacagagtgagactctgtccttaaaaaacaaacaaaaaaaatagctgggcattgtggcagacacctgtaatcccagctactcaggaggctgaggcaggagaatcgcttcaacccaggaagtggaggctgaggtgagcagaggtcatgccactgcactctagcctgggtgacagagtgagactttgtctccaaaaaaaaaaaaaaaaaaaaaaaaaaaaatgggaatgaaggaaacagaaaattagaacaccacagtaataattgctgcagataaagtccactgatgaagctaatattagtgggcaaaactctaaggaggaccaggatatttacatagcatctaagtataaacctccaaatatgcattaattatcttgtttttaacatatgtccccaaatgttttgatacccctccctccacaatggaaagcttaattctccttcccttaagtgtgggctgatttagtggtgcacttctaacaaatcatgcaggggtcagcgtagacccaaataggaaatatattaggctgtttaagccatatgatctcttttgcaacaactcacccctactgatgtagcatgaaagcagccataaaaaatatgtgaatgaatgaatgtggctgtatgccaataaaactttatttataaaaacaggcagtgggctggatttgggcctccagccatggtttgctgacctctagaatagcatatg

SEQ ID NO: 207740 - DNA, 271 bp, Homo sapiens
atgcagccacgaaaaggggtgaggtagatttatacacggtaatgcagtaagattttcacaactaagtggaaatacgagttgcagaataagaatgcatagtctgattaccatttatgtaaaaatgaaaattataattttaaaatagtaagtgcataggaaaaaaccgggaagatatacacaaaatttaatggtgattatctctaagagaggaagaggctttcctgtgagcatggggtgtgtgtgtgtgtgtgtgtgtgtgtgtgtgtgtgtg

SEQ ID NO: 207741 - DNA, 424 bp, Homo sapiens
aatgatgtgcaagaacaaaatggaaactggtcatggtgggaaaggaaatgaagcagaagacacctgacaaaaggaatcataacttagaaaaacggtgggtgttacaatttacaatttaagatttcagaacaagaacaaccatagagcacacagtcacaataatgttgccaaatcagagaaaagagtattgcagactaaacgaacttttatccatggaacatttacagtggctacagggtcacaaacctcctggatgcagtttataatcaatgtgaacgccccactgcacacccccatgcactcagctcaaaatatgcctatttatatttaccctcagtttcttatagctctgcacacacacacacaatatatatatatacacatatcccacctgaaatactttcaataaagtttctgaccaaat

SEQ ID NO: 207742 - DNA, 336 bp, Homo sapiens
ctagataacttttcagagtagagaatccagacaggttttgctgtgactgaaggagtgtctgcgcagtagaagaggtggtcatgcctgcagctgtgaccctgggtctgtgggcacacaaactggctaggtttaggaagtggccctctcaagggtcaggacaaagacgcatgatggtcaagaacccaggaatctctggttcaaatcctacttccaaggaacacttgtagatatgtgtgcaagacacacaacccttgccgaatcttaagattcctgtggttggctgggcacgggggctcacgcctgtaatcccagcactttgggaggccaaggcgggcg

SEQ ID NO: 207743 - DNA, 228 bp, Homo sapiens
tagagacgggagccataattgcaatgagaaggggagctgtggctggctctgactgccctgcttcccacattttcttttaacgagtgtccccacgtccccaccgcccctcccccccgacactcagatcccttcagttcccactggctgccattttcccttgctctgcagcctccaactccactccacttaagagaacagactggagactgctggaggccctgaagtgat

SEQ ID NO: 207744 - DNA, 413 bp, Homo sapiens
aggggtgtcaggcagctaggaagaccttagcacactgcctggcacgcatgacgctctcaacaaatgcagccactatggtattacagttaagccaggcaaagaggatggagggcaaagagcagctcccacaggggaagcagcaggtgcagcacctgggctggaaggagactggacacagcaaagcaggaagctcctgacagagcactggtgccctgcctggcatccctgtcactgatgctcctgccactttgtgccaaatctcccgcccactggagctctgattcggatctgtacagtgcaactctagggcctggtagtgccttccacgtgggggttaagtaacacatggctgctgagtcaatgtatgaatggatggatcaatggatagacggacagatggtctagtgattgag

SEQ ID NO: 207745 - DNA, 327 bp, Homo sapiens
ggagtgcaatggcgcgatctcggcttactgcaacctctgcctcctgggttcaagcgattctccagcctcagcttcccgagtagctgggattacaggtgcctgctaccatgcctggctaatttttgtatttttagtagagacggggtttcaccatgctggccaagctggtctcgaattcccgacctcaggtaatccgctcgcctcggcctcccaaagtgctgggattacaggcatgagccactgcgcccagcctaaactcgtgctttcactggctgatatatagacagtaagatgttgaaaaggaatttcaatgtgagaaaatgccca

SEQ ID NO: 207746 - DNA, 497 bp, Homo sapiens
gccgctgagtgtttatgctttcggggcataaagacatgaaggcaataaggagacttttctcctcagaggccgcccatggctccccatgggtgtctcacacaggggagaccaactcatctggcacccaagaaactctctttcccacaagtattccacagaggagttaaagccaagcctttggatttcagactcaattattttatccaaggatgagtatcacacatgaaggtttgcatgtgaaataattcatgttattattcatttaaattttgttaatcccacttcagcatacctagatgagggagttgtttttaattaattaatatttctgctggagttgaaaaggatcatgtgaacttttggaacaaatattgcttcttgcatttctaattgcttatgaacatcagcctgcctgcccttccctgcacataacagctaggcctgtgcgtagtttttgtttcatcatgtacgttaagattgtcttagggtacactctg

SEQ ID NO: 207747 - DNA, 223 bp, Homo sapiens
taactgaagcacagatctcagaatatgaagttatgggagatgaggcatgataaaaaggtacacatgatcctaatcatgaaggatcatcatatattatgctcttaggttcataactcaccctacaggagattagaaaacaacagaaaaatgttaatcaaaggttgatattcatcagatttgctcaggaaagtaattctctagtaatggcattcctattaaaaag

SEQ ID NO: 207748 - DNA, 439 bp, Homo sapiens
gagacggagttttgctcttgttgcccaggttggagtacaatggcgccatcttggctcactgcaacctctgcctcccaggttcaagcaattctcctgccttagcctcccatgtagctgggattacaggcatgtgtcaccctgcccagctaattttgtattttaggtagagatggggtttcatcatgttggcaaggctggtcttgaactcctgaccgcaggtgatccacctgccttggcctcccatagttccgggattacagatgtgagctgctatacccggccacatttcagattttaataaatgtacccatagggagaagtataaagcgttgagctcaacgctttatacttcattagctctagaggtccatgcatacttaatattatactagaattcaatacggaagtataaagcgttgaggaagtataaagcgttgag

SEQ ID NO: 207749 - DNA, 391 bp, Homo sapiens
aggatccccagtccaagtgacaagtgtggttgtgtcaaacctgagttggtgacatctctatgctgctattgtcacaagctcatattgctggacagcaaactatgagacccaaagtgaaaagaagtataacgtaacggttatttctgtgtggttggttgacaagtgatgtatttaaaaaatatttttaggcatgagctaccgcgtccggccaaacttttaagtcttacagttggattatgaacacatgataaaaactattctttgtaatgccaaattaataaaacacaaagtttggtaatagttattcttatttaatttttagaactggtcagttaatgaaatggattgcttttgtataatttgaatatttttcagtgggaatcataagagc

SEQ ID NO: 207750 - DNA, 571 bp, Homo sapiens
aatcagcggacataaaagcagctattataaatatgctttataacttttaagaaagcagagaaaaggtcatgatgatgagaggcatggaagatataaaaaagtttcaaatgaaacttacagaggagaactttgaaacaaaaaacataaaagatgagattaacagcatattaaacactgtggaagatcatgaagttaaaaaaacagcaatagtataactattcaaaataaagtacagagaggaaaaaatactgagaaaaaatggataatttcaagtggtctaaaacatgtgtaactggaggcccccaaaaagggaagatacagaagaaattattttaaaagtatggctgaaaattttctgaatttcatgaacactataaaaccagagacccaagaagctaaagaatagcgagaaagaacaaacataaagaaatcatactaatgcgcatcataatctaattacagaaaactaatacaagagaatatttgtatttaggccagaaaaaaagaacacattatatacaaaagaactaaaataagaataaaagtaggcttattgccagaaccatgtaaa

SEQ ID NO: 207751 - DNA, 378 bp, Homo sapiens
tgctgtagccatacataaagagatggaggagaagcaagagggatttattgaatactaggtttgagcaaaagtaattgcggttttgccatcatgccaaaagctacagttacttttgcaccagcctaatatttactaagtgccagatattcttacttaccttatttaaatcctcaccaaagacacgagttggaatttacaaatatgaaaattgaggcatagagttaggtaatttgcctgctatcagacagctagcaagaggagaaccaggacgtaaacctaggtctaggaagctatcaactaaaaatgtcctgtaaacttcctgtacgtcatccattgttcacgtatcattactgggttgctgtccttgcccacaatacc

SEQ ID NO: 207752 - DNA, 277 bp, Homo sapiens
agggatataggatctcacttttttttgtctctctccaggattacagagataaagcatttatgcatatacagaaccacgggattttagaagttgtccatcagttcctctggttgttttggtacaataaaaaagtgctttttttagagatagaatctctgttgcctgggctgaagtgcagtggcctgatcatagctcactgtaaccttgaacccgggaagtggaggttgcattgagccaagatcgcactactgcactccagcctggcaacagagtatta

SEQ ID NO: 207753 - DNA, 143 bp, Homo sapiens
gggaaacaatttttatagctaaacctaccaaaaaaacccaaggagaataaaaatgacatgtagcttttaaagtttgtcacaggaagcaactaggagacataaagataatggttctcacattctcatttccttaagcagcttct

SEQ ID NO: 207754 - DNA, 769 bp, Homo sapiens
gaggtttcaccatgttgtccaggttggtctcgaactcctgacctcaagtgatccgcccacctcggcctcccaaagtgctgggattactggtgtgagccaccatgcccagccagtggttgaattttttaaaaagtgttcatggggtgcttgaaaactaaaatatccttctagatttgtaagacagtatacctgcatactggtgtggcttccacacttgagtaaaagcttcagagtaggtatcctagatttccccaagatgctctactcttaaaatagtgccattcattttctaggtgggatcatattccacgctgactatattgctaggggtggcccagagggtcaggcctttgggaaatagcatggcctttaccagcttcccttctctcccaaagaacttcccttcttgggctttagattgaggaaggggctgagtggtaggcggtgctgctgtgctctgatgaagacccatgtggctagcaacagcgcttaccttttgtctctgggtcctggcctggggccatcaatccactttgggccactcactgtctgctctgcctccaccaatcagaaacccttccaaggaacagtgagagccaaagccaagagaagccttcttccctgtttggtgattgtgtgacagtgggtgaacctctctcagagagaactagaaagaactcagtgcttgtactccacagtgagtaatgtcaggtctgacccatcctgaagcctgtcttgccatgcttttacagtgttggaggcttctaca

SEQ ID NO: 207755 - DNA, 184 bp, Homo sapiens
gaagacgagactcagctttcatttttgatgttgtcatagagaagactctatggtaatgcttattttcacagtcaactttctcttcttttcccccagacagaaattgcaaactcaggtgagtgacagctttctggagtctgcaaacatagattattttccctcttttgatggcaaatttcttata

SEQ ID NO: 207756 - DNA, 104 bp, Homo sapiens
gaagaagcagaagtccaaatcaaggacaatgagagtattgaactaatgtatctagtatcaagacccaaagtccattcttaaaggaaaacatactccaagagggg

SEQ ID NO: 207757 - DNA, 512 bp, Homo sapiens
acctatgcctgctcacgaatctattactatacacccagaaaatacaaacatatcaactaaaatactaaaagcaattcttcaaaagtcatcactatagtagataataaacatgaaactcaattgcttcctttatttaaatagccagataataatgcaattgatgaaatagcctcataaaaacagaagcccttgccctccctccaaaatgtttttagaaataaatataacaaaaatatatggtttcttaaaaataacaaatatgcgtatcaacaagaaacacagatatgacaagatgaaaatcataaatgccactaaagggcatcaaacatcaaataaatgggaaatctatcttcctagaaagagatatgctatcgtaaagttatcaatgatcttctaaattaatctacaaatgcagaccctctcaatcaacataccaccaagaattattattattattattttgagatgggagtctagctcagtcccccaggctgggtgcagtggcacgatct

SEQ ID NO: 207758 - DNA, 203 bp, Homo sapiens
agagccattgatgctaagtgccacagggattcagagtggagagaatacatctgcccttgacaaacagaaaaggctacatggaaaaataggtattactggatgttctctgttaatctctccatcaaggcacccatcttcagaagaccgtgccctttagaagtccaaactatgtagctcagagttcaaggttggccatgcagtca

SEQ ID NO: 207759 - DNA, 711 bp, Homo sapiens
agggtcacaccactgtgcccggctaatttttgtattttttgtagagacagggttttcaccatcaggccggtcttgaactcctgacctcaactgatcacccgcctcagcctcctaaagtgctaagatagccacggtgcctggttagaatatattttttaaatgtgccttaaaatttctcaatacaaaaaggttcaatgaacattatctaggaaataaagaattaaaaaaaataagattactaggtagaaaataaacatttaaattcatagaaagggattggaagattatataccaaactttttttttcttttgagacaagggctcactctgtcgcccaggctggattgcagtggcacaatcacagctatatatgtgtatataattttctaagtaaagaaagtcctgaaattttaggttaaaaggtgtattagggccgggcgcggtggctcatgcctgtaattgcagcattttgggaggctgaggcgggcaggtcacttgaggtcaggggttcgagatcagcctggccaacatgatgaaaccccatttgtactaaaaatacaaaaattagccaggcatagtggcaggtgcctgtaatcccagctactcgggacgctgaggcaggagaatcatttgaacctgggagatggaggttgcagtgagctgtgatggcaccactgtgctctagcccgggcaacagagcaagactgtctc

SEQ ID NO: 207760 - DNA, 111 bp, Homo sapiens
tcaaagtgtggcatccaaacctgcagcattagcaccaactgggaacttgtaagaatgcagactcttgggccccagatcttctgaaccaataaactggagacgaagcccaga

SEQ ID NO: 207761 - DNA, 180 bp, Homo sapiens
tctccttttcttaaaacaagcctaaatgctcctctgggactctagtacttcaggatcttctgattcatgccagaccgacgtaaatcatccctcctgccctctgctcaggatcaagtggaaagttccaaggacagggcatgggagtgggggcctaggaccagaaggttacataaagcaaga

SEQ ID NO: 207762 - DNA, 272 bp, Homo sapiens
aggcagaggttgccgtgagccgagatcgagccattgcactccagcctgggcaacaagagtgaaactctgtctcaaaaaaaataaaaataaaaaataattaccttacaatcaagaaaaatttaaggattttcaatatcgtcccttctatttaactcaaggttttagccaggaaaataaggccaggaataaatataaaatgtataaggtttggaaaggaagaaacaatcttgccattaattgcaaacagcaagaatgtttacaatgcttgggat

SEQ ID NO: 207763 - DNA, 748 bp, Homo sapiens
tattgtgttgcttaagtttggtgatattctttgttaaagagaagttctaaattttgatgaagtccaaattatcagtctttcactgcttttcagttttgtctcatttaaggtctttactacctcagatcacaatgttttctgtgttttttctagtatttctttttatatggtggagctaagatcatttttctagtatttttaaagtcttatttgtacatttataaaatcatctataattaatttttctgtatagtgttaagataggactttttcttgtctttttttccaaatggagatccagtcaaatacctgaccattttaatgactctacaacacacctttatctgtgaccaactctgttcagaaagctggcacttacaggcattcagtaaaaatttattacatgagttaagtagagagggagaatgtcaggcattttaggcggggaactcgtgtgagcaaatgctgaggctggaatgcacaagtgtgtgctgagagctacatgtggacctctcttgttcagccagatgatcccttctcaggcccacttgacaccctgagctttcctttctgccaatactgggtcccccttgggcccagcctgctctccctcttcaatggctgctggccattccctccgtctcctactcatttctttgctgtaactaaagttgagttcataggtcctttcttttcaaagactgaccactgatcactaccagaggacaaacgataacaaaaagaataa

SEQ ID NO: 207764 - DNA, 646 bp, Homo sapiens
tattgtgttgcttaagtttggtgatattctttgttaaagagaagttctaaattttgatgaagtccaaattatcagtctttcactgcttttcagttttgtctcatttaaggtctttactacctcagatcacaatgttttctgtgttttttctagtatttctttttatatggtggagctaagatcatttttctagtatttttaaagtcttatttgtacatttataaaatcatctataattaatttttctgtatagtgttaagataggactttttcttgtctttttttccaaatggagatccagtcaaatacctgaccattttaatgactctacaacacacctttatctgtgaccaactctgttcagaaagctggcacttacaggcattcagtaaaaatttattacatgagttaagtagagagggagaatgtcaggcattttaggcggggaactcgtgtgagcaaatgctgaggctggaatgcacaagtgtgtgctgagagctacatgtggacctctcttgttcagccagatgatcccttctcaggcccacttgacaccctgagctttcctttctgccaatactgggtcccccttgggcccagcgtcccctctcagccgccacccccccgggaaacgaaccacataaca

SEQ ID NO: 207765 - DNA, 586 bp, Homo sapiens
agaccaagtgaaaagacccatacctcactgctgtatagcattttttcctccctgtcctcctcgtcttcctcctcctccttgctttttccttttctgtgtttctttcggatagcagttgttgctatgcctttaaattcacaaatattttgtctacaatatctaatctgccataaaaaccgtccactgtatttttcatttcagacattgtagttttcatttctagaagtttgatttgcgtgttttttaaatatatgtccagtctttgctctagctacattttgaaatatatggactacagatataacaattgttctaatgtcctgtctgctagctacattttaaaatatatggactacagatataacaactgttctaatgtcctgtctcctatcatctgagtcagtttctgttttattcctattttcactatgggtcttttcctgttttttttttttcctgcatttttggcaacttttgattgaatgccagattttgtaaaatttaccttgactcttttaataagtcttgaatttttgatggtaagaagctattttttttccatgaagtcatttgtataattgctaat

SEQ ID NO: 207766 - DNA, 347 bp, Homo sapiens
agtgtcttcaagaaatttacgtatggtccatcaagtaaacatttaggctattcagcttttttttgagaagttactttttctgattttagaaataaatgtccttttgtaaaatctggaaaatgatgaagtcagtcacattttctagtccttctatatgtttatatgcatatatgtatatatgtgtatttgacatcataggtaatattttgtgtctttgttttaaaaaactagagatatcctccatgttacagatagaaaaattatggtacacggaagtaaagctactggcctaatgccacacagtggtgtaagaggattcacagattcttctgctcctccttaagttt

SEQ ID NO: 207767 - DNA, 360 bp, Homo sapiens
ccaagatttcaacctattgcctgagaggttcgctgtggcctaaagtgaagttacattaaaagactgcacaaaataaagtatctaccaaataccttttctttctgggttaaattctttatctgcaaggctggactcagcatgctcgggggaatgagtaggtctacatgaacggtgagcctccaggaacgcagcttctccacagattttatctttttcactttatatttgaatcagaatgtactgatgggtgatcatttggatgcagaagtgcaagattccactcattcttcacttctctctcctgagataacggccacctgcccatgcacacatgcgtggggtaggaggtgggtaccgagc

SEQ ID NO: 207768 - DNA, 566 bp, Homo sapiens
aaaaaaaccccgtagtgcaacaactgcctcttcctggggatgagtaagcactcagtgacatggagcccggatttgctcttagataaggagggatagagaccctctggaagggctgtggggatgcagcagtggggtggctaggctcagcattgaggagcccccataactcatgctcattccctgcacacaatgaggactgtggaagcgtttcttctgcttctcttaaagccctggaaactgagctgtggcttgatggattggcctgttgggggtatccagggagtgcgcgggagatgtggaccaacagacttgatgattgtttctcaagcacaatcttcctggggaaaagagaataaagagctcagacagtgagatcccaataaaatgaagatgggaatttattgttgaggaaaagaacctgctatgtttgaatgcttgtcctttcccaaacccatttagaaattgatccccaatgtagagattaagtttaagaagtgattggggccaggggcagtgtctcacacctgcaatcccagcacttttggaggccaaggccagtggatcac

SEQ ID NO: 207769 - DNA, 802 bp, Homo sapiens
tcagtatcaacgggaatggaagcttcctgagcacagactgtcttaaccttccagtaccaagcacaaagctgcacatggaatataaatagaaagcaatgttctagaagatggagaaggggtgaatggctgggtttaactgtagagggaaagaaacactgcaaagagaaatgcaaatgtgtaagtaaactgctcctcaggacagaatcatggaggagtctggggatcagaggcgccaggtccctgggaagatggacatgggacttgctgaatgtgtgtgctggaagccagccacccagatgaccatcacaacctcaagtagccaggcagcgattccttcttcccttgggcagaagacatctggggaagggaaggaggcaggaacagatggatggagggaccgaatgagaacggctccagatcgagggagactgcgcacaggcaaggatgtaggtgaggcccaggatcgaaaatcgcaatattgagtaaagcttcaatctgatcaacaaaaatatcaaccttctaatgccagtctcttaaatgctctcttaaaaatgctagcagccggttacaagaatccctcccttccaggtagattgggggaatctcacctagaataaaagaaaaaacctatgggaactgacattaatggtttttaaagaaaaggccaattcccagtcaccctgaagttcaacgcaccacttgccatccctgacagtacgcatgaaactttcacttggtttttgagtgcctcactcgcaagtctgaaaccacacccagcaatccacaacatttgagatcatct

SEQ ID NO: 207770 - DNA, 2637 bp, Homo sapiens
agcgtgagccgcggccccagccgggccgagcgcgctgcctgagctgagccgccgtaggtgaggggcccgcgtccccgcccgccctgggcgccgcgcctggcactgatcctgccggtcgcccactgtcgccgccgccgccgcccgcgggcaccatgacagctctgagcgctggggttacagactgtggttttgtgcttgctcaccaaagctaacctcagcatgctcaaaaggaagcagagttccagggtggaagcccagccagtcactgactttggtcctgatgagtctctgtcggataatgctgacatcctctggattaacaaaccatgggttcactctttgctgcgcatctgtgccatcatcagcgtcatttctgtttgtatgaatacgccaatgaccttcgagcactatcctccacttcagtatgtgaccttcactttggatacattattgatgtttctctacacggcagagatgatagcaaaaatgcacatccggggcattgtcaagggggatagttcctatgtgaaagatcgctggtgtgtttttgatggatttatggtcttttgcctttgggtttctttggtgctacaggtgtttgaaattgctgatatagttgatcagatgtcaccttggggcatgttgcggattccacggccactgattatgatccgagcattccggatttatttccgatttgaactgccaaggaccagaattacaaatattttaaagcgatcgggagaacaaatatggagtgtttccatttttctacttttctttctacttctttatggaattttaggagttcagatgtttggaacatttacttatcactgtgttgtaaatgacacaaagccagggaatgtaacctggaatagtttagctattccagacacacactgctcaccagagctagaagaaggctaccagtgcccacctggatttaaatgcatggaccttgaagatctgggacttagcaggaactagtatattcaccgtctatgaggccgcctcacaggaaggctgggtgttcctcatgtacagagcaattgacagctttccccgttggcgttcctacttctatttcatcactctcattttcttcctcgcctggcttgtgaagaacgtgtttattgctgttatcattgaaacatttgcagaaatcagagtacagtttcaacaaatgtggggatcgagaagcagcactacctcaacagccaccacccagatgtttcatgaagatgctgctggaggttggcagctggtagctgtggatgtcaacaagccccagggacgcgccccagcctgcctccagaaaatgatgcggtcatccgttttccacatgttcatcctgagcatggtgaccgtggacgtgatcgtggcggctagcaactactacaaaggagaaaacttcaggaggcagtacgacgagttctacctggcggaggtggcttttacagtactttttgatttggaagcacttctgaagatatggtgtttgggatttactggatatattagctcatctctccacaaattcgaactactactcgtaattggaactactcttcatgtatacccagatctttatcattcacaattcacgtactttcaggttctccgagtagttcggctgattaagatttcacctgcattagaagactttgtgtacaagatatttggtcctggaaaaaagcttgggagtttggttgtatttactgccagcctcttgattgttatgtcagcaattagtttgcagatgttctgctttgtcgaagaactggacagatttactacgtttccgagggcatttatgtccatgttccagatcctcacccaggaaggatgggtggacgtaatggaccaaactctaaatgctgtgggacatatgtgggcacccgtggttgccatctatttcattctctatcatctttttgccactctgatcctcctgagtttgtttgttgctgttattttggacaacttagaacttgatgaagacctaaagaagcttaaacaattaaagcaaagtgaagcaaatgcggacaccaaagaaaagctccctttacgcctgcgaatctttgaaaaatttccaaacagacctcaaatggtgaaaatctcaaagcttccttcagattttacagttcctaaaatcagggagagttttatgaagcagtttattgaccgccagcaacaggacacatgttgcctcctgagaagcctcccgaccacctcttcctcctcctgcgaccactccaaacgctcagcaattgaggacaacaaatacatcgaccaaaaagtaagatctgctgtttcgaataaccaggcttctaaaaagcatctatgtttgagaaaagaaccgcagagttctttagggtcctggaatccaatttctcaagagaataatgaaaataaaatgatttcatttgtaaaagatatcatgaaacctaacattttttactctatgcattgaaattttgcatttgcccgtgtaagcttttgagctgcgccacgtggcagccatgcgactttgtaaacatcaagagcctcccaaatctgcattttctcaggtgcggaataaagggctgggatctccaaggctcagtccaggtgtaatgacctgccatctcctgc

SEQ ID NO: 207771 - DNA, 2653 bp, Homo sapiens
agcgtgagccgcggccccagccgggccgagcgcgctgcctgagctgagccgccgtaggtgaggggcccgcgtccccgcccgccctgggcgccgcgcctggcactgatcctgccggtcgcccactgtcgccgccgccgccgcccgcgggcaccatgacagctctgagcgctggggttacagactgtggttttgtgcttgctcaccaaagctaacctcagcatgctcaaaaggaagcagagttccagggtggaagcccagccagtcactgactttggtcctgatgagtctctgtcggataatgctgacatcctctggattaacaaaccatgggttcactctttgctgcgcatctgtgccatcatcagcgtcatttctgtttgtatgaatacgccaatgaccttcgagcactatcctccacttcagtatgtgaccttcactttggatacattattgatgtttctctacacggcagagatgatagcaaaaatgcacatccggggcattgtcaagggggatagttcctatgtgaaagatcgctggtgtgtttttgatggatttatggtcttttgcctttgggtttctttggtgctacaggtgtttgaaattgctgatatagttgatcagatgtcaccttggggcatgttgcggattccacggccactgattatgatccgagcattccggatttatttccgatttgaactgccaaggaccagaattacaaatattttaaagcgatcgggagaacaaatatggagtgtttccatttttctacttttctttctacttctttatggaattttaggagttcagatgtttggaacatttacttatcactgtgttgtaaatgacacaaagccagggaatgtaacctggaatagtttagctattccagacacacactgctcaccagagctagaagaaggctaccagtgcccacctggatttaaatgcatggaccttgaagatctgggacttagcaggcgagagctgggctacagtggctttaatgagataggaactagtatattcaccgtctatgaggccgcctcacaggaaggctgggtgttcctcatgtacagagcaattgacagctttccccgttggcgttcctacttctatttcatcactctcattttcttcctcgcctggcttgtgaagaacgtgtttattgctgttatcattgaaacatttgcagaaatcagagtacagtttcaacaaatgtggggatcgagaagcagcactacctcaacagccaccacccagatgtttcatgaagatgctgctggaggttggcagctggtagctgtggatgtcaacaagccccagggacgcgccccagcctgcctccagaaaatgatgcggtcatccgttttccacatgttcatcctgagcatggtgaccgtggacgtgatcgtggcggctagcaactactacaaaggagaaaacttcaggaggcagtacgacgagttctacctggcggaggtggcttttacagtactttttgatttggaagcacttctgaagatatggtgtttgggatttactggatatattagctcatctctccacaaattcgaactactactcgtaattggaactactcttcatgtatacccagatctttatcattcacaattcacgtactttcaggttctccgagtagttcggctgattaagatttcacctgcattagaagactttgtgtacaagatatttggtcctggaaaaaagcttgggagtttggttgtatttactgccagcctcttgattgttatgtcagcaattagtttgcagatgttctgctttgtcgaagaactggacagatttactacgtttccgagggcatttatgtccatgttccagatcctcacccaggaaggatgggtggacgtaatggaccaaactctaaatgctgtgggacatatgtgggcacccgtggttgccatctatttcattctctatcatctttttgccactctgatcctcctgagtttgtttgttgctgttattttggacaacttagaacttgatgaagacctaaagaagcttaaacaattaaagcaaagtgaagcaaatgcggacaccaaagaaaagctccctttacgcctgcgaatctttgaaaaatttccaaacagacctcaaatggtgaaaatctcaaagcttccttcagattttacagttcctaaaatcagggagagttttatgaagcagtttattgaccgccagcaacaggacacatgttgcctcctgagaagcctcccgaccacctcttcctcctcctgcgaccactccaaacgctcagcaattgaggacaacaaatacatcgaccaaaaacttcgcaagtctgttttcagcatcagggcaaggaaccttctggaaaaggagaccgcagtcactaaaatcttaagcaagaggccattaccgacgagctcacccattagcatccgctgttgtctctacttgggaagatcacattgtcactctagtggagtcagaatgtataggctttttccacacccttgttctgggacattaagaaagaagacatggagacaaagaagaaaagaaccggggaccccctgctactgtgtctataaacaactagtggtgtttaaaggctaataaagctccaaagatctctcttataaaa

SEQ ID NO: 207772 - DNA, 2530 bp, Homo sapiens
agcgtgagccgcggccccagccgggccgagcgcgctgcctgagctgagccgccgtagactgtggttttgtgcttgctcaccaaagctaacctcagcatgctcaaaaggaagcagagttccagggtggaagcccagccagtcactgactttggtcctgatgagtctctgtcggataatgctgacatcctctggattaacaaaccatgggttcactctttgctgcgcatctgtgccatcatcagcgtcatttctgtttgtatgaatacgccaatgaccttcgagcactatcctccacttcagtatgtgaccttcactttggatacattattgatgtttctctacacggcagagatgatagcaaaaatgcacatccggggcattgtcaagggggatagttcctatgtgaaagatcgctggtgtgtttttgatggatttatggtcttttgcctttgggtttctttggtgctacaggtgtttgaaattgctgatatagttgatcagatgtcaccttggggcatgttgcggattccacggccactgattatgatccgagcattccggatttatttccgatttgaactgccaaggaccagaattacaaatattttaaagcgatcgggagaacaaatatggagtgtttccatttttctacttttctttctacttctttatggaattttaggagttcagatgtttggaacatttacttatcactgtgttgtaaatgacacaaagccagggaatgtaacctggaatagtttagctattccagacacacactgctcaccagagctagaagaaggctaccagtgcccacctggatttaaatgcatggaccttgaagatctgggacttagcaggcgagagctgggctacagtggctttaatgagataggaactagtatattcaccgtctatgaggccgcctcacaggaaggctgggtgttcctcatgtacagagcaattgacagctttccccgttggcgttcctacttctatttcatcactctcattttcttcctcgcctggcttgtgaagaacgtgtttattgctgttatcattgaaacatttgcagaaatcagagtacagtttcaacaaatgtggggatcgagaagcagcactacctcaacagccaccacccagatgtttcatgaagatgctgctggaggttggcagctggtagctgtggatgtcaacaagccccagggacgcgccccagcctgcctccagaaaatgatgcggtcatccgttttccacatgttcatcctgagcatggtgaccgtggacgtgatcgtggcggctagcaactactacaaaggagaaaacttcaggaggcagtacgacgagttctacctggcggaggtggcttttacagtactttttgatttggaagcacttctgaagatatggtgtttgggatttactggatatattagctcatctctccacaaattcgaactactactcgtaattggaactactcttcatgtatacccagatctttatcattcacaattcacgtactttcaggttctccgagtagttcggctgattaagatttcacctgcattagaagactttgtgtacaagatatttggtcctggaaaaaagcttgggagtttggttgtatttactgccagcctcttgattgttatgtcagcaattagtttgcagatgttctgctttgtcgaagaactggacagatttactacgtttccgagggcatttatgtccatgttccagatcctcacccaggaaggatgggtggacgtaatggaccaaactctaaatgctgtgggacatatgtgggcacccgtggttgccatctatttcattctctatcatctttttgccactctgatcctcctgagtttgtttgttgctgttattttggacaacttagaacttgatgaagacctaaagaagcttaaacaattaaagcaaagtgaagcaaatgcggacaccaaagaaaagctccctttacgcctgcgaatctttgaaaaatttccaaacagacctcaaatggtgaaaatctcaaagcttccttcagattttacagttcctaaaatcagggagagttttatgaagcagtttattgaccgccagcaacaggacacatgttgcctcctgagaagcctcccgaccacctcttcctcctcctgcgaccactccaaacgctcagcaattgaggacaacaaatacatcgaccaaaaacttcgcaagtctgttttcagcatcagggcaaggaaccttctggaaaaggagaccgcagtcactaaaatcttaagcaagaggccattaccgacgagctcacccattagcatccgctgttgtctctacttgggaagatcacattgtcactctagtggagtcagaatgtataggctttttccacacccttgttctgggacattaagaaagaagacatggagacaaagaagaaaagaaccggggaccccctgctactgtgtctataaacaactagtggtgtttaaaggctaataaagctccaaagatctctcttataaaa

SEQ ID NO: 207773 - DNA, 2579 bp, Homo sapiens
agcgtgagccgcggccccagccgggccgagcgcgctgcctgagctgagccgccgtaggtgaggggcccgcgtccccgcccgccctgggcgccgcgcctggcactgatcctgccggtcgcccactgtcgccgccgccgccgcccgcgggcaccatgacagctctgagcgctggggttacagactgtggttttgtgcttgctcaccaaagctaacctcagcatgctcaaaaggaagcagagttccagggtggaagcccagccagtcactgactttggtcctgatgagtctctgtcggataatgctgacatcctctggattaacaaaccatgggttcactctttgctgcgcatctgtgccatcatcagcgtcatttctgtttgtatgaatacgccaatgaccttcgagcactatcctccacttcagtatgtgaccttcactttggatacattattgatgtttctctacacggcagagatgatagcaaaaatgcacatccggggcattgtcaagggggatagttcctatgtgaaagatcgctggtgtgtttttgatggatttatggtcttttgcctttgggtttctttggtgctacaggtgtttgaaattgctgatatagttgatcagatgtcaccttggggcatgttgcggattccacggccactgattatgatccgagcattccggatttatttccgatttgaactgccaaggaccagaattacaaatattttaaagcgatcgggagaacaaatatggagtgtttccatttttctacttttctttctacttctttatggaattttaggagttcagatgtttggaacatttacttatcactgtgttgtaaatgacacaaagccagggaatgtaacctggaatagtttagctattccagacacacactgctcaccagagctagaagaaggctaccagtgcccacctggatttaaatgcatggaccttgaagatctgggacttagcaggcgagagctgggctacagtggctttaatgagataggaactagtatattcaccgtctatgaggccgcctcacaggaaggctgggtgttcctcatgtacagagcaattgacagctttccccgttggcgttcctacttctatttcatcactctcattttcttcctcgcctggcttgtgaagaacgtgtttattgctgttatcattgaaacatttgcagaaatcagagtacagtttcaacaaatgtggggatcgagaagcagcactacctcaacagccaccacccagatgtttcatgaagatgctgctggaggttggcagctggtagctgtggatgtcaacaagccccagggacgcgccccagcctgcctccagaaaatgatgcggtcatccgttttccacatgttcatcctgagcatggtgaccgtggacgtgatcgtggcggctagcaactactacaaaggagaaaacttcaggaggcagtacgacgagttctacctggcggaggtggcttttacagtactttttgatttggaagcacttctgaagatatggtgtttgggatttactggatatattagctcatctctccacaaattcgaactactactcgtaattggaactactcttcatgtatacccagatctttatcattcacaattcacgtactttcaggttctccgagtagttcggctgattaagatttcacctgcattagaagactttgtgtacaagatatttggtcctggaaaaaagcttgggagtttggttgtatttactgccagcctcttgattgttatgtcagcaattagtttgcagatgttctgctttgtcgaagaactggacagatttactacgtttccgagggcatttatgtccatgttccagatcctcacccaggaaggatgggtggacgtaatggaccaaactctaaatgctgtgggacatatgtgggcacccgtggttgccatctatttcattctctatcatctttttgccactctgatcctcctgagtttgtttgttgctgttattttggacaacttagaacttgatgaagacctaaagaagcttaaacaattaaagcaaagtgaagcaaatgcggacaccaaagaaaagctccctttacgcctgcgaatctttgaaaaatttccaaacagacctcaaatggtgaaaatctcaaagcttccttcagattttacagttcctaaaatcagggagagttttatgaagcagtttattgaccgccagcaacaggacacatgttgcctcctgagaagcctcccgaccacctcttcctcctcctgcgaccactccaaacgctcagcaattgaggacaacaaatacatcgaccaaaaacttcgcaagtctgttttcagcatcagggcaaggaaccttctggaaaaggagaccgcagtcactaaaatcttaagagcttgcacccgacagcgcatgctgagcggatcatttgaggggcagcccgcaaaggagaggtcaatcctcagcgtgcagcatcatatccgccaagagcgcaggtcactaagacatggatcaaacagccagaggatcagcaggggaaaatctcttgaaactttgactca

SEQ ID NO: 207774 - DNA, 626 bp, Homo sapiens
gcctgactcctgggtgggtggggtacaggcagttaggtgctgaatgaagctgccatccttgctgcagcttctaactggtaaaaagatccaggatggagatgggaaggttagaaaggcagccctcacctctgaggacagaggccggggtccaggcccgtgggcgcaaaggtgcctcatagcatagccagcattcagcacacacaaacctactgcccacatttgggctcagggttggccatttgctagttctgctgccctcttaagatctgactgccaaataaatcatcctcatgtccttttaaaaaaaaaaaaaaaaaaaaaaaaaaaaaaaaaaaaaaaaaaaaaacaaaaaaaaaaaaaaaacacaaaaaagaaagcgaaaacggaacaacgaaaaaaaaagaaaagaaaagcaacaaacaaaaaaaagaaggagaacaaacaaaaaagaaaaaggaagaaccaagagaacgccgacaagaccgacaaaacgggcaacaacgataaccgcacacaactccgacagaaagcaaacggcaggacgggaagaagaacagggagcagacaccagagccgcggagacaaaaaacccacgcaagacccgaacaggagctacgcaaacgaac

SEQ ID NO: 207775 - DNA, 389 bp, Homo sapiens
tgcaaaacacatgtagacatggtttcagattctacatcacaactaacctttaagaaattaccacttgttaagttttgttgcagaatcagagtattacaactatctgaaaaagctaaaataccccacccaacatactggtcataaacttcaaccagaaacatatatagcaacagattgataggaaaatccagctgtcttctatcaaggccaaacattaaggagatttacaaaaatgtaataccatcaccattccttcactaacttattttggaatatagtttttcattaaaatgttatttattaaatatattaagctgggtatgcacacctgtagtcccacctatttgggaggctgaggcaagaggatcacttcagcccaagagctcaag

SEQ ID NO: 207776 - DNA, 197 bp, Homo sapiens
cgtgcactctgggccaccgagatgagaaattcagattgagaaacttggccggtcagtgacggagctggggctcgctctcgggtggtcttgctccagagatttgatgagaccctggttgttgcccaactctattactggccgcgtgaccttgggactctgagcccctgacttccctgtcacaccaggaaatgcttggt

SEQ ID NO: 207777 - DNA, 377 bp, Homo sapiens
tgccttcaaaatcctcttcgtgaggtttatagaattcctaagaactcaggaaagacatcagcagagagcaatgatcgtcatagccagatgcactgtcacctccattcatacagcactgactttgccctttcagtcccatggggtttacagatctgttctcctaacagcttcttgcctatttcacaatgcctattgcaaaactagctccacacagaatgcacccacccagctacttgtcgaattacaacctgatgatggatccaccagaaactaagaatggaaaggttataaagaaatcacagcattcatcttctggaagaaaaagactatttcttagaaagtaaaataaatgaataaaagcacttaataaggagcat

SEQ ID NO: 207778 - DNA, 470 bp, Homo sapiens
gtctgtagcccacgttcccagcaggggagcctccccaaaggtctctggatccccttcggaaactggaaaaagtaggaacgctgatagaggttgttctctctccctgtagcagacacagcgagttcctgaccaagtggcacacctctttccctttctaatgaaatgcagtcttcctaaggtgttcacgctcctccctgtgaccttaagcttcaaggttagcagcccatcccaactccaaagaagtccaaattgccacggactccgttcctggcaggcacagatgtagacataagcgtgagcgttaactccatcaggcgggaactgaggagaggtttttgattctgatttctttgctgataaggtgggacatggagaaagatctttccaccttttccatggattttgtcaagggagagcctggctgtgcttgaatgaggtgcctggggtgggtgcaggcctgagaagtgcca

SEQ ID NO: 207779 - DNA, 311 bp, Homo sapiens
ataaatggtttcttgaaatggaatcgctcctggtgatgatgctgtgaacactgttgaaacgataacaaaaagcagattactaaatttagttgataaagtagcagcagggttttagaggattgactctaattttgaaagaagttctactgtgggtaaattgctatcaaacagctacagaaaaatctttcatgaatggaaagtcaatcgatgagtcagactttacttccgtcttattttaagaacttggccaggcacagtggctcacgcctgtaatcccagcagtttgggaggccgagacaggcggatcattt

SEQ ID NO: 207780 - DNA, 111 bp, Homo sapiens
gcagggagggagtggctgggggaagggaggaacgtggagtgactgctctacgggtccagggtttcctttcagggggatgaaaaagttttggaattagatagtggtgatggt

SEQ ID NO: 207781 - DNA, 113 bp, Homo sapiens
tgccagagatgagagtgaataaaataaataaatgagacctgaaacttttcaatgtgtactaataggttttataccacccagtttttgcatatgagcaaaatgtaaatttccta

SEQ ID NO: 207782 - DNA, 746 bp, Homo sapiens
gagccactgcacccagcccacctttgtacttttaatgctcagggacctggggggggacccaggccaggacttgccatgtacagagtcaagaccgcccagtgtgtgcttgtctagtcccttgtgtacgtggattcaagccacataactcttctagcccagcacgctcccagcagggcccacctccccgcctaagctaactgcagtgctcttggtcggggaacccatggtctgaatgcgagtaccctgctgggtccaggacggtggagactcacgcttctccccaaccaaacagtgatctgcttgctgcctttggattaggccaggagaccctccctcactggccttttattaagaaagaaaatcagactcgtctttgaactcagaactctcaagttcatttgaactctcaaattcttgtgcctgtgtgagtttttctcctctgccttgtccagccgcggggcatgtggcgtcgtacagtccttaccaatgtttggagttgcctgccctaaggtgcggctgagaggctgagaagatgctgagtgacagtccacaggctgggagtgcagggctggtggggcttcatgctggtaaagtgaggtggttctcccagagcccatttggtaccttcctcttcagatgcacttctgatattatcttctttattctttagccatacctaaaaggcagggaagggccgcatctcacaatcctgctttacagatgggaacactgatctatagaatatg

SEQ ID NO: 207783 - DNA, 847 bp, Homo sapiens
  misc_feature (767)..(767): n is a, c, g, or t
gagccactgcacccagcccacctttgtacttttaatgctcagggacctggggggggacccaggccaggacttgccatgtacagagtcaagaccgcccagtgtgtgcttgtctagtcccttgtgtacgtggattcaagccacataactcttctagcccagcacgctcccagcagggcccacctccccgcctaagctaactgcagtgctcttggtcggggaacccatggtctgaatgcgagtaccctgctgggtccaggacggtggagactcacgcttctccccaaccaaacagtgatctgcttgctgcctttggattaggccaggagaccctccctcactggccttttattaagaaagaaaatcagactcgtctttgaactcagaactctcaagttcatttgaactctcaaattcttgtgcctgtgtgagtttttctcctctgccttgtccagccgcggggcatgtggcgtcgtacagtccttaccaatgtttggagttgcctgccctaaggtgcggctgagaggctgagaagatgctgagtgacagtccacaggctgggagtgcagggctggtggggcttcatgctggtaaagtgaggtggttctcccagagcccatttggtaccttcctcttcagatgcacttctgatattatcttcttaaaagtaaataatagatacgcactgacgaggacaaaaagtaggtgaagcgcagcccacatcagatgcccaggccaaatcagatgccagttcaaatcagaggcccagntcaaatcacatgcccagttcaaatcagacgcccaggtcaaatcaaatcacatgcccagttcaaatcaatcatgccccatt

SEQ ID NO: 207784 - DNA, 306 bp, Homo sapiens
gcctagatggcctctgttgggacagctgaactctcctccacatagtctctcatcctccactagcattgcctgggcttttttagatggctgtggtgacactccaagtgaagggacagaagcacacatgacggctccctgaggccaggaatcagaacgggcccaccatcactcccaccgcacactactgaccaaaacaaatcactggccagcccagattcaaggcgaggggaatagaccctaacttttggtgtgaggaactgccaaatcatgtgacaaagagtggggatataagtaggagggaagact

SEQ ID NO: 207785 - DNA, 1311 bp, Homo sapiens
agcggagcggctcacgccgaccaaggccttgtcagaaggctcgaggccgagctcacgctgtgcaagacgacagggcccttcccgaggcgcgcgtgcgcacggccatttgcaccctgccctttcaaccccgtcgtctcgtgcccagcacatcttggctggaactggtaggggcgtggcctggcctcaggaacgcactcttgctctgctcctcacgcctcgcgcaggatcctcgcgccgggaggattcgcacccaaccccaagcccggttgggaacgtggtgtccgagaccgtctgggatccccgcgcgcacggccggcttcccgggacccgcgcgagacgctgtctgatcgggctccctagagtggggcccggagaaaccagaacggcgggggcagcctcacgccattttgcacgccctgagatgtttggttccagcagatacttgggttcctctgaacagcccagagctaattcactgggtcccagtgacaggaccttggttttgtgctccctagtggaaggggaagataaggtcaacccctccgaaccacatggactgagaatggaggagaaatggttgctcaaaggaaaactgaggaatcagaggaaccaaaacaagctcctgtccccaaacaagaagcagaggaaaaaccacactagcaagctgcaagagttggcactgctgctgcccatagccctgaagacggggaccaagaagctcacaaagaaggagattctggtgcatgtcctgcagtacattcagtacctccagagaaacatcgatgccgccaaggccttgttcaaatgccacatcaccactggggaaggtggacttgcggggctgggtcagaaaccagcctggggcccagccaggcggaggagacactctaccccctccagctccccaagctctcagaagtcctgtctccagggggcgtgccagaagcctcggaagaagaagctgacccaggcatcagaaagccagactcggaccccgaagcctcgccgctctctggccctgaacaagcctgagaagctggtggccccatccccagaccagaaaggaagtggcacaggggggaccactacccctccaaggtgccctgactcctgcggtcacccgaggcctgcatcatcctcacctccaggtgacagaaaaggaggacagtcccagctgacgctgttggatctggccgaggacaccatccactgtgacatctcaagctgctggtgccagggcagtgtccaggatgacgcacctttccctgcgctcctggctcaggaagatgtggcgaggatccattttctcaa

SEQ ID NO: 207786 - DNA, 216 bp, Homo sapiens
ctttgaagtcctggatgtgagtgagatggggccgaggggggagtccagaggagctgagaacagggctttgatgaactccagcatgtaaaggcaggtggaagaggatgaactggcagaggagaggacactgagaaagatgaggaaggaaggaagcagaagagtgcagtccttctggtccttctgaaccatgcacttgctcacggccctcccttatgc

SEQ ID NO: 207787 - DNA, 544 bp, Homo sapiens
agggattctgattaaaacatggtgtgccttaaaatacacagagtagctgatggagtaaggaaagctccacaggatgcacaggcgtagatgtgttctggagcggcatgccagccagtgcaagggagcagggtccattcgtgcgagaggcagctgcaatggatgcccggtccaaaatgtccagcgactccatgctgagcagggcccaggctttaatttaggatgaaaccccaaagtaagtgtgttactgtgtcatttgacaaatccaaaaagaatgagaaatcaactgatgagtggcttggatatgttcatctctggtttaagtggacatcataatatgtatctacaggagtccattaaactggaaattaatctgaaagaacttgaagactttttcttctttgttaagcagttatagagcttgtttccattaaaagacttcttcctacagttttaaaagttgaaggtgtctgttctgcaaagtgctgcactcagttaaataagctggttattggctaaaataaagattgaattgaagttatctgtg

SEQ ID NO: 207788 - DNA, 391 bp, Homo sapiens
atcagtgaaattgcggctgcactaatggctactcttaaactaaaagcaggttcaggaaggccacatcaacagccaggggatttttgagttctgccagcatcacaacatagagccttttaggaaacctaaaggttcttgagacttcacaatcttcaaacactggaaatggggcacaaaacacttttcaatttccctttaactggtagatcatatggataccaaagaaacgatgtgccacagttgtacctcaggccactctcacatacaaacatgctttcaggacatgggaacgatgtcacactgccacttttctaaaataaaaggtggctaccttactccttgatcttgtaaggtgggggttggggccgagtttgtgaaaactgaaagaaag

SEQ ID NO: 207789 - DNA, 458 bp, Homo sapiens
tatttaagttacatttttaaaattattttttgttttagaaataatctctcatagtcccaacactgctgatacacactaagctttctttctgaatctaaaataaaaattgaaatttaataagaagtacaaatgagatctaattaaactaaagagcttctgcacagcaaaagaagctaccatcagagtgaacaggcaacccacaaaatgggagaaaattttcacaacctactcacctgaaaaagggctaatatccagaatctacaatgaactcaaacaaattcagaagaaaaaaacaaacaaccccatcaaaaagtgggcgaaggacatgaacagacacttctcaaaagaagacatttatgcagccaaaaaacacatgaaaaaatgctcaccatcactgattaaggagatactgcaactgataccacagaaattcaaaggattattagtatctactatga

SEQ ID NO: 207790 - DNA, 684 bp, Homo sapiens
tgccactgcactccagcctggcgacagagtgagactctgtctcaaaaaaaaaaaaatacacatatatgtgtgtgtatatatgtgtgtgtatatatatacacactaatagtatggataactcaatagctttcacattgattgaagtttttgaattgtcccatgtcttaactgattcttgtaatgacagatgaatgagaaggcaccatagagacactcaagggtttgcaaatccagtcgaatacacctatttagacctaagaaggagatccacacagcacataaaaacatccgtgtggaagtcataggtgtttagaatggaatgctttactgtgagtgtgagacggggaactgtcttctaaagtggtcagtttctcccaacagtggcatagctgtgcatctcattaatggacagaactggtattgagtttagacttgggccattttgacaactctgtgtgcttctcgagcttcccatgatagcaagaatggcagtcaagtcagcagtccccaacctttttggcactagggaccggttttgtggaagacagtttttccgtggaccttggggtggggagggatagttttgagatgaaactgttccaccccagatcatgaggcattggattctcataaggaacatgcagcctagatccctcatgcacagtttacaatagggttcatgct

SEQ ID NO: 207791 - DNA, 275 bp, Homo sapiens
atgaaggtaaatactctgggacttgtttttggttttagtttttgatcactattccaaggaggttggttccttttcaatcccccctgcccccacctggtagtctgaatttgagaaatatgtacctacacattatgtggggggtgggggagatctagtcctgattaacgtggcatatttttgtttacttgaaaattgcttcccaagattcaatctggttttcagaaaattttaaaattacattcccacgtacaaataaattgtatgctttctggata

SEQ ID NO: 207792 - DNA, 562 bp, Homo sapiens
tgcctcaaatctcagtttgatttagatcatggaaataatgccttttatctgtatggacatcagagtttactcagcccctttccctctgcccccttcatttgatctgcactctctaacctcatgaagttgtctgaactagtgttattattctcattttgccaatgagtgaatgagactcagaagaaagcatctaggttagagatttctaggcaatgtttctaatgtttccttcagtaaaattgttgttgctctatcaagtatatgagctggttgctgttttctgtctttgatgagtgacaggattcccttttatgtgtctcactgggtctgtctcctagaggcctcatgagacttaatgagtagtatctgtaaggtgcttgaggatccccagataaaaggagcacctgttagcatttatgatggaagtagcggggcctcttgaaaagctgtgcccttgttgttaataatgctggctagaggagttgcaggcgaggctttgcccaaagcctttattagtcattactctcaggaaatgcagcctcaccaggatgttactttgtaa

SEQ ID NO: 207793 - DNA, 939 bp, Homo sapiens
actgagaggagacacaaggagcagcccgcaagcaccaagtgagaggcatgaagttacagtgtgtttccctttggctcctgggtacaatactgatattgtgctcagtagacaaccacggtctcaggagatgtctgatttccacagacatgcaccatatagaagagagtttccaagaaatcaaaagagccatccaagctaaggacaccttcccaaatgtcactatcctgtccacattggagactctgcagatcattaagcccttagatgtgtgctgcgtgaccaagaacctcctggcgttctacgtggacagggtgttcaaggatcatcaggagccaaaccccaaaatcttgagaaaaatcagcagcattgccaactctttcctctacatgcagaaaactctgcggcaatgtcaggaacagaggcagtgtcactgcaggcaggaagccaccaatgccaccagagtcatccatgacaactatgatcagctggaggtccacgctgctgccattaaatccctgggagagctcgacgtctttctagcctggattaataagaatcatgaagtaatgtcctcagcttgatgacaaggaacctgtatagtgatccagggatgaacaccccctgtgcggtttactgtgggagacagcccaccttgaaggggaaggagatggggaaggccccttgcagctgaaagtcccactggctggcctcaggctgtcttattccgcttgaaaatagccaaaaagtctactgtggtatttgtaataaactctatctgctgaaagggcctgcaggccatcctgggagtaaagggctgccttcccatctaatttattgtgaagtcatatagtccatgtctgtgatgtgagccaagtgatatcctgtagtacacattgtactgagtggtttttctgaataaattccatattttacctatga

SEQ ID NO: 207794 - DNA, 1031 bp, Homo sapiens
tgcacacactgacaggagtccaagaatgtgcactgagggagcgtttccgcacagatctgcgtgttccttaccactcacacatgtgcacacacatatccatgtgtgtgtgccagtgctttggggctctgttccacggggcatgaagttacagtgtgtttccctttggctcctgggtacaatactgatattgtgctcagtagacaaccacggtctcaggagatgtctgatttccacagacatgcaccatatagaagagagtttccaagaaatcaaaagagccatccaagctaaggacaccttcccaaatgtcactatcctgtccacattggagactctgcagatcattaagcccttagatgtgtgctgcgtgaccaagaacctcctggcgttctacgtggacagggtgttcaaggatcatcaggagccaaaccccaaaatcttgagaaaaatcagcagcattgccaactctttcctctacatgcagaaaactctgcggcaatgtcaggaacagaggcagtgtcactgcaggcaggaagccaccaatgccaccagagtcatccatgacaactatgatcagctggaggtccacgctgctgccattaaatccctgggagagctcgacgtctttctagcctggattaataagaatcatgaagtaatgtcctcagcttgatgacaaggaacctgtatagtgatccagggatgaacaccccctgtgcggtttactgtgggagacagcccaccttgaaggggaaggagatggggaaggccccttgcagctgaaagtcccactggctggcctcaggctgtcttattccgcttgaaaatagccaaaaagtctactgtggtatttgtaataaactctatctgctgaaagggcctgcaggccatcctgggagtaaagggctgccttcccatctaatttattgtgaagtcatatagtccatgtctgtgatgtgagccaagtgatatcctgtagtacacattgtactgagtggtttttctgaataaattccatattttacctatga

SEQ ID NO: 207795 - DNA, 382 bp, Homo sapiens
agcattttaggaaacttctttgagattttgaaactcctttgaaaacttcttgagattttgaaaatcaaagaattatttgtggaaaagggaagaaaatgccttcattcaacacgtttattggaccctgaatgtgtgagacattgttgtaggtagcgtagatacagatatgtgctaaataaatacatacataagaccattatccctggagagcttttgatctgctgtgggagagaaagtttgtagtgtgatgcagaggtgtgactaaactgccatggagatgggatggagtagctgacctttgaaatcaaggatgaattctagttttacaggatgaagggcacgggtggcaggaagacattccaggcatatagtatagtgtatt

SEQ ID NO: 207796 - DNA, 532 bp, Homo sapiens
tattatttcaaaggccactataaaggcagagaaattgagaaatactgagatgacagttttaagtataattaagcaatttgcttacaaaattacccaaagcaaatttttcttattttaaagtatttagttgttaagtaagaccaattatttaatttctatatctacacttacagtttaagatacacactttcctcatattatagtccaggtcttgacctaattatgtgactttgaataaatcccacatatctacagaatgtttcttccagctgcaataacctagaactagttagagagattttggtctcttctattaatatttagagaataatatatcagcataggtgtacatgtagaaacatgctgaaaaactaaattgttagctctagtcttatttcagttaactttatagtcagacattactactaaaaatgttttttaaacttgaagttactttcaaggctaaaaagttacacaattgtgagtatagtttcacgattgaggtatttcacaatttcattcacagttgtga

SEQ ID NO: 207797 - DNA, 330 bp, Homo sapiens
aattgcttttgaggacttagccataaattcttcgccaaggtcaatatcaagaaaggtatttcctagaatttcttctagaattttgtagtttgaggtcttacatttaattctttagtccatcttgagtgaatttttgaatctgatgaaaggtaggggtccagtttcattcttctgcatatgggtaaccagttatcccagtaccatttattgaacagggagtcttttccctattgctctttttgttgagtttgtcaaagatcagatggttgtaggtgtgtagctttatttctgggttttctattctgttctcttagtctgtgtgtctgtttt

SEQ ID NO: 207798 - DNA, 370 bp, Homo sapiens
atcagtgccggcctcattttattcacggcatgttcatcgtgcaggcaataggagcgggaggctgctttctgtccttggcttctaaccacatggttgcatcctggtgtgtttttctatttgtgtatatttgagagaacaataagttatgtttatgctttcctttcaagaaggagagtctatatttttcatccttggacttaatcagagcctaatttttgtaaaaaattcatttacttgaagtacaaagctattgtgtgttgcacttggggtttctttttgtgttgttttgataaagaaggattccaaggccaaagtttcccagtgtcattttaagtaagacctgcaaaatattcagggtcttaggtgaaaa

SEQ ID NO: 207799 - DNA, 376 bp, Homo sapiens
aagaaaggaataattaacttagaatcctgccacttcacagccttactgaaatagtgaatctaggccatgaccattaatggccactgaaatcactgggtaaaagctgacaaggtacaagggaataatcaaactgataacacctgaaacctgatcaatcataacatcacagacagagatcatttgccacatgatgtaatacaacaaaaaaataccaccacttaagaagtattctttgaaaaaacaaagtgaaacaaaaaacctggattcaatgcagtcaagacataaaccagtatacagaaaatgcaggtaaaacaagattggccttgttgcagtagggtgatgaatatggggaggtattcctaataatatgtaaagg

SEQ ID NO: 207800 - DNA, 796 bp, Homo sapiens
caaagggaaccaggagaagaagaacttgataacaggaccttgcataattaatcgattgatcactgaacttcattgtcatatttctacggtcaaattttgggagaaagctgtcgcaaattcatcagagtgtagcaatgcccgagttgtaactgagttccatctggataaaaccaagatagaaattgtgcctcataattgatattttgaggattccatgaagtaataaatttattatgtgctaagaaatatgtgcctgatggagtcttgttctgttgcccaggatggagtacagtgacacgatctcagcttactgcaaccactgcctcccaggttcaagcgattctcctgcttagcctactgagtagctgggactacctacaggcttgcgcttccatagctgactaattcttgtatttttggtagagatggggtttcaccatactggccaggctggtgttgaactgacctcaggtgatacacctgcctgggcctcccaaagtgctgagattacaggcgtgagccaccatgcctggcctattttggtatttacttatatttgaatattcttaactctgttattggtttatgtaaacaaatagttaagaactttcaaagataagtgtattttcacaattagtttcatgataatttttgctgcatcttatccttgtaacaaaatgttatataacctcagggaagaaaattatcttcactgacactttatcttctaaaaaagatttttaattgaggtgtagcaaaaataaaacattaaatctcagtgtacaagctggtgagc

SEQ ID NO: 207801 - DNA, 667 bp, Homo sapiens
agctaaccaccctgcccaccccacttcacaacaagcccagatctctcccacccggacctaaacttacccagtctgtaagcgggggcgggctctggccttagttggtgtccccctccgcgggtgtttgttcggtaaacctgtgttgctgtagagccgcctccgtccgtttttcctcccgttcctgcgctaacaatgacattataccaaatgtaactgatatactaatacatgctgctgtaataaggagtcctcatttaagttactgtgtccaaaatgagtttccagtggtcctccatcttgatacatgctccagtatcacttatacagaaagggtggacatgataaaaccaagatagaaattgtgcctcataattgatattttgaggattccatgaagtaataaatttattatgtgctaagaaatatgtgcctggtatgttgatttttctaattattattttatatgtgatatatacacatacatgtaggtcatatatataaagttatgattcattctaaaagtttataagaagctgatttttattgtattgtaatttaaaatctgtaatttctgtaacttatgataaaataacattttacctttgtactctcttaagaatatagaatgcttataaaaatacaataaagtataatacttaagttaaaa

SEQ ID NO: 207802 - DNA, 404 bp, Homo sapiens
agccagaccttggcaatgaccttgagcagtaggatatacataattctgacaagcttagtgttccaataatgggacactaggcataaatgggttaattttccagatcatcttcctgttgatttataaaagctgaattttggtcatttttccctccttttctacttttctattgaagaaacagatggagttgctgaaactgtcaagtactcagcaattagagagaaggaggtaaagcccaaaagccttattaacatataatttcctgcacaggtttttccctctccccctagacctgctttattttacataatgccccttgcttttgacactccagccttctcattccttggagatgccatatgccctgctgctacggggcctttgcttacattgcttcctatgcc

SEQ ID NO: 207803 - DNA, 317 bp, Homo sapiens
acctttgcctccctaattgctgggttttcaggtgcaaaccactgctcctgccaatagtgacacattttacaaatgtttgccattcagacattcaggactttcaagtcctccttgaagccttctgtccaccttctttaccatctcttaccacttatctgcaaacttttatttaacttgtgaacacatcctacctgcagggcctcttgggagtaggtttgggtttagaaataaatttttcaggcccttagcacattttttatgtcatttgtatttgggtactagctcagcagtttattcctttgcctctttttggctct

SEQ ID NO: 207804 - DNA, 414 bp, Homo sapiens
ctgattaagtaggttatgcttctctttcatgtaatttcttttagttcaatttaatattgaagaactttgtcccttcactttctttttaaaagagaaagagattaaacctggaaagacaagacacttagccacttttatatacttcaatgcaaaaagtacctttgctacttaatagccgatgaaagttgttctctgaagcaaaataatctccatgatggctaataaaatgaacttaataatgatcagatgagagaaatgaatatttctctcatattaaagtatatacttagaattaaaattactctaaactgataaaaatttaataagggaaatgttatttttaaagtatcatttctcttgtatcttacatttcttcactagagcatagaaatatatgcaaaattacaaaaaaaa

SEQ ID NO: 207805 - DNA, 217 bp, Homo sapiens
tccccctgttgtgttgaggacactattaagttccctgccattacctggtgcttaacacatagtagatgctctattagtgttggaatggatgagctctagtgagtaagcgcctaagacaacacagaccctaaggtcttctgaacccaaccaagtgccctgtttttgctgctataccaggctgtccttcttcccactgccatcctcctggttctgttct

SEQ ID NO: 207806 - DNA, 367 bp, Homo sapiens
tgatctcccagcccctaaaatgacattctcttatgaaagaagacagaaagggaaggaaatcagtctatcacaaaaatccatctttattgctacctcttaaataattttcaaatctattcatatttctgtatttccatttatatcatgttttaacagacaaggaataagaaatcagttaattgaattgatcagggagggtctcagggaggagatgagacttgaaaatgggttttgaggtttagctattgcttggagaagagaggaaggtaggaattccaagcaaaagggaagaaaggataaaagctccaagatggacgtgatcatggtacatacatatgagtgtgattatggttatgggcaaagagac

SEQ ID NO: 207807 - DNA, 338 bp, Homo sapiens
gccgctgtactacatggactaacttgtggccataagatgaatatataattaaatgctgttccaacctagacacaatacatgctgaagggcttcagagaaggaagcaagcaactgtaaagtcgaagagtagggaaaagccgcagggaggaggaccaagaccttccaggggaggggagaggaggctcttttaggctgagggcaccacccaaataacagaaagttctagtgagctgagtcatggccaatgaggaactaaagtgtaacatactttaaagacccaccttagcctcccgctgccgcaaatctggcacggcactgaagagcagcccaactgatcc

SEQ ID NO: 207808 - DNA, 453 bp, Homo sapiens
tgagactgactgaaaacaaaaacagaactcttacagagagatcaaacattgacctttgcaatgtcatctgttgctaggatgatagttttggtaagttataaagcatggcaccctaagtatagggaatcatctaagggaactgctttctaggtatgttagagcttcgaaagtcataatgaatatttccattaatgtgaattgagtagttatttttgacatacttagtgatatcttggtattttttcttataagtttaataagctgcttatatgctattagcaattagacttgatcatttgatagaatctttagtttgtaaatgttttctttcattacctaattcatagttttatatggttctatcttactctgtttttattaggattaggttttgaacttcaaaaaatgtcctttggcctccgtcacagtggtcctgtaattacctaacctata

SEQ ID NO: 207809 - DNA, 401 bp, Homo sapiens
taaagccagtttcagtttcactgaaatcactggttacagttccttaaaattaaaggaaagtgattattttggggggtaattaaatgggaacatgtccattcaaaaaagacacaactatatacaacaccaactttgaaaataatttaaaaatgtttaaaacttgattacttttggcagaaattctatctttaatcttaaataggctatggataaggagttaaactttcttgcctattccatgcctgcagtcacctttgtccatgaatgctttgtctaacacataagtctcagtctataagtccatcatctcctaaaatttccaactgccagcacaagctgctgtaatgatggcatgatgactcacatccttacctacacatgcacttccattattcattgta

SEQ ID NO: 207810 - DNA, 186 bp, Homo sapiens
ccatactacgcccctgttagctgatactcatccccaaatcctttcatttataccaagggcttttatggccgggcgtggtggcacacgcatctgtaatcccagcactttgggaggctgaggcaggaggatctcttgagcccaggagttcaaaaccagcctgggcaacatagtgagaccctgtatcta

SEQ ID NO: 207811 - DNA, 258 bp, Homo sapiens
ggaagtaacaagaaataccgtgccctgaggttggacgtgggggaatttctcctggggctcagagtgttgtactcgtaaaacaaggatcatcgatgttgtctacaatgcatctaataatgagctggttcgtaccaagaccctggtgaagaattgcatcgtgctcatcgacagcacaccgtgccgacagtgactcctgaggaagaagagattttggcattctttttcctttcatcatatttcttctgaatttttttagat

SEQ ID NO: 207812 - DNA, 676 bp, Homo sapiens
gactggaccggcagtgaggcagatcttggggttaaactttcgccaaaatccattgttctataaataagccaaacgacttccattgaccaagcactctgacttcccaaacactgccaagaacacatccagctgaccacctggtataaatgtttaatagccaaacccaaatgtctaaagcctgcttactcagcagtccactaaggcatatgtacaggttcaaaagcaacaatatggcatgtgacagggtcacctggcaggttaaccaggcaccgaaagtatgagccacccatatgtgtggattcgtcctaacgctgtcagcccaccgggtcctgagtcctctctctggtgacaagtgggaagggtgtgagaactggagactgtccacatgtggcttcatctaaaaggtatgaccagaggcattactgacatcccaggggattcctgaccctagctgacaggtgccccagttaaaacacaccccaaagctagggctgctggaacagaaaacagctcccctcaaaggtctgcagcagcccctctgcaggcacaccgcctcaggctacatatcctcaaattcaggggatcttggaataactcgtgcattgcacaatcccactaacaagtgcggaaaattaagttactttaaaattacaaacttgggccaggcgcggtggct

SEQ ID NO: 207813 - DNA, 673 bp, Homo sapiens
gtactaggaaagagtcttgtgggctttgaacgtgcagactacacagccattgttctataaataagccaaacgacttccattgaccaagcactctgacttcccaaacactgccaagaacacatccagctgaccacctggtataaatgtttaatagccaaacccaaatgtctaaagcctgcttactcagcagtccactaaggcatatgtacaggttcaaaagcaacaatatggcatgtgacagggtcacctggcaggttaaccaggcaccgaaagtatgagccacccatatgtgtggattcgtcctaacgctgtcagcccaccgggtcctgagtcctctctctggtgacaagtgggaagggtgtgagaactggagactgtccacatgtggcttcatctaaaaggtatgaccagaggcattactgacatcccaggggattcctgaccctagctgacaggtgccccagttaaaacacaccccaaagctagggctgctggaacagaaaacagctcccctcaaaggtctgcagcagcccctctgcaggcacaccgcctcaggctacatatcctcaaattcaggggatcttggaataactcgtgcattgcacaatcccactaacaagtgcggaaaattaagttactttaaaattacaaacttgggccaggcgcggtggct

SEQ ID NO: 207814 - DNA, 491 bp, Homo sapiens
tcgcctgcatgtagttggggatgcatggggatatgctgtcacatacttttgttgtatatgttgtctgtgggatttcttttctttctctttctgtcatctgtgttgatacattgtctcttaaagaccaccctagttttcaccatctttctagaagtcctacataatacttttaaggaaagtagattctaatttaaatgaaatacagatgaatgcatttaaaacggattatgtaggctggacacggtggctcacgtctataatcttagcacttttggaggctgaggcgggcagatcacgaggtcaggaggtcgagaccagcctgaccaacagggtgaaaccccgtatctactaaaaaaatacaaaaattagctaggcgtggtggcatgtgcctgtaatcccagctactcaggtgtctgaggcaggagaatagcttgaacccaggaggcggaggttgcagtgagccaagacagcaccactgtactccagcctgg

SEQ ID NO: 207815 - DNA, 341 bp, Homo sapiens
ggctgcttgagtttcctcacagcatggcagctggtttcttccagaatgagtgagaacttgctttttatgcccttgatgtggacatcacacactcatttatttctgcagtgacagcctatcccacttactgtcgggggaggagagtacacaggatatgaatgtcagaaaacaagaccactgaagtgatcttggagcctggttgccacatgaaatatataaacaagcgaatttatggtcatacataaatggtttcacacaaaacaaaagcaaaagacccctaaaaaccagaagagcacacacagatatacacatgccatgcacatgtgagcacatagagtaaa

SEQ ID NO: 207816 - DNA, 496 bp, Homo sapiens
agcatttcagtcatttaaagtctttctcatttacttaaaaaatgcacttaagttacaaatgttcccctctgacctgcttttgtagcattccacagtaatgatatatgttgtcttattgacattctattatacctggcctgtaattttagttttgattttctctttgagcaaagatatttttagaagcatttgacattaagtataacattttatacttttctgattatattttgatgctgatttctatctctattttctagcacagtattaattttctaaattaaaaagtattttgatattttcttattagatcattgtatagtcaattctttaatttctttgggcaatttaaaaattgtgttttctctataaagaattttatgatatctatcaggtcaatgttttattcttatttgtcttttataatattacttatttctttgtccactgatatttcttgaacttagagcaataaattgaagtcaattactaaatt

SEQ ID NO: 207817 - DNA, 338 bp, Homo sapiens
aaaagcaattttttaaattgtcgtatgttcggaagggagggtcttattcaaaaagacttggacgcagagcagtgagtatccggggaagggagttgtctgaggtggtggcttggtcagaactgcattttggtgaaatccattgcagggcccagccgtggtccagcctgaagcaggcattcattccaaggtagaggagctcctggagctcctgccaggagccagaccctgttctcagtgctgggcacccagacaaagtccctgcccttgtggacatcctggcaattccatagatgtctgggaagactgcagaagccagagagaagggcctttgaagtgga

SEQ ID NO: 207818 - DNA, 502 bp, Homo sapiens
agagctggaagttagttggaactggagaatgagaccacatctgaacaccagccagagaagcaggggtcttccagaggttatccggtccagcatcccgcctccaggcagaactggactgtgctctggtccggcggcacgggttccagctctgttctgcctcctcccaacagcgtgtgagatgagcaagggatggagcctgtttcttgcacctgtgaaatggggttggtaaaggtaccccctgcatcaggtggttgtaaagattaaatgagctgatgcacactctgctcctggcacagcggaggcgctacctaagtggaagtgtgcgtcactgtcggtgtcgtgaggctctcgtctgccttgtcctgccttgggtgggagattggacctccctgggggagcctgggtggtgcaggcaggcagggctgagctgagcagcctccctgtcacctacatccctcggactaatcattttctttctgttcctcagtttccttatctgtaa

SEQ ID NO: 207819 - DNA, 827 bp, Homo sapiens
aagcctaggtttctgccactctgggtgaccctgtatttccttctggtgcccatcccttccatctgtccagttaatatttcctcctttttaaaatctccaagaagctgggtctcatccagatctcatttagaaccaactgggttttgaaagcccatgtggataatggccaccatcctaagcccaaagcgaaagatggtagaaggtggcaggtagaagtcactgcaaggaaggggatgggattttccatcctaaaagttttggagagggaaatccaggctattaaagtcataatttccaggtatttctattttccatttctcagcttcaagagaggtgttagcagtattttctccattttcagtctccctccaagctctgccctttggagaggtctgccccactctgtcaagtggaatctttccctctctggctctacctctctcatatattgaattcctccctttcccctgattagagaaggggatcaaggggggaaagagatcagccttggtccctaggcctccagaaatgccctcctaatctccaccttttcttaacccccaaaaaggattaacatccctgactttatgtgggatagtatatactgccacatcagtgtttgagtcattccccagagggaaggggaaccctcctccatcttttttgcaacatctcctatcttccttttgctgttgcttttttcccacttacacttggttttgttctatcctacactacagatttctattttgaacttgctgccttttttcatattgaaaatgtgacattgctccaagagccaaaaataaatgtgaattggaaaaaaa

SEQ ID NO: 207820 - DNA, 1167 bp, Homo sapiens
gcatgctgcaacgactctcttaatcctccaccgctacagactaaatgagggatttcttcttggtttggatccattgctggcaaagttgttatctatgcaacaagccagagaaactgcagttcaacagtacaaaaaactggaagaggaaatccagacccttcgagtttactacagtttacacaaatctttatctcaagaagaaaatctgaaggatcagtttaactatacccttagtacatatgaagaagctttaaaaaacagagagaacattgtttccatcactcaacaacaaaatgaggaactggctactcaactgcaacaagctctgacagagcgagcaaatatggaattacaacttcaacatgccagagaggcctcccaagtggccaatgaaaaagttcaaaagttggaaaggctggtggatgtactgaggaagaaggttggaaccgggaccatgaggacagtgatctgattgaaaaaaaacgacagtctggggaagcgatcacatctggtgaccaggctgcttcattcaacactgtgtaaacaccaaagccttaacttagcaaacagttgttagaagtgggacactccaaccacattccaagctgagataaaatcaaatcacaaatgtttaaccactttgctgctgacttgagttatttatccaaatatattaactatagacttttaccaatgggtagctataaggttacagcttattttgtaactattttatatctcaatatctttaatataaatctttttactgagagatcattatagaaacatgttaaagttggttaggatcatatcttcacatatggccctttctgaatcaaagtgcggcaaagtaaatattgtctaagctttaatccactgtgttaggtcaaaacttcaaatacatgcatttttcaatatagggtatatttcttaactgatgagagaggcttagacatgagtgtgtagtcttccttcaatgcgtgtatgtaatctttgttagtataaaagatattaaatataggtgccaagaattaaatgtataatttgtttaataagagatggatatattaaaattacattcatcaaggcatgatttttgtttcactacaaataatgcaaactgttttcaataaaaagaggagactgttaatgtgtacttataaattc

SEQ ID NO: 207821 - DNA, 1203 bp, Homo sapiens
cgccccgctcctccgccggatcgtctgtgggtgagtctcgagccaggaggctctgagccagtggcgattggctgacgcggtggctgcgcactcggcctgagaaactcggcaagcgcgcagtgtcgactccccggtctatgccaggcgcatctcagataccagcattgccaccggtgggtagaacactaagtgggctcttggagtccctgattccagaacttgactcttggatgacatttctggacctgctctgggccagagaggagaccacttcccttaagggaacgaggtctcactatattgcccagactggtctcgaactcctgggctcaaacagtccccctgcgttggcctcccaaagtgatggaattacaggtgtgaatcactgcatctgactatggcaaggatctctgtcactgagctaatccaaaagtaaatgagaaacttagaaaaagattgccaattccaaatcaacatatttagagaaaattggaaaaggagaagcttactacagctttatttgaggactttttaaagaacgctgggttctatctgtgagctgcaaatcttggagcaaaaaccagagacattgccagagcaaacaagaacagaaatacaaatggagaactggtcaaaagacataacccacagttatcttgaacaagaaactacggggataaataaaagtacgcagccagatgagcaactgactatgaattctgagaaaagtatgcatcggaaatccactgaattagttaatgaaataacatgtgagaacacagaatggccaggcagagatcaacgaattttcagatcatcagttcttatccagatgatgagtctgtttactgcactactgaaaaatacaacgttatggaacatagacataatgatatgcattatgaatgtatgactccttgtcaagttacttcagactcagataaagagaagacatagcatttcttctaaaagaattggatattctcagaacaagcaataaaaaggtataatatggaaagtctgataattgtatagtatgggtttagctgttgatcttctaaatttcctttgttgcccatcataattcagttttattttgcactttaatcatttaacagtagctttatgtttttgccataccttgccatcagggtatggttgagttaaggggttgaaaatgaaagcatttttttgatttcatac

SEQ ID NO: 207822 - DNA, 937 bp, Homo sapiens
cgccccgctcctccgccggatcgtctgtgggtgagtctcgagccaggaggctctgagccagtggcgattggctgacgcggtggctgcgcactcggcctgagaaactcggcaagcgcgcagtgtcgactccccggtctatgccaggcgcatctcagctaatccaaaagtaaatgagaaacttagaaaaagattgccaattccaaatcaacatatttagagaaaattggaaaaggagaagcttactacagctttatttgaggactttttaaagaacgctgggttctatctgtgagctgcaaatcttggagcaaaaaccagagacattgccagagcaaacaagaacagaaatacaaatggagaactggtcaaaagacataacccacagttatcttgaacaagaaactacggggataaataaaagtacgcagccagatgagcaactgactatgaattctgagaaaagtatgcatcggaaatccactgaattagttaatgaaataacatgtgagaacacagaatggccaggcagagatcaacgaattttcagatcatcagttcttatccagatgatgagtctgtttactgcactactgaaaaatacaacgttatggaacatagacataatgatatgcattatgaatgtatgactccttgtcaagttacttcagactcagataaagagaagacatagcatttcttctaaaagaattggatattctcagaacaagcaataaaaaggtataatatggaaagtctgataattgtatagtatgggtttagctgttgatcttctaaatttcctttgttgcccatcataattcagttttattttgcactttaatcatttaacagtagctttatgtttttgccataccttgccatcagggtatggttgagttaaggggttgaaaatgaaagcatttttttgatttcatac

SEQ ID NO: 207823 - DNA, 1012 bp, Homo sapiens
cgccccgctcctccgccggatcgtctgtgggtgagtctcgagccaggaggctctgagccagtggcgattggctgacgcggtggctgcgcactcggcctgagaaactcggcaagcgcgcagtgtcgactccccggtctatgccaggcgcatctcagctaatccaaaagtaaatgagaaacttagaaaaagattgccaattccaaatcaacatatttagagaaaattggaaaaggagaagcttactacagctttatttgaggactttttaaagaacgctgggttctatctgtgagctgcaaatcttggagcaaaaaccagagacattgccagagcaaacaagaacagaaatacaaatggagaactggtcaaaagtttgctacttcgcatatccctacttgaccttttttggagcaaatgcctttgtgaagtcttcctagagtcttccagacataacccacagttatcttgaacaagaaactacggggataaataaaagtacgcagccagatgagcaactgactatgaattctgagaaaagtatgcatcggaaatccactgaattagttaatgaaataacatgtgagaacacagaatggccaggcagagatcaacgaattttcagatcatcagttcttatccagatgatgagtctgtttactgcactactgaaaaatacaacgttatggaacatagacataatgatatgcattatgaatgtatgactccttgtcaagttacttcagactcagataaagagaagacatagcatttcttctaaaagaattggatattctcagaacaagcaataaaaaggtataatatggaaagtctgataattgtatagtatgggtttagctgttgatcttctaaatttcctttgttgcccatcataattcagttttattttgcactttaatcatttaacagtagctttatgtttttgccataccttgccatcagggtatggttgagttaaggggttgaaaatgaaagcatttttttgatttcatac

SEQ ID NO: 207824 - DNA, 929 bp, Homo sapiens
acattttcagctttgatttgccaggaacttcaggtggctgtatggaaatgtaaacctttgtatgaaggagtgtatcagtgcgtcagaacttggcacccacaaggatcttaagaaaacaggctatttgttccttggagaaactattctctaatccaaaagtaaatgagaaacttagaaaaagattgccaattccaaatcaacatatttagagaaaattggaaaaggagaagcttactacagctttatttgaggactttttaaagaacgctgggttctatctgtgagctgcaaatcttggagcaaaaaccagagacattgccagagcaaacaagaacagaaatacaaatggagaactggtcaaaagacataacccacagttatcttgaacaagaaactacggggataaataaaagtacgcagccagatgagcaactgactatgaattctgagaaaagtatgcatcggaaatccactgaattagttaatgaaataacatgtgagaacacagaatggccaggcagagatcaacgaattttcagatcatcagttcttatccagatgatgagtctgtttactgcactactgaaaaatacaacgttatggaacatagacataatgatatgcattatgaatgtatgactccttgtcaagttacttcagactcagataaagagaagacatagcatttcttctaaaagaattggatattctcagaacaagcaataaaaaggtataatatggaaagtctgataattgtatagtatgggtttagctgttgatcttctaaatttcctttgttgcccatcataattcagttttattttgcactttaatcatttaacagtagctttatgtttttgccataccttgccatcagggtatggttgagttaaggggttgaaaatgaaagcatttttttgatttcatac

SEQ ID NO: 207825 - DNA, 1686 bp, Homo sapiens
cgccccgctcctccgccggatcgtctgtgggtgagtctcgagccaggaggctctgagccagtggcgattggctgacgcggtggctgcgcactcggcctgagaaactcggcaagcgcgcagtgtcgactccccggtctatgccaggcgcatctcagctctggttgaagaagtgtattttgcgcagaaggaacgtgatgaagctgttatgtctagactgcaattagccattgaggagagagatgaagcaattgcacgagccaagcatatggaaatgtctctaaaagtgctagaaaatattaaccctgaagaaaatgacatgacattacaggaattactgaacagaataaacaatgcagacacagggatagctattcagaagaatggagctataattgtggatagaatctacaagaccaaggaatgtaaaatgagaataactgcagaagaaatgagtgcactaatagaagaacgggatgctgccttgtctaagtgcaaacggttagagcaggagcttcatcatgtgaaagagcagaaccagacttcagcaaacaacatgagacatctgactgctgaaaacaatcaagaacgtgctctgaaggcaaagttgttatctatgcaacaagccagagaaactgcagttcaacagtacaaaaaactggaagaggaaatccagacccttcgagtttactacagtttacacaaatctttatctcaagaagaaaatctgaaggatcagtttaactatacccttagtacatatgaagaagctttaaaaaacagagagaacattgtttccatcactcaacaacaaaatgaggaactggctactcaactgcaacaagctctgacagagcgagcaaatatggaattacaacttcaacatgccagagaggcctcccaagtggccaatgaaaaagttcaaaagttggaaaggctggtggatgtactgaggaagaaggttggaaccgggaccatgaggacagtgatctgattgaaaaaaaacgacagtctggggaagcgatcacatctggtgaccaggctgcttcattcaacactgtgtaaacaccaaagccttaacttagcaaacagttgttagaagtgggacactccaaccacattccaagctgagataaaatcaaatcacaaatgtttaaccactttgctgctgacttgagttatttatccaaatatattaactatagacttttaccaatgggtagctataaggttacagcttattttgtaactattttatatctcaatatctttaatataaatctttttactgagagatcattatagaaacatgttaaagttggttaggatcatatcttcacatatggccctttctgaatcaaagtgcggcaaagtaaatattgtctaagctttaatccactgtgttaggtcaaaacttcaaatacatgcatttttcaatatagggtatatttcttaactgatgagagaggcttagacatgagtgtgtagtcttccttcaatgcgtgtatgtaatctttgttagtataaaagatattaaatataggtgccaagaattaaatgtataatttgtttaataagagatggatatattaaaattacattcatcaaggcatgatttttgtttcactacaaataatgcaaactgttttcaataaaaagaggagactgttaatgtgtacttataaattc

SEQ ID NO: 207826 - DNA, 967 bp, Homo sapiens
cgccccgctcctccgccggatcgtctgtgggtgagtctcgagccaggaggctctgagccagtggcgattggctgacgcggtggctgcgcactcggcctgagaaactcggcaagcgcgcagtgtcgactccccggtctatgccaggcgcatctcagctctggttgaagaagtgtattttgcgcagaaggaacgtgatgaagctgttatgtctagactgcaattagccattgaggagagagatgaagcaattgcacgagccaagcatatggaaatgtctctaaaagtgctagaaaatattaaccctgaagaaaatgacatgacattacaggaattactgaacagaataaacaatgcagacacagggatagctattcagaagaatggagctataattgtggatagaatctacaagaccaaggaatgtaaaatgagaataactgcagaagaaatgagtgcactaatagaagaacgggatgctgccttgtctaaggtaaatgagggatttcttcttggtttggatccattgctggcaaagttgttatctatgcaacaagccagagaaactgcagttcaacagtacaaaaaactggaagaggaaatccagacccttcgagtttactacaggtttgtatgtgagaaagagaaaaaagattttgtattgggttatgtgtaaaacatattcttacagtggatcatggtagaaaacattgaaaaaacacaccgatgcacaatgccatgtatattctttcattactaagtttaaaaaatcctcaagtctgaaatgtaggaattcactaagggtgctgttaagtttttgaaagatttttgttttaatttggaccttttctcagaataaagttaaaatgcataaaatgcaattaaatcaaaataagttttactgaagtacaattaagaaaatattatgtcatgatatatcatgatatacatgcatcattattaatggata

SEQ ID NO: 207827 - DNA, 913 bp, Homo sapiens
cgccccgctcctccgccggatcgtctgtgggtgagtctcgagccaggaggctctgagccagtggcgattggctgacgcggtggctgcgcactcggcctgagaaactcggcaagcgcgcagtgtcgactccccggtctatgccaggcgcatctcagctctggttgaagaagtgtattttgcgcagaaggaacgtgatgaagctgttatgtctagactgcaattagccattgaggagagagatgaagcaattgcacgagccaagcatatggaaatgtctctaaaagtgctagaaaatattaaccctgaagaaaatgacatgacattacaggaattactgaacagaataaacaatgcagacacagggatagctattcagaagaatggagctataattgtggatagaatctacaagaccaaggaatgtaaaatgagaataactgcagaagaaatgagtgcactaatagaagaacgggatgctgccttgtctaagtgcaaacggttagagcaggagcttcatcatgtgaaagagcagaaccagacttcagcaaacaacatgagacatctgactgctgaaaacaatcaagaacgtgctctgaaggtaaatctccgttccttcttgcaggcaaattaaggttgtaagcccttggtgccagctttctgtgctgcatatatcagttgtgtacatttcagcagaagtgagctgtggtgtttgccaacaaccccttctttaaacacagatacagcacccttttgttatggtattattttatttcacgtatgtgtacgtgaaaacaacacattttctgaattttgagtggtggtatattaataacttttggtaaatgtttattctgtttcttttttatatcattaccttttgtagttaataaaaagtgaccatactaaaagaaaa

SEQ ID NO: 207828 - DNA, 689 bp, Homo sapiens
ctaatccaaaagtaaatgagaaacttagaaaaagattgccaattccaaatcaacatatttagagaaaattggaaaaggagaagcttactacagctttatttgaggactttttaaagaacgctgggttctatctgtgaggtaaatctaattttattctccttaaaagcataaaaaaaaacttgcatagtgttttatcatgtttactacaaaaacaaataagagagaggagtatcattaattccacaagttagtggtggtctttatgttttttaaaattagagtaatattcttaaattacttttataagtaaaatttattaaagtaatctatatgaatatatacacagtaaattcaaatcagtaaatttgaaatttttggtataaaatttatgacaaataaagtaaaaatgtatttttcttaaatgcttaaaattgtagttgaagaagatttcagttaaataaattaaatggttctctacccaaatcagcatgaatgtctaaaaaacttaacctgaactgtatatactaaaatacaagtgtgaagaaaagaacctttttctgagaaaaagatttaatttctcctgttgaaattctcagttaattgtcccattgtaaatgttttagaaaaccatttatcctgtaaattctctgttaaacaaaggtaagatttaggtgtgttctgatatattg

SEQ ID NO: 207829 - DNA, 978 bp, Homo sapiens
cgagggggtggggctatgcccggacagaggatcgcctcgctggcctactctctcctcccgtacggcgccggaatcccagctccacttaccaggccgcggctaccccgccgtcccccccgactcccgccaccccgctctctcaggctcttcaggatccaagtccgtaggccctttaaggggtctagttgccgtttgcgaggccctgggactttggtcccagacagcggggatccggatggcttccgtgcggatccgagaggccaaggagggagactgtggagatatcctgaggctgattcgggtgaagactgcaggccggagctagccgaattcgaaaaactctcggatcaggtgaagatcagtgaagaagccctgagagcagatggctttggagacaatcctttctatcactgtttggtagcagagattcttccagcgcccgggaagctactggggccctgcgtggtgggctatgggatatactatttcatctacagtacatggaagggacgcaccatttatctggaggatatctatgtgatgccggaatatcggggtcaagggattggttccaaaataatcaaaaaggtggctgaggtggccttggataagggctgctcccaattccgcctggccgtcctggactggaaccagagggccatggacttgtacaaggccctaggagcccaagatctgacggaagctgagggctggcacttcttctgctttcaaggagaggcaacgagaaagttggcaggaaagtgacgccatccctaggaggatctctgtcttgagtttctccttccccatcagctgaagcactcttcagagactacgtccacagacactgatgctgaggcctccctggaggaaggagggttaggggtgcctatcctcaagtattggaagagcagaattgagggagagacctttcttccttgttgagggtgaaaaataaataagaattacatgtcctga

SEQ ID NO: 207830 - DNA, 876 bp, Homo sapiens
cgagggggtggggctatgcccggacagaggatcgcctcgctggcctactctctcctcccgtacggcgccggaatcccagctccacttaccaggccgcggctaccccgccgtcccccccgactcccgccaccccgctctctcaggctcttcaggatccaagtccgtaggccctttaaggggtctagttgccgtttgcgaggccctgggactttggtcccagacagcggggatccggatggcttccgtgcggatccgagaggccaaggagggagactgtggagatatcctgaggctgattcgggtgaagactgcaggccggagctagccgaattcgaaaaactctcggatcaggtgaagatcagtgaagaagccctgagagcagatggctttggagacaatcctttctatcactgtttggtagcagagattcttccagcgcccgggaagctactgggtcaagggattggttccaaaataatcaaaaaggtggctgaggtggccttggataagggctgctcccaattccgcctggccgtcctggactggaaccagagggccatggacttgtacaaggccctaggagcccaagatctgacggaagctgagggctggcacttcttctgctttcaaggagaggcaacgagaaagttggcaggaaagtgacgccatccctaggaggatctctgtcttgagtttctccttccccatcagctgaagcactcttcagagactacgtccacagacactgatgctgaggcctccctggaggaaggagggttaggggtgcctatcctcaagtattggaagagcagaattgagggagagacctttcttccttgttgagggtgaaaaataaataagaattacatgtcctga

SEQ ID NO: 207831 - DNA, 359 bp, Homo sapiens
cactctgcatccttcaaagaaaggggaacctcctacggtcgatggcacttggaagaccccttccttcccaagatctgacggaagctgagggctggcacttcttctgctttcaaggagaggcaacgagaaagttggcaggaaagtgacgccatccctaggaggatctctgtcttgagtttctccttccccatcagctgaagcactcttcagagactacgtccacagacactgatgctgaggcctccctggaggaaggagggttaggggtgcctatcctcaagtattggaagagcagaattgagggagagacctttcttccttgttgagggtgaaaaataaataagaattacatgtcctga

SEQ ID NO: 207832 - DNA, 1308 bp, Homo sapiens
  misc_feature (1180)..(1180): n is a, c, g, or t
cgagggggtggggctatgcccggacagaggatcgcctcgctggcctactctctcctcccgtacggcgccggaatcccagctccacttaccaggccgcggctaccccgccgtcccccccgactcccgccaccccgctctctcaggctcttcaggatccaagtccgtaggccctttaaggggtctagttgccgtttgcgaggccctgggactttggtcccagacagcggggatccggatggcttccgtgcggatccgagaggccaaggagggagactgtggagatatcctgaggctgattcgggtgaagactgcaggccggagctagccgaattcgaaaaactctcggatcaggtgaagatcagtgaagaagccctgagagcagatggctttggagacaatcctttctatcactgtttggtagcagagattcttccagcgcccgggaagctactggggccctgcgtggtgggctatgggatatactatttcatctacagtacatggaagggacgcaccatttatctggaggatatctatgtgatgccggaatatcggggtcaagggattggttccaaaataatcaaaaaggtggctgaggtggccttggataagggctgctcccaattccgcctggccgtcctggactggaaccagagggccatggacttgtacaaggccctaggagcccaagatctgacggaagctgagggctggcacttcttctgctttcaaggagaggcaacgagaaagttggcaggaaagtgacgccatccctaggaggatctctgtcttgagtttctccttccccatcagctgaagcactcttcagagactacgtccacagacactgatgctgaggcctccctggaggaaggagggttaggggtgcctatcctcaagtattggaagagcagaattgagggagagacctttcttccttgttgagggtgaaaaataaataagaattacatgtcctgaaaaaaaaaaaaaaaaaaaaaaaaaaaaaagttgtgtgtggggcggctggggccctgagaaaaggtttttaaaaccattgtggtgtggggggggggggccccaggggttaggtggaacatggtggcccctaaagggtgttcccagaaggagaaatccgggccgcaatgagaacaaaggtggtcggggatttccccccacattnaaaaaaagcgcggggggaatcccggaagggcttccggaaaccaattcccaggggtggagtccgcgagggcatgcgcgggttccttacagacaggggggttccaggcggaacccggaatttaaattgca

SEQ ID NO: 207833 - DNA, 1257 bp, Homo sapiens
cgagggggtggggctatgcccggacagaggatcgcctcgctggcctactctctcctcccgtacggcgccggaatcccagctccacttaccaggccgcggctaccccgccgtcccccccgactcccgccaccccgctctctcaggctcttcaggatccaagtccgtaggccctttaaggggtctagttgccgtttgcgaggccctgggactttggtcccagacagcggggatccggatggcttccgtgcggatccgagaggccaaggagggagactgtggagatatcctgaggctgattcgggtgaagactgcaggccgggccggtaacccgggggtcagagtggcgcggccagagcggggtcgtaggaggcgggggcagggggaggggctcgccttgggaacctgctcggggagcagcggggcccttctgctctaatctagcttccgtacccacgccttaggagctagccgaattcgaaaaactctcggatcaggtgaagatcagtgaagaaggtgggggctcagcgcccaggttctggcggaggctggggaggaaatgagggatgggttccccaggcgacagctccaggctgggcatacacccacgtcctctttctctatctctttgtcacaactccaatctcggcagccctgagagcagatggctttggagacaatcctttctatcactgtttggtagcagagattcttccagcgcccgggaagctactggggccctgcgtggtgggctatgggatatactatttcatctacagtacatggaagggacgcaccatttatctggaggatatctatgtgatgccggaatatcggggtcaagggattggttccaaaataatcaaaaaggtggctgaggtggccttggataagggctgctcccaattccgcctggccgtcctggactggaaccagagggccatggacttgtacaaggccctaggagcccaagatctgacggaagctgagggctggcacttcttctgctttcaaggagaggcaacgagaaagttggcaggaaagtgacgccatccctaggaggatctctgtcttgagtttctccttccccatcagctgaagcactcttcagagactacgtccacagacactgatgctgaggcctccctggaggaaggagggttaggggtgcctatcctcaagtattggaagagcagaattgagggagagacctttcttccttgttgagggtgaaaaataaataagaattacatgtcctga

SEQ ID NO: 207834 - DNA, 1269 bp, Homo sapiens
cgagggggtggggctatgcccggacagaggatcgcctcgctggcctactctctcctcccgtacggcgccggaatcccagctccacttaccaggccgcggctaccccgccgtcccccccgactcccgccaccccgctctctcaggctcttcaggatccaagtccgtaggccctttaaggggtctagttgccgtttgcgaggccctgggactttggtcccagacagcggggatccggatggcttccgtgcggatccgagaggccaaggagggagactgtggagatatcctgaggctgattcgggtgaagactgcaggccggagctagccgaattcgaaaaactctcggatcaggtgaagatcagtgaagaagccctgagagcagatggctttggagacaatcctttctatcactgtttggtagcagagattcttccagcgcccgggaagctactggggccctgcgtggtgggctatgggatatactatttcatctacagtacatggaagggacgcaccatttatctggaggatatctatgtgatgccggaatatcggggtactgggcagaagctgaggctggggtgggagcaaagcaccccacagaccccactgttatcccctgtccccagagcccagccggtgtcattttctgatccccttcagctcaaacaatagctattttttgcctctttctctccacaacaggtcaagggattggttccaaaataatcaaaaaggtggctgagtgaggtgaggagatgggtggggcgacaagtgaggacctgaagaagcaagggtatatggaggggggacccgggttgaaagagggagtgagaaaacctttttcttttttgaccccagaaaagttagtgttgtcttctcccacaggtggccttggataagggctgctcccaattccgcctggccgtcctggactggaaccagagggccatggacttgtacaaggccctaggagcccaagatctgacggaagctgagggctggcacttcttctgctttcaaggagaggcaacgagaaagttggcaggaaagtgacgccatccctaggaggatctctgtcttgagtttctccttccccatcagctgaagcactcttcagagactacgtccacagacactgatgctgaggcctccctggaggaaggagggttaggggtgcctatcctcaagtattggaagagcagaattgagggagagacctttcttccttgttgagggtgaaaaataaataagaattacatgtcctga

SEQ ID NO: 207835 - DNA, 1127 bp, Homo sapiens
cgagggggtggggctatgcccggacagaggatcgcctcgctggcctactctctcctcccgtacggcgccggaatcccagctccacttaccaggccgcggctaccccgccgtcccccccgactcccgccaccccgctctctcaggctcttcaggatccaagtccgtaggccctttaaggggtctagttgccgtttgcgaggccctgggactttggtcccagacagcggggatccggatggcttccgtgcggatccgagaggccaaggagggagactgtggagatatcctgaggctgattcgggtgaagactgcaggccggagctagccgaattcgaaaaactctcggatcaggtgaagatcagtgaagaagccctgagagcagatggctttggagacaatcctttctatcactgtttggtagcagagattcttccagcgcccgggaagctactggggccctgcgtggtgggctatgggatatactatttcatctacagtacatggaagggacgcaccatttatctggaggatatctatgtgatgccggaatatcggggtactgggcagaagctgaggctggggtgggagcaaagcaccccacagaccccactgttatcccctgtccccagagcccagccggtgtcattttctgatccccttcagctcaaacaatagctattttttgcctctttctctccacaacaggtcaagggattggttccaaaataatcaaaaaggtggctgaggtggccttggataagggctgctcccaattccgcctggccgtcctggactggaaccagagggccatggacttgtacaaggccctaggagcccaagatctgacggaagctgagggctggcacttcttctgctttcaaggagaggcaacgagaaagttggcaggaaagtgacgccatccctaggaggatctctgtcttgagtttctccttccccatcagctgaagcactcttcagagactacgtccacagacactgatgctgaggcctccctggaggaaggagggttaggggtgcctatcctcaagtattggaagagcagaattgagggagagacctttcttccttgttgagggtgaaaaataaataagaattacatgtcctga

SEQ ID NO: 207836 - DNA, 1355 bp, Homo sapiens
cgagggggtggggctatgcccggacagaggatcgcctcgctggcctactctctcctcccgtacggcgccggaatcccagctccacttaccaggccgcggctaccccgccgtcccccccgactcccgccaccccgctctctcaggctcttcaggatccaagtccgtaggccctttaaggggtctagttgccgtttgcgaggccctgggactttggtcccagacagcggggatccggatggcttccgtgcggatccgagaggccaaggagggagactgtggagatatcctgaggctgattcgggtgaagactgcaggccgggccggtaacccgggggtcagagtggcgcggccagagcggggtcgtaggaggcgggggcagggggaggggctcgccttgggaacctgctcggggagcagcggggcccttctgctctaatctagcttccgtacccacgccttaggagctagccgaattcgaaaaactctcggatcaggtgaagatcagtgaagaaggtgggggctcagcgcccaggttctggcggaggctggggaggaaatgagggatgggttccccaggcgacagctccaggctgggcatacacccacgtcctctttctctatctctttgtcacaactccaatctcggcagccctgagagcagatggctttggagacaatcctttctatcactgtttggtagcagagattcttccagcgcccgggaagctactgggtaagagcacctggcccttagaagtccacctctccagccggcctcagaggtctccccacaggcttccagaagccttactccccttttctctctctcagggccctgcgtggtgggctatgggatatactatttcatctacagtacatggaagggacgcaccatttatctggaggatatctatgtgatgccggaatatcggggtcaagggattggttccaaaataatcaaaaaggtggctgaggtggccttggataagggctgctcccaattccgcctggccgtcctggactggaaccagagggccatggacttgtacaaggccctaggagcccaagatctgacggaagctgagggctggcacttcttctgctttcaaggagaggcaacgagaaagttggcaggaaagtgacgccatccctaggaggatctctgtcttgagtttctccttccccatcagctgaagcactcttcagagactacgtccacagacactgatgctgaggcctccctggaggaaggagggttaggggtgcctatcctcaagtattggaagagcagaattgagggagagacctttcttccttgttgagggtgaaaaataaataagaattacatgtcctga

SEQ ID NO: 207837 - DNA, 1019 bp, Homo sapiens
cgagggggtggggctatgcccggacagaggatcgcctcgctggcctactctctcctcccgtacggcgccggaatcccagctccacttaccaggccgcggctaccccgccgtcccccccgactcccgccaccccgctctctcaggctcttcaggatccaagtccgtaggccctttaaggggtctagttgccgtttgcgaggccctgggactttggtcccagacagcggggatccggatggcttccgtgcggatccgagaggccaaggagggagactgtggagatatcctgaggctgattcgggtgaagactgcaggccgggccggtaacccgggggtcagagtggcgcggccagagcggggtcgtaggaggcgggggcagggggaggggctcgccttgggaacctgctcggggagcagcggggcccttctgctctaatctagcttccgtacccacgccttaggagctagccgaattcgaaaaactctcggatcaggtgaagatcagtgaagaagccctgagagcagatggctttggagacaatcctttctatcactgtttggtagcagagattcttccagcgcccgggaagctactgggtcaagggattggttccaaaataatcaaaaaggtggctgaggtggccttggataagggctgctcccaattccgcctggccgtcctggactggaaccagagggccatggacttgtacaaggccctaggagcccaagatctgacggaagctgagggctggcacttcttctgctttcaaggagaggcaacgagaaagttggcaggaaagtgacgccatccctaggaggatctctgtcttgagtttctccttccccatcagctgaagcactcttcagagactacgtccacagacactgatgctgaggcctccctggaggaaggagggttaggggtgcctatcctcaagtattggaagagcagaattgagggagagacctttcttccttgttgagggtgaaaaataaataagaattacatgtcctga

SEQ ID NO: 207838 - DNA, 1646 bp, Homo sapiens
cgagggggtggggctatgcccggacagaggatcgcctcgctggcctactctctcctcccgtacggcgccggaatcccagctccacttaccaggccgcggctaccccgccgtcccccccgactcccgccaccccgctctctcaggctcttcaggatccaagtccgtaggccctttaaggggtctagttgccgtttgcgaggccctgggactttggtcccagacagcggggatccggatggcttccgtgcggatccgagaggccaaggagggagactgtggagatatcctgaggctgattcgggtgaagactgcaggccgggccggtaacccgggggtcagagtggcgcggccagagcggggtcgtaggaggcgggggcagggggaggggctcgccttgggaacctgctcggggagcagcggggcccttctgctctaatctagcttccgtacccacgccttaggagctagccgaattcgaaaaactctcggatcaggtgaagatcagtgaagaaggtgggggctcagcgcccaggttctggcggaggctggggaggaaatgagggatgggttccccaggcgacagctccaggctgggcatacacccacgtcctctttctctatctctttgtcacaactccaatctcggcagccctgagagcagatggctttggagacaatcctttctatcactgtttggtagcagagattcttccagcgcccgggaagctactgggtaagagcacctggcccttagaagtccacctctccagccggcctcagaggtctccccacaggcttccagaagccttactccccttttctctctctcagggccctgcgtggtgggctatgggatatactatttcatctacagtacatggaagggacgcaccatttatctggaggatatctatgtgatgccggaatatcggggtactgggcagaagctgaggctggggtgggagcaaagcaccccacagaccccactgttatcccctgtccccagagcccagccggtgtcattttctgatccccttcagctcaaacaatagctattttttgcctctttctctccacaacaggtcaagggattggttccaaaataatcaaaaaggtggctgagtgaggtgaggagatgggtggggcgacaagtgaggacctgaagaagcaagggtatatggaggggggacccgggttgaaagagggagtgagaaaacctttttcttttttgaccccagaaaagttagtgttgtcttctcccacaggtggccttggataagggctgctcccaattccgcctggccgtcctggactggaaccagagggccatggacttgtacaaggccctaggagcccaagatctgacggaagctgagggctggcacttcttctgctttcaaggagaggcaacgagaaagttggcaggaaagtgacgccatccctaggaggatctctgtcttgagtttctccttccccatcagctgaagcactcttcagagactacgtccacagacactgatgctgaggcctccctggaggaaggagggttaggggtgcctatcctcaagtattggaagagcagaattgagggagagacctttcttccttgttgagggtgaaaaataaataagaattacatgtcctga

SEQ ID NO: 207839 - DNA, 1548 bp, Homo sapiens
cgagggggtggggctatgcccggacagaggatcgcctcgctggcctactctctcctcccgtacggcgccggaatcccagctccacttaccaggccgcggctaccccgccgtcccccccgactcccgccaccccgctctctcaggctcttcaggatccaagtccgtaggccctttaaggggtctagttgccgtttgcgaggccctgggactttggtcccagacagcggggatccggatggcttccgtgcggatccgagaggccaaggagggagactgtggagatatcctgaggctgattcgggtgaagactgcaggccgggccggtaacccgggggtcagagtggcgcggccagagcggggtcgtaggaggcgggggcagggggaggggctcgccttgggaacctgctcggggagcagcggggcccttctgctctaatctagcttccgtacccacgccttaggagctagccgaattcgaaaaactctcggatcaggtgaagatcagtgaagaaggtgggggctcagcgcccaggttctggcggaggctggggaggaaatgagggatgggttccccaggcgacagctccaggctgggcatacacccacgtcctctttctctatctctttgtcacaactccaatctcggcagccctgagagcagatggctttggagacaatcctttctatcactgtttggtagcagagattcttccagcgcccgggaagctactggggccctgcgtggtgggctatgggatatactatttcatctacagtacatggaagggacgcaccatttatctggaggatatctatgtgatgccggaatatcggggtactgggcagaagctgaggctggggtgggagcaaagcaccccacagaccccactgttatcccctgtccccagagcccagccggtgtcattttctgatccccttcagctcaaacaatagctattttttgcctctttctctccacaacaggtcaagggattggttccaaaataatcaaaaaggtggctgagtgaggtgaggagatgggtggggcgacaagtgaggacctgaagaagcaagggtatatggaggggggacccgggttgaaagagggagtgagaaaacctttttcttttttgaccccagaaaagttagtgttgtcttctcccacaggtggccttggataagggctgctcccaattccgcctggccgtcctggactggaaccagagggccatggacttgtacaaggccctaggagcccaagatctgacggaagctgagggctggcacttcttctgctttcaaggagaggcaacgagaaagttggcaggaaagtgacgccatccctaggaggatctctgtcttgagtttctccttccccatcagctgaagcactcttcagagactacgtccacagacactgatgctgaggcctccctggaggaaggagggttaggggtgcctatcctcaagtattggaagagcagaattgagggagagacctttcttccttgttgagggtgaaaaataaataagaattacatgtcctga

SEQ ID NO: 207840 - DNA, 1219 bp, Homo sapiens
cgagggggtggggctatgcccggacagaggatcgcctcgctggcctactctctcctcccgtacggcgccggaatcccagctccacttaccaggccgcggctaccccgccgtcccccccgactcccgccaccccgctctctcaggctcttcaggatccaagtccgtaggccctttaaggggtctagttgccgtttgcgaggccctgggactttggtcccagacagcggggatccggatggcttccgtgcggatccgagaggccaaggagggagactgtggagatatcctgaggctgattcgggtgaagactgcaggccgggccggtaacccgggggtcagagtggcgcggccagagcggggtcgtaggaggcgggggcagggggaggggctcgccttgggaacctgctcggggagcagcggggcccttctgctctaatctagcttccgtacccacgccttaggagctagccgaattcgaaaaactctcggatcaggtgaagatcagtgaagaagccctgagagcagatggctttggagacaatcctttctatcactgtttggtagcagagattcttccagcgcccgggaagctactgggtaagagcacctggcccttagaagtccacctctccagccggcctcagaggtctccccacaggcttccagaagccttactccccttttctctctctcagggccctgcgtggtgggctatgggatatactatttcatctacagtacatggaagggacgcaccatttatctggaggatatctatgtgatgccggaatatcggggtcaagggattggttccaaaataatcaaaaaggtggctgaggtggccttggataagggctgctcccaattccgcctggccgtcctggactggaaccagagggccatggacttgtacaaggccctaggagcccaagatctgacggaagctgagggctggcacttcttctgctttcaaggagaggcaacgagaaagttggcaggaaagtgacgccatccctaggaggatctctgtcttgagtttctccttccccatcagctgaagcactcttcagagactacgtccacagacactgatgctgaggcctccctggaggaaggagggttaggggtgcctatcctcaagtattggaagagcagaattgagggagagacctttcttccttgttgagggtgaaaaataaataagaattacatgtcctga

SEQ ID NO: 207841 - DNA, 1028 bp, Homo sapiens
cgagggggtggggctatgcccggacagaggatcgcctcgctggcctactctctcctcccgtacggcgccggaatcccagctccacttaccaggccgcggctaccccgccgtcccccccgactcccgccaccccgctctctcaggctcttcaggatccaagtccgtaggccctttaaggggtctagttgccgtttgcgaggccctgggactttggtcccagacagcggggatccggatggcttccgtgcggatccgagaggccaaggagggagactgtggagatatcctgaggctgattcgggtgaagactgcaggccggagctagccgaattcgaaaaactctcggatcaggtgaagatcagtgaagaagccctgagagcagatggctttggagacaatcctttctatcactgtttggtagcagagattcttccagcgcccgggaagctactggggccctgcgtggtgggctatgggatatactatttcatctacagtacatggaagggacgcaccatttatctggaggatatctatgtgatgccggaatatcggggtcaagggattggttccaaaataatcaaaaaggtggctgagtgaggtgaggagatgggtggggcgacaagtgaggacctgaagaagcaagggtggccttggataagggctgctcccaattccgcctggccgtcctggactggaaccagagggccatggacttgtacaaggccctaggagcccaagatctgacggaagctgagggctggcacttcttctgctttcaaggagaggcaacgagaaagttggcaggaaagtgacgccatccctaggaggatctctgtcttgagtttctccttccccatcagctgaagcactcttcagagactacgtccacagacactgatgctgaggcctccctggaggaaggagggttaggggtgcctatcctcaagtattggaagagcagaattgagggagagacctttcttccttgttgagggtgaaaaataaataagaattacatgtcctga

SEQ ID NO: 207842 - DNA, 926 bp, Homo sapiens
cgagggggtggggctatgcccggacagaggatcgcctcgctggcctactctctcctcccgtacggcgccggaatcccagctccacttaccaggccgcggctaccccgccgtcccccccgactcccgccaccccgctctctcaggctcttcaggatccaagtccgtaggccctttaaggggtctagttgccgtttgcgaggccctgggactttggtcccagacagcggggatccggatggcttccgtgcggatccgagaggccaaggagggagactgtggagatatcctgaggctgattcgggtgaagactgcaggccgccctgagagcagatggctttggagacaatcctttctatcactgtttggtagcagagattcttccagcgcccgggaagctactggggccctgcgtggtgggctatgggatatactatttcatctacagtacatggaagggacgcaccatttatctggaggatatctatgtgatgccggaatatcggggtcaagggattggttccaaaataatcaaaaaggtggctgaggtggccttggataagggctgctcccaattccgcctggccgtcctggactggaaccagagggccatggacttgtacaaggccctaggagcccaagatctgacggaagctgagggctggcacttcttctgctttcaaggagaggcaacgagaaagttggcaggaaagtgacgccatccctaggaggatctctgtcttgagtttctccttccccatcagctgaagcactcttcagagactacgtccacagacactgatgctgaggcctccctggaggaaggagggttaggggtgcctatcctcaagtattggaagagcagaattgagggagagacctttcttccttgttgagggtgaaaaataaataagaattacatgtcctga

SEQ ID NO: 207843 - DNA, 956 bp, Homo sapiens
  misc_feature (41)..(41): n is a, c, g, or t
aaataccccattttagcatggattatttcttgaaaaaaacncctatcagtgaagaagccctgagagcagatggctttggagacaatcctttctatcactgtttggtagcagagattcttccagcgcccgggaagctactggggccctgcgtggtgggctatgggatatactatttcatctacagtacatggaagggacgcaccatttatctggaggatatctatgtgatgccggaatatcggggtactgggcagaagctgaggctggggtgggagcaaagcaccccacagaccccactgttatcccctgtccccagagcccagccggtgtcattttctgatccccttcagctcaaacaatagctattttttgcctctttctctccacaacaggtcaagggattggttccaaaataatcaaaaaggtggctgagtgaggtgaggagatgggtggggcgacaagtgaggacctgaagaagcaagggtatatggaggggggacccgggttgaaagagggagtgagaaaacctttttcttttttgaccccagaaaagttagtgttgtcttctcccacaggtggccttggataagggctgctcccaattccgcctggccgtcctggactggaaccagagggccatggacttgtacaaggccctaggagcccaagatctgacggaagctgagggctggcacttcttctgctttcaaggagaggcaacgagaaagttggcaggaaagtgacgccatccctaggaggatctctgtcttgagtttctccttccccatcagctgaagcactcttcagagactacgtccacagacactgatgctgaggcctccctggaggaaggagggttaggggtgcctatcctcaagtattggaagagcagaattgagggagagacctttcttccttgttgagggtgaaaaataaataagaattacatgtcctga

SEQ ID NO: 207844 - DNA, 638 bp, Homo sapiens
ggatggcgtcactttcctgccaactttctcgttgcctctccttgaaagcagaagaagcccccagccctcagcttccgtcagatcttgggctcctagggccttgtacaagtccatggcccactgttatcccctgtccccagagcccagccggtgtcattttctgatccccttcagctcaaacaatagctattttttgcctctttctctccacaacaggtcaagggattggttccaaaataatcaaaaaggtggctgaggtggccttggataagggctgctcccaattccgcctggccgtcctggactggaaccagagggccatggacttgtacaaggccctaggagcccaagatctgacggaagctgagggctggcacttcttctgctttcaaggagaggcaacgagaaagttggcaggaaagtgacgccatccctaggaggatctctgtcttgagtttctccttccccatcagctgaagcactcttcagagactacgtccacagacactgatgctgaggcctccctggaggaaggagggttaggggtgcctatcctcaagtattggaagagcagaattgagggagagacctttcttccttgttgagggtgaaaaataaataagaattacatgtcctga

SEQ ID NO: 207845 - DNA, 926 bp, Homo sapiens
cgagggggtggggctatgcccggacagaggatcgcctcgctggcctactctctcctcccgtacggcgccggaatcccagctccacttaccaggccgcggctaccccgccgtcccccccgactcccgccaccccgctctctcaggctcttcaggatccaagtccgtaggccctttaaggggtctagttgccgtttgcgaggccctgggactttggtcccagacagcggggatccggatggcttccgtgcggatccgagaggccaaggagggagactgtggagatatcctgaggctgattcgggtgaagactgcaggccggagctagccgaattcgaaaaactctcggatcaggtgaagatcagtgaagaagccctgagagcagatggctttggagacaatcctttctatcactgtttggtagcagagattcttccagcgcccgggaagctactgggtcaagggattggttccaaaataatcaaaaaggtggctgagtgaggtgaggagatgggtggggcgacaagtgaggacctgaagaagcaagggtggccttggataagggctgctcccaattccgcctggccgtcctggactggaaccagagggccatggacttgtacaaggccctaggagcccaagatctgacggaagctgagggctggcacttcttctgctttcaaggagaggcaacgagaaagttggcaggaaagtgacgccatccctaggaggatctctgtcttgagtttctccttccccatcagctgaagcactcttcagagactacgtccacagacactgatgctgaggcctccctggaggaaggagggttaggggtgcctatcctcaagtattggaagagcagaattgagggagagacctttcttccttgttgagggtgaaaaataaataagaattacatgtcctga

SEQ ID NO: 207846 - DNA, 938 bp, Homo sapiens
cgagggggtggggctatgcccggacagaggatcgcctcgctggcctactctctcctcccgtacggcgccggaatcccagctccacttaccaggccgcggctaccccgccgtcccccccgactcccgccaccccgctctctcaggctcttcaggatccaagtccgtaggccctttaaggggtctagttgccgtttgcgaggccctgggactttggtcccagacagcggggatccggatggcttccgtgcggatccgagaggccaaggagggagactgtggagatatcctgaggctgattcgggtgaagactgcaggccggagctagccgaattcgaaaaactctcggatcaggtgaagatcagtgaagaagccctgagagcagatggctttggagacaatcctttctatcactgtttggtagcagagattcttccagcgcccgggaagctactggggccctgcgtggtgggctatgggatatactatttcatctacagtacatggaagggacgcaccatttatctggaggatatctatgtgatgccggaatatcggggtcaagggattggttccaaaataatcaaaaaggtggctgagtcctggactggaaccagagggccatggacttgtacaaggccctaggagcccaagatctgacggaagctgagggctggcacttcttctgctttcaaggagaggcaacgagaaagttggcaggaaagtgacgccatccctaggaggatctctgtcttgagtttctccttccccatcagctgaagcactcttcagagactacgtccacagacactgatgctgaggcctccctggaggaaggagggttaggggtgcctatcctcaagtattggaagagcagaattgagggagagacctttcttccttgttgagggtgaaaaataaataagaattacatgtcctga

SEQ ID NO: 207847 - DNA, 1087 bp, Homo sapiens
cgagggggtggggctatgcccggacagaggatcgcctcgctggcctactctctcctcccgtacggcgccggaatcccagctccacttaccaggccgcggctaccccgccgtcccccccgactcccgccaccccgctctctcaggctcttcaggatccaagtccgtaggccctttaaggggtctagttgccgtttgcgaggccctgggactttggtcccagacagcggggatccggatggcttccgtgcggatccgagaggccaaggagggagactgtggagatatcctgaggctgattcgggtgaagactgcaggccggagctagccgaattcgaaaaactctcggatcaggtgaagatcagtgaagaagccctgagagcagatggctttggagacaatcctttctatcactgtttggtagcagagattcttccagcgcccgggaagctactggggccctgcgtggtgggctatgggatatactatttcatctacagtacatggaagggacgcaccatttatctggaggatatctatgtgatgccggaatatcggggtactgggcagaagctgaggctggggtgggagcaaagcaccccacagaccccactgttatcccctgtccccagagcccagccggtgtcattttctgatccccttcagctcaaacaatagctattttttgcctctttctctccacaacaggtcaagggattggttccaaaataatcaaaaaggtggctgagtcctggactggaaccagagggccatggacttgtacaaggccctaggagcccaagatctgacggaagctgagggctggcacttcttctgctttcaaggagaggcaacgagaaagttggcaggaaagtgacgccatccctaggaggatctctgtcttgagtttctccttccccatcagctgaagcactcttcagagactacgtccacagacactgatgctgaggcctccctggaggaaggagggttaggggtgcctatcctcaagtattggaagagcagaattgagggagagacctttcttccttgttgagggtgaaaaataaataagaattacatgtcctga

SEQ ID NO: 207848 - DNA, 656 bp, Homo sapiens
attcctagaaggatacagggaattggcttgaactagctattttggaacttggcaaatactgcaaggcaagtcagtggtgagtttgtcacttggatatggaggtggcatgcctttctgtacatccccaaatttaactcttacaattcggaaagtgctggggctctggtgtgtctgattttagcagggttctgtaggaaatgcatgcagtgtttttgtggacgttctcagggctgactttgaaattaaaagtagccagttaagatctttgttcccctctatatattcctggtgctgtgaaccagcttggccttctgactgacacagacttctggctccaatcctcatgatacacttaagagaatgtggttgtgcctaaggtggggtctgacttttgaaaaatctctcttctgttagcttcctcatagagagagttggcaaaagaaatgagctccttgaaggcctctgaaagcagctcagaaatgtttttttgtgagaatggatgccaaaacagcagctaacagcagcttcaggcagtatagtcttgttcttgtgaaagtgcttatttaatgagaccagtagcaccgtggtaccttatctggtaccagtctgcctgccggcttttggacctgcacaccattttctctgacagtggctgt

SEQ ID NO: 207849 - DNA, 152 bp, Homo sapiens
gagataggattctgtgcttaatttcaaaaaggatttacagcttatgacagtcttagcaacttcctctaaattatgtagattactattccagtagtagatagatcaagtatccgtgttttaggacagcttttaaattgggcaaatgtaagaca

SEQ ID NO: 207850 - DNA, 430 bp, Homo sapiens
aattcagcaggaaagaagtgcaagagaaaaatattgcccgggatggtaataatttggtttgaaagtctcatagatgatgcaactccaaggtcattctttgtttcctaccaatttcaggttgcaaaaggaaagcaatatctggtagcagaaaggagcaagtgttgggtagtttcaataggacctggcagctccccctagctgagttaaaacacggctctgagcacattgctaatagtgtcagtcacaaataatcagattctgcatggttttagtatccaaatctgatcccagtttattctgagaacaaggccatctgccagccaggcaatggggaagaaaagccagcactctactgcctactattgccacctgccggctgctggtggaatcacatgctcattccttcctagagaaacttcccgttctaaca

SEQ ID NO: 207851 - DNA, 521 bp, Homo sapiens
ggtcacatggttgttaggtgctgaggatgagattaaattcaggcagattggctcttgtgctccaaacccatacatgaacacacagcaacatcaaagccttttcatggcatcttttgcatgatgcaataggtaaaaatggtccccattttattccattcaatttatataactacgtttaagaagaaataaaatcactaagagaaataaagtttggtcttgggctttagagaagcttttctgggccgggtgccgttgctcacgcctgtaatcccaacactttgggaggccgaggcgggcggatcacgaggtcagggatcgagaccatcccggctaacacggtgaaaccccgtctctactaaaaatacaaaaaattagccgggcggggtggcagacgcctgtagtcccagctacttgggaggctgaggcaggacaatggcgtgaacccgggaggcagagcttgcagtgagctgagatcgcgccactgcactccggccttcgcaacagagcaggactccgtctca

SEQ ID NO: 207852 - DNA, 422 bp, Homo sapiens
aaggtatctgagcacctcacacttttcttcatccttcctacctctattaaaaacagtttccaggaaaggctgtgagttcatttttactaaataaatggctgctggactttgatatgtggccttacccggatatcaaaagcattgtctgaagcaggatttttcacaaactcagcactattgacattttggggctaaataattatttgttgagggaagccactgttctgtgtactataggtgcttagcaggatccttgacctctacccactgaatatcaatagcactcttctcccagttgtcatgaccaaaactgctttcagacattgccaaatgtcctatgggggcaaaattacttacagttaggaatactggtctaaaaaaatgaaaattcttctgtacaatcttttgggcctcatcaaata

SEQ ID NO: 207853 - DNA, 339 bp, Homo sapiens
attattgtaggagattttcagaccatttttagctatagtcttcccaaaccaaagccttcttcttctgagggaaactaggatgaaataaagctaatctgaacggctgaatagttttttgtgggaatgcaaaaaaaaagaaccaagagcgcccctgagcagcatacctgaggcaggtaccctcaaagtacagtgcaaaaaaccactggtagaggacaagaccctggtgaggactcctgggttcaagtctttttttttttttttgagacggaatctcgcactgtcgcccaggctggagtgcagtagtgcgatctcagctcactgcaggctccgcctcccgag

SEQ ID NO: 207854 - DNA, 885 bp, Homo sapiens
tcgactctacaggatctgtcccggtatccccactgcagtttgacaaagggaaaagaaaaaaaaatacatatatgtatatatatgtatgtcaagaaaaattccaattttttcagagatacttgtttttgggcagcctattgctcagttgagattctctgaatggaccttccaggtggactttcaccttggggtggagaagaagaataattcatggaaggaaagactctccatactcagattggcatcctagccaactctttcatgggagaaacagagtaggtgtagttgatcgcccaccatatgttccatgtatggctatgtgcgcatctatcttgatttattagggacttctttctgtaattttgtaaaggtcaaagctagcataatcaccaactccaagaatatgcctgttggatccaaacagcatattgcgctgcattacatcctctgtcgaagcaactgaaatttctctgacataagcttctaacaagggtgggaatatgaattatgcacataatgtacttgttattttgggaggatgctttagacagtcactcagtcaataagtattagttgaatggttacaaattttctaacactgtgctaggcactgtgggaaatacaaaagaagtataatacatggtctttacccacctgagtctacagtgttattgtggaggcaagacaacgaaatttttcaaaagtatagatgagcaaatgcttcattgtatggtaccgagattggatgtagtctcagagagagggaagtatcatccaagaaggctttgcaaaatcaagtcttgaaagatggataggatttggagagagcaagacctttttattttagggaaacagcacatgttaagggaggaaagggtatggtat

SEQ ID NO: 207855 - DNA, 288 bp, Homo sapiens
caacagagccaagcagctgggtcccctttctatgtggcctgtgtaactctcatctgggtggtgccccccatccccctcagtgctgccacatgccatggattgcaaggacaatgtggctgacatctgcatggcagaagaaaggaggtgctgggctgtcagaggaagctggtctgggcctgggagtctgtgccaactgcaaatctgactttacttttaattgcctatgaaaataaggtctctcatttattttcctctccctgctttctttcagactgtggctttacctcg

SEQ ID NO: 207856 - DNA, 191 bp, Homo sapiens
gctgggattacaggagtgagccttggctcccagctcaggtctactcttgaatgtcttggcatggctggagagtatctcacggcctagcagatgataacactgtgcattcacaatcaccaaacacaattggcttctcctcatggcatggcaagcttagtactactttcttttaggaagcaccatcctgcttt

SEQ ID NO: 207857 - DNA, 546 bp, Homo sapiens
gccagtctgaaagatctacatgctatatgattctaattctatgacattctggaagaggcaccactatggcatcaggaacaaggcagtgtttcccaggggttctgatggagggagttatgaacaggtgaagaacaggatttttagggcagtgaaatgactctgcatgatacagtaatagtggatatgtgtccttatatatttgttaaaacccatagaaggtttgataccaagtgtgaattcaatgtaaaccatggcctttggttgataatgacgtatgaatgtaggcttattgattggaatgaacgtgcccctctgatgtgacggtgtggaaggttgcaagttagggagagggtaatgggagaactctgtactttctgctcaaatttgctttgaatctaaacaatctaaaactgctctaaaaaaaaagtctattaattaaacttgttaaaatagagaggagagatagggagtatttgaagggatacaatccccaactgggtagatcatgaaggtctcagggttaagagtccagctaaggaaacacct

SEQ ID NO: 207858 - DNA, 484 bp, Homo sapiens
cgttttgaaggagctgtgtatgacaaactgtcaggagtagaagaagggaagttgggaggagtgggacacaggattccaccttaaaaccatctctagggaacaacaattccagagaatacctccaagaggttcagagtgaccctctgaagagtcagtaggatgtatcaaaaaatggaagaaatcaaaatagctgaagtgtggccaggcgtggtggctcaggcctgtaatcccagcactttgggaggccaaggtgggtggatcacttgaagtcagaagttcaagaccagcctggccaacatggtctctactaaaaatacaaaacttagcagggtgtggtggcccatgccttgtaattccaactacctgggaggcagaggcaggagaatcatttgaacctgggaggtggaggctacagtgagctgagatcgcatcactgcactctagcctgggtagtggagcaagactctgtctcaaaaaaaaaaaa

SEQ ID NO: 207859 - DNA, 206 bp, Homo sapiens
cctttataagggaattaaataacatagttggacatttttgaagccttcaattataatttttatacacacataagacaaaaaagtgagtacatttgctaatcacttttaaatttcaaatcttaggttgagacatttttacactaaaaatatgaagttaaaatcaaatgttattttaaaaccagaaatactattgatggatttaaaga

SEQ ID NO: 207860 - DNA, 430 bp, Homo sapiens
tgtacctggacacagagtgaaagagcaggctgaaggagcctgctgtatctgagcacaggctgctctcagcaagtacacatagagacttgcttttgggcccaatgatcccctttactagcaaaatgacgtaagtagcaagagtctcaaagtgctaggcacagtgctcatgcctgtaatcccaaccctttgggaggccaaggcgggcggatcacttgaagtccagagcttaagaccagcctggccaacacggtgaaaccccgcctgtactaaaagtacaaaaattagccaggtgtggtggcaggtgcctgtaatcccagctactcgggaggctaaggcaggagaatcacttgaacccaggaggcggaggttgcagtgagccgagattgcaccactgcactccagcctggctgacagagcgagactccatctc

SEQ ID NO: 207861 - DNA, 354 bp, Homo sapiens
agtccccgtggtgtgtcgcctctgtacttgttctagagaggcagggatgactgagacaacacaggtcctgctcccaacaggactagcgtgctagtagggatgctggtaccaaagaggtgtcctgaataaaacatgctaagtagcatgattgagtaaacatgcagggccaagggcactggctgcagctgcccaacaggaggcagtagatggagcagcaaggaggtggccctggatgttggcatgaccggcacaaggtctgaccctggggccccgtggctctacaaagccctctgtgaggccagctcccatcccttcttctccttcagctacaggagtagctccaaaagttaaaaa

SEQ ID NO: 207862 - DNA, 437 bp, Homo sapiens
atgaatttatagaacaaatgtttacagaaaagtcttagggaaatgtagtggttggcctgccttgtgtttatgatgtgggcagtttaataagacacattcagaatatttggtcagcccaaacacagattgtcctacatctggaaagtgtgtttgctgccacaagaagattctttactttctggcagtgctgtggctaagattttttttttctttttttttttttaaccctgcagttttccttgtatcagtgaaagaaatgcctaggtagcacatgatcatgccaaccagacactctaggagaggaagcatgagtgtgaggaaaggacaacaggggaaaacagccctcatcatcacctgaggacacaagcaaatctgcaatctcaggaaaattctctttccagaattctagaaattctggaaatttctctttgttctat

SEQ ID NO: 207863 - DNA, 645 bp, Homo sapiens
ggttctttgtgggaaatggtattttgatattgcaaccttttctctaggggtgctcatagttattgcagtggtaatgtttctaggcctttttagtgggtagagctagagaaaaaaagttttaagagatcttgagttcatactgatattttaaatttcaatttagggtatagcatttttatttcttttatgtttatattttttcttatgctgaaaatgtggttttagtggcaataatattagatttatttgctttatcttataatgtataaaataacaatttatattaataatatgattatggaaaacattttaagattaaaaactggtcaggtatggcaggtcgcgcctgtgatcccagcactttgggaggccgaggggggcggatcgcctgaggttgggagttcgagaccggcctgacaaacatggagaagccccgtctctactaaaaatacaaaaaaaattagccgggtatggtggcgcgtgcccgtggtcccggctgctcgggaggctgaggcgggagagtcacttgaacctgggaggcggaggctgtggtgagctgagatcgcaccattgcactctagcctgggcaacaagagcgaaactccatctaaaaaaaaaaaaaaaattaaaaactttaattttttt

SEQ ID NO: 207864 - DNA, 462 bp, Homo sapiens
tcttttttagttcaaagcattcagcaccatactttggggtaacgtgttctgagtcccagcactgatacatagttatcctattccacacctataactttatgtatttctctcagcctgaaatagtctttcaacctttcaatttttgcctcttcaaattttatgtatcttttcaagctcagatgtaataccttcataaaatttgttttggtgatctgccatgctcttatatgctccccataaaaggaatgtgtgatttcttcagtctttgaaaaactgtcatttttgtttgtgctttttaaaagatatgtatatatactttgtcttaggattacttttatgtgtagagacatagtaactgtgtctagcgcaggctattatgcttcagatccagtagattcaggtaatgtttagtgcctactgtgtacttcttcacttactcacctgtaacacctttttgaaata

SEQ ID NO: 207865 - DNA, 397 bp, Homo sapiens
tacttttttctttcagagtacaaaattgtccaaaatcattttatatttcaagtccccttgtggcacatatagaatatttggccttatctagcctatttaaaacaagagagataggccgggcgcggtggctcacgcctgtaatcccagcactttgggaggccgaggcgggcggatcacgaggtcaggagatcgagaccatcccggctaaaacggtgaaaccccgtctctactaaaaatacaaaaaattagccgggcgtagtggcgggcgcctgtagtcccagctacttgggaggctgaggcaggagaatggcgtgaacccgggaggcggagcttgcagtgagccgagatcccgccactgcactccagcctgggcgacagagcgagactccgtctcaaa

SEQ ID NO: 207866 - DNA, 700 bp, Homo sapiens
gcaaccagccctttttcttaagctgtctaggagctttcagtcacccagtcatctcagtaacatcaccaaatgcattcttactatggtgatcccaaaggtcttagaggctcttgtgttagaaacctgggactaagaccaaatattcaaacaaaagatggtcctatcacctttatcaccaaggcctttataagaacttgagaagctctgtgccaggacgaggggcagaaaccaaatgtgtattttttttctttttcttttgaacacagagtctctgtttcacccaatctggagtgcaatgatgcagtcgtagctaactgcagcctcaaccacctgggctcaagcaattctcccgcctcagccttccaagcatctgggactacaggtgcacaccatccatgcccagctgatttttgtatttttttgtagagatgggatcttgttatattgccgaggctggtcttgaactctggggctaaagcaatcctttcacgacagcctctcaagtagctgaaactacagatgcataccaccatgcccagctaattttctcttatttctttttgttgtttaattgagggggggggtctcactgtgtttcccaggctggtcccgaacttctggcctcaagcatttctcctgctttgacctcctaaactgttgggattatggttgtgagccccggcctctgtgtccagcaatc

SEQ ID NO: 207867 - DNA, 222 bp, Homo sapiens
catatatatttaacacactgctccttcacacacacacatacacacactctcacacatacactcacatacaagatgctactgacagactgcaatctagaacatgccttcctattctaatacaaatgagtctacattttcttttaacttggcaaggttgaaaaacagactcatcatagtaacttagcagtggccacacctaagaaaagcggcatgactacacag

SEQ ID NO: 207868 - DNA, 604 bp, Homo sapiens
gtgtggtggaatctttgacttttcctttttccgctttcttttttaataacagctttgttgagataaaattcacataccaacaattcactcgtatgtgtacaattcagtggttttaaaaaatgtattcaggatgttatgcaaacatcatcacaatcaattttagaaaatgttcatcttcccccaaagaaacaccataccctttaacagttaccgtcccagatcaccatctcaccctaggcaaccactaatctgttttctgtttctatggatttgcctattctggaaatttaatataaatggaatcctacagtatgtggtctgttgtgacacttagcttaatgctgtcaaggctcatccatgttataacatgtgttagttttttttctatttataattaatttttgttttgagacaggatcttactctttttcccaggctggaatgcagtggtgcagtcatggctcactgcagctacaacctctggggcttaagcgatcctgctgccttagcctctcgaatagctgagactgtaggcccatgccaccacgctcggctaattttttttcttttttgtagagacacagtctcactatgttgcctacac

SEQ ID NO: 207869 - DNA, 353 bp, Homo sapiens
tttgactgacaggaaacttgctactgattcttgtgggcaaggataatctcaaaacaattatataatcctcctcgtttttcctctaaaacgtttgtctttctttacctccctgaaatgcacatagtttactatggcacctgccatccaattgcagtgcctattctcaggtaaataacattttcttttagaaataacatttctaaaatgttacagtgacaatatttacaatgacaaatttgttcttttcaatcagtttcagcatccaattgattctatatgtttttatagttaaaatatataacaaaatgtaaatttctacttataaataaatgcaaatgatttcattctaaata

SEQ ID NO: 207870 - DNA, 526 bp, Homo sapiens
aacaaaaagatacatcgtttaaaatcagttgggtggggggcagacagtgagatgccaaagagcatatacacttgaatatatagaatttcaagtaagtgcaatgaaggaaaagaatgagattcagtaagagagaatagaaagaactttagagtgaattatcaggagacctttctgaggagtcaatttagtgtaagtcctaagcactgtattacctgttccattgtgttacttgttttgctcagaaaggtcaggtttctggtaccatgccaccaagattaaaagattctctgtgcaaagacaggcagcaaatcagaggaagaaataatttttagactagcaatatatgaccttgtggagttaatgttctttaaaaccatttatgaagaaattgtgatcaagggacctactttttttttgagacactgaaaatattattatttactgattggtttactttgtttttttctttcagcatactttaagattgttttatgtctctgtacctttgaaagagttatttacccat

SEQ ID NO: 207871 - DNA, 475 bp, Homo sapiens
ctgaactcagagattcaggacttggtgagcacttcaatatttctgtgtctggagaatgttaacttaggcctggatcacttgaaatttttaccatttattgagtaaaaattttgtgtatagcactatgctaacccctgaggctctctcattgccaagttttttcaaagactctggatttatgtaaaagaagataggccaggcacagtggcgctcacctataatcccagcacttggggaggcggctgaggcgggtggatcacttgaggtcaggagttcgagaccatcctggccaataaggtgaaaccctatccctactaaaaatacaaaaattaactgggcgtggtggcatgtgcctatagttccagctactctgaggcaggagaatcacttgaactgggaagcggaggttccagtgagcggagatcaagccattgcactcaagcctgggcgtcgcagcaagacttcgtctcaaaaa

SEQ ID NO: 207872 - DNA, 306 bp, Homo sapiens
ggctttatagaaagtattgtgccagtatctgctgttgctgagggttcagagagcatccagttgtaacagaaggggaaggagacagtcttgtcacagcgagagagagagagcgagagatgggagggaggccactctcttaaacagtcagctccagtgtgaactaatagagcaagaacgcactcattactgtggggaggggaccaggccattcatgagggatctgtccccatgacccaaacacttctcagcaggccccagctccaacattgggggtcacatttcaacatgagatttggaggggacaga

SEQ ID NO: 207873 - DNA, 434 bp, Homo sapiens
tgggagtatttccccagtgtattaaagacttgatacatggctgagagtcttccactacccagaggctgccataatcctggttgactctggtatctacaaagacaaccccccagtatcttcatcatggtcttggaccccctcatctctagtgaacatctgccctcctcaccttcagttacctgtatttacaggttcacaaagaagagcttatcatcacccctgtgtcacctccagattctaagcgtcccatccagtacaacctactgtggctccagtcagccagagtgctccacgttctatttccaacttaccactatctcccaggctctagccactgcttctcctctagattactgtgtagtccccagactagttgtctttcgttttgccacctacactccattcttcacccagcaatcagaagatcatttgaa

SEQ ID NO: 207874 - DNA, 337 bp, Homo sapiens
catgcagcaagccttgcaggatggaaggcaccctggggacggcgacccacgggccttctctgtgcttcctgctctctggaaatgggtgcatccgggtcacatcagaagttcactgttctttgcttgtcccgaggttccttcctgggacagtccttagttgaaactattcatggagccttccctgcacccttcacttggggacggctccctctcttctctcctcttcccagaaagaaactgccatcaggaggtggcattaattaacaatgaacaccagaggaggcatcgggccaggcaggtgacgccagcttaggaagcacctgatgcactggtcccc

SEQ ID NO: 207875 - DNA, 182 bp, Homo sapiens
aatcattgttcttgagtttgaaaccatttcttacactcctttctatcccctacagcagggtgtctcaaccttggcacaactgacattttgggtcaggtagttctttgttgcagaggggccgtcctgtgtgttaggatatttagcagcatacctgccctctagccactagatgtcaatagcac

SEQ ID NO: 207876 - DNA, 350 bp, Homo sapiens
actttcttgtccaaagccccgtggaggtgaaattcctacccacccttctttcctgttccctctcttacctgtgataactaagtggggctaatacaaccttggtactaacctggtctcaaatctctgtctataaacatctaactaaagagatttcatggactgctgatcacatttctagagtgaatataaaactatgagaaaatctatagaggatttgcatcaacatatattctttctatttttttctagttttcttttgaaatgcagcatattccaaaaggcttacaagatagtataaagctgctgggatggaggtctcttccttgttttgaatttccactaaaaaaaaa

SEQ ID NO: 207877 - DNA, 450 bp, Homo sapiens
agggaatgtgaattctggttttatccttgttgatttggcagctatcaggcagtcctcatcagacaaacacagatgaacattatatttctagggagagatcaggctaaagagatacagtaagctgtcagggccatgggaatgcccatcaccattgtgagagtaggtgaaatcatggagaagagcaaagggctggtgcagattcattcttaaggaaacatctacatttaataaagagcattacatggaaagagtttcattaaagaccaaatgaattgttgaagatatcagaggcagttaggataatgcaacattgtgaaagccaaaagaatagtttttaacatattggcttagaaattaagaaaaattagaaggtagaaaaagtaattggacttggaaactggcatcagtagaattggagaaatgatacactttgatttgcaaagtttgaca

SEQ ID NO: 207878 - DNA, 143 bp, Homo sapiens
gagcccaggagtttgctgcagtgagccgtgattgcaccactgcagtccatcctgggtgtcagagcaagaccctgtctcaaacaaacaagcaaacacaaaataatagtactttccttgtaaggttgtcttgaggattaaatgaa

SEQ ID NO: 207879 - DNA, 293 bp, Homo sapiens
tggtattaggttggtgcaaaagtatttgtgatttttgccattacttttacaccaacacaatattttaaaagccagagttggaattttcgtaacccaatagaaccagtgatacactgggtttttttttatttgttttctttaaattgttgtttagggatctttgtttttgagacagggtctctcactctggttgcccaggccgaagtgcagtggtggtgtcttggctcactgcagcctcaacctcccgggttcaggtgatcctcccacctcagcctcccaagtaactggggcta

SEQ ID NO: 207880 - DNA, 444 bp, Homo sapiens
cccctgctttgatggagcacacgcttcacatcgacccacacgctacccccacaacgaagccatgcagcctgctccaaggacagggaggccgaggaggaagcacattgactgggggcacgtgcaaggtcgtcctcgtgcaggctccgagctctgggctgggacagatgagacctgtccatgccgaggcctccttggcacgtgggctccactgtctctgctcctttctttttctgtgctccgtggaaagaagatcattgtggccccacacctcccggtgcccctgtacttcctcctgggccactcagcagaattctcgggccctgtccatggcatttgggtgggggccttgccagtcctccatgagcccagaagctcctggtgccttcagccatcttggcattgtcaggggagatttttttttaattaaaagtctgccttggagta

SEQ ID NO: 207881 - DNA, 732 bp, Homo sapiens
ataaaacaaacagggattggactgttttaaggcagcatgaccagcacatgctgtctctgtccccagatctgtatgaaacccaaataccaaccagaagaagcttgacaaggatggactcagaacaagcagagctggatggagcaaatggtaccaatctaagatgacctcatacatctgtgtcataagaaggatcatcttggcaactggacccaaatactcagtatttaggctaagactcctaatgttctccaagttttccatgcctgaccaaacattctattgactagcattctttatgaaatatattcagtcaagctacagtcaagccttgaagatccaggaaccttttctctaacatatattttcctatttgtgttctgatttattacaccatatactatcttaacccatgttctttcttccacgcaactgcctgacaggagagaattctggggcctcataggctcaccaccaacatcaggatgctgtgctcaaagtcagcactcataggccacaaagcatcatccctgatgcctcagaagctggactaatgatcacagtgtcatcagagtgtacctctcccggtctcgcccaagtcccttatcgccgtctcccggccctacaaacgccagtccccagtttcccctcatccgaccattgcggccacagggccccctccaccccctcctcctccgacccgctcttcgcgccggcctcccccctccgccccct

SEQ ID NO: 207882 - DNA, 636 bp, Homo sapiens
cagagcttgcgttgatcacattcatttattcattcaacacatttttctaggaaactcactgtatacactaaacactattctgtgtgctcaacctagaatgtcttctccagaacaagactagtgtagaaatacaggaatgtaaattctgtcagacggactagatctaaagaattaccagcataaatgtttgcatttctgctgaagccagaagcttttccttcttcctagacaccatttcatccttaattattacttctggttagttttccattgccaccataacaagttacaaaatgtggcttaaaatagcacaaatttattatcttcacaattctgtaggttaggagtccaggttaagagtttcgcggtgccaagatcaatttgttggcagggttgcattctgttaggaggctctacaggagaatcatttccttgtcattccaccttctacaggacatcctcattccttggcttgtgacctccttcttccatcttaaaaaccagtgctgtttcatctctatgacccttctgttaccacatctctctgacaccagtgtggagaggttctctgcaggactcatgattaaatgaggcccaccggatatccaatctaggcttatctccttgtcttgaaat

SEQ ID NO: 207883 - DNA, 342 bp, Homo sapiens
gcaggctgagaacgtggaggaaaaggagccagatgttggctctcaactcgtgttgatcactgggtggctttttaaaatcccaatgcccagtgccccatcaccagttaaattattgttgctgggggtacacccagagttcaagctctccaggtggttgtgcatggtggctcacgcctataatcctagtaccttgggaggctgaggcgggaggatggcttgggcccgggaggttgaggctgcagtgggccatgctcaggccactgcactccagtctgggtgagagagcaagaccctctctcaaaagaaaaaagaaaagaaagaggaaaaaaagaactttactga

SEQ ID NO: 207884 - DNA, 214 bp, Homo sapiens
ctggaagtgatagtcacataaatgctgccctcagttctccctaaccttgtgttgtgcctgccttcacagttcttcatatctttcttgctgagctttagaaagtgattagaagaacagaataccttaccagtaaaaggatttttgctgcaattccttggcagccttttctttccattaaaatttttttgaaatttggaaatcatttctaacttac

SEQ ID NO: 207885 - DNA, 210 bp, Homo sapiens
ggggacgctggaactgaaagtggacagcagcgggccgtgcagcctggcctgccgtgtaaaggacctggggctcgggctgagcttgttgaggccccagggggctggtcagcatggctggtgggagtgtggaggtgacacccagcacattcacatgctacctgagtgccacgtgggctccgggtggtttttacattcaaattcagcaagtgc

SEQ ID NO: 207886 - DNA, 329 bp, Homo sapiens
ccaaagtcagagtgccaggatgttctggttttggggagggcccttttgcggttgcagactgttgggtttttgtataagcacatggggaaagaagtgagagctctcttaggtcccttttataagaacactaagcctattcatgaggcctctactatgacaacctaattacctcctgaaggtcccactactaataccattacattgacagttacgatttcaatatacagattttgagggtacactttaaaaattcagtccgtaacattctgccccaggttccccaaaattcatgtcttcacatgcaaaatgcagtcattccattccaacaa

SEQ ID NO: 207887 - DNA, 597 bp, Homo sapiens
ggtatctgaaaatgtgatgttagtgtcattgtttaggattcaaatgtgcaagatctgttgtctgaaattatttatgccaattctcttaaaatcttctttgagattctaaagtgctaaagatataatgcatcatcaaacgcattattactttaagcattaattaatttcatatagtgagagaccttagatttgcatgcaaaaagagagtgacttacgagagagtggcattcagaaacaaagaagtatctgtaagttctcttttcacatcaaagcttgatacacgagcagagcgtggtgccctattttgacaaagttcgccaattatcagaacaagaatgctttttaaaaacacaagttgtttcttctactgacaaatcattaacgaaatgatgtaagggatcttgaaaaaaaaatcactacataatctttttctcccaatgaatagcctgttttagaagcacatggtttttagtttccagtaagtttcactattattctatttcaagaatatttacagatatagttgatatataaatatacgcatatatatgccagatatagttttgcaaacacatttgctgtctaatttactttcta

SEQ ID NO: 207888 - DNA, 182 bp, Homo sapiens
ctatcttctctatttccttttgcaacaaatttagagatcatttctgttatctccttgacttctctacctccttttaaatctattacagtctgacttttgattctacctttgttaataagatcactaataatgtccttatcttccaaatccaaatttgctttttagtttttctttcatgatgt

SEQ ID NO: 207889 - DNA, 174 bp, Homo sapiens
ccacaagtcacttagactccatgggcttcagttttttcatttgtaaaatgtaaaagtcaaactagatatctcttttaataggtgagctgaatatgtttccatttattggagaaacctcaatctttttatgttttatttaccatattatgtatgcatgattgtaagtatgtaggt

SEQ ID NO: 207890 - DNA, 210 bp, Homo sapiens
gatagacattgggaaagggattcacagaggtccttcaaggatattgttagaaaagccacggaagactggcgggatggctcatacctataattccagcacttagggaggctgaagtgagaaggttgcttgaggccaggagttcaagaccagcctgggcaacatagcaagatcccacatctacaaaaaataataattagctgggtggggtgg

SEQ ID NO: 207891 - DNA, 247 bp, Homo sapiens
gttcttgctgaactatgtgccatgctattttatgactctgtatctttgttcattctgctccctgtgcttggaatatctttcccaagtttgttctgcctggataacacaaacttaacacctcttcagtaagtattttcctgacttctctgatgtggaactgactagcctttctttgtgcccctgactatactccttatgtgcttttgttaaagcatccagagtgtttatatacatggtgtatctttca

SEQ ID NO: 207892 - DNA, 143 bp, Homo sapiens
atttcttttcagggtgtttgtgccctgattatcaaatgtacagcttgaagggagttcatgtcttaaagtaatgaattaagagttgacctttgttgactgctaaaatattcttatatgtgaaagcatcctggaaaaatacgtta

SEQ ID NO: 207893 - DNA, 257 bp, Homo sapiens
cctctctcaacattactcacttaggatatttccaattatttgctattgtaaatagactccagggaatatctttaagcatacggtttagtctttggacttttaatctactgagaaggcgtatctgagtatttcttgacttgacttgttatcatcagagtgaggcctaagaaactgttgcattcattcattcatttatccatccatctattcatttatttgaaacacatttaccaagttccttcttaatgttagagata

SEQ ID NO: 207894 - DNA, 473 bp, Homo sapiens
caggaataagtccccaaatttgaaatatcattatcagtgttttggctgatagaaaacaggttgtggttactgaatttgcctcttagagtgggctgagcaggggtagcttattcattggaattgaaaacaactctagatggatttgaggggaataagatcagagtttttgtggatcacaagctggctgtacatcagtaaagacctcccattatatgaaaaattctaagttaatactggaataagttgacaaggctaaacctatcataggtcctaggctgtgttttggtggggaccctccaggaaaatctccttttggggctggagagttccctagagaaattagtgatcaccctgtccactaaatgaggtctctggtctcttactataaaactggctgatgcaacttgattgtaatttactagtttgacttcggttgtgttcaaaatattaaagcatgatagtgtttaactgta

SEQ ID NO: 207895 - DNA, 489 bp, Homo sapiens
cttgggataataatggtatgtatccgagaggattacagattagtgagattatacattcacagtactgtatattatttgttgtatgaagtctggagggatacagaatagcatgtagtttgagtacacttttgtaggagaaaatatacaaagctatacataggcttctaacaaaacctgcaaggctatatgccaaaacgttaatagtatttatctatggctagtgccattgacaaatcaggttttaacaaatgcttttctgttgtagactcgattttttttaacattcaacatatattgcttttataattggaaaataattcttaccacctgctgtcaggagaagaaaagaagagaaagataattctacttaaaattaactcttagggttgggcagttggagcagtgtttaatcttataaatgtagcttcataagatctggtcctatatgaaagtttaaatgtagcttctgtaagatctggccctatgtgg

SEQ ID NO: 207896 - DNA, 411 bp, Homo sapiens
aagtgttctgctaacattttttgttgctttattaatgcttgccctgggaatcatatcataaacagtttaggtaaacaataagttaacaacactgagaattttcctgtttcaccaaacgtgtcttatctacaggctgcagacattcagcattaccttgtcccttgcttctgttctctttataaagctctggacaagaggcacacaacagacgtgtcccagctgctgactcagtgtgacagagcactgttgccagtgcccaggtgactgcagtgggccacactgcaggattgatggtttaactctctgtagcttccaaatcagattattttcatttgcgcaaaggcacaccagcaggggtgtgtactgtttgacgcacagatgacaatctggccggaagctagtacttgggga

SEQ ID NO: 207897 - DNA, 861 bp, Homo sapiens
ttttttaattctcaggaaaaaaatcatttagctggatttttatatgaagataaatagttttcatacaaatttaatttcacagaagctgccattattctaatgacgtgggtataacctcactttcaaaagcagaaagaaacactttagcaaacacataaaaattcttaagatattcacactttaaaaaatgtaataggcggccgggcgcggtggctcacgcctgtaatcccagcactttgggaggccgaggcgggtggatcatgaggtcaggagatcgagaccatcctggctaacaaggtgaaaccccgtctctactaaaaatacaaaaaattagccgggtgcggtggcgggcgcctgtagtcccagctactcgggaggctgaggcaggagaatggcgtgaacccgggaagcggagcttgcagtgagccgagatcgcgccactgcagtccgcagtccggcctggccgacagagcgagactccgtctcaaaaaaaaaaaaaaaaaatgtaataggcaaatctgtggcctggaactcttgtgggcagtgcagtgtttgctttgtgcaagctgtcaggcctctcagcatcaagagacagtacctccttcctggccagcacccccaacggtgagcgccgtgacccaccaaacagcaggtgagattggagacctggctggatgagcaaagcaggaaagcagttttgctatccgggcgaatggagttacggaccttcttccaggttaagaagaaagccacgttcggagcgccctgtgttgcagtgatgggtttgttgagcacccaccaatttagtcaggaaaactgatgcagacgtgtggtctgggggtcttcatgaatcggccagaa

SEQ ID NO: 207898 - DNA, 392 bp, Homo sapiens
gaacaatttctttcccaactcctgcacagggatgacggcatatcactcaaacatccatttctccttgatatggtttggctgtgtccccacgaaaatctcaccttgaattgtactcccataattcccacgtgttgtgggaaggacctggtgggagataagtgaatcatgggggccgtttccccagtactgttctcgtggtagtgagtaagtctcatgagatctgacagttttttggggtttctgcttttgtgtcttgctcattctctctttgcctgctgtcatccatgtaagacgggacttgttcctccttgccttccaccatgactgtgagacttccccagccacatggaggtgtaagtccaattaaagctccttctttggtaaattgccca

SEQ ID NO: 207899 - DNA, 120 bp, Homo sapiens
caaagccacacacagcacttcagaggtggcagggaggagacagaattcacagtggaaattcagagggacttactcaaatcaaaactaaagtcaaggcctggatatttcctctatttgatg

SEQ ID NO: 207900 - DNA, 563 bp, Homo sapiens
atgctgctacatggtcagggctttcatcctatcctggtataaaagtcataccgctttctaagaaatctttttacttttaaataatatacatattgcttgatttagatacccaatcaaaacacattctttccaagtatgaaatttaatttgtatacatatggaataaagataaatagaaaatccattttgctaatatacgtaatagttgcatgtagctgaccaaagcattcacatgtggggcctaaacatttactgcttcttggtcttttggctaaagttgggtgtagtatctgttctaggatttctggagcagggagatggaacagaagcttgcttggaccactccatgtattgaccgggtactgcactaactctaagaaccgcgcaccaagaaaaccaaaaccaaaaccatgtcatgcctcttagctgagctaaggaaatgcattatatgactgtgtccataaacgtgtctcttggccaagaagcttccttcacacagttaacctttcttttcttgctgatggccctcataccactgagcctctgcttagagaggaaagaaa

SEQ ID NO: 207901 - DNA, 319 bp, Homo sapiens
tgtgcacactaggtattcccagtgggctacagccatgcctctctctgcttcaagttccacatctggaaaatggactaatgatacctgcttgtcacattgcaagggccacaaaaatagaaatgagatgccgcatgtgaatggagcttgaggaaaatcaatacaaatataaataaacttatttatatgagtcatacttcaaaaaagaataccatcatactgtccttcatggtatcacccttaacaagacaatgccaaccatctaagttccctcgccccatcagactcctttaatacactacatctagtattgtttaatttt

SEQ ID NO: 207902 - DNA, 500 bp, Homo sapiens
atagtcagtccacagtacaccggcaccagcaccaccttccctcttcacattctccatcccatgaatctttgccttaggaaaccaaagcttcctaaaagtagccatgcctgagtccttgtctaggcccctggtatccaattagccagaatgggatgtaggaggcgagattcaaaaacataaactagtttgaaaattgccttcagttttctataatgcttcgcttcatccatgttcccttaaacttctaaagataaataggcctatagtaatacaaaattggattgatttaaaatgatacctgtgatctggtaggatctggaacttactagaacaccaagaatacaaattaattggtatgattttgaatttatagacctgggctgggtttacattcaattttatgtcataagagtgggtttaataacaatatttattgtctaacaacatacaagatctacttaacaaagtatttcaaatatttttcataagttgttgccaaa

SEQ ID NO: 207903 - DNA, 1031 bp, Homo sapiens
tgacagtgctatgcatgaatatgtttgtgtacttaggcattcttatattccgggtctctttgcacagagattatataatttgagataattgcattacatcgtgttattattttaccttgaaattagagaactgctaaaatatgcactggaagtttccaaatcctaaagctctctaacagctaagtagaaattagaagtagaaaggaataatttgaagccattgtcttagaccatttggccttccataacaggatgcaataaactggttggtttacaagtattagaaatttattttttcacagttctgaaggctgggaagtccaatatcaaaatgccagtaggttctgtgtcaaatgcgggcctgcttcctatttcataggcacccatcttctcattgtatcttcacatggtggaacaggcaagggcactctctgggatctcttctatgagggcgccaatcctattcaaaagatccccaccctcatgatctaatcacctgacaaaggcctcacctccaaatctaatcacattgaggattagggttcaacatacgaacctttggggagacataagcgttcagtctatagcactgattgatggagtctggtttcatcatttcatagttatgtatctctattttgcagacataagtcatgggcaggagggtgactacagaggcattcccatcgtaagtcatctaacagaaagcaaagcttagggttacttggtaaagtgactcacagatctcttcattgcagggctgtgaaactctacaaggagcagctcttaacagcctcaagatctggggttttgctcatgaatgacactatcttatgactttacgtaaatccttgggggttctcagagtctcagtttgctcattagggagtagattaaatgatttcagaggttcctactagctctaaacaagtataaatgtataaacaagtaaaaacagttcatcaaaccgactggtgaatcctagtagtgacacatttcaattgtagaacactttagggtttgtacaggtc

SEQ ID NO: 207904 - DNA, 298 bp, Homo sapiens
cacagttttgccatgtctaacatcagtccttcatcctgcacgttcacctgtttgttctctctcagtccttttctgaagacttgaaaagagctaattacttggagacattccttttcaatagctttccaaattgctctattctgcaagccaaatatatatattatatgccctttagacttttcccagcctctctctcttgatttttaaatgatctcagagattttcacataagcctacatttttagagctagcacagccacagagatcaatgagtccaactatgtcaggataaaactga

SEQ ID NO: 207905 - DNA, 168 bp, Homo sapiens
caggtcagtccttcacggggtgtagccaatgggaggcctgtcaaagacaccgaggggtattgccgggttccttttaataaaaaccctaattgaggaagctcttgggcctcttgctggagccccgctcccagtctgtgaattgtcttcaataaacctgtgctttcctta

SEQ ID NO: 207906 - DNA, 361 bp, Homo sapiens
gagtcctctgaggacgactccagagtccctcaactccttggaggagataagcagccaacacagtgttgttcagcagatgccaccgtctgccatgtaagttaaataaggcagacagcagcagctaaggagattttagcctcctgttctaaacagtattttagcttaacagcagaaaacgtttaacatgttcccccactcctagaaaaacaagcaatttatcttcagggagagggagaaaaagcactttccaccattctgatgggtcatcaagtttaaaagctctcttatccctaaacctttagagaaactaacagaaagtatgtttccctttccctgcagcttatttaccttgcaaattgtt

SEQ ID NO: 207907 - DNA, 250 bp, Homo sapiens
tcctccatcattaatattcttttcctgacttgcccattgcagagtctaattgaaattcacaaagataaaaagcatgccatttaaaaccttgcaaccagagaacctaagtatcttatacttggcatgaacagttcacttgctactgtattttcctattttccatttctgtgagtcaatcttcattaaaatctctatcacctctccatttatattactaataaattgttgatattttgataatggaagttaa

SEQ ID NO: 207908 - DNA, 174 bp, Homo sapiens
ggccccttggtgctagtatagtatctccttcctccatcttctgacaaaaacctagctctggaccagcgggggcaaaattcccagccaaggaaccactgcactgacctacagctcaatggtctcccagttactaccccgtgagacagcaagtagaaaactgcctcctctttctcc

SEQ ID NO: 207909 - DNA, 363 bp, Homo sapiens
tcctttctcatattggtaattctgtaatgactggttatgacccgccccctcccccatatttaattctcatcagcccagctctccactttgctattaatgatagcagccagcaaaatagctttcaacatgccattgacagtctggtttaagagagcacttgaagtagtgctagacagctgaaagcacccataattgtgtaccagagtgagaactgcgtgctcaagggccttgtttttatatgcttaaagggacaatatcttgttttcaacaaatgctctctgagactcacagccaagatgctttcttcctttttccttttcctttcttcttttggctttctcttctccttcaaaatacatattt

SEQ ID NO: 207910 - DNA, 396 bp, Homo sapiens
gtcattgcctaggcagaaacatgatttggtaagttgacgctttctaaaatacgatgttcttggaacagaaatgtgacttgggtgtttttgtcttgtttattataccagtgccttttgactactttgtgaaattccagtttataatcaggaaataacagttccttctgcgtttctatagtagtaggctaagccttacttgttctgtttgcatttctttaaatgtgtgggcttaggaaacaggagccgggagtccagtgtgttccgaatgtgggatttgtggggtttgagcactggccgcctgactttggacaagtcgcttaacctttctaaggttaactttctgatctgaaaaataagcccagtaatttatttaataagatttttcttatagtcaac

SEQ ID NO: 207911 - DNA, 385 bp, Homo sapiens
ttcaccttccaccgtgattgtgaggcctccacagccacatggaactgacctgttctgaatggtgctgaagccccatgtgacagagtccatgcccatcaggaggctgaccttcaggacaagagaggatgcattcttaaccacagctgtcaatggcagcctgattctttcacgctgaaaaccggatcactgcatcttatagcaatcgacattcccagcacatgaccattcagtcaacaacttttaactgagcatctactaggtaccaggcctctgtgctaggcgctggggggcacaacaggtagcatcctctttctcaacacagtctaatggccaaaaaagcactccgcaatatagaaggcagaagaggccggggacggtggctcac

SEQ ID NO: 207912 - DNA, 298 bp, Homo sapiens
ttacaggcgtgagccaccgcacctggccctaaaagtagccttcttttcccttttaaagagttagtgtccatagctactggatgccattttggttcaggtggaccgtgaataggtttcactcatcatgcccaaaggttgccactcctgacaagtcacagacaacgcttgcaccatcatcttcttccttcagagtctgtggtcccctggatgtcactaaggtcctgcttcctgtaccaataggttttaaacactacccaaggcaggctggctttaaatatcctacttaatctggctgaca

SEQ ID NO: 207913 - DNA, 670 bp, Homo sapiens
atctgacgtcaacccaatcaacagaaaagtaagatggaagagggaaattttgcctggaagcctggaatttaaactgaagtttccagagagctcttacttggtagactttttgaaaacatcttttcctatatcgtcagtaaagaagtaacttgtttaggcaaagcacgttatggctttttcttgcctagtttaggtctgtgcttaatgactactggaatagcagcaaacataacatcctgataacatttgggaggaaaagccatatttgaaaattggtgaaatgcaataatctttaaaccaggaatcatcagtttgctaataaaaggtatatggctccaagttacgtattttgtcagggtcctctggcattttcactagtcattttgctagtgtgtacaatgattcctatcttgctgtaaaacttggtgatttttttatattgttgaactaggtgacatgaatattgagtcagatcacataatcttagagtaacacataagtgattatgtagcgttgtgggtggaaacaattctggataaaaagtgcatgacagttcagaactactgtgcaggcagcctgtctgaaatcaggtttaaaaattggccctgtctccagctgactcgttttgtcagactgagtcataggattaacccttgacatgttcctttaa

SEQ ID NO: 207914 - DNA, 422 bp, Homo sapiens
aggacttttagaacacagaacactgtcatatggagatatgaagttatgtacaccgcattatgtggcagaattgaataaatttgaacagaaagttacagaaagttgtggaaggttcaaatagcatagaactaactaactaaaaggagtttgatgtggcatctcaattcacagacatttcaatagttacctcctgaggatacactgccccagccattataggacctgttgccattccctaatgtaccagagcatctcccttcttacactgcatctttgtaccaacgacaaaaaaacaaaagtaggcaaacgaataacattgataatgatggctaacatatacggagtatttaaggggcaagtgtaaaggtacagacatggaatcgaagttagaaatgagtgacttagcattatttcactgaaac

SEQ ID NO: 207915 - DNA, 260 bp, Homo sapiens
ccattggaagaaatcaaatgaaaagctgtgatttctaactacaatcaattcatagttcaaaagactgggcacgagcaaagacaatgcagtgccagacccactgtagtttccctacaaaactgccaccctcccttccccttccccttttctctggcttatcataatcctatacttttagagtgttaagaagaggatttacagatttagattagccaactgtgagaaaagcgaggatgcatatactcggaagctttttaaaa

SEQ ID NO: 207916 - DNA, 535 bp, Homo sapiens
agagttcattttttgcttttcattgttattattaggtatttattaagaacttcataatttgtgaaatgttctaagacttccctttcttaagctatttgccaccttagtcctttagagaatgagatggagaaattaacctaaaattgttctttggtccttatcccagcatggaagcagaaacatgaaacacagagggcagagcaaggtgtcatcaggtcaggggaaggtggtacacttgaccagcacctgagtcactggtccagtgcttgcctggctgaccagactttcctccctgacttaccacaccattcaggtttcttttcttttgacatgatgttcttctcctgttatgaatgacagcatagctacaaagacactacactttgtgttaaaaacaattaaagaaaactgattttgtggtttttatagcagttggcttggagatctatctataaaccattctattaattccaatttattctctcacactctaacagacaaacagtcagaaaataataaaagtggataaatcatt

SEQ ID NO: 207917 - DNA, 402 bp, Homo sapiens
tgtgtaaaatatgttgtgtgtgtgttttttttttccacagcaactgctttttgtgtgtgtggtaaaatatgtatgaaataaactgccattttaacctttttatgagtagaactcaatggcattaattacattcaaaatgctgtacagccattgccacaatttctaaactttttcatccccccaaatggaaactatgaacccagtaagcaataattcctcattcttccctccttcctactctcagttcctgaaacctctaatctactttctgtctctatgaatttgcctattcaaaatctttcatataaatggagtcagatcgtatttgtttttttgtgttggcatatttgactcagaatgttgtagcatgtgtcagagcttcactccttttcatggccgaat

SEQ ID NO: 207918 - DNA, 364 bp, Homo sapiens
acatataaaatacacatgaaacaatatgaaaatggcaaataagtcaggaggaaaatgggtaaaatatatgaataggcatttcatacgagagaaaatatgagatagccaagaaacatgaagaaatactcagcatcattaattgacaaggaagtgcgaactaagaccacaattagatgccattctatacccagcattaaaaagttggcattactacacgttggagaggctgtagatgtggtagttctgctactaccttttggtagtgaagttataaattgccaaacacactttagggaaagtaaaaattggcatcatcatgaaaagttaaatttaagattactccctaactcttaggcatgtactt

SEQ ID NO: 207919 - DNA, 268 bp, Homo sapiens
atagaagctgaattacttctctgaggatgtcttgtcactaaaacatggagaatccaacctaccctgcgtagttgtggaatccctcagatgacagcagtgaaggtacctggcagggtccttgcatacaggaggcataggataaattagcctttacttctttctcccctcttccctggtcccaaagccatccaagacctgcaagaacctccattacttatcaagtacgggaacatcactgaaagaacctaaataaattttctaaagtaga

SEQ ID NO: 207920 - DNA, 152 bp, Homo sapiens
gtaagtatatgccatcagctcaaggctagaaataagctgatcgaatctgataaaaacaccataaaaaaccattccttcattctaggttacagggtcctctcctttatcaaccattagcttattccttgtaattctgaaacataattcagata

SEQ ID NO: 207921 - DNA, 596 bp, Homo sapiens
ttctgtgagcgctgtgaacagagcttcgcagagcccactctgctggccctgcaccagtgcagtgagacccatatacagcctgtgcagggcctctctagccccccatgctctgtagagctgcctcccagcaacccaaccctccctggccctctgcagggccagagcccgccagttagccccctatcatgccctgtgtgtagacaggagtttgcccaaccccaggccctgaagagccacttcaagattcaccggggcactcctgacaccttctcctgcccagaatctggctgtgtgttctctgctgaagatcgcaagggtctgcagcaccacctgaggcagactcacagagcagttcctgtgccctgttctttccggggctgccccctgcttttcgggagccagcagggcatggagctgcaccggcaggcgcattaccctttccactgcagccactgcagcttcataggctccaacgtcaaactcttccggcagcatcagcggagccatggtgctgggacacagggagaactttctgccgttcagggccttccatcccaggagctgctgccaggtatgaggccaagggccaagcagtt

SEQ ID NO: 207922 - DNA, 445 bp, Homo sapiens
agagtttgcctgaaagcaatgttgcctgggctgttctgagaaacagcttctttctcaggacaccttgagggtggactgaattcaaggaagatgactttcttttcctggtagtactccaggaactggagcctttcaaaactacatgacatcatctttggcctggagaattttgaatttaagcgagaggctttgcctgttcagaaaactagggttagattcagaggatgtcttaaaaatgatgtcaaagccagaatttgatgtcaaagcctaatcctttcagcaaggaaagaggcttcttccagatgaagaacaatggccctgtctcactggtggcaggagaaagggttgctaactgacattcttagaaggcaccactgtgtatcaccctgtgccttgaggacaagatgtactcaagacccatttcccaactctaccttctctccag

SEQ ID NO: 207923 - DNA, 630 bp, Homo sapiens
tggtcgtactccagaatggctgaccccctgaaggtgtacccgccactgaaggggagcttcccggagaacctgagacaccttaagaacgaccaccgaggtcgttctggagattcagagtaggggggactgggggtgcaccttggactttggaacaagacagacctaggctccagtgccagcccacacctcacattacatctgtctgcttggacaggagatttaatcctagcctcaggatccctatctgtaaaatggggataacaaggcctacaatggcacagaatgaaagacgaccaaattagaccctatgtcctgaaagacttagcctggtgctgtgtccacaacagacacttaaacaatgttaacccagcaggtcctcaccactcactggctgtgtggctttagttaaactgtctaggtgtcaattgcctcaccttacaatggggataaagaacatcaccactttgtgaagattatgacaatggaagcaaaacagccagcaagataccctggacacatcaggagcccagtcaatgtcagcggtcagcatgctctcacttcccatccactgtctatttaatcaaagttaatcattcacagagcaagaaagaagtcctgttgttttttttc

SEQ ID NO: 207924 - DNA, 408 bp, Homo sapiens
tatttaacagtaataaaaacaaagaacagcaggcttacacaacattccagactaaatgacctcacagagacatatacacacttttcacccaacagcagcagaatacgtatttttctcaagcacatgggacccattctccagaacagatcatatgttaagtcataaaacaagtcttaaaatatttaagatcaaaatcatgtcatgtatcttttcaaaccacaatggaatgaacctaaaattaattacagcaagaaggccaggcgcataatcttgaaaaagaacaacaaaggcaaaaacatcacactccctgatttcaaattatactacaaagctatagtaaaacactatcatactggcataaaaacagacacaagccaatgaaacagaattgaggtatacggttaacta

SEQ ID NO: 207925 - DNA, 523 bp, Homo sapiens
acctgattctcactatggctttatttaaaatagaagaaataaacccttctaatatctgcatcttagtcttctgaattaaactcattgactaataaaagatttttactttggagggtttagcactgcatcaaaaaggaagcagatctctcctatttgttaaacgctaaggaatgaaagaaaataacaataaatctgacctctttttgtcatatggcacattaaatatctttgaaaaaaaccccaaaacaataataacaaaagcttgccgctctaaaacgtttaaaatatcggacacaataataaatttttaaaaatgcaaggctaagcaggttttaaaaagtatagggactctccaagaggaaaacaaaaccaggagcagaatccaaggatatagggaagcactgaagccagcagctcccttactgacagtgccaatcgtggaatgccaacagctttagttttaactgtatgcaaggggctggttacaaagctgggggttaagggagaaagatttagataggag

SEQ ID NO: 207926 - DNA, 546 bp, Homo sapiens
atcttgacaggaaattcaagacccttaatgccttatattacttccttatcatagtgagtagagcatgagagaatgtattgtgtgcattgagaagggtatgaatttttctgtttgattaatattcttgttattgcctgagtatgttcattgtgaattctcaaagtgtacccttggaagaaagagtatgctttcttttctcagaagaaaatagcatatcccattattttttgtgaatggacttgtttgccgttgcattgcattcattgagttttatggtggttgtttaagcatagagcctgtctttgaaatgaaaaatttattgaaatccatttcttttcttttcttttttgtttttagacagagtctcgttctgtcacccaggcttgagtgtagtggtgcgatctcggctcactgcaatctccgcctcccagaatcaagcgagtctcatgcctcagctacttgggagattgaggcagagaattgcttgaacccgggaggcggaggttgcagtgagccgagatggcgccactgcactccagcctgggc

SEQ ID NO: 207927 - DNA, 507 bp, Homo sapiens
tgactcaccctcactgtggctctggagctccaaccctgggacagcctagtgcttctgacaccctggctgctgagactgtagggagatggggtggacagaatcatggcccccaaagatgtccatgtcctaaaccctggattcagcgaatatgttaccttacatgacaaaaggggctttactgatgcgcttaaggattttaagatacggaaattgtccaggtgggctcaatgtaatcacaggggtctttataaaagcaaaagggaggcaggaaggtcagagagaggtttgaagatgctacgttattgactttgaagatggaggaaggagccatgagccaaggaatgtaggtggtgtctaggagctggaaaagtcaaggtaatgagttgtctcttagagtctcctgaatggacgaaaccctgtcaacaaccttgattttaaccaaatgagacccattttggacttctgacctccagaactgtgagagaataaatgtgctttgttttaagc

SEQ ID NO: 207928 - DNA, 295 bp, Homo sapiens
taccgagtcttccctctctccaattcctcagcatgttttccatgtgccggatccatcggatgatctgaccctcctgttcctcaccaccgtcctctatccctggagcactttgcctctgctccaggttgtagcagtgacatgccctacatggtgtcactgtgggactttctttctcacatctgtctgtgggatggatgactagcattaagcatattaagcatactgtctcgactatagaacaagggttggcatttgagctgggccagggcaacctctttgataaacaaccacacaa

SEQ ID NO: 207929 - DNA, 266 bp, Homo sapiens
atggaggcaagtatacaacacgttgcagtgtttgtagactcaatcctaactatatgaataatcacatcaaatgtaaatagtctgaatatcctaattaaaaaacagagattgggctgggcttagtggctcacgcctgtaatcccagcactttgggaggcagagatgatatttttattttttctttttttcaggctctaactccaatgggatgataattttgtaaaggacccaaatcatacttctaaagatgagcacatatatatcac

SEQ ID NO: 207930 - DNA, 234 bp, Homo sapiens
tgtttacaagcatcactggtgtgttacttaaggagcagcaagacaacccatgggtttattttatattttaaccccacccttatagttgctatttctactaatttaaagataaacttttgtgcacagtcaaaataatcacaaacgcatgttgcaatctgtatctacctttcaggtatttcttcctaaatactgaaagttataactaaaagtataaaaaattaaaaaacagagata

SEQ ID NO: 207931 - DNA, 120 bp, Homo sapiens
ctaatatgtaatcctgggatgaagaaatgaataaattaaaaatattaatcaaactgaaatgtcctatagaagagcttcaggaaccatcctgcccactgacaatgacttcatatgatgttt

SEQ ID NO: 207932 - DNA, 350 bp, Homo sapiens
aaggaaagaaggaaagaaggaaaagggctccatgcagcatttacctagcttgcctttccatcttttgccctgtgaggacacagcaggaaggccctcaccagaccaaatgccagttacttgagcttagacttcccagcctccagagctgtgagaaatacatttctgttctttataagttacccactctggggtattctgttatagcagcataaatggactaagacaatgggcaaaggatataagcaggtaattttcaaaaaagaaaacataagtgaccaacaaacttaatgaatgtatgttcaacctcataaataatcaggacatataaataaaaataaagagactatttc

SEQ ID NO: 207933 - DNA, 408 bp, Homo sapiens
aaccaggtgctgaataaatttgtcttagtttttatagtttttgtgtgtactgtacgtgttaggatattcttctctttctcataacactagcagtttctttgacaagaaaggagagcagcctcttaacaagaacagtgaaaatggaagtatttaagttttacaggttttccagctgtctttaattctccttgataagagtaacaacagacattatatttaatggaaaaacagaggcgttcctcctgaaatttagactacttatttattactttaggattttggtggttgggaaatgggatgagaaaacagttcactttgtgtattttttcatttttgaaccatgtgaatgtattacctattttaaatgctaagtgtaatggccctaaagtttcataatgactctggaaa

SEQ ID NO: 207934 - DNA, 253 bp, Homo sapiens
aggatgtaaaatggaacgaacagataaggcttttttcttaaaaccacaacccaagggcacataaagtatttttaagatagctgggaaatgtcattcttcactgtgaagacctagtccaacatatcaatatccacaacagcagaaccagagcagtggcaagaactgagtattggtgaaaaccaggtttaaaggggaagaacagaggaaggcttgttagtgctggtcctataggtagcaaatgttcgttccattt

SEQ ID NO: 207935 - DNA, 256 bp, Homo sapiens
gaggttgtatccaatttgtggaggaactttaatgccagcctatgacataatgacttcttgtgatccagagatttggtgtaacttgatatagttttgaaggaaagaaagttgctgagtgaaaataaaacacttgcaagggctgcaaaagacgcaatcaaaacagaaactatgtttcatttcagtcaaggcaaggaagtaaattcagtgttctagaaaagagtagaatattttcttgacaagagaacaataattccag

SEQ ID NO: 207936 - DNA, 621 bp, Homo sapiens
ttttttggtagttctcttttttagtttgtagaaacacgaaaccatgaaagaaaaaaatgtttcctttagttcagttctgccacaaatatggagaaaaccttttatcttaaagagcaagattgttctgtaaggttattttgattcctttgtttaatcctccacttaccatattttatgcactattaaatattgacatcaggattcctcctgattgcttttcctcttttttttctttccttctttccgtctttttctttgttcctttcttatttattaaagaaaaatagcaacagtgtagttctgcttactgatattctgatattatacaaagtaatttatttcccttctacagaatttatgtatgaggacctaaggctgttcagatatctaaagaaaggtttgaagccttcttctagctggtaattcccttctttattgtctggccctgaactagaaaagctatgatgggagggatgtggtcccttagtaaacagcaatgagctctggcccatgtgcaatttccctttctatctaaattcaaagaacagaagatctttgccttaaaccttgcaatgccaaggtctgctcctttgtgactatggtaaatttatcccactctta

SEQ ID NO: 207937 - DNA, 284 bp, Homo sapiens
tggctcaggctgaactatgcttactcaacatctccacttgaatgtctaatcatcctttcagaagcaacatgtccaagaccgagctcctgacatttcctcccaaacctgctcttcccacagataccccacaccaataaatggaaactccattcttccaagggttcaggccaaaagccttggctcattcttaattcctttttctctctcaccaaagccaattcaacagcaaatccacctacaaaatatatctgataccctatcacttttaccctctacctccctga

SEQ ID NO: 207938 - DNA, 835 bp, Homo sapiens
aaaaaccatatatatatatatatacacacacacacacacacacacacacacactccatatattcaaggtagaggaggaaagcatgagtgtgatgacgagcacaatgaaaaatataagaatgacccaaattgaacttctagagatgaaaaatgcagttataaataaaaacacactggattgcattaatagcaggttagacactgtggaagaaaatattagtgaatttgaagatacatagcaatagaaacaagaatgatgtcgtttaagttcattcctgttcctctttattttgattctctctgttaagtcttcatagaaaaaatcatctacttttctgaaatgcatgttgtcaaagaatcttggaatgtcaaccagtgatttttatagaggctctaattccctgcactgttagtaacttttgctgatttttatggacattggagtgagaaggacactcacgaggggttgctggcactgaaacaatattcgtaacacttgggtttagggtttcattgttagggaatggacctagttatatggccctgtgtcttgtcatttcttaaaatttccatgaggataaatatatgaagattttggtatttgtaaagcgttgtgcagaaagactttattttaatgattatcattatgttgttagatgttctgaaatgttagtttttctcttagcagataaagttaattccaatacctttgaaaatagactcaatctacatacctcactgccctaatgctatttttagtgttgtgtggaatatatattttaattagatttaattgaaattctgtttccagaattttaaatttcttaagttgagag

SEQ ID NO: 207939 - DNA, 152 bp, Homo sapiens
ctgtgaaagccaccctaggtacaatggtgggatagccataggacaactactacagacattctggttcaaaaagaggggaaatgggagacataaaggagttactggtctataactaacaactctgaaatccagctgggaaaatggaagtttct

SEQ ID NO: 207940 - DNA, 551 bp, Homo sapiens
ctcatttcagttcagaaaaaagaattaccagagacacttatgacagatggagcacgtcttcaggaactaacagaaaagctgaatcaattgaaaattattgcctgcctgtccctaattaccaacaacatggtgggtgctattacaggaggcctgcctgagcttgcaagcaggttaacaaggatttcagctgttctacttgaaggcatgaacaaagagacctttaacttgaaggaagtcctgaattctattggtattcagacttgtgttgaggttaacaagaccctgatggaaagaggtttacccactttaaatgctgagattcaagctaatcttataggtcaattttcaagcattgaagaggaggacaatcctatctggtccttgattgataaacgaattaagctttacatgagaaggctactttgtcttccaagccctcaaaaatgcatgcctcctatgccaggaggcctagctgtcattcagcaggagctagaagccctaggctctcaatatgcaaacattgtgaatctcaacaaacaagtgtatggacc

SEQ ID NO: 207941 - DNA, 793 bp, Homo sapiens
tctcctccgggaccatgaggagctgggcattcaactgctgtcgaagtgaccttgcccatagctcaggctccaactgccagttccaggatgccagatgccgggcctcacctgcatgggccagcccagcagaggggccagagaagggacctcaggctctgggcaggggatggtcagagtcaatggggttaggaggaagaaaggacctgggacagggaaatagatggagctacagagcagagccagaccagcagagagcctttcctgagaccctcaggccctccctactgcttccccaaagactctggtaaggagcaggcctaagacagacgtgagagccctccttgcagaagagttccttcttacctcccagtaccctgtccccctcacctggcctaggggggttaggaggcaaggcaagggaagagagcccgatctgctgatgaggtttcattgaagagtgcctgctggagcagtgaatgaacttagacttgagttccagtctgaggctcaccctaatcatagccacccatacacggagagactcgcacacagacgtgcaatcacctgaagaggcaaactgacacaccgacagagctcactctgaacctcggtcacagcaaggaatctgcactcgagctggcgatcgcctgaaaaacgggttaacaggtcgtcactcaaaggcagcagagccccagtcccatgacgtcttcgcccacagcctaaggaggtcgtgaagacagaaagccgaggagcaggcacagcaaatgatggtcaggatgcaggtaggggaaga

SEQ ID NO: 207942 - DNA, 347 bp, Homo sapiens
tggacacatttctgttactaaccttcctgggtagttgttttgttaagtttagttgtttagttgaatcctttccctgttggtactaaattgataagttgcttgcatatagtgtagtctatgaataattctctttgatttttatttgttgagtttgttcccacttccaaaggggcttgaggtagattgggttctgaaacaaagtgcagaatagagcaattatgtaaacatagatttcctggaggtcctgaggaggcaggtgctccaggcacctggtgatctgatttccactcttgggcattgcactctggtctgatttctgtaggtggagataaaatgggaaacattta

SEQ ID NO: 207943 - DNA, 304 bp, Homo sapiens
aaattgtgtatatgtgtgtgtatgtatgtatgtatgtatgtatgtatgtatgtatgtatgtatatgtatttctaacaccagtgcagcataactaatttaatgccagtgctgtgaactatatactgaatagctctgtgtgggctttgtagtctacagggatatcacattattagcaatcatatctgcttaggcaaagctggcttctacagatggctgctttcaagtgcaaatgaactggttagacgtgtcttgtttaatacatactcaagattcacaaatgggtattgattttttttttcaacca

SEQ ID NO: 207944 - DNA, 493 bp, Homo sapiens
atattcatatatctccaaaaaactgccaacccagaattctatagccagaagaaatccttaaaaaataaaggcatttcagtaaaagaaactatgaaaattcatcaccagcagacgttcactccaagaaatgctaagttaagttcctcaaactgtagggaaatgataccagagaaaaattcagatctctggaaagaaataaacagcatgggaaatagtaaatatatgggtaaatataaaagatgaggattttcatcttaatttctttaagcaactgggtgtagcactgtgtgcctatagtcccagctactccagaggttgaggcaggaggattgcctgagctcaggagttcaaggctgtagtgtgctatataacatctgtgaatagccactgaattccagcctgggcaacatagcaataccccatctctaaaaatagaatacagaagactgttcaaatttccaacatgactttccatggattacttatttaattg

SEQ ID NO: 207945 - DNA, 615 bp, Homo sapiens
atttaaattaacatgcacttataaagcccctgaatttaaaatactcatgagttagattagatttggaaattaatgttgccagcaggcagttttagttttctgttgaaaattgattccttccttcctcccttcctccctccttccctcctttcgacggtctccctccattgctgagcctggactctactgccgtgatcttggctcgctgcaacctccctgcctcgggctcccgtgattgtcctgcctcggcccgcccagtgcctgggattgcagggacgcgccgccatgcctgactggtttttgtatttttggtggagatggggtttcgccgtgttggccaggctggtctccagctcctgacctcgagtgatctgcccgcctcggcctcccgaggtgctgggattgcagagggagtctcgctcactcaatgctcaatgttgcccaggctggagtgcagtggcatgatctcggctcgctacaacctccacctcccagctgcctgccttggcctcccaaagtgctaaaattacagcttctgcccagccgccaccctgtctaggaagtgaggagcgtctctgcctggccacccatcgtctgggatgtaaggagcgcctc

SEQ ID NO: 207946 - DNA, 464 bp, Homo sapiens
catgcattgaaagaaaacattttgtttctaaattagtctaccattgagtgagaataatcaatatcaagaaagaagactatctttctcaactaaacaataatattccaatcagcttgggaagacctgaaacttgaataagcagtggaaatgccaaatataacagagggtatgtgctacagagaagtaaaaagggtttgactttttatgatgggattttttttttctgggtatgtaatctattttttttttaaactggaaagcatttttgtcagtgtgaatgagggtcaatagtgcagccagtggtgacatttttctttattttgcaaaatgcttttaaaaccaaaggctgctctagttgatggacagtatcagtcttgatctaaattgtaggacactttttcatgtaacataacatttggggattgggtttatttagtgtaatgaagataatttgatataaaaat

SEQ ID NO: 207947 - DNA, 82 bp, Homo sapiens
ggggcatgaaaacaaagcttaggagccaatacatggagtgggaaatctgtgccctgatacagaaacagcactcacagcacta

SEQ ID NO: 207948 - DNA, 402 bp, Homo sapiens
tcagtagttttcagaatgtctttgtgtgtctcataagttttttctctcaccgttgaacaataaatggttcattatttggccagttcaaaatcatcttttcagaaataatagagacctttgcttctgtttttagtacacagtgttacagaggggaggattttggtcttactctgtagatactgtttcattcctcggaaacagaatttttctctattcttgcggtaaaggaagttaaaactgtccctaagactgtgtttagatacctgagtgtatggtatctttgtttctttttggccttttgcccttttggtctaaggattcagtctccttagagcagacaaaaatctacttaatttaaggaaacttttctcctttttctctgttcttgctctgttaaagttc

SEQ ID NO: 207949 - DNA, 615 bp, Homo sapiens
accacaacctcctatcagcagcgggatcccaccaacctggcctgctctgtgttcttccacatacacgtcttgaaggcattttgtgactttggctatctgttatggtggcactagtgtccactagaaagtaatttgcatgtggcctgcaggacttgaggaaaactcagaatatgctaacccaatcttaggtctctgcttttactgttttttgttctagccatttgtctgctggtaatttctactctaacaggctgctgacttcttgaaagcaaggcctgggtcattctaacaggtataaggtgatatctcattgtggttttgatttgcatttcactgatgtttagtaatgtggagcattttttatatacctgttggccccttgtatatcttctttacagagtgtctattcaggtattttgcccatttttaatagggttatttgttttcttgcttttaagttgagttccttacatattttggacattaacccatgtagtttgtatagtttgccagtatcctttcccattttataggttgtttgttcactctgctgattgtttcctttgctgtgaagaagctttttggtttaatatagtcccttttgtccaattttgc

SEQ ID NO: 207950 - DNA, 383 bp, Homo sapiens
gagcctctctacattaacacatgctttctctctgtgtttgatctcctaaaagttaaactcttagtgtcgattaccaccaccccaggtaactcccaaaggaacacctttgggcaaaatttcccacttaaatctctactttttgtccacatatatgtatcagtgaacaaatcaaaatacatttatcatcttattgtatgtctggaattacgacagccatggagatttacagccaagactgttcccctatacatgatggcttaccatctagggaaggagacagcagcacttccaagaactcaaaactgaagtcactatttttccctcaatgaactgctttcccctttcagtcagaagtcatcagcaaccagttgcttcaaccttat

SEQ ID NO: 207951 - DNA, 213 bp, Homo sapiens
acccaaggctgtgtgtccaaaggcaactgtactgaataccggaaagcatgtatttgtttgctaaattgctctctttccaccagtgatatcaattctgaaatacttttgagatcttgacaataatcaaaaggtagccaggtgcatcggggaaagcactgacattggagtcagacagactgaagttcatatctgattctgctatatgacaacgtg

SEQ ID NO: 207952 - DNA, 715 bp, Homo sapiens
ctattagaataatgcattaatagatcacatctatttaattgaaatgtgacctcacatgactgccttgactgtatttgagatgaccgacttgaaatacccttagaatttagttcttccctttttccatttaaatgacaagcaaaaatggctgggcacagtggctcagcctgtaatcccagcatctggggagaccgaggtgggcagatcacctgaggtcaggagtttgagaccagcctgaccaacatggtgaaacctgtctctagtaaaaatacaaaaaaattagccaggcgtggtggcgcatgcctgtaatcccagctacttgggaggctaagacaggagaattgcttgaacctaggatttggaggttgcagtgagctgagatcatgctactgcactccagcctgggcaacagagcaagactgcatctcaaaaaaaaaaaacaaaaaatgtgtgagattgatcaggttaaacaccactagctttaagagaaaggcagttcattaacattcatacaacacagatttaagcacctatcagttacaggatataaattctccaaacaaggaaaaggttgctcccctgaagaagctcaccgtccaggacccctgaagaagctcaccgtctaggaggggatgtggagaagtaaacacattatcataattaccgtggaaggggctgtggttgaagtaaactcttggcactattagggaagctc

SEQ ID NO: 207953 - DNA, 341 bp, Homo sapiens
cactaactaccttccagaataaacaatggttcccatgttaggatcatgcataagagctacttggagcctcttagatgcagagcccatagggaatttcttctcatttcctgcttcactaaaaacattactgtgattttcaaatgagtcccagctgtaactgtaccacacagagcatcacagagtttcaccaggggctgctgctattcattcatggctcttactatgtgccaggcaaaaggtactaagctctggggcacagtggggaacaaaacagaccaaagtccctcctctttcagaacttacattgtaagtgggagagacacatgatcagctcatacaac

SEQ ID NO: 207954 - DNA, 472 bp, Homo sapiens
cggggcgagtggatcacctgaggtcaggagttcgagaccagcctggccaacatgatgaaaccccgtatctaccaaaaatacaaaaattggctggacatggtggcgggcacctgtaatcccaactactagggaggctgaggtaggagaatcacttgaacccgggaggcggaggttgcagtgagccaagatcgtgccactgcactccaccctgggcaacaagagcaaaactccgtctcaaaaaaaaaaagaaaaaaaatttaaaagaaattcttgagtatttcttttgccctgtgtttgccatgaaccaagaaagtttgggaacctctgtcatgtgacctttgaccagtcatttcactctgggtccaacttcccacgtctacaaatgatatgggtagaaaagaggatctctctggggtccttttctactgtgtgtgcatttatgtaaaatgtcagactcagctttgcacccact

SEQ ID NO: 207955 - DNA, 138 bp, Homo sapiens
aatcactaatatctctgcccagcaaatgatatcattaccctcagagttcaagaagactaagaaaataaaatcccttaagtagattacattcgcttcctattctgaattggttttacttgaattaatctaaattaataa

SEQ ID NO: 207956 - DNA, 146 bp, Homo sapiens
ttcctgaaccagcctcctgtctgctctccctacccccagtctttgctcactgtggccagagcagccagaataatcttgtataaatgtaaatgtaagtcatatcttactagttctctttataaaatgttccaggggcgggccgggcg

SEQ ID NO: 207957 - DNA, 429 bp, Homo sapiens
ggcttaggggcctttttcggattactttggtttcttctgttttttttattaatactttttagatataatgtaccatatatgttttaaaaatttcaaagagtaccaaaaatatatatagcgaaaagtaaagtcatctattcccactttcccttagtggcacagtttgcttctcaagatgccatggtggttattaccagtctcttgtatatcctcctggggaaattctctgcatatcaagcaaatttgaggatgtgtaattcctcttaccaattttgtgaagttttttgtttttctgttttgcttggtttgatacatgagtggttgctttgttatgcaggatgttctgtgccttgctttggtttctttgatgtgttttgggctccttaattagcaccatattgggctaccttgttctttttgatgactgcc

SEQ ID NO: 207958 - DNA, 736 bp, Homo sapiens
gggaagccccagggctcccagcccgccctcctgagactcggttgttggcaccgggggaggcccaccttatcgtctagcagacgcggggctgggcacgtgggcggtaggccctctggctctgatgcatgggaagctctagccccaacatctacccctccctcccaaggaggacttttgctccaggacgtggctcatgaccaacccaactcctatggctgattttgggcctgactggcttcctcctgggcttgcactgagtcccaagaaaggacccggagtggcaggaagccagtgggcctcagaccagactcctccaagtggaccccactcagcctcaaacccctcagggtctccctcatggagctggcagggtgacaaagaatggcttttggttttaagctatgctaacagtttgatgcaaaaaacatacgttttaaacatactggttttaaaaaaacacctccacccccacacggatgcaagggctggccccgggaacggaaccgatggccgaagcgtgtgcacaatcgccctgtggtcatgtgctcagcaccctgctctgctgggaagaactcagagcagacaggatgccctccctgccccgtggagcagccttcaggtcagggccgagggtggcttggggtgagccctctggccccacacgagctgcagagaccagggtcaagtatctcccagcacaaagcagctgtggcatggagagttaacccaagtcata

SEQ ID NO: 207959 - DNA, 274 bp, Homo sapiens
tcccacagcttattagagacagagctgagatttaagcaaggttagcgggtaacacaagcgaatgaggcagcccactgtgagacgatgggagtggtggggactgggcacactcctgagcccttgtcctgtgcccagggagctcccacactactcaggcccagctgatgatgccacgccagaatgcagaccccactgccaaattttctggcttgacaagataagcttatatttttatgtgagatctcctgatttttatgtaaaaacctccttttta

SEQ ID NO: 207960 - DNA, 279 bp, Homo sapiens
tccagtgtagaaaacattatatttgacccttggacaacaaagagattatattgaaggaattttattgattgtatcatgaataaaagctgaagtcaaaattaaaatgtaaaaaaataattcagaggatggaatatgcaaatgtaaactccaaacgatgtggctggaattcataaacatttactttatgcaagatactgtgctattccaggcactcctatggcatttaaagtacaattcttaccttccctaatttttcaacctagtagaggacaataggct

SEQ ID NO: 207961 - DNA, 115 bp, Homo sapiens
cagaaaatagaaatagaaaacaaaatgtggtagttgaagggagtagtaatggacaaaatgaatactaaagttgcaaccaagatctagaaaagctgaataaatgctatattaaagt

SEQ ID NO: 207962 - DNA, 428 bp, Homo sapiens
actatcctttattattattattgttaaagaatttctaggtctccttttaataaattggggcagccttatttttcccccagcaagtgaatctgttcttttgggttgaggtcgtacgtcctgaggggaacacaggtgttcccactccctaaagaggctacaacccaggccgggcgcggtggctcacacctgtaatcccagcactttaggaggccgaggcaggcagatcacgaggtcaggagatcaagaccatcctggctaacacggtaaaaccctgtatctactaaaaatacaaaaaattagccggacgtggtggtgggcacctgtagtcccagctactcgggaggctgaggcagggaatggcgtgaacccaggaggcggagcttgcagtgactgccctccagcctgggtgagagagcgagactccgttt

SEQ ID NO: 207963 - DNA, 457 bp, Homo sapiens
catttaccatactttattgatattatctgcttttatttttctcataatcagattatagactcttcaaggactacactgtatcttcatcttttaccccacatcctatcaaaattgtcctttagaggagaaaaaaacaaaatattaaaatgtgctgattgaaggctgggtgtcatggctcatgcctataattgcagcactttaggaggctgaatcaggaggagcacttgagcccaggagttcaagactagcctgggcaacataatgaaacccccatctgtacaaaaaaataaaaaattaaccaggagtgatggcacatacttgtagtcccagctactcgggaggctgaggtgggagaattacttaaggattacttaagcctgggagatcaaggctgcagtgagccatgattgcaccactgcactccaccctgagtgacagagcaagaccctgtctcaaa

SEQ ID NO: 207964 - DNA, 344 bp, Homo sapiens
ggagaaataaaaatattactggattaggaggaagaagactggaaattttagttctcactctgacactaaggcagtctgaattcagacaacttacttcccctttccaaggttcagttaacagggaagcggggaaaggcagatatgaaaaagttggaccagatggtaagacccctttcagctcccacataggactcgtaaatccagaatcctggccaggcaccacagacgtaccagactccaaagaactaatgtgaacatcaagagactcctcaagacctggcccagaaactcccttgcctgatttttagacactccctccaaccggatcacattgaaaaactgga

SEQ ID NO: 207965 - DNA, 656 bp, Homo sapiens
ccttttggtgcctccctccctcctttccaaaaggcccaaagaggcacaaagtcatgactgagaagagcggctgggcagggcacccgcctgggatgggctagggaccagcagcaggaggaggggctggggggccagccctgctcactttgagccttcacaggctggggagtgggcctggctcactctggactaggaagagtggcccccaccctagtcactaggtctgcccaacagctgaacaaaacctggcgctcccccaggcaaggggcacttggagaattggttcctggggacacaggcgaaccgcccaacaagtggaagttgtgcctgctgggtggccagcggatggctacagtggcaaacgacagggcccctggaggagagcaggaggcccttcctgtcctgtctggtgacagcaggaggcccacgaggcgacccagcatctgatgtgacattggaagaggacatttccttaggccccccaggaatggaagctgcagaagagggttgtggctgacttggacttggggtcaggtggtgcttccgggcccacctgtcgcctgcctgtttctgagctccaggcctgcacccttccctcctccgaggcttgggcagagctgggcactggggaccacatacatctagtgacccccccc

SEQ ID NO: 207966 - DNA, 289 bp, Homo sapiens
gtagccaccccccccttttcactttgggctcctgaaaagaggttcccctgttgtgccacatgtgtactcattgtttgctgcattgtgggggcagtccaggggccttgaagaggggccaaggtgccaaaggggcactctcaggcctcaaggaagtacatgtttactgatatgatactgtctcttcctccaggaaggaagccttccctgatctccccactgcatgcccactatgataccagtttaggtcccctctttatggccatctgtggcatcagtgtgaatcctctta

SEQ ID NO: 207967 - DNA, 534 bp, Homo sapiens
ccaaggactgtgacagcccttcctgacttccagatctacctttttaggcaccctttcagtttcttctctctgttctccaccctactctgcaaagaatattgctgagcttgtttggtgggaaggaagaacaaagaaaacaaaagaacttgagaatcagattattttccaagctctgacaactataaattatcttcacccatttaggtgccactgtggctgctttttaaaataaatgattactcacctttgaattgtggtcagagatattataagttttacatgcttgcgctcacttaggaagtctatcaaaaagaaagggaggcaccaccattaaagtcttcccagcaagctttaagagattcacaccggctgggcgtggtggctcacgcctgtaatcccagcactttgggaggccaaggtgggtgaatcacgaggtcaggagttcaagatcagcctggccaacatagtgaaaccctgtctctactaaaaataataataataaaaaaattagctgggcatggtggcgggtgcctg

SEQ ID NO: 207968 - DNA, 568 bp, Homo sapiens
caaagctgaggcaaggcaagcctcttaggaaggtgcaaagggcatgaggctggggttgcagaactgcctgggaatactactgtattgaagcctgtggaaagctgtccctactcttgtcatgcaaggtctggccttgaaccatctcaaatccaaaagtggcttctggggggctctatagagaattaatcctaacaggaaccctgcaaagcaggcatggttgtcactgctatattacagatgggaagctctaaacacaggctgctctgcccaaggccatcctggttagaaagtttcagggcccaaactccagcctcggtctcggtatctcaaagtctccgcctgtgaccagcactctgcctgctttccagggtgccatgggcacccagaggacggacccttttccatttttaaaagaatggaacaaacgctcttaataccaagcttccccaggccttggctgggataaaacaaccccatttattcctgaatcggagcttttgcttgagtttgggcgactttcaagagggaaagtgaactgaggccaggggaactcagcttgctgccttcc

SEQ ID NO: 207969 - DNA, 568 bp, Homo sapiens
tgactggtgacgaaacaagttgtgagcggcaaaactgagacctattttggacatgttaagtatgagatgaccattagacttcaagtcaagatgtcgggtgggcaatcataattataagtctgccatttgggggcaagttggggctgaaggtataaatctaatatttaaaactatggaactaaaagatatctcctaggtgttggggcagagagaaaagagaatagggctgaaaacagccctaaggcgtgccaacattaagaggtagggaagtctattcacctcactagagagaccagtgaggcatcccagaagccaagtgaaagtattttcagtaggagacagtgatcccctaagttaaagctgctgatgagtaagttaaggattgagaagtaaccattggatttggtgactttgataaaggtagcttcagtggagtgatgaaaacaaaaaaattggtgtacagtgatccctcctactccacagtttcattttctggggtttcagttatctgcagtcaaccagagtccgaaaaatattaaatgaaaaattcaagaaataatccgtaagt

SEQ ID NO: 207970 - DNA, 646 bp, Homo sapiens
caaaaaaaaaaaaaaaaagtttaccaaaaaatgcatagaattaattagtgatgatatcaagtttgcatgatacaatataaatagataaaagttgttttcctatatgccaccaacaataaagagttagactttagtaattaaaaacacactaccatctacaacagcatcaaaaaatctttaaaaagttaaactcatagagagtggaatgatggctaccagagtctgggaggtgaggagggagggaatggggagttgttaatcaaagggtacaaagtttcggctagacaggaggaataagttttgagatctactgcacagcagaatgactattgtcaataataatgtatatcttataacttaggaagtagacttcgaatgtcttaccttaaaagtgataggtaagtgaggtgatgaatatgttaattagcttgatttaatcattccacattgtatcgtataaatgtatacaattataatttgtcaattaaaaataaaataaataaataaaaatgaaaagatcagaagaattttttaaatagcaccaaaaaagtggaatacttaggtataagtcaaataaaatatgtacaggtcccgtatgtggaactaaaaatcaaacacctaagtaaatggacagatagtccatatt

SEQ ID NO: 207971 - DNA, 534 bp, Homo sapiens
tccaatcattaatcaaagatcccctgaaaataattctaatttaaatacaaattactagatgtataaataaaataacaagtcacataatataaatttaagtacttaaaggaaaataggcctttgcattactaattttgatgaattgaatattaattaaaaagatgaaaatacctaagacattaaaatacactgacattgtacagagtaaaatccatagctctttttatggcatacaaggttcttatgatcaatcttgccctgtaaagctttatttctcatatttccttttcttacattatcttctcacatattaacagtaaactcacatgctgtctgaactctctctggtttcttgttccttcatgctcagcccacgcttcccttctttggaataatcctcccttctcagcatcccctgcttgtggtcctcccattctttttttttttctttttttttcttttttttaagacagagtctcactctgttgcccaggctggagtgcagtggtgcaaacgtggctcgctgcaacttct

SEQ ID NO: 207972 - DNA, 411 bp, Homo sapiens
accttggagacgagccaattgattaagaggttatgtgctttgcccatggccaaacatataggaaagtgcaatgagttgattccagagtatgagttcttaaactaagacatatattattttcctagctacaattaaatgtgtctgctaataactacctgggaaaatttagcatcaaattttctaacactaatatctccaaacatttaaaatgataaaagaaaataaccatccaataagggaactctgttacatggtagcatactttataattttctgatggccttatcatgaagcacttatactccagaatgattcttgcactggcataacagatggtcctctaaaattttcagaccaaattatcttgttcaaaactgaacttgctcatttaagatgattcaagtcttgtgt

SEQ ID NO: 207973 - DNA, 139 bp, Homo sapiens
agctacctaccttaggtgatgctgagtgcttcccacagcatcgcttccatcaaaactgatcagtggtttcaggtgttgtcaacctgctctgtccttcaaaagttttcctcaaaatttcacctacggctttagcatcgct

SEQ ID NO: 207974 - DNA, 515 bp, Homo sapiens
tgagaggcacacactgcaatgcaaatcctccacgatagtccacaggatgtactgggagaaactggaaggccacaggagaaacgtttgctcacgaaaacacaggcatttcatgtgcctggagcacgggatgaagaattccttagactttgagtgccaagctagtgcttggactttcttctaaaggtcatgggtgagcccttggggaatgtggagaccactccggcctgcgatggagaaggaaattgtgccagaagctgggaagtcaaagttaaccctccaggctagatctagggaaagacttgtcagctgtttcttcacttccatgaccttggaaaatccgctgtctccaccagacactgatccttggcacagccactatttgatacacttaactctgctcaggattttagatctcaacccaggaaatgagctacagtctcaccccagtgcttgaaataggtgtgcaaacaattcacatattataaatacgttgacttgggccgggtgtggtggct

SEQ ID NO: 207975 - DNA, 615 bp, Homo sapiens
tttttgcttctgttgcctgaattttttatgtgtgttaagaaataattgccaaagccaagatcaaaaagtttttctcccgacttatttctagaagttctttagtttcaggtcacatttaaacctttaatccattttgagctgatttttgtatatggtgttaaaaaaggggggccaatttcattcctttgtatgtggatatccagttttcccagcaccatttgtggaatagactatctttttcctattgtgtcttactggtgtccttgttgaaggtcagttgataaatgtgtgggtttatttctgggctccctattctgatccattggtctatgcatgtggttgtatactaatatcatactgttaagatactataactttgtaatataatttgaaatcaggaaatgtaattcctccaactttattttcctttctcaagactgcttttgctactcatggtcttttgtggtttcatacaaattctagaatgggtttttctatttttgtgaaaaatgtctgaaattttcatagaaattgcattcaatctgtagattactttttgtagtatggacattttaataatattaatgttttccaatccatgaacatagagtatct

SEQ ID NO: 207976 - DNA, 403 bp, Homo sapiens
gtctaaaaaggaaggaggaagggaataagagtaaaatgtgtttatgtttgcttgcatatgcataaaaaactctggaaggaacagaaataatttataataatggatatatataagcggggtagtatggtaaccagacaagtaggaacaggggtgggtgggaaatttttactgttaaacccttactaattatattcttttatttctggaccatacgaatctataatcttttcagaatttgaatttaaaaacacatattttttcttcagagtaaaaatttttactgacatagctcaaccaaaattggggtattttactgactatgaagatgcatggtttctccagtttgtgcccatttcacaaaggatattccaataacgctgctcaaggctgacatccaacagga

SEQ ID NO: 207977 - DNA, 415 bp, Homo sapiens
ctctcaactcatatttggtccattactataaattcatagtgggcttctctgcctctacttttccttctccagactatcttgcacatcaccattaaattaaacacagctttcattataatgtagcacaataaagaacttttcaatggtttcctattgtatagaggagaaaaactttatctctactttttacaggatatctctattaaactgtgatcctcatattcttttgaacatacttttacttttctaagagtatgcctttgcttttagcagtttaaccttctttgagtttcaagtccctaagtaatagttattaccgtagatctagatatttatgtaccaagcattatctatagactacatatatgcacaactaccttgtgtattttgactgagggagtaaagttttgatact

SEQ ID NO: 207978 - DNA, 435 bp, Homo sapiens
aagcatcagccccacctttcatctttatgtctccaaagacctgcacagtgtctggctcatgagaggtagttaagaaatatttattaaggtgatgaatgaaccaagcaatatacaaacaatatacatattcttttctttgtggtggtgtggagaagaaagggagaagtaataagttccactttctggagtggaagggttctagtgggacaatagaagattgtatgacctccagaaccatcttaagagtgattttaggattagctactaagggccaggcacaatggcacacacctatagtcccagctagttagaggctgaggcaggagcattgcttgaacccagaagttaaaggttgtagtacactgtgattgcatctatgaatagccactgcactccacctgggcaacatagcaagaacctgtctctcaaaaaaaa

SEQ ID NO: 207979 - DNA, 571 bp, Homo sapiens
gacacaggccagtatacaagagtcaattgatttcctctagaccagcaatgaggaactgcaatttgaagttaacaaacaataccatttacaatatcaccaagaaaaccataaaacttagatatacctctaacaaaatatgtacaggttctgttaatatggaaacctcaaaaactgataaaagaaatcaaagtggagctaaataaatagagaaatactccatcttcatggaatggaagactcaatactgttaagatgtcagttcttcccaacttgatcaatagatccagtgcaatcccaatcaaaatcctagaaagctgttttacaaatatcaacacaatactgaaaaagaataaaattggaagactcactctacctgatttcagcacttactgtaaagctacagttatcaagacagcatggtattggcgaaagaattggccccataggtcgatggagctgataaatagacctacacaaatatggtcagctgatctttgataaaggtacaagggcattcagcggagaaaggacaagtggtgctggaagaatttaaatatttgtgtgtatatgc

SEQ ID NO: 207980 - DNA, 163 bp, Homo sapiens
tcagctagctgcattcaagaaaatatatttgaatccaattcctgcctttacttatgtctttcactaagtagaacttgacttaccaggttccaagttggattgtagtctaaggcacaatatctgcacttgaggaaaattgatgtttctgccaaaaaatgaacta

SEQ ID NO: 207981 - DNA, 360 bp, Homo sapiens
  misc_feature (7)..(7): n is a, c, g, or t
actctanacgatccccttcgcggtatcataatgaatgaacagatggaaaaatcttacaaaaaaattatacgaatttgaaaatgaaaagcacaatattcaaaatgaaaaattcactgttgaatttgaagctgcagtgccacatacatgccactgcacatcagcctggtggtagaacaagaacctgtttttaaaaattcacaatttatcaacagattgctaatagcaaaagaaagggtcagtgaacattaaatcaacttaaaataatccaaatgaacacaagggaagcctgggcaacatagtgaaaccctaactctaaaaaaaaacaaaattagctaggctgatggtacacgcctgtatagt

SEQ ID NO: 207982 - DNA, 731 bp, Homo sapiens
tgagattgcaccattgcactccagcctaggcaacaagagcgaaactccatctcaaaaacaaaaaagaaccattgagaggcaatgcctttccccagatgtctacttttttatttcttccttagcccctggtttctagcatagggatttgctcacttaaactttcattggtcctagagctagcaaagttcacattaaaatgattataaggggcctggcgcagtggctcatgcctgtaatcctagcactttgggaggctgaggtgggtggattgcttgaggtcaggagtttgataccagcctggccaacatggcaaaaccccgtctgtactaaaaatacaaaaattagccgggcatagtggcaggcgcctgtaatcccagctactcgggaggctgaggcacgagaattccttgaacccaaggggtggaggttgcagtgagccgagatcgtgccactgcactccagcctgggtgacagcaaaactctgtctaaaatatatatatatatgtgtatgtatgtatatatgtatgactataggtcagttctctatgaaatgtgcatgctgtgctttcacagatccagggactgtaagttatccctaggtagacacttctttatcagataggcagttggttggctagtctcaacttttgtttttttctggtacgtaatgtgtttggtatagacctttgggcctcagagactccagaggacatagttcaggctctcaagct

SEQ ID NO: 207983 - DNA, 418 bp, Homo sapiens
tcctagttcagcatctggctgagctaaataatgaaatgctcccataatacccctcggcacttggctttattaaaacacgttggcacttttaggattgttacaaacctgtgttactatcctgatagctttccaccaagtccttggatcactgaaaaaataaatcattggctgtgggagtcttggagctaaaatggtcctgcagggcatctcagctaactgaaatttgtgaatcctccacctggcctcactccacacaccgatgagggaaactcactgccttctaaggcagcctgttccttgtttggattcagctcagtctcagtcaggcacaacaagaacttatatcctcccctggcactagggatgaagtaatgcctcaggccccactctgccctcagggagttcacagtctggaaga

SEQ ID NO: 207984 - DNA, 387 bp, Homo sapiens
attgcagccatcccccgccagctgccccattctctgtaccctgctctgctgttttcttttgtccacagcacatcaccctttaacatacagtgtcatttattggttagttttgtatgttgtttattgtgtgtctccaccactagggtgcaagtcctatgagggaagcagttcctgtctattttgtctgctgatgtatcccaggtgcttagcacagagtaagcacccaagggtacctgtgggaccaaaatgaataagcagtctggggggggcagtgaggaggggctagctgggagtgagatggggtcctgggactgctcagctgtggggctgggttaatgagtggggtctgtgtgggcagtgattggtaggactgggaggatcaatggt

SEQ ID NO: 207985 - DNA, 513 bp, Homo sapiens
aagttgatcctgagctccttggaggacggtggaacatgctgacaccacaaacagagttgaaaaataggggtctcatgtgcatcccttttgtcctgcttggtttcggtgtgggtggaagtgtgctctccatggaccgcaatccttgaaaattctggcttcagttttgctcaccagatatcacccctctcctcaccatgcctgtcttcccaggagcactatttcaatgagaagctgggagctcagaagctgagcgggggatgtatcactcttaggtgaaagaagggggaagaaaaaccagaaaaggtcctctttgccccaagtgctttgcatgcattaaatctaaggagacaggtgtctttaaatctggattcttaaatcaatcacttgctgccaacatgcttccgtgttcaaagtcagttaccatgcgatgcttctgaaaatagacctgtgctgaccaatcatgactcttatataagatttagtactgacttaagcctgcaccagccaggaatg

SEQ ID NO: 207986 - DNA, 1043 bp, Homo sapiens
gaggatgcactctgagagcccgggctccctaaggtatgagagttctaaccagcaggtgtagacttttcaggagtgaggaatgaggcaggcattccaaacctggagcttcatcaccttttgtttcatctcaagacaattctgaggggctgttttggagcgtgtctggaaggtgaacgttgaagaagagtgtgggctttgatgtgactcagatgagatctttcatggggaggcaggaattcaatgcccagaatctgggctggtgtctttgaggtcagtaggttgcctctttgtatccaagtccattgttactaaattggaggctggagattctaaatggcttccagaccatctctctgattctctttgggagattgggtctgaaaaagacaatgtcagtatttttgggaaattctagaaagtctgcttggaaacctgggaagacctcttgcctagtgcctaaatattcaatgtgcagctctagccatgtagatgcttggtaggtatagagctgggttttcatttatatcagcaaaacctatgtcagagttgaaaaagtagtcaagacaaagtgtcttggtcgcaggccggggaacatcttaaaagcaaacttctagcctgatgactcttggcaatgagtgttgggtcctggctaaagtgccttgaatgcagcatgaggccaatccatgaatccaacttccaatggagaaatgttaatattttttcagtttgaatcaatcagggtgaaattaccttgctattggtttgcttactttttattatttcatataaaatctaagacaaaatacattaaatgcttattgatatatgtatttattcttcacctggctcataatatttgcctaattttaaactttcttctattttgtaggtttcaacttatttcattgtaagatattgttaaatctaatacgggcattgtcacttttacaaataattttattttatttcatgtatttcctattcactttttacatttaaattatggaccatttcatcatataaaaagctccatttctatttta

SEQ ID NO: 207987 - DNA, 370 bp, Homo sapiens
atcacctcttacagttcccacctgtcaacgctgttgcactggggattagattccaagatacgaactttggggaacacatttaaaccacagcacccctgatgtttcttggtagtaattttccagccactgacttccacccagctctttctttggcaatgaattgccacttgcccatgctgtgtttggagttgagcctaatttctctcccctactgcaaaaccttgttgcactgcttcctgtacctaccatggtggtcctgataaagccttcctcacagtactttaaaagtaacattaaataattttttctttaacctagggcagaagcatcctcaacagtccctggtccagatacacaatgaaggaggttt

SEQ ID NO: 207988 - DNA, 476 bp, Homo sapiens
aaacagcttatagtgcatatgtgattcattttatgtaaagtcctaaaattatctaaattaaaagtatctatattctatagctgtgcatgtgtgttatgcacacacaagaatatacacatctgcattttatatagatacaagtatattgaaaggatgatacattcttatacagatgtagagcttaggatttctttatcaatataagatagaaactgcgaaagcatgaaaatgaaattaagcatacttcctttattcacttatcacccgttttcagaattagttgccctatgggtaggtaccttttaaattatattgtacatctttcaattaaatatcgggaggttgaaaattaagtgacaattctaatatttctagtggaagacctgaagctgcactattaaaaagctagtaaatggaaggggaaggatatttctttatccatggagttaattacacaagcagtacactatgtaagt

SEQ ID NO: 207989 - DNA, 803 bp, Homo sapiens
tcagtggtataaggagtctgatgagtgagtagaaagaagatgagttaggtaggaaatttgagagaaatggtagatgcttgaaatggttgaaggaaatgagatatggcccacctcaaaaagagaacatgaatttgtggtagtaccaacatgtaaatgcaatgtagctggtgtagaagctgaaaacagctcaaataatccaattggaatgggtattgggaaaagagtagctgaaaggatgcacagtgaagactgggctaaataaacaaggaagtcaagccagatgagtgggaggaaaacaaaacaaaacccagatactttgctttctgaagtttccacttcagtgttcactagaactccctctagaagcctagcccaaaaggccttcctcaacatcagacttgcttgatcttcatcctaccaaattccaacaggatatagtcggtgccatctgggacgatggatggacaatctcactcactaatgtgttctcccaacaagaagggagctataacagagcaggcaaggtttctttgttatttttcctcctgcccaacattgtatatgagcgtgtgtacatgcaagcactcacaaacagtcgacacatcccaggtcatcaagcatgggctggacagaagatgagttcaattttccaaagcaaagggtctggtaaacagactccacaatgcagggttcatgccttgggtagggttggaatcacatgtggcctctatgaggatgactctggacgagttttagtgagggttgccaggccactacaggaacctaccctcccttgctcactc

SEQ ID NO: 207990 - DNA, 762 bp, Homo sapiens
tgtttctttatttcataggtcctgagatctagaggctctgtactcaaggagcttcacttgaggagcctcatctccacctagacctgatttagctgatgaaatcctggtcctcagatctaatcctgatgttaaaataggctgagacttctgggggccttgggggaaggtgaatgtcttttgcatgtgtgagaaatgtaaataatttatggctagagaggagagtgtggtagacttaaaatggctgcaaattccttgtggctcctcccattgaatctggactggctttagtcactgcttgactaacagaatacagtatatgtgatgttgtagaattttagtcacaagatcacaaaaaaccttgatcttctgccagggactttttgaatgcacctgccatgctgtgaggaagtccaggtaaccacatggagaaccacacagagacagaatttgagatccccagctggcagccctagtggagctcctagctgacacccaacaccaatttgccagtaatgaagataattcattctggaagtggatactcagttccagtggaggcatcgggtgacgctgtgtagcgcagaaatgagccatccccacccaaattgcagacttatgagtaaaaataaattactgttttgagctactgttttagagtggtttgttatgcagcataaataaccataacgttccttaacctagcaactccacatctatatgtctaccttaaataaactcttgtgaataaaaaatatgaatgag

SEQ ID NO: 207991 - DNA, 478 bp, Homo sapiens
tttttcattctgtccttccaaaaaaaaaatcatacaaaaaaaataggagatcaagggggaaaaaaaaaagagggcatggaaaaaccagcctctggtataggctttcagggtatattggtgagcaaacttttcctagagctgtttctggttatcaggtgtggtacaggttgcagggaggtggggatggggatgactagggtcacagcaggcaataactagggttattggcacccggttggtgtttggtgcctgctgtgtaacttgctgggtgttgggaatctgtatatggcatatgccatgtgcacagtgggatgtgtttaaaatgtgggagacaggagctgtatggaaatcattattttcaaatgcggtcatggcttttaggttgtgaatttttgttcctttccaaaaccggtttagatgagcagctttgctttttagtgagattgagttaatcttatatctttatgttctaaaaaaa

SEQ ID NO: 207992 - DNA, 475 bp, Homo sapiens
ctggctgatgttgggataattttgaagcttattaccttacatattagcaatctgaagtctcttattcacagatgtggcaagtgataaaccagctttgtatgttttctcccaaataatttctagaaacttaagtggcccttcacctgagcccatgttttaggctgacatggaacattaattatcaacctttggatagtgtccagttgcctgtggacatggtttaatgactgtttcgtagatgcctgttcatgccctgttggtcagtcattactcagctattttcctgagtgtctgttcgggagggatagagcagggagccagctagacgcgattccggagacaggccccaccgtgcggtaaactgcacttcctcacttagcacagcgagcaggagagggaagagctgactatggggacagggcagccaagtgttaggagatttgaggagacagcaggaagcctgcagagggagagg

SEQ ID NO: 207993 - DNA, 597 bp, Homo sapiens
atacttaacttagttcatatatattttagtgcccatcctctaattgaactttttaataagcaacatcattcctcgtccatctatattttgcatcaaatgcgtcacaccttatgaaggtgtctaaatttgttcttactatgagaatctaaaattgtcttgcttctaaaacctggtttgaagatctaacagaaaaagactgattttaggaagctgtatgttattcataaaatcattatgtaacagtcttcatttcagagcttccttcagctgatgtgtttatacaaaggagctctgctaaaacaagctgattagaataagagggcgcctatgatgtcaaacatccccacagacctgactcaccccacctgacagcaacggcagccagcaattctgacctggttaatgagagcaaaacagggccaagcacttggtagcagctccagcccagtctctgtagctcaggctgttggttccagatccatggacggcaaactctagaggaagcccatgtgcggctggctaggtataggccaaggccagcactgaggcagaagcctgggcttgctccctggaccataatcaaatcaggggcattcc

SEQ ID NO: 207994 - DNA, 394 bp, Homo sapiens
tctaccccgctaatacctttattcttcttgagtgataccaggagaggaaagcaaaggatgacacagaaaattctgataaaagaaggtgacagcaataaggctaaataaactgttcagctagaacctctcaagttgaaatcagaaattttctcctgatgtattgtataatatcagtgtcctcatttgttattacagcattagctactaattgtctcccattgtctatttacctccttcttccttttagcaatagacccatcctcccttgcagttttaggaagcccagcttgataccgcacttcccaaactcccatatggctaggagtcaccaggtgatgacattttagaaagcagaatgtgagcaaaaatgatgtgcccaacttcctagtcacat

SEQ ID NO: 207995 - DNA, 340 bp, Homo sapiens
aggaatcaagaatatacacggtccctgagcaaaggcaggactgacatgaagcaagagccatgtcctacatattgcccacaaaccagaagaatggtcccacgtttggacttgtatgatcaactgggtgccagtcactcctcccaagcagaggaacaagcgagagccaaatgtcactgcttatatttgagaagagtggaaaaccttcatgaaatgagaacaaggagtacagattgctcacaacagttttcactgtactaatagccatgtatccagcttctgtagactatcgcaagcctttataatagagcccgaagttaacatcatgctgcatagatgatag

SEQ ID NO: 207996 - DNA, 219 bp, Homo sapiens
tctgtttctattggaataagagacaagtgcttgaaaagcagaggagagtcaatacacaggccacatcttctctcactccctccttcctcctcatagctgtgagccaccccagtccctgtacctgcttccttggctggcatcatctaagaaatcatctcttccacagtttcctgcaagggcatcaccccaagggaagctgaacacatgcaacatctgccc

SEQ ID NO: 207997 - DNA, 1224 bp, Homo sapiens
acaaatataaattatgaactatcattctcctcacttcagagaaggatctgaggcagagaggctaagcaacttgttcaaggtcatagaggtagtaactggcagaactgggatttgaacccaggcagtttagcctcagaatccacactattcactgctatgccatactgactgcctgcaaggtctgattggtctcccagcccacagcaggcctcagggagtggttgctgaataaatgagcgaaggaaggaataggcaaatgaatgaatgaaagtgagcaaaagcagagtgagctcccaggtgcaaggcaaggaccttagagagcctgcaccatgcaaatgagtctgacgtgagtctccttgttgctgaagcagctccgctgtccacagccctggggaaagtcaggcgatcagaggagactagcaggtgccattggcctccacccactacagatgctcatctcttgagcctcctgagatgttcatctcccagccccctgcctcccccagccctgaatgctgcaggattagacataggcccctggggagctgatccctcctaaggacaaggcttgcggatctcagggactggagggggaaggtccccaggctggagagccaagtttaatcctggcatggcattgactggctgggtgaacttgaatgagtccctgcccctctctgtgcacaggtgccctccagctccatattctgagattcaccacatgctcagctgccctcatggatgggtgcaggtgagctgtgggtcctatagccatgggcaaaagggacctgtccctagagggaaagcggaaaacgagaatgaatcccacctactactcactgcaagtctgctgtacgccaagcatttcaacatgaacaatttctactccttgcagcaatcccactgggcacggtggcaggtgaggagggccttagattcagctaaaggaggctaaaagccagggtccaacccaggcccatccaacttcaaaactccctactcttgtgacaagagccaagaagtggaacaacccaagggtccatcgacaggtgaacggacagacagaatgtggtctagccacacaatggagcagcactccgcctgaacaaagaaggggatccagccacatgctgcagcatggatgaaccatgaggacactatgctaagtgaaataagccaaatattgtacacttccacttatatatggtatctaaaatagtcaaa

SEQ ID NO: 207998 - DNA, 665 bp, Homo sapiens
gcaaccagaaagttttaaggtctttcaagtcgtataaaatggacctgcagaaacgttggaatgttctcaggatgcaaagttggagctgaaatgtgatatcaaacagttgcaaaaaatgtatagcaaccatgccttgaggtcaaacctggtaccgagatctgcaacaaaaagcttcaagacacatagtttgttgggcttgtcccacatggtcgcataatctgctcatgtgtgaatttcacaaacgactcgtattgctctgctagtttggtattgaggattttctcatactcctcccaaatcttctcttcatagtttgagagacgtgtacatattgttctagcttgccggagggccaaggtgggctggtccatcttcacccaggagaaacctgcacactgggtgctgggtgctgaggactgaggctggctttcctaagcacaagctgccctctgattaagaacaacttctaaatgtgtccacctctgataatgattctattatatgttgaaaaatgtgtttcggagttggaaggtcctctggcggccaggcggggcaggctgctgcagggtcgcggtggggtttgcgtctgaaacgccggcggtggctcggcgtcccagggcctggggcccggagccgggcggggaagcggggagtggcgcggccgc

SEQ ID NO: 207999 - DNA, 779 bp, Homo sapiens
tgagtcagtcacattactcagggggttccattcatgctaaaataacaccttgtaagtcacatggaaagaagctgcagactgaacaaacatgctgagcagttttactagtgaagatcaacatgggaaagttagcaagtctttgtttttcccatccttatcttttatcagtaaataaacatgagttcttgatattctttttcctgtggagcccctcgtttggacaatactatagtctcattttaaggtacaaaattcagtgcctgcttagaggattacagcatggagtaatcatattcacaccagagatgaaaggccagttagtagtagttccaggggtttttgctgttcccttgctcagtttctctagacttctttccttttgctatacaattgcagtgtaaacaaccttagggaaattataatgtttagactcaaagtaagaagaaataaagatggaccactagagaattgtagtaatctatttttaaattgatattgtgtctcatttttgtataacttttgaaataaaagtagattatgtcttaaaattgtaagtttacagtttgataactgaaaaacatttttaaaaaggcaatttttaatacaaaggtagataatttaggaagacagataaataaaatgaagaaagtaagttacttgtgatctcaccagtctttttagatacgcatctatatttatgtcacacatatctgttttatttatgtatttatgcacctttaattaaattaaaattatattgtttttaattttacatttgc

SEQ ID NO: 208000 - DNA, 342 bp, Homo sapiens
ctgaaacaggaatggggcaaagagaaaggagagccaggagcatttaaaaatcagcatctgggccaggcaagatggctcacgcctgtgatcccagcattttgggaggccgaggcgggtggatcatgaggtcaggagatcgagaccatcctggctaacacggtgaaaccccgtctctactgaaaatacaaaaaattagccaggcatggtggcaggtgcctgtagtcccagctactcgggaagctgaggcagaagaatggcatgaacctgggaggtggaggttgcagtgagccaagatcatgccactgcactccagcctgggcgacagagcgagactccatctca

SEQ ID NO: 208001 - DNA, 252 bp, Homo sapiens
gcaggtgaagtttgggattccatccacccctcaccagattttatcctcacccttatctgaacttattccttctcacactctatgtcccaggattaaatctcaagatgatgaaggaataccccctcatgacatgaagcacctgctcatctgggaagctaattcaatgtaaattcaaggggacctaagaacaggactgctagtgtctccatggttaggctgcaggacaatgaaacactagatgtcatttttttt

SEQ ID NO: 208002 - DNA, 432 bp, Homo sapiens
agcacttttacattattgtctagataaagagatgccactcttctacaaattggtacttacgaatttattttgaggatctgttcggctttagtccacaaaccaatatgccacaaacttttaattctttatcccaaaaagggggctacaatgcatagatgatttaccagtcgccctcatgctatgtagcatgtgctcatacgtcatgtcgaaagtaccagaaactggaaaaggaatcaattcctttttttcttggcttggaacagggagaagcaaaaactggtagaaaagtctgacatcacctcttgggcctgaccctccatagccacaaaacaagttggccaggaatccaggtagaatctgcaaaagcagactccaggtctcacactggcctggcaataaagtctttaggatgttaatagaggttgagtgaaa

SEQ ID NO: 208003 - DNA, 195 bp, Homo sapiens
tgtaaagaatagtaaattataaatttgggagatggtaatcttcaaacataacatcatcaatttttagatctttctttgtgtctaaacatctgtagagctacactgttccttttaaaagattcttaagttcccgacttcaaagaaataatgaagatgtatctatcaaagtgtggttttcttaaactgttgttttgt

SEQ ID NO: 208004 - DNA, 447 bp, Homo sapiens
caggtttattttgattttgtttcttcttgagtcagctttggtagtttgtgtctttctaggaatttgtcagcttcaattaatttatttgatttgtcggcacgtggtttttcatggtattgtaggtaaagccggatactccttcgtttttcctgtaaagtcagtagtgatgtctcctctttcattcctggttttagtaatttgagtcttctctctttgtttcttgttgtatagtctagctaaaggttcttcatacttctggaatcttcacaagaaaaaggaaaagtttttcaatgttgggtcttttcagagaacaacttttggtttcatttattatctctgtgatttttctctgttgagtttgtttctgctctcatgctttattatttccttccatttgctttaggtttgtttgggtttttttgtttttgtttttgttttttttgagac

SEQ ID NO: 208005 - DNA, 180 bp, Homo sapiens
taaataatgtgacatcttaatgtgtactgtctaatcgttccttctttcttttttttaaaacttgaaaatgtgtcagtgacttctgtgtatatttacctcattcttgtaaattcctcaaaatgtccaaagagtaaaaatataatttaagtttatttgtagatatctgtacttttaattttt

SEQ ID NO: 208006 - DNA, 176 bp, Homo sapiens
tacggtactttgttacagtggtcctagcaaaccaacacacaggaattgttcactgcctccaaatacctatatatctataacctatatccacagaacacagataaaaagcttcatctcccagccttccttgcagttgtggtcatgtgaccaagttgtagccataggatgcaaatgga

SEQ ID NO: 208007 - DNA, 327 bp, Homo sapiens
agccagacaggccaggccacacctgctagagcttccaacccagtggtcccacttctacctgaactctgcaggcaggtgcaaccccgtgtttactcaggaagtaaacagacaacaacagattagggctgacctagcaaggatacaacctatctgtcaactgaggttcctgtctgagggagagccccatggacaagaacactcaacaaaagaaacatgggcacagagacagtaatcagagagggctcctccaagacccaggagcaggctagaatctaagccagtcaactgatcccaccttatactgtaatcaaacccccaaggttatca

SEQ ID NO: 208008 - DNA, 505 bp, Homo sapiens
cagaaaaccaccaaccagtattctgatttaggttacatgttatggagcataatctcttcacatttgatatcctgtggttctcattttttaatactcaatttcttgtttcaagattaaaatttcagatatgtgtgatgattctaacatcagtgaataaatgtccagaatattaaagccccccacagctatatgatcagataatagactacatgaaataattttcaagaacctaaactagaattttaaaaatatatatatcaggtttcaatccaaaggaagtaagagatcaaatagatcagacatttcaacaatactaattagttgtgttgactcttatgaggcctcacaaaagcatttggcaactttcaggtaagtattactcaataccactttaaagtcctcagtacttcagttaaaaatgccaacagatgaatttagtgataacaaagtttaagtgtttatgttgcttgtaattttctcattcataataaattaatttttaata

SEQ ID NO: 208009 - DNA, 228 bp, Homo sapiens
aggttagattcttgctgagaaaaggaatcagtattgtctgttaaagccacatgagtgcttctttgttattttagcattgattttactgctgattcaaatattgagttggtttttctccttaacagttaaatctctgaatatgtacttgcttacattttgaatatgcaaatcagttacagattgtattctttacaaaaagaggaaagctgtaaacttctgatatctttt

SEQ ID NO: 208010 - DNA, 363 bp, Homo sapiens
gttctaagtgctggggatgaaaagatgaataagcaggacaagacgctgcctttgtgggtttacgtctttgtgaaaatccacaggagctggaccagtacttgtaagggaatttctaaacaagcctgattctactcggtgtcaagattagaatagatgggtgtagtaggacagtttggccaattagacttgaggtcttctctaggcttcactgtttccccacctcttaaagctggggcttcaattacatttttctttaaaaaaaaaaattgttcttttagaaaaattaaactaccaatactgatttttgccagtagatggcagacaactgcatttgtgtgtccaatgagcgggtcaagtttttaa

SEQ ID NO: 208011 - DNA, 160 bp, Homo sapiens
ctctttgtttttgcccctgctttgtcctgctaggtgaggcctttatctttctaaaattttctcctgctggctttcatgtcttgagtaaactttactggaaaaaccctcacagacatttaccatctgggtgtaatgagactcctatgtgcctacgtctagc

SEQ ID NO: 208012 - DNA, 365 bp, Homo sapiens
aaatgatctcagcaactacaggttgaaatgttaatcaggatagcgatttgactgagtttttaaaattatatagtcacccctcggtatctgtgggggattggttccaaaacccaccaaggatacctaaatccatggatgctcaactccctggcaaaaaacggcataatatttgcatataaagtgtgcacatcctgccatatactttaaatcatctctagattacttataatacctaacacaatgtaagtgatgtgtaaatagttgttacactgtattgttttgatttgtattatttttattattgtattgttattttttattttttctgaatatttttttatcagaggttggtgtgagagcgttgg

SEQ ID NO: 208013 - DNA, 251 bp, Homo sapiens
acagggcgaagactctgctccccttcggttattctgaactcttaataatccagtccctggctgggaatttttcctgaacccctctaccacatccaggtagatggtctgtgagtattggatagaagccctagtctcaaccgtaacccctccatgtccataaagatgatgccctcttttttcctgagagttcccatctcagttgtctctctgggctaacataataattcatttagacaagtgggaagagagac

SEQ ID NO: 208014 - DNA, 932 bp, Homo sapiens
tatcagactgaggctgaatgaaatccaccagtccaccttaaagacagctatcctgggaatgtgggcaacgtcccacttgcccactgctatagcttatagcaccttacactcacctcttcctacagattatttttgagtaacagcgtgaccatgttgtgcatttagccaagcaaacctttctagcttaggtgaatgagagggagcggccaacgtataaaacaaaatagtaagttcataaaaattacagtgcacaatagtctcagataaaatattaattgttaaacagaattccctgtatgtgacatgttctctttcctaataattttcagttatttcaaactttttactcaagttttttcaagcctccaattaaaggtgctgagctgcaccagtctctgtgacccccagctccaaccttcttcactacaattttgggggtactagcacatgccaggtacagtactcaattataaatatatgatttgtgtatatcgtgtgtgtgtaaaacacttcattttccccatggaaaaatttatccctcaccaccaccctataaagtagagtttgttacctccactttatagatgaaacaacaaggttccaagaagatgttgcataatattctacagatgaaataattaggaaatcaggccgggtgaggtggctcacgcctgtaatcccagcactttgggaggccaaggtgggcggatcactaggtcaggagttcaagaccatcctggctaacacagtgaaaccccgtctctactaaaaatacaaaaaattagccaggcgtgatggcaggcagctgtagtcccagctactcgggaggctgaggcaggagaatctcatgtacgtgggaggcagaggttgcggtgagctgagatcttgccactgcactccagcctgggcaacagagtgagactccatctaaa

SEQ ID NO: 208015 - DNA, 600 bp, Homo sapiens
ggcctgcagcttgtttaaccattcacctgttaaaagacacctgggctgcgtccagattttagttgttacaaataaatgttgctctcaacagtcctgagcaggtttttgttgaatataagttttcatttctctgatataaatgcccaagagtacaacttctgggtcatagggtagttacgtattcagctttattaaaaagtgcctgttttccagagtggccatacagtggtttttgtttgttcttttaaatgacttaacaatggaaggaaagacgcttctgcatggcctggcatagaaagcccatggagagccgccctgtgggtggggaagcgggtgacgggagccccactgcttaccagaaacccgagtgaaactgcgtctttccagtcccaagattctccttttttgctaaaggcatcagaagagatgaaagcatttctaccacccacatttcggggacactcctagcttttactttagagttgggagagaggtttggttttcattgtcatttaaatcctgttgggtttcagcagagcctgatctttagggccctgggtgcagctgttgtctggagatgcagatcactgtctgctgaaa

SEQ ID NO: 208016 - DNA, 767 bp, Homo sapiens
gggcatcttttctatggctttttgtttgtttttcttttaagaatggccccacactgaaccatggtagagctattagtttgtagggccccagatggcataaactcgagaagggattgtccacggaaatcaccagcagacttcagcccgaagctgagttcaggaagtccagctgtcactgttgggaaacatctaggagtcttccttggatccataagaagctcttcccctaaaggcagcacagctaactctactctctacctgccacaactcagtcaagaattggcacctgtagccatctgggtaagcctcgatgcttctttcagggatgtgacacaaatggcaactcggagctatttgttactgcttgtctgtcaagattgtagccaggttaatgggtcattttccttctctccagactccaccactgactgatttcagaagaggtagagaactccaaactgtcccagcaggtttgctttagacaacagagcacagcccacatggccctacctgttcagaaagtcatgttagatcaacaaaccacttccattctgagtgcacttttataggttttatgctttagcatgtccgggagatgagttaattaacaatataaacattatgtgagtaaatggaaggtccaaactttaagtttttcttataaaaatattggagctattcatttaagaatttgctcaaaagggaacataacgccaaaaggaaaatgcatgtaggtataggaatttctcagtttagtagggccaggg

SEQ ID NO: 208017 - DNA, 297 bp, Homo sapiens
agtgccttcaagataatatccacaccctttgcatgccacacaaacttctctacaacctggacggactttatccaccctatctttccagtgtccccaatttacctatatcaggatgcctctactagagacagaccagaatacttatctcccccttcataacttacccatttttccacatttatatatttttcatacaatttatctgtctagaatatagctctatactcatttttactgttcttagccattttgcaaagcccagcttccagttagccttttccaaaagtcttgtaagac

SEQ ID NO: 208018 - DNA, 515 bp, Homo sapiens
ttcagtctttcctggcttttcatgaccttaagtgaatactaatcaattgttttgtgtagggaatgtttgagttttctcacaattaaattgaggttttgagtttttggcaagaaaaccacaaaagtgatactgtgtcctcattgcatcatgtcagggagtacatgaggttgatgttttattattggtgatgttaaccttgatcacttgattaaggtatgtctgccaagtttctgcattgtaaagttactagtttcttctttggaagtgatttaaaatcttgtggaaatattttgagcaatggtaatatcctgttttcatcaaactttcaaccactaatttttgcatccattagtggatcttgcctgcaatttattgtagtatttccaagttgatgattttctgtcattttttccctacatttactagtaggagtttgttaattaaattctgtaaggaaaagctgttcctcctcatttatgtatgtatttataaatacaggtcatttttattttatt

SEQ ID NO: 208019 - DNA, 526 bp, Homo sapiens
ctttcatccagttttattgttttaaagaacttttttctttaaaattactgtagatgaacaaaacattggcaagtttcaaggttctgtgtctaattttggatcccatccaaatctacaattgctgcagataatcaatagcagacatatagtagagcaatggaacttattaccatattaacatgacatctttaccccactgttctgaaagaatttaaaaccatactaatgcagttatgacagtgaatgcaattcacaatctgccattgaggtttgtaattacatcgttttaaagcagtcctaaattatgcagtgggaggaatacactgatttaatcccaactcagtgaaatcagaaaccaagcaaaattggtgggacagaaagagcataaggaagatgagagaatttgacgacgtgtcttgctgggatttatgtgctttacagatgtttaattacattccaatagtatatacagatttaattttttttaaccttgagataatttatagtaaaaaaaaatgctgaatta

SEQ ID NO: 208020 - DNA, 380 bp, Homo sapiens
ccgatagcttaatagtggtttgtgtatgggacacttctgtaatgaataatttttttaaattaatatatgttacttttgtcactttaaaaaatgcttaagactagggctgggcatgctggcttacacctgtaatcctagcgctttgggagattgaggtcagaggactgcttgagcccaggagttcaagaccagcctgggaatgtggcaagactccatctctacaaaacatcaaaaaattagccaggtgtggtggcacactcccgtagccccagctatttgggaggctgaggtgggaggattactgagaccagaagttcaagactatcctgggcaatgtagtgagactttgtctttgcaaaataaataaacaaataaaaatg

SEQ ID NO: 208021 - DNA, 258 bp, Homo sapiens
atagttggcaatggcaacattaaaataacaacgaaataatggtattaacttttagatagatgctgttacctgctaaattctctgagcctaaatctgcccagtaaaaaaaacaaaaaacaacaacaaacgacatgaagatactaagatcttgtaattagaaggcttgagggattgaaaagctattaactttctcatgacatgattggttattgtatacattctacctaaagtgggcatacatcccacacatcctaaagt

SEQ ID NO: 208022 - DNA, 481 bp, Homo sapiens
tatttctccagcaagtttcatatttattttattgtatgccattttatatccttgagcatagtcataactaataacagctttaaaatccttgtcagtcagttgtgttggcacccacctacagtccgagctacttggcaggctgaagtgaaaggaccaccagagtctaggagctcgaggctgcagtgagttaagattatgcctgtaaatggtcactgcactccagcctgggtgacacagtgagactcctgcctcaaaacaaaacaaaacaaaacaaaacaaaacacacacacacacacacacacaaacaaaaaaactttttttttttgattttctaattactatatctgggtcatcccatagtgtcccttggttgccttttcttgagtatacatcaaagtttccagtttctttttatttatatctggtaattttggattgtattctacatcttgtgaatgatactttttagaggctatggatt

SEQ ID NO: 208023 - DNA, 325 bp, Homo sapiens
ttagatcagttgactgatcatgctgtccattttaagtatgtccttactgattttttgcttgctgtatctgtccatttctgatagaaggctattaaaatttccagctacaatagtggattcatctttttttcctagcagttatatcaatttttgcctcacatagtttgttgctctgtcgttaggcacatgcacattagggattgttatatcttcttggagaattgactcttattatgtaatatgcctcttcatccctaataattttccttgctgtgaggtctcttctgtctcaagtgattataggtactctggctttgttttgatt

SEQ ID NO: 208024 - DNA, 221 bp, Homo sapiens
taggaattactgaaaattggccggaccaccaactggtctgtgatctgcctttggcctattcagactttttttagagggaagggaggcagatgcttccctcaccaccaaatcacatgttgggaagccccaagagtactgcatatagaggttatggtcatctacaaaatggtagagtgtcatctctgtccctggctggatgtttgccaaattgcaaaaattag

SEQ ID NO: 208025 - DNA, 169 bp, Homo sapiens
ctcccacctgagtcactgggattataggctgagccaccactagtgttttgacagacttttttgaatacctagagcttccctccaccatcccccaaaaaagagtagacagaaaggaggacaaccaccttctcccagtctttgcagaatggctgtgttgggggacactgtg

SEQ ID NO: 208026 - DNA, 881 bp, Homo sapiens
ggtccgagacagaatggtacctacagtgcaggctatgtttctgtgggaatggaaaagaggactttagaaagtgaacctgaagaactcttatttctaagggaatccagtcaagcttgagaaaatgaaatattcttgtgtgtagtgattcagctcaggatattgaagtcccttttaaaaatcttattttcacctgtaaaaatagaataaaaattaatggcaagcctgcgccaggtgcctgcccctcctaagcactttacacgcacagctcattcaacctcacgtgtcgggagcatcagggagctcaccagtctcttgaggatcacaggccaattgcttgtccttcccgacccaagccccaccccacagtgtcttgctctcttctgattttacaggttttttggcagtaatacacatgggagtgaaattgaaatcctccctattattttccctcttttcctggaaagccgttttttgccctcacaatcattcattacttctctaactagggggaagtactacaagctgtcctcaggtactgcccctacgtgtgtttccctgggatggggccttgctagaggtgattctgctgccccagcattgggaagcaggaccagtgcatgtgccccatgcagccacggtacatggaagctgtcacttgagccatcagaccggctcagcccatgtgaccggagctctgaagaggcacacacgcatgccccgcacaggctgttagcacttgtcgcctcgctgccctggtccagactacccttgcttgcgtcagtcaaaactgttgtaactactttgagtcttttctgcatgattgctctttgagagaactttaacaagggaattaaatttaaaatattcaaataaatattttg

SEQ ID NO: 208027 - DNA, 460 bp, Homo sapiens
tgcaaagcactgaggtcaagatgtgggcataggagagaagcacctgcagctcccacctcctggtggtgggcacctactattcatccattgccatagcctatgtggcctacagggctgacctgcccctagacttccacgtcatgggcaatgtggtatatgccattctcacacctgttctcaaccctgtcatctacaaactgaggaacaaggatgtcaaagcagccatcaccaagattgcatgtccccaggagccaaagaatgctaggaaaccctgattcaaagaaataacttcatcttctctcataaacatcaataacatagagggaaaagtggaaaatttagaaagcccagtagttagaacactcattctcaaaatattgtcctaggtagtcctccattataataaaatgataatttttttcttaattcatagaaaaaagagtaggatttttaaattcaa

SEQ ID NO: 208028 - DNA, 322 bp, Homo sapiens
cagaaatgtgatgcccacatggaataagacttggctcaaatattgactacgccccgaagctttgcctgaccactgccgccatccatccacctccagttggaagcacctcagagctaattgaaatgatggggtcccaggtttatggacaagcactgacacatttgctgtagagaactactaatgcaaatattccaaaccacaccaagaacagcaagatgtttctaaaatatttggagttatggtagtctcacttttatttgttgcatatttattaacttaaaattaaatatgctaataaacctttccacatcttataactcaa

SEQ ID NO: 208029 - DNA, 416 bp, Homo sapiens
gcaagctttggcatttctctgaacaccggcggtgagggggtggggggagagggtagctgagtattgattggcccagtgacccctgtctcctcctcctctcttccaactctaattgcaatcctgaatgctgttctcctgcagcttgtcaagcactttgccaggatgggtggctttgaaaattgtcctgttggactccagggtgggtctgcaagatgacagagcagctttagtttaaggtgtctgaaaggttttgttttgtttgtttgttttgttttgtttttccccagcaccatggtactggcaattgtttgaagaaggtcctaaatatgcctgggtttgggagtctcggcttctactgggaatgatacaagaggtcaaggctacttgtaatgaataaatcctgttctctgccacga

SEQ ID NO: 208030 - DNA, 538 bp, Homo sapiens
agagaactatcatgccatccagtaatcccactactggacatttactcaaaggaaatgaaatcaatataccaaaaagatacctgcactcctgtttatcacagcactactcacaataacaaagatatggaatcaacctaagtgtccattaatggaagatacgataaaggaaatgtggtatatatagattacatggaatactattcagccataaaaaataataaaatcatgtctttcaaagcaacattgatggaactggaggtcatcaagttaagtaaaatgagccagacactgcgggtcagataccacatgttctcactcaatgtggaagctaaatgatgtgtacacatggacatagagaggggaatggtggacagtggggacttggaggtgaggcagtggggagggatggataattggaagttatgtaatgggcacactgtgtgttatttgggtgacggatacactaacagccatgacttgaccattaccctatctatgcatgtcataaaattgcacttgtgccctataaatttataaa

SEQ ID NO: 208031 - DNA, 944 bp, Homo sapiens
gaattgaacaatgagaacacatggacacaggaaggggaacatcacactctggggactgttgtggggtggggggaggcgcgagggatagcattaggagatatacctaatgctaaacgacgagttaatgggtgtagcacaccaacatggcacatgtatacatatgtaacaaacctgcaggttgtgcacatgtaccctaaaacttaaagtataataacaataataataataataggaatctaaaaaaaaaaacaatttaaataatgtcacctaagattttttacaattagcaagtgctggggattcaatccagggagtctgacatccagagccaatactttactacatgaaacagccctaaaaagagcagagaatctgtcttcacagattttcaaagagtaaggaaacatggttaggcctagtggtcagggaatgctttgtagatgcagtggggtgtggaaagaggccatgaagaagaaagaggatttgaaagaagagagaggaatgaagaaagacttctaataaatatgcttgctacgatcaattctgtgtcctcccttttctataaaatatgatccttggcccctataatttcttgactctaaatgtttgaaagagtgaatcagcattatcatggaacaatatgtgctgatgggtatagtctccccctttgattggtactttgcaagtttcacaaataactaaccacctgagaacttgtctcccttgaactgaattccattttaattttgttcaccttcttgattctcttctttttgtgtcaaaattgtacttttgcaaagatgatttcaaaagtgttttctttctgatttagtgcggccagttttcaacattcggtctgaaattgaggagttgctgtatgaaaagtgaatttatttgaatggtaaagtttcctgtgaacagaaataaagtattgtttcactctg

SEQ ID NO: 208032 - DNA, 224 bp, Homo sapiens
tttgcaagtattttcactcactctgggttgccttattactgttgatagtgccttctatttttctttacctatttatttatagaggtgggtcttcttatgttgcccaggctggagtccagtggcatgatcataactcactgtagcctcaaactcctgggttcaagggatcctcccacctcagcctcctaaatagctgggaccactggcatgcaccaccatgaatg

SEQ ID NO: 208033 - DNA, 326 bp, Homo sapiens
gcctggcatggtggcacatgcctgtattccctactcaggaggctgagacaggaggatcacctgagcccaggagtttgatgctgcagtgagctatgattacaccactgcactccagcccgggggacacagcgagaccctgtctcaaaaaacaagagaatgaagcatcctgcaggagccctggctcgatgcctggtagccactataaataaagaagaaccagcaggctgtgtggatgcaaggcccagtgctcccctgttctctgaggaggggggcattaagcaccctggggccccacgatgggcagcaagagtttgccgagggaggaa

SEQ ID NO: 208034 - DNA, 184 bp, Homo sapiens
taatagacttccctaagcagcagttactaagggagctgtgttaacaaaacagtagaggggtttttgtcttggctcatctaccagtatttcgattccatgtctgcccttaaattgggttgggtaatattccctctgcctctgggagtcacagatcatcaacaggtgggaagggacggagagatca

SEQ ID NO: 208035 - DNA, 229 bp, Homo sapiens
tctggttttacacaaaaccaggtggggtgtgagtaggtcattgccctaaccctcagagtcacttttttcccccactctcaccccagacatgccagggaaactccaaagctcctcagagacagctcctaaagggattaccaggcccagttctccaacctgtacaactgccagccccattccaggtcctgtgatttcaggcaagggctcttctcttggatcccatggtcca

SEQ ID NO: 208036 - DNA, 187 bp, Homo sapiens
ttttcatggtacctttggggaattggaagtcaatatttataaaaattgaactcagtattctaaaagaagatagaggggagaaattcatatgtaataaataagaaatcattgagatgctggagaaattaggtgtaagaaaggctaaaagaaaaagaaaactcagatttcaggggagaaaatagagtac

SEQ ID NO: 208037 - DNA, 360 bp, Homo sapiens
aagagaatggggttaagccatctaaactcccagccagaacgcactctctggtaacaccgatgtgcctaataccacgtggttttttcctcacccattttatacggggaataactttttaaaaatctctttgccatagcataatagtcatcactggttaaggaaagacgcataaagagatgttaagcaggatacaatcgcaaggcatctcaccataaaatgagacgtgcttattaatgacacaggcaaacagcactaggaatggacaagtccacattaggtgcctcctgagatggtgtactgagaaggacacactttacttctgtgatattcctgacaaaaatgcataacctggccaggcat

SEQ ID NO: 208038 - DNA, 372 bp, Homo sapiens
accttatcaagaaaaatggaatggtgccaagaactatattagagttgtaaaaggaaacctaagtatggaacattctaaccaagaagtatggctgtaaaaagatggaggaaaaaagaagagaagatacagtagggctgaagaagggttctctttttgttttatagcattcaaagtcttcattatgttaaggggttaaataaagacctggtaaagaaagcacagaggatgaaagtcccatgtgagatagaggggaataaatccagtacacaggagtcagactgccctggagaccccatcgtgcctcattctctggcacggtggggtagataatcaccataatagatgagtttaaagctagaggacacaggagtt

SEQ ID NO: 208039 - DNA, 326 bp, Homo sapiens
tcttatgtaactaaatcttgtgagcagagctgggcagcaggttgctccagggtttctctagtctcatcttagaacaagtcttggtcctgcctttccaaggctcctcctcatagtgataaaatgcctgccaaccctccagcttctcttccctttaggttcaggtctggtagcaaagccttgctttcttggtcctgggggtcttttacattttacttctttaagtcgaatcatggactgatcctgaaactacccatcacactacaagaactgaatgtgggaaagcaatagaactccaagtaaaaattgatgactgtttcttgttgttg

SEQ ID NO: 208040 - DNA, 572 bp, Homo sapiens
ttgcagctgaggtgacctagaggatccctcttctcccctgacagtctactgtattgaaacctcaagcacacttttatagtcttaacaaaatccatcaaaagtcataggcttctggagacagattattaccttcccagaaggtaatctttttaatgtaaatagactgtcaaagggtaaaatttaaaaatattaataagatatccaacagattttgctttagaatgtccgtgtccctccattttagtgtatttttcccacatagagaagatactgtacctaatttgtgtttgcaagagtataaaataatatagctttttttatgcagagtggaaaaaactgttgtgaagctaataactttaaacttgtatctggaaagctgagacctgatagattatatatcaaattggtatacaacttatttggtaacatatataggttgagtttcaaagtattgtagctacatcagaagataaataacaaaggaaggatatgtatttgtgaaaccagaatttcatgaactctagaaaaggaagaggagcaatcactttgcacaacaaagaatctttattcat

SEQ ID NO: 208041 - DNA, 194 bp, Homo sapiens
gtcatgtcaaaatttcatcatgaatatgtgacaagtacaaaacataagttttaatcattaattaacaggaatgtgtatgtctgtacacatctctaaagtacatgtgtatacacacacacacacacacacactttagagatgtttatgtgagcaacttagacatctgtgctgatagtttaaaactcctgtctacc

SEQ ID NO: 208042 - DNA, 617 bp, Homo sapiens
caggggaggaggaagcggctggccgctgaggggcggcggggcccggagcgggggacgcgcagggcccggcggtgggcgggcgggtcggcgctgccccgtgggctcgctggggagccacggcggagacccccgccctcaactgaggaaaagacaatttctctctgattcagaatcctgaaaatgtgatctcccttaaaaagaggacagtgctgctgtgagtttgacgaagtggacatcacctgcagtcagtccagagctgcccagtcttgaatataatcatggccaaaccttatgaatttaactggcagaaggaagttccctcctttttgcaagaaggaacagtttttgacagatacgaggaggaatcctttgtgtttgaacccaactgcctcttcaaagtggatgagtttggcttctttctgacatggagaagtgaaggcaaggaaggacaggtgctagaatgctccctcatcaacagtattcggtcgggagccataccaaaggatcccaaaatcttggctgctcttgaagctgttggaaaatcagaaaatgatctggaagggcggatagtttgtgtctgcagtggcacagatctagtgaacattagttttacctac

SEQ ID NO: 208043 - DNA, 561 bp, Homo sapiens
caggggaggaggaagcggctggccgctgaggggcggcggggcccggagcgggggacgcgcagggcccggcggtgggcgggcgggtcggcgctgccccgtgggctcgctggggagccacggcggagacccccgccctcaactgagaggacagtgctgctgtgagtttgacgaagtggacatcacctgcagtcagtccagagctgcccagtcttgaatataatcatggccaaaccttatgaatttaactggcagaaggaagttccctcctttttgcaagaaggaacagtttttgacagatacgaggaggaatcctttgtgtttgaacccaactgcctcttcaaagtggatgagtttggcttctttctgacatggagaagtgaaggcaaggaaggacaggtgctagaatgctccctcatcaacagtattcggtcgggagccataccaaaggatcccaaaatcttggctgctcttgaagctgttggaaaatcagaaaatgatctggaagggcggatagtttgtgtctgcagtggcacagatctagtgaacattagttttacctac

SEQ ID NO: 208044 - DNA, 464 bp, Homo sapiens
taaaattgcagatagaattaaaaacttgcttatctatttttagtagagggaaaaacctaaataagtttaattctagtaagttgctgactctacacaacaacttcctttcagtcttcagataatggaaactttgtggatttatgcacagcacccaaaccccagagatctgccccaacagaaagattgccaacaaaatgtttgtcttaatacttgaacaaatttttctcaaacttacattgtatatttttctccaccagtttgctaaatgtccacaaggttaatacccgcccagccaaatgaaaagaccactgggatcaggtgcggtggctcacacctgttatctgttccagctacttggggaggctgaggtgggaggatcgctgtagcctgggaaatcgaggccgcagtgagctatgatcaagccactgcactccagcctggccaacagcgcaagagcctgctct

SEQ ID NO: 208045 - DNA, 306 bp, Homo sapiens
tatcagatgctaagtagggaaacgtatttaataaaatttaaaaatttcagatatactgtcaacggaaaattaagatgagaaaacagaatgtacaatatcattggatcgttaaaaagacagacaagcattgaggcacaggctataggacatcaatacattgagaaagtctggtagtttatttattctgttacattacaacatgatcatatgttaccattacttttcttttagttgctatcttgattttcttttttgaatatatttcataatcattttaacactgttcatacattaacttaaaaaata

SEQ ID NO: 208046 - DNA, 489 bp, Homo sapiens
ggccgtggttgtacttctgactccatccatgacaggcaaactgtcatgtgggagttcagtcagggtggtggggaaaattacagaggagaagttttaagataaagttataggaaatagacacaaaccttcttggaaggctggtacccacaggatccccattccttgtaaaggtcgtgcactgacacgcatcctgagggccagttccacgtccagtgcctctcgcctttacttccacgtcaggctactgtttccctatcgagggccttccttcctattctgtgatcaaatggttcactgcagttctagagatggagaagccaggagagagaagctgagccatttgttccaagttaagctagagccagggttggaatccagaaccctatcatgaaaaatacagcgttagattaacatttttgaactgcttaattgcccatttttgaactgcttaattgccaaataaattttgagatctcgtaaggctgggtc

SEQ ID NO: 208047 - DNA, 403 bp, Homo sapiens
cacttttttctcaccattgattttcttagtgacacttttcactataagaaatattctatttttagctcattttaatattttaattttaatttatcataaaatgctttaaagccactctatagagaatattaaaacctgtgaacctactcccaggatgtttttcctaattgtcccttgtgggagagataaactatacaccaatgcattattccttgtgttcatttactattgtaagctctgaaggtagggactgtgtctgtcttttaatcaccatggcatcctggtactgagcacctggcaaatatgtgtatgtaaatggaggtatgaataaataaccaatttatacatgattaagaaatatttttttcctatccctggacactttttttttttttacagtgtt

SEQ ID NO: 208048 - DNA, 429 bp, Homo sapiens
aatgcccctgaaaacactatccttacttcctctgtttaccaggtagaaagtttgaggattctattttgtttctcatactctgtgtctactgtggtcaatcaaaaaaatctactgaagttaccgggctttgaaattacattcagaaaaaagcaagctggactgtgggataggtatttatcaatgaaatgctcccaaggacactaatgaggttttagaaaagaggaagccacttgctgagacattgccttcacggccaagagtctttactagccaattccatagcactcttcctatgaattataatttagaaaggcagatcccacccaattctagaaatataagttcaaataggccctaagaatctggtgaactccatttaaaaaatgatttgtctctgcaaaagaaaaaagaaaaagatttaactgactg

SEQ ID NO: 208049 - DNA, 373 bp, Homo sapiens
tatattttttaaatctctgttggctgaagacctagaagtatctggtgcttagtattataaatgacttagaatataaagcattctaagatggtacaggtgctcttccttgtacttctcactcaacatatgaacttgtctggcttttctttttttttctttttctttttctttttttttttttttttttgaggcggagtttcactcttgttgcccaggctagaaggttgtagtgagccgagatcggaccactgcactccagcctgggcaagaaagcgagactttgtctcaaaaataataacaataataataataattttatctctaaatgttgaaggcattgttccattgttttctactttccagtattgctaat

SEQ ID NO: 208050 - DNA, 390 bp, Homo sapiens
aagctgttggatgagattttttttttaagttcctaactgttctacatagacattaaaacatccattacagcagacctagaaaccgtccttctgtccttgacatttcctccttcctcacttgttcctttgcaacaggaagccagctatttgccttagttcctagctctctgttcactgcacctcaggggtgcttccttttacggcaggatccccctagataaaaggaaaattataaacactcatccttagaaatttggaagggaatatatatacagcctaaggagtgcaaaaggctctgcacttcattcagctatcgctgctcagggactctaagtacaaaaataaagatgaactggctggaaagtataataaagggagctgaattacagg

SEQ ID NO: 208051 - DNA, 653 bp, Homo sapiens
cccctttttggcttagtgactttttttcttcctggttgtttctatgtaaatgtaacaatttccttgaaatgatgaatgaacccacatctccagtgttttcctcttgtactggacagagtggaggaaactggaattgcctgtttttgtggcagaggaggtagatggggatggaaatgaatttccttttaaagcaatgaattctttttttttttgtttttttctgagatggcgtatagctctgtcacccaggctggagtacagtggtgctatctcagctcactgcaacctccgcctcccgggttcaagtgattctcctgcctcagcctcccaagtagctgggattacaggcgcccaccaccacacccagctactttttgtatttttagtagagatggggcttcactgtgttggccaggctggtgttgaactcctgacctcatgattcgcccgcctcggcctcccaaagttctgggcttacaagcatgagccaccgcacccggcctaaaccaatgaattctttctcggctttctctccagccaaagcagaacagctatacctatgcctcagttgtttttcatgatcccatgtcgaagctgcggaaatagatggtctggttgttgagtgacaagttatttattcccttcctttattc

SEQ ID NO: 208052 - DNA, 622 bp, Homo sapiens
tctgggattaggacttcaacatatctttttttaggggatatatagttcaacccataatggagatcaaaggctgaaggatttgcagcaagcagatccgggagttatgtgggtaacttggaagacctgccaaaacagtggtcttgttaattctacagggaaagccatctgaactccaagacttcataaaaccgtatttgtatgtattgtattggtgaagacttcggtggcaagtcatggaaattaacttaaataagtttaggttgcaaacgatggaaactcaattccagctggtttatacaaaataataagaaaagaaattcggccgggcgcagtagctcacacctgtaatcccagcactttcggaagatgaggcgggtggatcacttgaggtcaggagtttgagaacagcctggccaacatggtgaaaccccatctctactaaaactacaaaaattagtcgggtgtggtggtgggcacctgtaatcccagctactcaggaggctgaggtaagagaattgcttgaaccctggaggtggaggttgcagtgagccgagattgcaccactgcactccagtgtgggcaaaagagcaagagaggaagacatcatctcaaaaaaaaaaaa

SEQ ID NO: 208053 - DNA, 359 bp, Homo sapiens
ggagctcctgtgtgccagggcagcaatatagcaggtcaaataggaagtgtgtctaccaaggcccctcagtggcacataagccagccagaggcagaggcagcagcacactctgcctggggacctggtcatgttgagttgcgaaggtcatgaccttccagggtttggccttggagccacagagcagtccgtttagccccaggccactccccaggtaagatggcactatctgtaaggacctccaaggcaggggttccagagttctttcatgaagaaacactgtttaactattttgggtgtgcacagaaagaaatacgatacatgtaaatatgctattttaaaggtaaaataaccgtagtatt

SEQ ID NO: 208054 - DNA, 275 bp, Homo sapiens
gcggccccaggcttcccggcccgccactcccgctgccacccaaaggcgctgcgtgccggcggcttggtggagtttcgtcgaggcccggcaggcttgggccaggagatccagcggccgggcggggtcccggctgagagaggccgatgccgccgtcagtcaccgagatgggggtaatcactttgatcaacatgacgaaggacaatttaccttaagccagcagaagcaggggaccctttggggagcaggaggccaataaaaagttcagaggttaaaaa

SEQ ID NO: 208055 - DNA, 360 bp, Homo sapiens
gcggccccaggcttcccggcccgccactcccgctgccacccaaaggcgctgcgtgccggcggcttggtggagtttcgtcgaggcccggcaggcttgggccaggagatccagcggccgggcggggtcccggctgagagaggccgatgccgccgtcagtcaccgagatgggggtaatcactttgatcaacatgacgaaggacacttggaaactgaacaagcatcacttgacaagcctacagaatccataagatggatcattgcttaatttcgggtcttagccagttagatttaccttaagccagcagaagcaggggaccctttggggagcaggaggccaataaaaagttcagaggttaaaaa

SEQ ID NO: 208056 - DNA, 542 bp, Homo sapiens
aacggagttttgcacataaccatacaatccagtcagacttaattcctgagaaattaacataaatatattataaactaagcctaatgaattataattctgttcattatgatttcggtactaattgagtttaaataatagctgatataaaagttataattcaaacttttttgtatgtaacgtaaaatatgtactatataaacaagaatactgaataaaattcagtgatcattgtacctgtattactcaacgtccctccaggaaaatagaaatgatttcaggtattcatatcaaaggaaattttagcaagaaactggttatataagtgatagaggaactataaaggtaatgtaacatagaaattagagacagcagcagtcactatcatccctagactagaaaaaataaaggtaggaagtggtattatcagagcccagggactgtagtcacacaaaaaagctggaaccacaagtttttccagcagaaactggaatcatgaaagagatgaaacccaaggcagagggaactgatgaagaaataccttg

SEQ ID NO: 208057 - DNA, 351 bp, Homo sapiens
tttgccagtagatggtttatgggttttatagctttattttgaagtgaaagttatatatcatatagctttattataaaagaaaaatgataaactatattttctttttagccagtgttctttggagtgaattttagtagaattttgaaaacttatttgagaaaattaaattatttttaatccataacatttattgagtacctaccatgttcgggttcaatgctaagcttattacatgcattatgtcatttaactgtgacactagcactttaatctgaatgagcaatctgaggcttagagaggttaattaacttgccagtgtcaagatctagcctgatgaaactaagcttagaa

SEQ ID NO: 208058 - DNA, 167 bp, Homo sapiens
ccaaaacctccagctagcaaaaagtggggggaaatgtgactaagaaataaagtactgttgttgcaggttaaagtaaaacaaccagtggctccagttatctttccatgggtcttgggcagacttttcatgtagttatcagtttggtccaactgacttgggtggaagcc

SEQ ID NO: 208059 - DNA, 443 bp, Homo sapiens
cctctgttggtcagattcatcagagtggaagcagaatgacacattcattcaatttatcagcagctaaggtggtagaggggagtctctcattcctacaggtcttgctgaatgtaccaggaatgcatgaccctgatagctctctcccttggttttattttttttttctttctttctttcgagacagagtttcactgtgtcacctaggctggactacagtggcacaatctgagctcactgcaacctctgcctcccaggttcaagtgattctcttgcctcagcctcctaagtagctgggattataagggacacaccaccaggctcggctaatttttgtatttttagtagagatggggtttcgccacgttggccaaactggtctcaaactcctgacctcaagtgattgacctgcctcggcctcccaaagtgctgggattacaggcgtg

SEQ ID NO: 208060 - DNA, 544 bp, Homo sapiens
agttctcctgcctcagcctcccaagtagctgggattagaggcatgcgccaccatgcccggttttgtatttttagtagagacagggtttctccatgttggtcaggctggtcttgaactcccaacctcaggtgatctgcccgcctcagcctcccaaagtgctgggattataagcgtgagccaccgtcccccgctttctttgcctttttaaagtcttgtctgggctgggctcacgcctgtaatcctagctctctggtaggccaaggtgggaggactgcttgaggacaggagagcagcctggccaacatagtgagaccccatctatttaaacaaaattttatttattttttttcttttttgagatggattctgggctagatcgcagatttgggatcgcagattgggggctggatcggggatttggggatgggtggggggcggtgaaaaggtgaaagggagttgccgcagctcagaagccgatggttgggtgtctgagaagattacaggcgtgtgccatcatgcccagctaatttttgtatttttagta

SEQ ID NO: 208061 - DNA, 652 bp, Homo sapiens
ctagttgttattttagagtttcattgccaagacatttttttcaaaaattcaaataaaggggcaggcgtggtggctcacacctataatctcagaactttgggaagcctaggcaggtggatcagttgaggtcaggagttcgagaccagcatggccaacatgttgaaatcccatctctactaaaaatataaaaattagtcgggcatggaggcaggcgcttgtagtcctagctacctgggaggctaaggctcaagaatagcttgaatgtgggtggcagaggctgcagttagctgagatcgtaccactgcactccatcctgggtaacagagtgagattccacctcaaaaaaaaaagaaaagaaaattcaaataaaggttctcttattcacgcattgtttgagactgtagcttattcttagctttgtagattcttttatttttatttttttgagacagaggcttgcgctctggtgcaggctggagtgcagtagtgtgatgttgggtaactgcaagttttgccttctgggttcaagcgattctcctgcctcagcctcccaatagctgggaccacaggtgcgctccaccatgcctggttaattttgtttgtttgtttctttgtttttgagacagaatctagctctgtcacccaggctgga

SEQ ID NO: 208062 - DNA, 321 bp, Homo sapiens
tctgagttaaagggaagatgagcccaggtgggaactgtgctgtcccactctcatgcaacagtagggtttactggcatgtgtcttgggggagcagggggtggagcaatgggggacctgagggagcaaagtgttcttatcttatcttcttgtagctttgctctgcataaactctcctctgaagccatctggaaagaaggcccttctggcctctgctcagctagtggccaggggctgattctcaggggttctgaatgctccgtcagtcattccctggcagagattttgatagaaatacaagatatactttaattaaatgtgtac

SEQ ID NO: 208063 - DNA, 1041 bp, Homo sapiens
  misc_feature (800)..(800): n is a, c, g, or t
  misc_feature (804)..(804): n is a, c, g, or t
  misc_feature (807)..(807): n is a, c, g, or t
  misc_feature (809)..(809): n is a, c, g, or t
  misc_feature (813)..(816): n is a, c, g, or t
aacggctaggttcgaggctggggttaaatcggccgaggtcagcctaggctataaggtgtattttatcacctacagaccatatgcagactaaatacaacacttgtgcctgattctgaatggtatcttatatcaaaaggctcccttaattttagctcttgcttctcaagcttctctctcaacttatcagaactgcctatagtaaccaaaatggattcatgaagaaaaaaatatattttaggaaaacatgtgcaaaaagcatctaagcatctgttaacattaaaaccagaaggcagtatgtgctgcagagtacataagaagaggctttaaaatttagtaattcacaacatccacttagaagtattatagtaatcttttaaagtaacacaccacaatggtacacgctcttctgctgctgttgtctacttcctcctgcttccccgcgccgcgccgccatcatgagggaaatcgtgcacttgcaggccgggcagtgcggcaaccaaatcggcgccaagtttgggaggtgatcagcgatgagcacggatcgaccccacgggcacctaccacggggacagcgacctgcagctggaacgcatcaacgtgtactacaatgaggccacggcggcaagtacgtgccccgcgccgtgctcgtggatctggagcccggcacatggactccgtgcgctcggggccttcgggcagatcttccggcggaaacttcgttcggcagagtggtgctggaacaactgggcaaggggcactacacagaaggcgcgagctgtggactcgggctgatgtgtganaaangangntgannnntgtgactgctggacaggttccaggctgaaccaacccggtgggcggcggtcggaggtccccccacacagaaccgcagagaccaacggacctcaccttcgcggggcctccaacgtgaaacagggccaaacaccctagaccactaaacaagacatgtgtaactgtagacacaagaccctgggaccggcatggaaccccaacaaaaatacacacacaacaaagaatgcg

SEQ ID NO: 208064 - DNA, 322 bp, Homo sapiens
aagctcaatagtggatacacattattagtactccatatcctggattctcattatattgtgagtttttagcagtacagatactgatgccaaaaagatatgaggctgtgtctttaccacttgcatattctatggcttttcataagtaaatggttctttgattccaacattagtaaagtagggatattaatagtttctcatgggatacgaagattaattgagacaatatctataatgactgaatgagaaaatgctttacatttatcattgtacctggtacttagtatgcacacagtaagtggtagatgtttgctatcactatcag

SEQ ID NO: 208065 - DNA, 309 bp, Homo sapiens
tatgtagtagaacctcatgaaaatactagctctgttgataaaactagactgaaaaaagctttcaaagtcaacaacagtatgaggcagtgaaggacgtagaggagaagctgctgctgcagcctgtagctcctggaagcccgttttgtccatgatttagcaggaacgcattacctttccatgaggacactgcccacagaaaccaaggccattctttgaagacaaacatgtcttaatagcctttacattacgtaatagtgtaatacaaataataatttattattagtaatgtgaaattatttacaataccct

SEQ ID NO: 208066 - DNA, 235 bp, Homo sapiens
gattgtccttggagccaggtcatgggcacataaagaaagagttcttcatattttccagccacagacattatctttactcgtatttatttatatcttcctagcaaggcccttaggttccagttcaacacgcccaaggaataaaattcattagtgagttctcacatttgactttctccctctgaccatgaggctcttcttaccaggctaatgtttctttgattggatccctcatggt

SEQ ID NO: 208067 - DNA, 1862 bp, Homo sapiens
  misc_feature (36)..(36): n is a, c, g, or t
tcaggcgtgtaaaccagccggagcggcgcggcagcngcaggaccgccgtggcgcctagagtagcgacccggggggagcgcaggggcgacgctggctgcagggacccggtgacagcgtgagaggtactaggttttgacaagcttgcatcatgcgtgagtataagctagtcgttcttggctcaggaggcgttggaaagtcctgctttggagcaatttacagcaatgagggatttatacatgaaaaatggacaaggatttgcattagtttattccatcacagcacagtccacatttaacgatttacaagacctgagagaacagattcttcgagttaaagacactgatgatgttccaatgattctttgtggtaataagtgtgacttggaagatgaaagagttgtagggaaggaacaaggtcaaaatctagcaagacaatggaacaactgtgcattcttagaatcttctgcaaaatcaaaaataaatgttaatgagatcttttatgacctagtgcggcaaattaacagaaaaactccagtgcctgggaaggctcgcaaaaagtcatcatgtcagctgctttaatatactaaatgcattgtagctctgagccaggtctgaagaactgttgcccaattcaacagtgccagcattccaactttgttaaacctaccaacatcttaaatggactttcctgtggtggtaccctttaagaggcggatgaaagctactatatcagtttgcacattctaatcactttccagtatcacaagagagatttttacttatataatagtcctagagtttgcagctggtaaaaccagaggctacatccagtattactgctaagagacattcttcatccaccaatgttgtacatgtatgaaaatggtgtactgtatactttaacatgccccatactttgtattggagagtacaataatgtaaatcctaaaagcaccactattttagcataataaaagaaagtccaaagagctcctatatagactactccagataacttcgcttctttgatacttgtagcttattgtaattttcttttaagaaattcaaggtcattattattgtacaaaataagcgctttgattaacacagctatatagtttttttaatttttaaaaaacctgtggagacggtgatcttgtctttaaaacatgatagtcctttcagtataatgtcttagattaaagacgttgcctttaatatctgttgggaaggaaatgtccagacttttcaaatctcttattatatgtttcctttttttgtttacatagggaacaatgttatagtcgtgtgtacagtgggggtctacaacaagaagtgtatattttcaaaccaattttttaatgatttaacaatttttgtaaatcattttcaggcttctgcagctgtagattctcactgtgaatcccttgcttgctcatgcataagtgtatttgcaataccaaatatacaggtttagtatttttgcctgttagtgattgtttcacatgtgtaacgttttggttgagatgttaaatggtggacgagtactgtggatgtgaatgtgggaagtaattttaatcatatgtaattggtcacaaggcctaatttgcagtaactattgctgttttatttaacaatgccttgttgctttgtatgcattaatgtttggatgtaaagattgtgtgtctatccaacagggagccacagtatttaaattgaccaacctaatgttacaactactttgaggtggccaaatgtaaactaaaagccttaattaaagtggtgcaattttgtataacttagcatcagtagttcaataaatttggattgccatgcaagggcttgcattataattacttgcca

SEQ ID NO: 208068 - DNA, 1317 bp, Homo sapiens
tctgggttaacccccccgagtaagggatatcgtcgaaccgcgccgtcggtagctctgagccaggtctgaagaactgttgcccaattcaacagtgccagcattccaactttgttaaacctaccaacatcttaaatggactttcctgtggtggtaccctttaagaggcggatgaaagctactatatcagtttgcacattctaatcactttccagtatcacaagagagatttttacttatataatagtcctagagtttgcagctggtaaaaccagaggctacatccagtattactgctaagagacattcttcatccaccaatgttgtacatgtatgaaaatggtgtactgtatactttaacatgccccatactttgtattggagagtacaataatgtaaatcctaaaagcaccactattttagcataataaaagaaagtccaaagagctcctatatagactactccagataacttcgcttctttgatacttgtagcttattgtaattttcttttaagaaattcaaggtcattattattgtacaaaataagcgctttgattaacacagctatatagtttttttaatttttaaaaaacctgtggagacggtgatcttgtctttaaaacatgatagtcctttcagtataatgtcttagattaaagacgttgcctttaatatctgttgggaaggaaatgtccagacttttcaaatctcttattatatgtttcctttttttgtttacatagggaacaatgttatagtcgtgtgtacagtgggggtctacaacaagaagtgtatattttcaaaccaattttttaatgatttaacaatttttgtaaatcattttcaggcttctgcagctgtagattctcactgtgaatcccttgcttgctcatgcataagtgtatttgcaataccaaatatacaggtttagtatttttgcctgttagtgattgtttcacatgtgtaacgttttggttgagatgttaaatggtggacgagtactgtggatgtgaatgtgggaagtaattttaatcatatgtaattggtcacaaggcctaatttgcagtaactattgctgttttatttaacaatgccttgttgctttgtatgcattaatgtttggatgtaaagattgtgtgtctatccaacagggagccacagtatttaaattgaccaacctaatgttacaactactttgaggtggccaaatgtaaactaaaagccttaattaaagtggtgcaattttgtataacttagcatcagtagttcaataaatttggattgccatgcaagggcttgcattataattacttgcca

SEQ ID NO: 208069 - DNA, 1988 bp, Homo sapiens
  misc_feature (36)..(36): n is a, c, g, or t
tcaggcgtgtaaaccagccggagcggcgcggcagcngcaggaccgccgtggcgcctagagtagcgacccggggggagcgcaggggcgacgctggctgcagggacccggtgacagcgtgagaggtactaggttttgacaagcttgcatcatgcgtgagtataagctagtcgttcttggctcaggaggcgttggaaagtcctgctttgactgtacaatttgttcaaggaatttttgtagaaaaatacgatcctacgatagaagattcttatagaaagcaagttgaagtagatgcacaacagtgtatgcttgaaatcttggatactgcaggaacggagcaatttacagcaatgagggatttatacatgaaaaatggacaaggatttgcattagtttattccatcacagcacagtccacatttaacgatttacaagacctgagagaacagattcttcgagttaaagacactgatgatgttccaatgattctttgtggtaataagtgtgacttggaagatgaaagagttgtagggaaggaacaaggtcaaaatctagcaagacaatggaacaactgtgcattcttagaatcttctgcaaaatcaaaaataaatgttaatgagatcttttatgacctagtgcggcaaattaacagaaaaactccagtgcctgggaaggctcgcaaaaagtcatcatgtcagctgctttaatatactaaatgcattgtagctctgagccaggtctgaagaactgttgcccaattcaacagtgccagcattccaactttgttaaacctaccaacatcttaaatggactttcctgtggtggtaccctttaagaggcggatgaaagctactatatcagtttgcacattctaatcactttccagtatcacaagagagatttttacttatataatagtcctagagtttgcagctggtaaaaccagaggctacatccagtattactgctaagagacattcttcatccaccaatgttgtacatgtatgaaaatggtgtactgtatactttaacatgccccatactttgtattggagagtacaataatgtaaatcctaaaagcaccactattttagcataataaaagaaagtccaaagagctcctatatagactactccagataacttcgcttctttgatacttgtagcttattgtaattttcttttaagaaattcaaggtcattattattgtacaaaataagcgctttgattaacacagctatatagtttttttaatttttaaaaaacctgtggagacggtgatcttgtctttaaaacatgatagtcctttcagtataatgtcttagattaaagacgttgcctttaatatctgttgggaaggaaatgtccagacttttcaaatctcttattatatgtttcctttttttgtttacatagggaacaatgttatagtcgtgtgtacagtgggggtctacaacaagaagtgtatattttcaaaccaattttttaatgatttaacaatttttgtaaatcattttcaggcttctgcagctgtagattctcactgtgaatcccttgcttgctcatgcataagtgtatttgcaataccaaatatacaggtttagtatttttgcctgttagtgattgtttcacatgtgtaacgttttggttgagatgttaaatggtggacgagtactgtggatgtgaatgtgggaagtaattttaatcatatgtaattggtcacaaggcctaatttgcagtaactattgctgttttatttaacaatgccttgttgctttgtatgcattaatgtttggatgtaaagattgtgtgtctatccaacagggagccacagtatttaaattgaccaacctaatgttacaactactttgaggtggccaaatgtaaactaaaagccttaattaaagtggtgcaattttgtataacttagcatcagtagttcaataaatttggattgccatgcaagggcttgcattataattacttgcca

SEQ ID NO: 208070 - DNA, 187 bp, Homo sapiens
accaaaacaaaaaaaacacaaggtggtaccaagtttaatgtgctctgataaacaggctgaatcagagaacagctttggggaagtaagtgaaatgtcctttatctttccctaagaatgttctacaggtgctttgcagaaaagatagggggaaggagaggggacgagagttgggtactacgctttggca

SEQ ID NO: 208071 - DNA, 224 bp, Homo sapiens
atcccgacgttactcggactaccccgatgcatacaccacatgaaatatcctatcatctgtaggctcattcatttccctaacagcagtaatattaataattttcatgatttgagaagccttcgcttcaaagcgaaaagtcctaataatagaagaaccctccataaacctggagtgactatatggatgcgccccaccctaccacacattcgaagaacccgtataca

SEQ ID NO: 208072 - DNA, 423 bp, Homo sapiens
caaaaataaagtagaagtggactttgcaaaaccttgtgaatataaagtgaagtcctaggcctaaaatatggcagaaagttgcttattaaaggaccttcgtctctcggcatattgaaatgatgtcagagtatgcaattataaatacgattgtcatatttaccatgggaagatatctatagtactttgctgggctgggttacagaaatatgtgtaatataacaccacttctactaaaatatgtgctaagtatgcaaagaaaagaattctagaagggtagacatcaatattaatggtggttattgctaggtgatagactacaggaaaactttgcctttctctatacattttctggcatttgaaagattttttccaataaccgtatattatttctaaaattaataaaacaaaataaagatatttcaa

SEQ ID NO: 208073 - DNA, 423 bp, Homo sapiens
tcttgctctctactttgaaaacacagttgatgccatctgaaacgatctcctccacttggatctctctgcccgtatttacctgtatctccaatatctcctgctactcaagtatcttctttttattaaaactttcatatcgttggctaggcgcggtggctcacgcctgtaatcccagcactttggaagtctgaggcggacggatcgtgaagtcaggagattgagaccatcctggctaacatggtgaaaccccatctctactaaaaaatagaaaaaattagccgggtgcggtggcgggcggctatagtcgcagctactcgggaggctgaggcaggagaatggtgtgaacccgggaggtggagcttgcagtgagccaaggctgcgccactgcactccagcctgggtaacacagcgagactccatttc

SEQ ID NO: 208074 - DNA, 558 bp, Homo sapiens
gtttaaagacatcaaatagtaagttttaatttttccagctattactattaattctaagttttttttctctgatatgtcttctttgatgtttcttaaaaatcaagatttataaagagatagagaaggccattagtatatctctcaatgtcacaaaattaacctagccactgtaaagttaacctgtatccacaatataagtgacaaatggcagataatatctttaggaaaagtattaaatagtgcacactacttccatcaaagtatagtgttcgaggcaagtttaggtaatggtgcatttctaataaacagtctttaaaagatattagcatttctgttatttatgagaggctttcagtgtatttttcacatatgtattattagggcagtgtagaaatattattgtgatgtattaatgggctgacctgaggtaaacaataactacatccatgcgtgcatcatacatgcatacaaacttactcattttctttttaagcagactagtagttaagttccaagagagaaaggattctatatcatgaaatgccctgtacgtttttg

SEQ ID NO: 208075 - DNA, 212 bp, Homo sapiens
aaacaaactaaaaggggtaacaggtataggctgtagctaccttgagcacacttagtactattctctttaaatgtccaaattcaagatgtttttgtcctactgatataaataatagagaaacaatgtacgtttcaccttttggtttatattaagctagtttcttcccatgttcctgactatctttgagcctaaaacatgtgctcaggtctagg

SEQ ID NO: 208076 - DNA, 619 bp, Homo sapiens
aagaataataaatttcctaaaatatgaaattagatgtccttgtttataatttaaatttaatcatttaaaagttttaaaagtttctcttagaaattgtttataattttttatcctaaactttttgtaaatcttgtaataaactgtaaaatactagaaatgttaaatatttatcgtattatcaggttcaactttagtgcatgatgtgatggctaaagctgtatgtataaattttattcattttcagaaaatattaaggtacaagtagatatagaaataaaactttcatattcattataataatctgtcaatcacttgttctgtaccaacattagtttaatcaagaggactttttaaaatgcagcttcagtctttcttcctgaaggaagaagcaaagttttatgagagagaagagtaagtagtataaggaatacctgactggatgcctaaaggtctatatttttttatcccagtgctgccacttacggaacttggataagtcagttaacttttatgagtctgtttactcatctgtaggatgagtaatgatctacctcccaaattattttctgaataatgtaatgaatttgaaaacaatttctaattggcaagcacttgtaaa

SEQ ID NO: 208077 - DNA, 372 bp, Homo sapiens
gatcagtttaaaacattttcactcaccccaaaagaaacgctgtatccatgagcagtttcctgccatttcctcctcccactaagccctgacaatctactttttttgagatagagtctctgtcacaggctggagtgcagtggcacaatcccggcccaccgcaacctccgcctcccgggttcaagcaattctcccgcctcccgagtgctgggatataggcttgagccacctcgcccggcctctttgcagtatatttttaaatcaggtagtgtgaggcttctagctttgttctttttgctcagtattgctctggctatttggggtcttctgtggttccatatgaatttcagggtttttttttttcctgtttctgtg

SEQ ID NO: 208078 - DNA, 827 bp, Homo sapiens
ttttgatcatctatttcttcaggggtttttattgttgaaataaaacttgggggtaaaatatttgtatacaactattaatcttcattgtccaatatggtagctactagctgtatgtggctctattgagaacttgaaatgtggagcatctgaaccagatgtgctacaagagtaagatacacaccagattacaaaagacttgattaaaaaatgcaaaatatcccattactaacaagaaggtaaaatagctcattaataatttttatattaactagtgaatattttggatctattgggttaagaaaatatatcaaatttaatttcacttgtttttctttactttttgttaatgtaactactagaaaatttaaagtttcctatgtggcatgtgtttgtagcttgcattacatgtctctggggcagcctctctctaaacccatttgaccaggagcagccaacaaggtttccatctgctggaatccatatttagagtcaaaggtcagtcagtttaattccacacatgggatttttccctcaccccctcctccttacctgttccctggacctccttatcggatcttgttcaggttttgggcactgcactattgattgatccctcagtggctgctggttggctctttgtcccaccttcaccatcatctggtctttctgggactcctcagcaggctcctctgggtgggctagccctaatgtgagtgatcctcacagttctgacccctcctccacctctctcccctctgctcctcttccctggtttgggactcagattcacattgaaccttttttaactggcagggcaagcctctgtg

SEQ ID NO: 208079 - DNA, 167 bp, Homo sapiens
cctgggtggtgaggagctagttttcaaatccttctaagacttgtattttgagctgtgtatgtgcaccccaatttttggttgtatcagacattttcccatatgtatttgtcataagtgaaaaataaaataaaaaattaaaaaaggtttgagccctggcgtgagaatct

SEQ ID NO: 208080 - DNA, 107 bp, Homo sapiens
tgcccttctgactgaatttgtagtgcatttttcttgtggaaagagcttgagtggagattctttgtttagtaccaacaatattaagacttgttggtgctctgtattga

SEQ ID NO: 208081 - DNA, 322 bp, Homo sapiens
taaggactgaggacagcacccaagatactcatgagggttccgctcccgacccaaacacctatttggccccacctccaccatgagggtcacatttcaacatgagatctggagaggcccaacagcaaaccacagcacgtgccttccctctgtggtgctctaccagcttgaggcgaggcaccgggtgcagcccatacatgggggtgaataccagggggtggggaccactgggggtcagttcagaagctgcctgccacagtacctcatggtttttttttttttgtatttcagaatcccaataaaaataacaagtatcttcattttt

SEQ ID NO: 208082 - DNA, 458 bp, Homo sapiens
tctggaaagcaatgtggcaatatacatattaggtgccgtacaagcatgtgttccctttggcacggtaatttccctttcaacaatatatccggagcaaaaaatcagaagtacatcaaagacttgtgcacaacaatggttatcacagaaaatttgtaaagtgaaaaactagaaataaaattataaaaaagattcaaaaaataacagcaatgttatggtaaagtaaaactgatgttggccaggcgtgatggctcacacccgtaatcccaacacttcgggaagccaaagagggaggatcatttgagcccaggagttcaagaccagcctagcaacatagcaagacccccatctctactaaaaatacaaacattagccaggtgtggtggtgggtgcctgtaatcccagctactcgggaggcagagaatcacttgaacccaaaaggcagacaggtgcggcgtaga

SEQ ID NO: 208083 - DNA, 742 bp, Homo sapiens
  misc_feature (599)..(599): n is a, c, g, or t
  misc_feature (602)..(602): n is a, c, g, or t
  misc_feature (625)..(625): n is a, c, g, or t
  misc_feature (665)..(665): n is a, c, g, or t
  misc_feature (711)..(711): n is a, c, g, or t
  misc_feature (715)..(716): n is a, c, g, or t
  misc_feature (742)..(742): n is a, c, g, or t
ccgattatcctatagatcagtgtactttgtaatctccccaccttaagaaggttctttgtgatctcccccacccttaagaaggttctttgtaattctccccacccttgagaatgtactttgtgagatccaccccctgcccgcaaaacattgctcctaactccaccgcctaccccaaaacctataagaactaatgataatcccaccaccctttgctgactctcttttcggacttagcccgcctgcacccaggtgaaataaacagccttgttgctcacacaaagcctatttggtggtctcctcacatggacgtgcatgacattgggtgctgaaacccgggacaggaggactccttcgggagaccagtccccttcccctgtcctcgccctcactccttgaggagatccacctgcaacctcgggtcctcagaccaaccagcccaaggaacatctcatgaatttcaaattggctgaagactgatgctgcccgattgccttggaagcccccctagaccatcacagatgccgagcttcgggaactctcacagtggaggacaggaatgtcaggcctctgagcccaagctaagccatcatatcccctgnganctgcacgtatacatccagatggnctgaagcaactgaagatccacaaaagaaatgaaatagccntaatgatgacttcacattgtgattgttctgcccacctaatgactanaggnngggggatcctaaatcacctgagatgn

SEQ ID NO: 208084 - DNA, 776 bp, Homo sapiens
  misc_feature (633)..(633): n is a, c, g, or t
  misc_feature (636)..(636): n is a, c, g, or t
  misc_feature (659)..(659): n is a, c, g, or t
  misc_feature (699)..(699): n is a, c, g, or t
  misc_feature (745)..(745): n is a, c, g, or t
  misc_feature (749)..(750): n is a, c, g, or t
  misc_feature (776)..(776): n is a, c, g, or t
ccgattatcctatagatcagtgtactttgtaatctccccaccttaagaaggttctttgtgatctcccccacccttaagaaggttctttgtaattctccccacccttgagaatgtactttgtgagatccaccccctgcccgcaaaacattgctcctaactccaccgcctaccccaaaacctataagaactaatgataatcccaccaccctttgctgactctcttttcggacttagcccgcctgcacccaggtgaaataaacagccttgttgctcacacaaagcctatttggtggtctcctcacatggacgtgcatgacattgggtgctgaaacccgggacaggaggactccttcgggagaccagtccccttcccctgtcctcgccctcactccttgaggagatccacctgcaacctcgggtcctcagaccaaccagcccaaggaacatctcatgaatttcaaattggactgattccttcccagatcttcttgacttagcagctgaagactgatgctgcccgattgccttggaagcccccctagaccatcacagatgccgagcttcgggaactctcacagtggaggacaggaatgtcaggcctctgagcccaagctaagccatcatatcccctgnganctgcacgtatacatccagatggnctgaagcaactgaagatccacaaaagaaatgaaatagccntaatgatgacttcacattgtgattgttctgcccacctaatgactanaggnngggggatcctaaatcacctgagatgn

SEQ ID NO: 208085 - DNA, 658 bp, Homo sapiens
  misc_feature (515)..(515): n is a, c, g, or t
  misc_feature (518)..(518): n is a, c, g, or t
  misc_feature (541)..(541): n is a, c, g, or t
  misc_feature (581)..(581): n is a, c, g, or t
  misc_feature (627)..(627): n is a, c, g, or t
  misc_feature (631)..(632): n is a, c, g, or t
  misc_feature (658)..(658): n is a, c, g, or t
ccgattatcctatagatcagtgtactttgtaatctccccaccttaagaaggttctttgtgatctcccccacccttaagaaggttctttgtaattctccccacccttgagaatgtactttgtgagatccaccccctgcccgcaaaacattgctcctaactccaccgcctaccccaaaacctataagaactaatgataatcccaccaccctttgctgactctcttttcggacttagcccgcctgcacccaggtgaaataaacagccttgttgctcacacaaagcctatttggtggtctcctcacatggacgtgcatgacattgggtgctgaaacccgggacaggaggactccttcgggagaccagtccccttcccctgtcctcgccctcactccttgaggagatccacctgcaacctcgggtcctcagaccaaccagcccaaggaacatctcatgaatttcaaattggacaggaatgtcaggcctctgagcccaagctaagccatcatatcccctgnganctgcacgtatacatccagatggnctgaagcaactgaagatccacaaaagaaatgaaatagccntaatgatgacttcacattgtgattgttctgcccacctaatgactanaggnngggggatcctaaatcacctgagatgn

SEQ ID NO: 208086 - DNA, 985 bp, Homo sapiens
tgaggtggctcaagcctgtaattcccagcactttgcgaggctgaggcagaggatcgcttgagttcgggagtttgagaccagcctgagcaacaaagtcagaccccatctctataaaaagtgttaaaaatagctgggtgtggtggtgcgtgcctgcagtcccagctactaaggagctgaggcaggaggatggcttgggcccgggagttcaaggttacagtgagctatgatcgtgccattgtactccaatccgggtgacagagcacgaacctatctctaaaaaaacaaacaaaaaaagcatgataatttcatcctatgttaaaaaataaagaatgctaatgtctggcaccacatgatgtatgcattccttatcaaaaaagcattatcttgcatgccatagaaatataattgtaagtaagaaacactataccattattgctgtagaaagaaaatcagtatttttttttctttctactcctgtagaaactaaattaaatgaaatccagttgcatactatttatgggcagaaatcgttgctcatcctggtaagcaagctagtttggagggttttcctcttgtaattatggctgtcatttctcgtggtcttaaatccagttggatctaagaagtgtgggtgagcgcctgggagctccacagtgctccaagattcttaatgtgtcaacgaatggaaacctctcacagtcaggattcaacatctctaaaagaggccataccctttctttctactctgttaagctcactttcgacacctaataatttcatctagtcaaaatgtgcaatagtttttgttcaaatttacttcttctaatagtatctgtaattctgttgacatgacagatgtataaatgattctgccagtaaataatttcattcctagcgtacgtgttgacattccatttaagtccaacaatccatttaagggggtttgagacttctttcttgagaattattagaggaaatgaataag

SEQ ID NO: 208087 - DNA, 245 bp, Homo sapiens
tctccactggaggcatatctcctctggaggctgtataagtaggggctaggctgggctgacatccgtgtaaggatgggtttccatgtgccagcttctttcaacaacaaggaaaagatccttattgttcgcttaatgcaagatttggctcactcctgtccagcacttagtagaggccaaactagttgtcattcttgaaagactcttgagagtttctaatgaagacatctaagtaaactgttatgttg

SEQ ID NO: 208088 - DNA, 350 bp, Homo sapiens
atggtggaatgtcatcagttaaggtggggcagggccttttcacttcttttgtgattcttcagttacttcaggccatctgggcgtatacgtacaagtcacaggggatgcgatggcttggcttgggctcagaggcctgacacaaggattgttcatctttgtttactgactttggcaaagatctatattatctttaaagcgaaacctaaatgaagaatgcttttgatcttaagatattgttaggttttgaagggaagacgagagttaaagaatgacacacaggtcgggcgctgtggctcacgcctgtaatcccagcactttgggaggccgaggcgggtgcatcacctgaggtc

SEQ ID NO: 208089 - DNA, 331 bp, Homo sapiens
ctggcttttttccttgtcttttatttctcaagcgctggtaatatacaaggccctataaaaacatgtacttggtgcaatcccacataacagtgaacctgagatggcccatctgatgtttttacatgggagccccagatttagggaggccactaagctgaagtagatgtcagggagagagaggattcaccacatttatgtattcacgctgcagaccgagctgggcgttctctgcggccagtctgaaatggcacataatgacagtcctcctccttgtcaccaaaacaatcggtggttcacatgactgacttggggtgacagcagagggaagggt

SEQ ID NO: 208090 - DNA, 728 bp, Homo sapiens
agtaaaaaaaggaccagaggctgcagatgggaaatctgtctgcaacaaatcagactgagtaccagtggagtcttcgtttgcaactttgtgacttagctccagcctctgaatggttgccgtccacaatcaaccagactgattgcaggcttagtcagtcttcatttgcacagaagtataactttgtaacttcaccgtagcctctgattggttgcctttaccaatcagatgtttgcacaggagtgtgacctttgtaacttcagcctctggttggctgctttctgcaaccaatcagactgattgagggctaccacttcatttacatgaagtatgcatgaagtggccaatgggaaacttctggggggtatttggaccaaagaagattctgtattgggggctcttgagtagctgctcaggctgctcccacactgtggagtgtacttttgttttcaatacatccctgctttccttcttttgttgcttcattctttctttgctttgctgggcgttttgttcaactctgttcaaaacgccaggaatctggacaacttgcagttacgaccttctactggtgacagaatgtttcaaagcttgattttggtgatggattcagaactccgtaaatttactaaacattgtgcacatgaaatggggaaattttatggtgtgtaaactatatctcaatacgtctgttaaaggaaaaaaaagtaaaactcgcctttgccagttat

SEQ ID NO: 208091 - DNA, 311 bp, Homo sapiens
aaattaccatttcaatcttactgcttgttatttgtctgttaagagtctctctttatttctggtctaatctaggagggttatatgtttccaggaatttatccatctcctctaggtgttctagtttgtgcacataaaggtgttcatagtaacctttaattatcttttgtacttctgtggtttcggttgacatatctcctgtttcatttctaattgagctatttggatcttctctcttcttttcttggttaatcttgctaatggtctatcagttttatttatcttttcaaagaaccagtttttgttttatttac

SEQ ID NO: 208092 - DNA, 134 bp, Homo sapiens
gagtttggccggggcagttggaagagagccggggctgccgagtggcccaactccaggggaaaaccatctccctgctggctcccccatctgctgaaagctacccccactcaataaaacctcacactcattctcca

SEQ ID NO: 208093 - DNA, 632 bp, Homo sapiens
ttggactgctgttctgttattctctagggaaatggtgtgattcctgcttggaaaactggcagctgatgcaattgtgggctcttgacttagcttagctaacctttctctataggaagctgggctgttagctctattcatggattcattcaacaaacactccatcgatatttattatgtatcaggtactgtgctagggtgagacagtgccaatagcacatggcttgttaagacaacttttccaaaacttggaaatgaagcaaaaggatgactgcaagtttatcacttagtattggggcacaggcctgccccaaagtatttaattctgtaggagcatgtatcttcacttggcttattatttcctattgattagggcccagactaaaagttacatgttaacttatagattttcattctgtagatatagaaatgtttttgtctagtagaaacaataactcagtgctaactgttttatggctctacaggacattaatcagtcttatttatgtttacacacttacttcatcatcattttccccactaactttataaacatctgtttctcaaatgctctgagatgtcattagcatcttccttttctttcattcatttagttaagtagttgacatgtgctt

SEQ ID NO: 208094 - DNA, 261 bp, Homo sapiens
tgaggtgttcaagggtaatgtttttatttctttatctcccaaagcatctagaacataagtatgtggttagaaaatatctgaccatttttggccgggcgcagtggctcacgcctgtaatcccagcactttgggaggccgaggcgggtggatcacgaggtcaggagattgagaccatcctggctaacacggtgaaacccccatctctactaaaaatacaaaaaattagccgggcgtggtggcgggcgcctgtagtcccagcta

SEQ ID NO: 208095 - DNA, 219 bp, Homo sapiens
ttactcctctttgttactaggaggcatcagagatacatattttgttgattatagttataaaaatgcgataatcttgaatatgaataaatttgcttccttgttcaaggggctacctcttggatgaaatagctatttcatgaaacttctttcgagaataacatggtcctcccaaaaagtctattttagaaacaaaaatgatgttgaattctaactaactcc

SEQ ID NO: 208096 - DNA, 176 bp, Homo sapiens
accaagccctgtactaagcaataaagattttatatttaaggaatttatagactaatgcaaggcaaaagcatttcaaccaaactacaaggcatcataactgccacaataggggttcattcgagattctatggatggagacactggctgctccaaatgttcatggtaagtgagtactg

SEQ ID NO: 208097 - DNA, 766 bp, Homo sapiens
ttggtttccttttattacatcactcactgctgtagattttatgtatatttcacttaatcgtcataataacctcgtgaggtaagttgtgttttctaattttacatggggtttgaagagataatttgtacaaagttagtatatggcaaactgggatttgcattcctgtctgtttgactccaaagccactgtttagactgtgtcttttaacccactttctatcatcagtcctaactggttcttcctgctggggcttcatctttttgttcttgaatctgattttatagtttgttttctctttcctaaattaaacagacatcctagttctctctctttctctttcatccccactttctttctcttttcccttcttgctctgtctccttcctattgcactgactcatgcatgtgcacttattatttggtgctaagaaattcttattacttgttatcttccattgaaatgcttatagaaacctgcccttggctcaccctgaagttttaggtagttctctttgactcttgtttttatgttgttaatggagaaattactagatctggggttataaagaggaaagaattaaaaagaaataagaaaatagtcatgaatggccccaactaacactagtctttaaaagacactcttcctatcttcagtctgtaagtggttgctgtcaagaagggaaagtctatctccctaatgatccttgcttctttgtctgtatttcaggattggagacttggtttcctgggtttcttttcaaactta

SEQ ID NO: 208098 - DNA, 715 bp, Homo sapiens
tagaaactcaaataaaagcaattgagaactttaaactaaatttgttgcaattttgtcttttgacacataggattttcctcctgacacttatagacaattgtagaataaatggcctccctctgcctccattttctatttccattcattttcagtgttcttagctttttctttctacatgcccaccacttagatttcattgttcttccatctgaaagctttgcttatggccttttctatcattttctcttctaccttaacttctagagttattatgttacctaggacaagagatatgacttctcactgcctcagttcctcatctgtaaatggtgctgtgtagcagggcctgctgtaagggctaaggggtaatgcacacaaagtgcttggcacaatgctacacacagtaggtgctcaaaatgtgatagcaagctgggcacgatggctcacgcctgtaattccagcactttgggaggccagggagggcagatcacttgaggtcaggagttcaagaccagcctgggcaatatggtgaaaccccatctccactaaaataacaaaaaattagccagacatggtggcgtgcacttgtactcccagctactcaggaggctgaggcagaagaatcacttgaacctgggaggcggaggctacagtgagccaagatcatgccactgcactccagcctgggcaacagagcgagactctatcttaaatt

SEQ ID NO: 208099 - DNA, 655 bp, Homo sapiens
tagaaactcaaataaaagcaattgagaactttaaactaaatttgttgcaattttgtcttttgacacataggattttcctcctgacacttatagacaattgtagaataaatggcctccctctgcctccattttctatttccattcattttcagtgttcttagctttttctttctacatgcccaccacttagatttcattgttcttccatctgaaagctttgcttatggccttttctatcattttctcttctaccttaacttctagagttattatgttacctaggacaagagatatgacttctcactgcctcagttcctcatctgtaaatggtgctgtgtagcagggcctgctgtaagggctaaggggtaatgcacacaaagtgcttggcacaatgctacacacagtaggtgctcaaaatgtgatagcaagctgggcacgatggctcacgcctgtaattccagcactttgggaggccagggagggcagatcacttgaggtcaggagttcaagaccagcctgggcaatatggtgaaaccccatctccactaaaataacaaaaaattagccagaccatcatggcatgccagcctgtaatcctggcactatgggagactgaggttaggagaattgcttgaaaccaggagccgcgaggttg

SEQ ID NO: 208100 - DNA, 332 bp, Homo sapiens
tcatgaccagattgggagagccagcacctaacatatgtgggataggactgaattattaagcatgatattgtctgatgacccaaactgcccatgtcatttgtttccagaaacgaggaccaataattctctcacactggcatttgtggtggtagaacaagtcctttaatatgtccaggaagggagccattgcccagtggtccatatatcgtacggcatcccccgtttaagcccaaggtaggagtcccgtcctaaattctttagcctctaggagcctaaatttccttatctgcaaaatggagattaataaaacttaccttgcaggacctttgtga

SEQ ID NO: 208101 - DNA, 264 bp, Homo sapiens
gctgaggcatgagaatcgcttgagcctggaaggtggaggcttcagtgagccgagagcatgccactgcactccagcctaagcgacagagccagattcgtccccctaccccccaaaaaggggtcatggttcagacctccattgtaggcccacccccttgctttactagctgagggaccttgcctaaattctttagcctctaggagcctaaatttccttatctgcaaaatggagattaataaaacttaccttgcaggacctttgtga

SEQ ID NO: 208102 - DNA, 747 bp, Homo sapiens
gatttcataaaatttccagctgaaaaaatagattcacgtacccaagtcgttccaagcatacttaaaagttttacggtaatcgaatcgtgtatatttttaaattttattttaaattaaagttaggattatgaattcagttcctaaattagcctcatttcacttctgcatttcaagtgggacaagttattaccatattggacaatgcagtctagtgaagtagaggatagtggaaagtcagacttaaaaagttgtttagaaccagctctggaaggccttggatgtcagattaaaggactgagattttacccttgagtcaggcagaataatggatggtttttgaactaaggagtgacacaaggttgtgcttatgactagaaggaggccactaggtggccagctggtgagtcaggacacccttcagttgctttgacttcagccctgtggattcaaagtctgatttttgtcagcgctctagagcagtctcaccaaaagtgtggtccacaaggcagtgccagtctgtaagccctttgttacacatccatgtcaaggcatttacagaaagtaagaatttagaaacttatagcagtttaacagactaattttatttctgtgggtctaataaaaatttgagggattgtactttgcatattctttatttccctttttttgtttgttttttgtgttcgagatgggagtctttttctgcactccagcctgggcgacaaagcaagactccatctcaaaaaa

SEQ ID NO: 208103 - DNA, 1005 bp, Homo sapiens
gatttcataaaatttccagctgaaaaaatagattcacgtacccaagtcgttccaagcatacttaaaagttttacggtaatcgaatcgtgtatatttttaaattttattttaaattaaagttaggattatgaattcagttcctaaattagcctcatttcacttctgcatttcaagtgggacaagttattaccatattggacaatgcagtctagtgaagtagaggatagtggaaagtcagacttaaaaagttgtttagaaccagctctggaaggccttggatgtcagattaaaggactgagattttacccttgagtcaggcagaataatggatggtttttgaactaaggagtgacacaaggttgtgcttatgactagaaggaggccactaggtggccagctggtgagtcaggacacccttcagttgctttgacttcagccctgtggattcaaagtctgatttttgtcagcgctctagagcagtctcaccaaaagtgtggtccacaaggcagtgccagtctgtaagccctttgttacacatccatgtcaaggcatttacagaaagtaagaatttagaaacttatagcagtttaacagactaattttatttctgtgggtctaataaaaatttgagggattgtactttgcatattctttatttccctttttttgtttgttttttgtgttcgagatgggagtctttttctgtcgccaggctggagtgcagtggtgcagtctcggctcactgcaacctctgcctcctgggttcaagcgattctcctgcctcagcctcccaaatagctgggattacaggtgtgcaccaccacatccagctaatttttgtattttcagtagagacggggtttcaccatgttggccaggatggtcttcattgcctgaccttgtgatccgcctgcctcagcctcccaaagtgctgggattacaggcgtaagccaccgtgcccggcccttttttcctttttagtttatttttttcttttttgagaca

SEQ ID NO: 208104 - DNA, 425 bp, Homo sapiens
ccaggagttttaggctacggtgagccatcatcacaccactgtactcctgtactctagcctgggcagcctcgttctttagagtaagacactgtctctttaaaaaaaaaaaaaaagaaaaaagaaaaaaagaaaaggcttttagtgaatatatttttagggtagcaagtgtaatttttataaattgcattatttgaatctaataaataccctcaaagctgaagtcgaattctgattttgattgaaaatattttttacttaaaggaagagggatagaataaatgacacgattaaggaaaagacttcttgtataaggccggggttttttaaatgattttttgaatagttagatggacaatacggaattaaaaaggtggtgtaaaaagttatacggggctgggcacagtgactcacgcctgcaatcccag

SEQ ID NO: 208105 - DNA, 388 bp, Homo sapiens
ccaggagttttaggctacggtgagccatcatcacaccactgtactcctgtactctagcctgggcagcctcgttctttagagtaagacactgtctctttaaaaaaaaaaaaaaagaaaaaagaaaaaaagaaaaggcttttagtgaatatatttttagggtagcaagtgtaatttttataaattgcattatttgaatctaataaataccctcaaagctgaagtcgaattctgattttgattgaaaatattttttacttaaaggaagagggatagaataaatgacacgattaaggaaaagacttcttgtataaggccggggttttttaaatgatttttgcaagttagttgataccgcaatacaagccagagtacgatcactgccgtcgta

SEQ ID NO: 208106 - DNA, 253 bp, Homo sapiens
agctttcttgatttccttgaaagccatgtcctgttcttttccccaaaggaggggctctttttctcccactttggttgcctcatataaaggctttgctaggagcgagtagttaggaatccatatgtggcaaaaagcagctgcccctaggaattcccacacttgccaccttgtgtctggctgaggaatgctacagacaatctcttttcactcctgtccaagctcacactgcccttgggagacataaaagccaaga

SEQ ID NO: 208107 - DNA, 279 bp, Homo sapiens
gtagacgagtcagaaaataaagtggaggagatatttcatcaaatactccagactgtgcctggaatagctacattctcatctaggccacaagctgttcaaggaggaaaagctttaatgtgggttctttgtcctttgagcaaaaaggaagagaaggcatatcgagaaactcaagagacccaggaaagagaccctttgaacaaagaccatggaaatgataaggaatcaaatgttctgcatcagtaattttaatacggaaaaatatgcctctgagagaaagta

SEQ ID NO: 208108 - DNA, 217 bp, Homo sapiens
tgatagaaaaattgagtgtttttcccccaaaatatcagggtgggggattaatttttaagattctttctcattgtgtcacttttattttgttatgataatttccacttgatttctttttccattttcttttttcccattgccaaaaatagtttattaaagttaaagagctgtggaaatggacttcttggcaatagattgacaaagaatttttaaaaag

SEQ ID NO: 208109 - DNA, 344 bp, Homo sapiens
ctggggagggtgtacatatatataaaatgtaatatagaacagatacatattttgtgtgtcaatatatatacacagatacatttggccttcttctgataagatcttttaaagataagctaatatgtgtgaaagaaaagctaatgcttgtgtttgctccagagaatattaggacatttgtttttttctcctactatgtttgctatagtttctctatgactctcatgttcattaagaaatgaaagaaatggtatctctgggtatttctgcaggatcataaatctagaagtcatgtgttgaaaaagacttatttctcaaagtagaagcatgagtaccttaaccttatt

SEQ ID NO: 208110 - DNA, 412 bp, Homo sapiens
ctttctcttcacgtagactttgtcaagaggtgccattttttaatttaacctccttctttaaccaccatggattggcctcatttggcctaagccagtccaagtcaagaggtttgatttaggaactagaacccaaagtctggagtgaatctttctctctagtgaataaaactctaagacatcaaactttagaactatcaacagccatgtttgccatcacagatgtggaggaacagatgcagttcatctgccaaaaagagtcctggtctgatggcatttgaatcctgacctcccactgttcctgaagaccaagcaggcacacttctgcccttggattttataccccagtatcctcaaaattctcattttgttcaagttaatgagcattgggtacttttatcacttgtgaccaaga

SEQ ID NO: 208111 - DNA, 546 bp, Homo sapiens
ggattacatatatgtgccaccgcgcccagctgaatttgtatgtttcataaaaatctgaacaattactatttttctgtaccccttgctccctcttcccatttgcacatatattaggctgtctgatgctgtcacacagctcactgataactgtttttgaaaattattttgttctctgttttattttggataatatatatcgctgtcttcaagttcactgatctttccttctgcaatgtctaatttgccattcatctcatccactgttttttcaccttagtgattatatttttcatctttagaagtatgatttgggtctttacaaaatatcatccattggagttagagctgaaaaaaagaaaaaataaaaatatcatctctgcctcccaaagtgctgggattacaggcgtgagccactaagcccagcccaatctctgttttttaattaggatattcagactatttacatttgatgtgattattcatatagttaggattgagtctacaaaccctgcaacgtgttgtatattgcctcccggaatcctcgga

SEQ ID NO: 208112 - DNA, 165 bp, Homo sapiens
ttgtcctgtgaaggcattagaacctcctggaagatgccaaaatatctttgagtatagatgtctccaggatgttagtgccaaggctccagagaactctccactgcatcagcctttagcttgaatgcctgctgtcaactcccgtggacaccatcacagatcttagga

SEQ ID NO: 208113 - DNA, 337 bp, Homo sapiens
tcatttcaacatataaccaatgttattaacaagataacttacattctttctttcgtactaagttttcaaaatttggtgtttatacttggagcacatctcattaaggactgggagcatttaaagagctcaagagccacatgcaactagtgacgagagtatcggacagcgcagtcctagactctagagtaatgaatgagctctctagatgtccggggggtggtatcatgggtgtgtggtgtatgtaaaagaaactcttgaaattgctaactcaaatggctgcagaggctaggcaagtaacaataaaagatgacctgacatagggactaggacccactgg

SEQ ID NO: 208114 - DNA, 283 bp, Homo sapiens
cacattgtgtaccaagatatttggtttgtcaacagagacaaaagtattaaccaacaaacatactttatttacaaagtaaaagcatccaaatatgacttgacttggctttttggcagattgttctttgttcttgagttagtgttggcgacacataactatctttaggtatttgaagggttaatacaatggaaaattttaattttcttttgttaaaaataatgcttaaaattttttgaagtcttcatggtgtttttatgatgtgcctgggaaaatctcagatact

SEQ ID NO: 208115 - DNA, 384 bp, Homo sapiens
agggaggcagcaaatggttcaaaactaatctacaaaaaccattcccagtaaaatgaggaaggtttagtgggcacttagtcttatcttcacaatgtaggaattactgttaacactgattccatagtgtatagttcagcaataaaatctaggcaacattaagaaagaggccaggtgtgatagctcatccctataatctctgcactttgagaggccacggtgggcggatcacttgagcccaggaggcagacgttgcagtgatccaaggtcatgccattggactccagcctgggcgacacgagcaaaactccatctcaaaaaaaaaaagttgagtgtaggtggaatatacctgataaacatataatgcaaggccagtacctcacatgg

SEQ ID NO: 208116 - DNA, 293 bp, Homo sapiens
atttacacaaaaaataatgtttaaaataatactcaaggccaaagaaagttgatctcaggtgaaaagtctgcaatgagagaagaaatgaagatgaaaagaagtgcatcttttgattaaaataacagcatattacagtgtaaaacataagtagatatacttattgagttagaatgatggaattcccgtgcgtaacctcaactacatataaattgaaaggaggctagttgctcaaagttttaaattttttatatttccaagtggaaagcaaatgtattacaatcctgtatggcacg

SEQ ID NO: 208117 - DNA, 606 bp, Homo sapiens
cctctgttactactggttacccttttgttttcctaagccttcactcacacctttgtaaataatatattttaataaattttactccttgaattggcataattcgagtgtgtcttttcaggttgggagcttgactaataatggacaaataagattagcagagacaactattacggattaggattaaaaacctctgttacctagttctgtagattaaagtcaaagatgaatgtcttcaaactttgtgcaaaagaacttcacttggttatttttaatgtgtttggtctttcttgccctatgaggcctctaaaaacagtcatggcagtgaccagaaacaactgttaaaatcatcaactagcaaaaaaatccaagaaagaagggatcttcacagtttgaccccccgatttaataggcaaacttgtatctattccaaggctacatgatctctttgtgttgtctcactaccaaagatgatcaagattatcagtaggaacatgaggttattggcaataactagggctactgcctatctccacgcagggatgatttccagtggctgctgttccactgcattctccttgacagagtgggtattcattcctagcacgt

SEQ ID NO: 208118 - DNA, 229 bp, Homo sapiens
ccacagcaaacacgcagaccagaatatcccccatcggtttgtctaatatccaccactagagacactataaatccctacacatttcccacaaaacagacctgtgattagcaacatcacacctcacaggctcttagtgaatggactttccccgtgtggcaaagcgtgacatgatttaaacaaagtccctgatcgctagaaacagatgtttgtaatgtgcgcagcaggcaga

SEQ ID NO: 208119 - DNA, 201 bp, Homo sapiens
ctggtgttgggcagctgtgagacccctccttgccccatctctgtcttctaggctcttctgagaaccagtgtcctttgagatctcagatgggatttagaggagggttccacccagaccactttccacaaatttcacttctgcatttcatctggtagggtgtggttttcaactagaagcccaaatgaggaagaaaaaaattca

SEQ ID NO: 208120 - DNA, 215 bp, Homo sapiens
atttttcaggtggaggagggcaaataaggtttgcttcatttgtatgaccttgatttttttcctttgagtgggaagaaaggttatctactttgggcagatatgagagaactaagagtgtgaagaggtttggaacagctgctctgggggctgcaacagtcaacaaaggatgaacataagcatcgctgagcagcattaagattctgctaagtaggtgg

SEQ ID NO: 208121 - DNA, 377 bp, Homo sapiens
ggcatgatcatagctcactgcagcctttaactcctgatctcaagagatactcccacatcagcgctccagcagctgggactatacacgcaagcccagcaaatctgagattcttaagagttaagtactctcactacctgtacttcctcacacccactttatctaccaataaatatattgaaactctacattgaaactcctcttcaatgacttccttggtgctaaatccaaagaacataacatttatccttctactactcaacctactcttttatttcctctgtagactccacccttccccactattgacaatgatacaattagaaaattaccttttgtcaactattatttatttcaggctagactcatcagtgaatgct

SEQ ID NO: 208122 - DNA, 270 bp, Homo sapiens
gttttcaagacatattaaaaactacagtaatgaagacaatatcatattggaataaagatggacaagcaaattggaaatagattcttacatatggagtcgatttgggtcaaaggtgccagttcaatgggagaagtgatagtcttttaagcaaatagtattggaacaattggatagccatatagaaaaaaatgaactttaacccttatgtcacactattcataaaagaaaaaaaaaaaacacagatgatatacccaaacatagagctaaaat

SEQ ID NO: 208123 - DNA, 413 bp, Homo sapiens
ctcatcagctgctgaatggataaacaaaatgtggcatagccataacatggaatattattcagctctgaaaaggaatgaagtgctgacacatgctataacatggatgaaccatgaaaacattatgctaagtgaaaaacgccaggcacagaaggccacatagtgtatgattccatttatttgaaatgtccagaattgacaaattcgtagacacatgcattcaaggagtggttgctggctggtggggatggggaggcgtctgatgcatcattggatcagggtctctgggcgggaaccaactacctaccaggtaaagtgaggtcagctcctccccctttgctggtgagcccagtatcactgagtgacctgcctaggccctcagatagggcagagcagggctctgcttaaatggactg

SEQ ID NO: 208124 - DNA, 382 bp, Homo sapiens
ggccccagtcatacccccttcctgtttttgcctttcagagataaccaggggatgtgaattttttcaaattctcaagcatctcgttagacttttgctggatatatatagatccctaagcacgcaaaatattatttccgtattttatactagattactgcattttcttttgtaaacatttttcccgctcaatgttgtttaagttgtattctgagccatatcactgctctagttgaattcattttcactgctgtaatctcttgcatgaatggactacagtggtcccttttcctattgaaggacttttggttgctttccaatttcctgctatcatgaactatgctgctgtaagtgtaactgtacacctgatatttctctatatatt

SEQ ID NO: 208125 - DNA, 223 bp, Homo sapiens
catgcatttttataatttaaaatatttcatgttacacatgagcaatgttcagatttaagttttaagccaagtttactttttcctaagttgtatttatgccaaggctttcttacaaaaatatatcttatgtgtataaattggacaaacttacagtagtatttctaatgttcaatttgagatgggaaaacataaacctattctgaataaagatatttgtcaaggt

SEQ ID NO: 208126 - DNA, 449 bp, Homo sapiens
agatgaaagagtgattcgtttatggttaaagttggctcattgtttcatagcaactgttgtaatagccaccagccctcaaataattatgatgtacttacaactttataaatgatctgttacttcattgactcggcaactttgcaaggtaaacaatggaattcttcttcttatagaaataaagaaatggagcttgaggaaagtcaggtagcttgccacaagtcatatacctgaaaacgatcagggtggagagttcaacctctgttggtcttccttcctcaaaaagagccaaaaggcaaaaactatctattaatatgtttcctatatgttttcaaaatttcttatgttgtatgtaagcaatcaggaccacaacgtgaatagataatatcaaaatcaaacacaggagtgaatgtgcaaataaagggaaaaaaagtattctagaaaacaccagc

SEQ ID NO: 208127 - DNA, 473 bp, Homo sapiens
tagccaaaaggtggaaacaaccgaaatgtccatcaacagatgaacggatgaacagattgtggtatatacataaaactgagtatgtattcagccatgaaaaggaatgaagtactcatacacaatacaatgtagataaatctcaaaacactacgcgctaagtgaaagaagtcagacatgaaaggtcacatattgtacgattccatctaatgaaatatccaaaagaagtaaatctaaaaacacaaagcagatcggtggttgcaaaggactggcagaagagggcaaggggagtaactgcttaatgggtagcaggtttactttgggactagatacaggttgttatgggtgcacacattgtgaatgcagcaaacgccactcgagtgttcgcttaaaaatgattaattttgtcacgtgaatttcatatcaatttaaaaaaatctggctgggcgcagtggctcacacctgtaatcccaaca

SEQ ID NO: 208128 - DNA, 1175 bp, Homo sapiens
  misc_feature (1)..(1): n is a, c, g, or t
  misc_feature (3)..(3): n is a, c, g, or t
  misc_feature (1174)..(1174): n is a, c, g, or t
ngntagggcctgaacttcagctctcaaaaacctcttagcttcaagtttgttctcatagtcattaatggactctgcagggcagtgccgtattgtggggtgggggtgggggaggaattagtgtgatttttttcaggcagagagagcccctccattagtcacacagaccactgagaccctgcccgcccataagagtcataaagctgtttgcaccatgtcacatgtaaaatgaccatcatcaacaccaaagcaggaaaaggggtgaagccaaaagctgagcaggttggactggttatgtggctgatacatagtgtcttgccgctgccaagattttcatcccagctccttgatgctctgccaagatttcaaggtgaagatcccagcggaggaatgaggaactctgcacgataagttggagcatgcctgcagaggccacaggcagtgcggccatacccgcaaggctgagttggcagttttggggtgcaagaacaaacctcaacttctagcctgcaggactagcccaggctggagaatctgaaagccatgctgggagagatctaacccagaggcctttgatattggcttctagtcaagttcaagtccagtactttctcctccattcactgcagtagttcctgaggtctggcttccatcatgagatggggagtgaccaaagaaaatggcatctatactggcctcctgggggctgccacctgcagcaatctcccctagacacaaatgtgtagggcgcgtgcagcttctcaatcttcagacatacctccagggcaaaggaagggaaagaaaaaggaatgtctttcctagtcaaggaagtagaagtagagggttttgtgtgtgtgtgcttccttttttaaatcttcattgattcatgtaatgaaaagcaaaggagtctctagcccagaggttctcaactacaggcaaatttgtccctcagggccatctggcaatatctggagacatttttgattgatgaaagtggatacggcatgttatgaatccagtcggtagaggtcagggaggctactgaacatccaaaatgggccaggtgcagtggctcacacctgtaatcccagcactttgggggaggctgaggcgggaggatcacttgaggccaggatttcaagaacagccggagccacacagcaagaccctatttctnc

SEQ ID NO: 208129 - DNA, 496 bp, Homo sapiens
aggtgatccaccagcctcagcctcccagagtgctggaattacaggcgtgagccactggacctggcccataatagagctttataaataagaagactcaccctatcctcactgccaagaccatgcccttaggattaattggggggaaaaacatgcaaacgtggaatatctttacatccacaaagacctgccatttgttagacattggcttttgcaggagtgaattagatttttggctccaggtttctgtcaggagtcttagttaatatctaggtctgtgtctgcatgggtctttagataaagtagtcactcagttactcttatcataataccatgtttcgacttttggcttcgtgcttatttccatctgttatttccttatttgctatttattcctttcttgtctcatattccccatgagaacagagacctcactgtcttgctcaccatcaaatacccatggaagacacatatttaatatttgttgataaaagtatcc

SEQ ID NO: 208130 - DNA, 691 bp, Homo sapiens
aaaaaacaaacctttgaatcaatgtgtaaacattctgcaattctaccttatattctaccctcacacttcctagtattaatatgaactgtatgtttggaaacatttgtgccctgtcaaatggtgttgacattcttaactctggtcgtaggtccttttaggaatgtctgtagccttttgattggaatggagtggctaaaataagacaaaaatctctaatagtttttgaatgataaattactacctcgttactttgtatagactggaatctgcacagaaatgtgtattcatcagcccttattttttgtaaatcttttctctaattacttgatgattaatttcatatttttccttttgaacattacatgctgcttattactaagatttttttctccagatgacctattctacctgttagttcaccaagtcagtcatatgttgccggttgccaagtggcaaaattatcacagatatcaaactcagaaaatgtcaggtaacaacagcagtaactgctttccaacctgcagtggtggactgggagtgggaagtgaaagttctgttcacaattgtatcagtaactgttttgggaaaaataatattttttcaagttatgctatcaacagtactaaattgttaggatagtaattttccatggcattgtttagaacctattttatgcccaattttgagatct

SEQ ID NO: 208131 - DNA, 324 bp, Homo sapiens
attaaaaaaaaattaggcatggtggcatacacctgtaatcccagctgcttgggtggctcaggcacaagaacttgaacccaggaagtggaggttacagtgggctaaggtcacaccactggactctggcctgagcaacagagcgagactctgtctcaaaaaaacacaaaaaaagttgggcgtggtggtacctgcttttagtcctagttatttggaggctaaggtgtgaggcaggaggattgcttgagcccaggagtttgaggctgcattgagctatgatgataccactgcatttcagctaggataacagagtgagaccctgtcgag

SEQ ID NO: 208132 - DNA, 459 bp, Homo sapiens
  misc_feature (398)..(398): n is a, c, g, or t
cagtaccggctttgaataccaggttaaataccaggatggacaaatgaatgaatcctcccaccatggttaacgttagtcaagccttagttgaggccttgtaaccatgtatagagactctgaagcttaggattaagaacactggggagtgggctaactgcccattgtgtggccagcactataccaggactgggtgaggtgaagaaagatagcaaaaaaaacccccacgatacatagttcctcactacaaagaatctttactatagctggggagatgagacttatagaagaatattgagagaacactctgagcaaagatataatcaggtatgcagttgtatgctatgaggtaaaatgtggattgagaaaaagtacgtggtaatatctgtgggcctgactcnatcagagaatgtttcatgaaggaggtcagacttgagttggcctctgaagaatagctgtgat

SEQ ID NO: 208133 - DNA, 740 bp, Homo sapiens
gattgctgcggtcgttctagaggatccctttcttgccacgactcgtgtacagaggagtcccaagtaagaactaaacccgttctcctggaagatgataacaggttgacctatttgtacccatctgggctgtctggagaattggaccaatgacaatccccagcagcaatccttgattggcataactggaaaaccagaaactggtactcattatgagattttctgttagcaacacactaactcattcattctgtagccacgaaagatgtggttgtactcctggtattaacactacatacaatgaatccaagggtgaggtattaagtgtatttctaacataattagaaaatccctattccttttctttttggagtaatgcttctccctcttttcaaaggttgaaatttccttggaccccaacaagtgtgtctggaatacagtattctggagaagaggtaaaactgagcaaggttaactcttagccatgaggaaaagctatgctccccgtttccatggaaacagatgttagactaacaataacgtgaatgaactattttgagtagtcatttgaaggcttgctagctcaggaattcaggggagtcagctagccctataccctgcttagatctgtatctatagacacatacaaagcaaggcatctctgcaatacgaacacagcaatcaacataagaagtcagttcttgctgcccctgtagcccactggcctccttgatgtgctgtga

SEQ ID NO: 208134 - DNA, 756 bp, Homo sapiens
tcccccgggctgcaggaattggcacgagggttgtgttatagagacagggtcttgctctgccacccaggctggagtgcagttgaagcaggatattcctctgaccccttcgtgggtcttgcggctgcggtgcctcacttacttagcccacggctctcaactcctcgcgggagggggggcgcgagtgaatgaggcgggaactggagtgctggaagccacgaactccagtcacccaggcctgctgcgctccaccctttatgggagggtgcgtgggggtgagcagatgctggagccggagcgagcgcttttggtcgccggtaggagcgaactccatgcaggccctgcggctgtgtctaggggatgcccgcgacccctgaagacccacagcctgtcttacaacctgtcatggttgtgaaaagttttgagagaacgtctgcacagtgtctaacggtgtctggtatatagtgtgcactcaaatggtaaccagtttagttgcgatagttggtctacccctccaggtgttaacctctgcagctccgtttcccttctagaccctatttctgggccatcgactcccaccaattaggcaggaaaatactgtttgcctccatctggcccaaggctgtattcctggagtttatgtgagaacctaactcctttctcagctccaactgtaaccctctccccaccttcacaccaaaatcatttacattaccctgggtaccacaattgcgtggtggtgcatccccgtctctttct

SEQ ID NO: 208135 - DNA, 688 bp, Homo sapiens
tcccccgggctgcaggaattggcacgagggttgtgttatagagacagggtcttgctctgccacccaggctggagtgcagttgaagcaggatattcctctgaccccttcgtgggtcttgcggctgcggtgcctcacttacttagcccacggctctcaactcctcgcgggagggggggcgcgagtgaatgaggcgggaactggagtgctggaagccacgaactccagtcacccaggcctgctgcgctccaccctttatgggagggtgcgtgggggtgagcagatgctggagccggagcgagcgcttttggtcgccggtaggagcgaactccatgcaggccctgcggctgtgtctaggggatgcccgcgacccctgaagacccacagcctgtcttacaacctgtcatggttgtgaaaagttttgagagaacgtctgcacagtgtctaacggtgttaacctctgcagctccgtttcccttctagaccctatttctgggccatcgactcccaccaattaggcaggaaaatactgtttgcctccatctggcccaaggctgtattcctggagtttatgtgagaacctaactcctttctcagctccaactgtaaccctctccccaccttcacaccaaaatcatttacattaccctgggtaccacaattgcgtggtggtgcatccccgtctctttct

SEQ ID NO: 208136 - DNA, 185 bp, Homo sapiens
ggggaattccagttaaaggaacaactggagcacaagcttggtgctagaaaaagaaggaagtgtgtagctacaattcatgaaagatgggcaaaaggggagtattagaatataaaactggaaagtatttcctggggaaagccagataagcaggaccttgaatgcaaagctaaatcatttgaattata

SEQ ID NO: 208137 - DNA, 240 bp, Homo sapiens
atcttccgtgcccattgcagggacagttaaaaatttgttgcaagagcgccttgcctctagcccgaactatgaatttttcctgcagatactgagatgatcatatttttctctgttaaccagggaatatggtgcattacatgaaaagattttctgctgttgaaatgcccttgccttcctgggataatcaattgcatttattttctttcttttttttttgttttgttttttgagacagagtct

SEQ ID NO: 208138 - DNA, 132 bp, Homo sapiens
tggtgaaaatagacttgggcataatgcattaaagcctggcagcacttagtcatatcagagcttaggaggagaagatgtgtgaggttttattattaggagcataggccttcagtgactattgcataagggatc

SEQ ID NO: 208139 - DNA, 300 bp, Homo sapiens
tttctccatgttgatcaggctggtctcgaactcctgaactcaggtgatccgcccacctcagcctcccaaagtgctgggattacaggtgtgagccaccacacctggccctcaatttctttttaagagattttatctccatctttggttttcattaactgtgcatggatagcttccagatcttagctacagttgaatgtgtcttacaagctttagctgtgcattgtacatttctactctaccaagatctctcataagcctctcaaattcaaaatgttcaaagttaatttatctctggtcctc

SEQ ID NO: 208140 - DNA, 407 bp, Homo sapiens
tatttgtgggatgaatgaatcagtgaatgaatgaatatatatacctttaggatctcccagtaacttgaaacctttaggcaagaaggggaagaccctagtagagctctggtctctctccagccctcagtccctctttcctccttactgcctcaccctcttctcaggtccagtccagccctattccaccagaaaccatacctaagctgagaagcagtgcaacaggtgcttgatgccaggatgttacaattcccaggccactaggtacagaattctgcagggtgctaatttttaaatttagcatcctgatatctcacaaacagaagaggtcagagaaaggttaggactaaatatactacttaacctagataacagtactgattcagaaacagtagctcatttgctctgag

SEQ ID NO: 208141 - DNA, 574 bp, Homo sapiens
ttccagtccagaagaaaaaacagtagccacttatacaactataatacaaagcggtgtgtataaattaaatccttaggagatatataaagtagtagaagagttaaaaggagggagatattactttcgggggagattcaaaaaagactttaaagaaattagaaaatggcatttaaataagatttagacggcagaaatgtaggtagaggcattccaggaaaagatatagatgggaaagatgtcacagagaatgtaatgtaagtactctggattgcctggagggaggggttcagataaaggcagtgtgagaaataatgaaatgataaattggatgagattacagacaaatctgaatgctggacaaagtggtctatattttcttgagtaatgtggaaccacagaacagacatatggtatatattctgaacagaggtatggtttctattcacagctatgctttagaaaaattaatatggcagagactggagcccaaaagagaaattacaaggcaatcataatagtccagagtatttagagtggtcacagtgagaatgcaagattgattatttaatttggg

SEQ ID NO: 208142 - DNA, 150 bp, Homo sapiens
cataccaatgatcctgagagtttttttctttgccccacacaaatcctaaccggaggttgcaaactggcagcttatactttaaatattttatctgcttgctttattgtctggtttaatcagaatactatatataatgaaatcagaatatcg

SEQ ID NO: 208143 - DNA, 1001 bp, Homo sapiens
ggaggaaatgatggagacactgcatggaactaaaaatacatactgatttgttcatagtaggaatataaaaaacacttgaagaattaaaaatacttcataagtacaccttcataagtacgatatatacacaaggtatatattgtctctgtcctttttttctctgttaaacttaaatcccagctaacaggctatgttcacagcagccaaatactgcataatgaggtcagtggatttttctttgagactgttccgcaagtttaagctcaggttgagagacacattaggcctggtgtactcctgtaatcatcattggcagtgattactgtttggtaatctaagcttcaactgaatccaacattcttgcctctgctgaaagataattcagaggtgaaagatgaattccataatgctgacacaaactggtggtattcatcatagtgcttattcactgaatgcccattctagcttgaattatatgtccacacactcagcagagccacaccaatattgtttacttaatttttttaagtctccattttaggagaagaaaatctaatgtctctttaatcgtatattttgaataatgtctattctccagtagtcacctgaaaaacacacacacacacacacacacacacttttcctggacctttttacagcagaataatttctcagcattattaattatgtttctgcgtaaaagacatttagggacttttatcctttgtttaattagttatcaaaataatcagtcacacagctatttaataatgggccactcttaacagacaggtgaaacagagtggttgtgttcaaaaaatatttctagttcactagtaacttactaactctctctctcttttttttttttttcttctttgagatggaatctcactctgccactcaggtgcagtggtatgatctcggctcactcgcaacctccgcctcccaaggttcaaacaatcctcccacctcggcctcttgagtatctaggaccacag

SEQ ID NO: 208144 - DNA, 239 bp, Homo sapiens
ttgcagtgagctgagatccacaacactgccctccaacctgggcgacagagtgaaactctgtctcaaaaaaaaagaggaagtcaaagaatttctttaaaagaaaaaaaaagagaggaaattcaaagagagggcaagacctgtatggattgctccttagttgggatatgttcacagagaccttagggcttaatctgtccatttaaaatagtcccactatctccattgacactttatatgaa

SEQ ID NO: 208145 - DNA, 377 bp, Homo sapiens
cagctatcagcaggcagtgagcccaaagaggttaaaaagttaagtctgtctgactcatcatggtgctgaattcttagcttcaacggagtcctggttctttactcctgcccttggaatctgctagagtaaatgtcggcctgacatatggttcacatttctgccatgcccagagatgtcacgtgggagcagctcttgatggtttcagggtaccaggccatatttgctgcacccttaatggtgctacctgtcttgcaaaaatcctgtggattattctataatccagaaaagccattcagagggattttacttaatttaacctaaatgagagatacttttaagagctgtgtaggtttgtccaatcacacctagaaattaac

SEQ ID NO: 208146 - DNA, 377 bp, Homo sapiens
ggcgtttggatgcggaattagtgcaggggtctttaccaggcactaagcaagagccctgagttaggaatatgacagaagaccagttgtcacaactgggaaacaagtccatggcctggccaacagccctgctaacttaatgttgagccccagaatatgaagccagtgattcttcaatccacttctctgtttcaggatgagtcctaaagaatgaaccaagatggatcccactatcctgggtgactgagagcctgtcaaaggtctccagttgtgtgagtggaaggcttaaggcttttgtgagtggaccaggcatggcctagtagtgtgctgttttgtggaaattcctcacgtatgaaaattttgcaaaagtgaggcatgat

SEQ ID NO: 208147 - DNA, 552 bp, Homo sapiens
atatttctctacacatgagaaaattgaagttgaaaaaaatgaaattagtctctcaaagccacacagaataagtgggacccaaacttatgcctatctgacactaaaattactcgataggcttttcactgtataatcttggatctctaagtgtcttttttaaagtttcaggaacattggaaaccaagtccgttattttataatcagaaaacacctcagtttttgcacactcaatgaaattatatcaatgactcttttactggtcaccttattccataggttaggctccaaacagctgacctccccaaatttttaaattaccaagcggcaaaactttcacatcatagaataataaaattttgtagttgaaagaaaactttcgtgttctacagattatgatttttagaagcagaaaaacgctttgaaaagaacagcagacatctgatcagaagatttacattgttttaccttttccatttattagctacttcatacatttataatcttaaacaaggcatttaatcactctgagtttctttcttctaatatataaag

SEQ ID NO: 208148 - DNA, 316 bp, Homo sapiens
gaaacatcaacggattgagctcctattatatccagggtctgggctgcacttaggcgttacagaagtgagcaagaaacccagtatctgttctcagcatttctgtaaacagcccaggcattttcaactttagtttcctattagaatcacccaggcactgaagtgtactaatgcagggccaaccccagagcaactgaatcagaatctctggggatgaagcctaagcatagaaattgttctaaaagctctccaggtgattctagtgaacagtcagggctgagaactgctagtctgttatagactcctgtcttgaccttcg

SEQ ID NO: 208149 - DNA, 599 bp, Homo sapiens
cttcaatcgaaacattttgttggctgagaatgtgcattttccccctctcaggggtaaggatttgcctcatctcattgtctagcttcctgttgagaagtgtggtgtgtgtattcacttaaactctgatgtcatattgaagcccattggtgggcagtttcagccaatcagatgcttcctgggtatccaagtaagaaagatatatagttctggaataacaggaaacttcacatttttcacatcctgttattctgggttttgtgacttgctgccttgccactatgaaggttagtagaaatttatgtatgtatttctttttgtagtatacaaaattgacaaaataaaaaatgacttgaattttcagagcactaagattagatctgtagagctgaaagacattcagatctcctatttaaaaatgttatgatgaagagaaattttatgttttgcatataaggaagctgaggcctatttaattccttttaaaaaatgcagcttaacccgtatttgttataggtggttatgtcagcctagatgctgctctcatttgagttgggatttcttcttaaataataaatattacaacaaatgtattctgtatg

SEQ ID NO: 208150 - DNA, 182 bp, Homo sapiens
gcacctggccagttatttagtttggaactctaggtctcctgaccccagcccactcctccttctggactgtactgttttcagttgactgtctctgggccgaacactgatataaatgagaaaaaaggtcttcagttgaggggctcagtcaagggacctaactcaccatcacaccgcactcatta

SEQ ID NO: 208151 - DNA, 441 bp, Homo sapiens
tcctctacagtttactctgtgattaacttccttctccctcaccccaaaatacagaagagtgaaatctctgaccagaaagttcctggcacctaccttgggttctgtgaaaaaataatggccctggttttcaatgctgccaaagttaagaaaagttttcaccccttcattttaaagcagccataaagtgccatgtgtttaaccgcaggaaaaaaagggtctttttaactattgagaagtagcttttcatatccccaccaggggaaggaaagagcgggaaccaggagactcgtgaggactgcaaagatggtcctccctgggtacttctgctgctctcttctctccagagctactttgtgattggcctgatggtcagacctataaaatcccacactgctaaaaatgctgtccttttcctagaaaagcccttttttaaaaaaaccc

SEQ ID NO: 208152 - DNA, 409 bp, Homo sapiens
agctctttgaagaatgcatttgtaactttgagaaggttgtctactttcttccaagaaaacgaagcacattaacagaacttaataacagatttccaattcaaggcaatgcgtgataatatctcaattactgatatcaaatgaagatgccatttctgaaatacattttatatgaaatttcactggaagtctgaaatgtcctaggatatttattatgaacgtttttccaggaaatattggcagaatccctatttttcaaaggaaatgtaagtgatttaatccaaatcttaaggcacttacaagtcttgcagggcagaataaatcatgcgcatactggactctaatgcaaaacagaaagatgaatgccagagaaaggtaggggtgtatccctgcagatagagtttcagaagag

SEQ ID NO: 208153 - DNA, 157 bp, Homo sapiens
aggcgtgagccaccatgcctggccttcaagaggcattttctactcattcaatatgaaaaatagctttattgtatctcttggaaacagtatatgttctcacaacttttataacctcccttgtagagtagagaaatattaatggcaaaattgactctct

SEQ ID NO: 208154 - DNA, 517 bp, Homo sapiens
acggatgtggtgagaaggacccggctgagggatggagcctcagttttcctggggaccacagcagggccccacaaggggtcgtatgtgcagaggattctgccatcttcctgggggtccctaggcccaggtcctgagggaggggctgtgaaggcctgaggacagcattcctgccctccctaaccacatcagggtcccgggccgacctgccgtcggttgtacccctccccaggcacagactgtgactacatccaagacttgtgcaggcccccagccccaccccgccttgaatgggggcttagggtgaccagtgagggaggcagtgtctgaacagggccctaaggagcgagttgacctcagttctagttggagagactggccagtggtcagtggagtctctcggtggtgggcaggcagggagatcctcagacacctcctgcccagcccaggcttcttcccagggaggtctgagggtggggtgacactggggaggcacagacgcaggcgtcctggacacctt

SEQ ID NO: 208155 - DNA, 253 bp, Homo sapiens
gggcagagctcacccgcatttggaatcattcacccttctaggaagatttaattataaacctcagctcaaatccttggcgtgcttacagctttccaggcacccagttaagtgctgtacatgcgatagcttattttaggggtcagcaaaggtttttctgaaaagggccagattgtcttcagctctgcaggcgttaagttccctatggcaactgttcaactgtgccttcttagctcgaaatcaactacaggtaacg

SEQ ID NO: 208156 - DNA, 177 bp, Homo sapiens
agctttgaaaatcattaagtatgaggtaagataatgtttgtattgcttagtaattttgcctcaggccacctgctgctgagtagaaaggctgcccatgccttcacgaatgtggctgtgctggaccattgcttgacagcgggttgtcatcttttcacacagaatctcatcttcgtcctc

SEQ ID NO: 208157 - DNA, 321 bp, Homo sapiens
gctgtgcaaacagcattcagtactaggagctgtgggttgcttatcaatggccaatcaagactttgaactttaaaattctgtaatcattgccaagtcctcaggcatatttggagtttctatttctttggcttctgtttctgtttgttggctcgttttatgaattttggtttgttttgtaatttataagggctctgagatccaggtaagcctattcccatagtgaagcaaaggaggtgctgtgtgtgtgttttaaaaagattttatcatggaagctttcagaaatacaaaaagtagtataaatccccatgacccaaccccaat

SEQ ID NO: 208158 - DNA, 312 bp, Homo sapiens
aaatgacggacattagtgtaaaaagcctgcataccagatacaaaaaagcataatctttgtgtaattttgagactggccaggagcctttcaaggaatttaaccaactcaatgaaagtgacatatggacaccatatgctaaggcagtaggaggtgaactgagggttaacttttacttcatgacataatcccagcatattcggaggccaaggcgtgtggatcacttgacatcaggagttcaagaccagcaaggccaacatggcgaaactccttctctactaaaaaatacaaaaatcagtcaggtgtggtggcacg

SEQ ID NO: 208159 - DNA, 176 bp, Homo sapiens
ccgtattcccgggtcgtaccacgcgtccggacatggagctgtccttggcagagaagaggggtcgatgacaagatagatggaaagcacctggaaattggcaggccctgagtgggcgctggacgtgtggggccgcgggccgaactgccccctcctggcctcatctcctggtgcgcccc

SEQ ID NO: 208160 - DNA, 131 bp, Homo sapiens
tatgcccagccagattttatttttctctgaaaagatggtacatttacatggttcaaaattcagatagggccaggcgtgagccctggagttcgagaccagcctgggcaaaagagagccctgtctctacttta

SEQ ID NO: 208161 - DNA, 1823 bp, Homo sapiens
ggctcgaggcaggaggtgggggacgtgatggaaacaccatggagaaactggtgtaggctcaagttcagacctcagacccaagtctcccactctgatctctttctactcctgagggacctcaaggacggagcccgcccctcctccttcctggcataagcatcaggtcagctgcagtggagaaaagggtcccttgtgcttgggaaaaaaagcaagcattcctacacgtcctgactctgccctttcccctcccctccactccatggctcacactgggggcctccgggtgcttgctcgtggcatcttggtcccactaccgccacagatgtcccttttgggagtaatcagtggccgtccagggccttgtctttggggaggcctgtggggccagctccaccctccaggagctgagcaagaatcaccctggctggtgggcctgtctgctcccctgagtgagactccccaggaggcttgagagtatctgaatcttggggcccatgcctgaagcccacaaactttctctgcctaccaagggcccctcaggaacgctgggtgaacaaatgcagagccaaggagttgcacagccagagtcccagtgtgctcagcccatcagtgtgtgatggaaacaggcccagagaggtcaggtgacctgcccagggccttccaggccccacacagctggaaccaggatccacagcccccagcccagagtgctggacaccacgcttcaggggaattggcgtgctgagctcacaccagagaggtcctgctagctgccagcctggggctcccccgcctgctgcccaccccttcaacaccgatagagggactcacaggcacgacggtgggaccttccactgcagacacaaagcacaccaccacctgaggtccagggttatgatttgaatcctaccaagtgcccatcaggcctttcccaggttgcggggaaaacaggaccccagcccccacacagtccctggccacctgctgctcctggagacttgtctccctgcctttaggaagggtttttgtgtgaaggtttttgcatgcactggtctgaacgcatgttcacagccctgcaaggtgggtttgattctcatccccatcttgcaggtgaaacaggttcccagagtctgagtagtttgccaaggccacacagccaggaaggggtgaaccaggactcaaacccaggtcctctgactgccactttctctctctggaggtcggtacccccagtcccttccctcttggtctgtcggagactcagcagagacaccaggtgaaggctcagtaagctcaggtgcatgatggagacctggggtcttgtcactgtcctgccacctcatccgctggctttgaaaccatccgtgctacttcaggcttccccagaggtgtctaacctggccccaaaactcagccaccccaccctagcctctgggggctgaggcaagggctcctcttttctccacacagaatgggcaccctctgggggcctaaggtaagaggtggtctatttctaaaaggcctggtgtctagttaagctctgggtatcttcttagctttgctttattgggggtctcattcagagaggagatttgacagcctctctgaagacacagaagtgaatggcaaagcgagaagaggctgtaccccccacctaccatgacttccttattaggcacatggggaatgtgaggcccagtgggtgaaaggggcctgaaggggcacagctgggacaagaacccagaactccagccccccagtccagggccctctactgcccaggctgtgcaaatggggctgggaccgaaagatggggacagtca

SEQ ID NO: 208162 - DNA, 170 bp, Homo sapiens
gagtgagctcttctgttagttcccttgaaagctggttgttaaaaaagagcttcgtacctcccctctcatgctactatgtgatctcagcacatgccagctccttttcgcctttatagattattgatctttgatactgaaaactattattgaaaaatattgcatcattgtgc

SEQ ID NO: 208163 - DNA, 695 bp, Homo sapiens
agcggagaggccgcttgcatgaccctgacatcggcagcgggagcggcggccagactctcttggaagtttaggatatttcacagttctgaatgttagccactgaaaatgccagtagatgatgaagcctctgaagatgacacggattcatttttctcaaacagcccaagaacctttattttccaataagagaatataacaatttctgtacactatggaagagtttgacttggtgaaaaccttacacaaaacttcatcttctgtaggatctgatgaaaattctcttcattctcttggactgaacttaaatactgatagaagtagtccccaccttagtacaaatggggtatcctctttctcagggaagaccagaccatctgtaattcaaggtacagttgaagtcctaacttctttaatgcaagagctacaaaacagtggaaagactgattcggaactttggaaaaactgtgagcatatacaggaggagataaaaaatttagtcaaattacagactagtagtgcttccttagcttcctgtgaaggaaattcttcaaacaaacaagtatcttcggaaagtcaaatgggtttttattctctaagcagtgagagaaatgaatctgttatccattatcctgaatccacagaacctgaaatacagcaagaaatgtccacgtcacaaccagactgcaatgtggata

SEQ ID NO: 208164 - DNA, 785 bp, Homo sapiens
agcggagaggccgcttgcatgaccctgacatcggcagcgggagcggcggccagactctcttggaagtttaggatatttcacagttctgaatgttagccactgaaaatgccagtagatgatgaagcctctgaagatgacacggattcatttttctcaaacagcccaagaacctttattttccaataagagaatataacaatttctgtacactatggaagagtttgacttggtgaaaaccttacacaaaacttcatcttctgtaggatctgatgaaaattctcttcattctcttggactgaacttaaatactgatagaagtagtccccaccttagtacaaatggggtatcctctttctcagggaagaccagaccatctgtaattcaaggtacagttgaagtcctaacttctttaatgcaagagctacaaaacagtggaaagactgattcggaactttggaaaaactgtgagaccaggtggttacagctattcaatttggtggaaaaacaatgccaagaacagatagttgcccagcaggagcagttccacaaccaaattcaacatatacaggaggagataaaaaatttagtcaaattacagactagtagtgcttccttagcttcctgtgaaggaaattcttcaaacaaacaagtatcttcggaaagtcaaatgggtttttattctctaagcagtgagagaaatgaatctgttatccattatcctgaatccacagaacctgaaatacagcaagaaatgtccacgtcacaaccagactgcaatgtggata

SEQ ID NO: 208165 - DNA, 741 bp, Homo sapiens
agcggagaggccgcttgcatgaccctgacatcggcagcgggagcggcggccagactctcttggaagtttaggatatttcacagttctgaatgttagccactgaaaatgccagtagatgatgaagcctctgaagatgacacggattcatttttctcaaacagcccaagaacctttattttccaataagagaatataacaatttctgtacactatggaagagtttgacttggtgaaaaccttacacaaaacttcatcttctgtaggatctgatgaaaattctcttcattctcttggactgaacttaaatactgatagggaagaccagaccatctgtaattcaaggtacagttgaagtcctaacttctttaatgcaagagctacaaaacagtggaaagactgattcggaactttggaaaaactgtgagaccaggtggttacagctattcaatttggtggaaaaacaatgccaagaacagatagttgcccagcaggagcagttccacaaccaaattcaacatatacaggaggagataaaaaatttagtcaaattacagactagtagtgcttccttagcttcctgtgaaggaaattcttcaaacaaacaagtatcttcggaaagtcaaatgggtttttattctctaagcagtgagagaaatgaatctgttatccattatcctgaatccacagaacctgaaatacagcaagaaatgtccacgtcacaaccagactgcaatgtggata

SEQ ID NO: 208166 - DNA, 349 bp, Homo sapiens
agatccctggggtaagaattgtggaggggtagttccccagaagaaaatcgaggtgttctcacaagaggaaggggtaatggatcttaaataaacaaaactatagatgtccacattttctatctataaatgtttagtgttactataacaattagaataattatttagttcatacactattcaatttgtatctcccttctgttgccctgttgccgttattttcttacagatagaatgaaaaatattaatctaggcagctctgtgaaacagtactgtccaaggaatataacgtgagccaggccgggtgtggtggctcatggctataatcccagcactttgggacgccgaggca

SEQ ID NO: 208167 - DNA, 248 bp, Homo sapiens
caactccacacaaaccgctggccatggccaatgtcttttctccatgggaagaacattataattagaggttgatttagggggcctagaatcagaacaaggaaggtgattggatgatgaaaatgcttaatgacatctggttacaatagctggccaaagacatggactagtgctattgctagaacacttagtctgccagccaagactttcctttgatattgtttttgcaagtattgctgcccttgtttttg

SEQ ID NO: 208168 - DNA, 480 bp, Homo sapiens
aagttaataagaaatagagccagacttctcaagaggctagaaccagaaattgaaaacccagcagggacgagacactaggaccaataatcagaaagccattgagatccaacgtagctgctctcagactctttcttggagccatttggtctttctgtgtgtcagttgcatagaaagccacacggtcctacaaactggctttctccttgtccgagccagtaagggatcagctccataatagtgtcagagtttgcaattccttcgttcaagcaataagcagagagtgactgccatccataccctgatcgacacctgcaggtgtctatgacccaggcagatgtcatttaggtgggacagggaaggccacagcattcactgacaagtcagaatacagttccccaaattcctttgaagactttcctgtctttcaaaacttactgttaattgtcaatgtaataaacagaataatgctgtcttcacaaa

SEQ ID NO: 208169 - DNA, 379 bp, Homo sapiens
tcaataaattaagttttctgtgtgatctttagttcattttcttaacagtaccaaatcaataaggaagaaaagtctaattccataaatggtgttggcataattggtaagcttttgggaagaaaacttaattttgatcatcacttcatagtacttaccaaaacaaattccagtttagttaaagatatttaaatgtttttttgaaaatcagccagcctgttttttgaaaaattagattactggctatcctggctaggaaggactttccaaatttaaagtgttaggaaaaatcacattaaaataaggatagactttattaagtatatttaatttctgcatttccaaaaggcaaagaagaaaagtttgcagaaaatatggcaaa

SEQ ID NO: 208170 - DNA, 554 bp, Homo sapiens
gcccttaagtattactctgtcattaactcactagggaacctaaactcttatcttctaatcagggctattatatcaattaaacgaaacatgatatgcaagtacttagccaagtgcctagcacagagtaatggtctcaataaattctggtgatacaacataggattagtcaccattattattaattgctatatgatagaatgggcattactaaaatataattagttcatattctggaaagatcagacaaatatatgtattcaaatgagttttttatttgaattgtatttatttgatttcagttaagggggtttatttgtttctggggaaagcattgcaaaagacaaaattattgcttgaagagcgagcatctgttgcagaggaactttaagatggcaaaggaaacacaactagaaggacgttggcatcactgaaagcctagaggaagactctgaggtctggaaaaggaagaaacaaaagcctgcactgcctgagtcaaagagacagaggaaaaaagaagggagaaggaggtcatattagtgaagcagagttggtgc

SEQ ID NO: 208171 - DNA, 209 bp, Homo sapiens
tcctgccaaaagtgacgctatatggcactgccactcagtcttcgcaacccagtgagatagtgttactgttgagaaaaccagggctcaacgaggagcctaggaaaagctgatgtagaattcatactcctacgtgagagttgccattttctttttgcttttctttttttttttttttttttgagacacggtcttgctttgtcgcccgggct

SEQ ID NO: 208172 - DNA, 263 bp, Homo sapiens
actttcattatagtgactaagttactttatgaaccttatctgaaagtaccataattaacactgattattcccacacattagcaagtattctgagcatagtccacagataattgcaaacctgacaggttctcattgcattttcatagtgcagttcctacttatatgcattatcaacttagacaaactacaggagcttaataatgaaatttcatctaggaattttaagtttaggctgcatttaatccagattagcagttaaccta

SEQ ID NO: 208173 - DNA, 299 bp, Homo sapiens
ccccaaaaattctatcctccttttctgatttttttgttagccagtataattaacacatcataaagattacttaaatatcttggttttaaaaatttgtctctcccactagaatgtaagcttctgtaagcaggaattttgtatattttgtttactggtatttctccagtgcctggaaaagttcctgccatgtagttagcactcaatatttgccaattaaatgaattaaagcatcaattatagacctcagtttgcccttggatattttacaactttgtaacaaatttcaagaacttttcttt

SEQ ID NO: 208174 - DNA, 526 bp, Homo sapiens
gcgttttttcacgtagattggaaataatatgccagtaacgcttattgaatcaaattgtgtctttgaagctgactggctaaaaaagttgtgaaatctttcatgttgatttttaaagtaatgttcttttcacaaattttccagtctgttactaaccttgattaaaatgctattataggagttatgaaaagacatcattttcacggtggaatttggagtaagcgtgcaagatatttaattattttagtattagttggagggttttgtgattgaactttcatcaagcgaatttaagcatttatattctatatgtatgtttgtgggttttgctttggaaaaattgagcatattgcaaaatagttgtaattttagaaaaagaaaacaggtcaaatgtttcagtgaggtttgtgttatttagttgtttaaaaggtaagataaagacatggttaaattgataaaatcttatctttcaagatttttattatttttctaatagtcaggtaattaaaaccttgttacctaaccaaat

SEQ ID NO: 208175 - DNA, 790 bp, Homo sapiens
gggcacccacctggtcggtgtcacatgctgcttcggccccagcgtcccctccaggtcccggcgccggccgcagtccccagagccgtccccagcgcaggcccggccgccccacccgcggcccgcccctggccgcccgacgggagggagggatcgggttctcctaggaagtttcaggtcattcaacatttattcaaccaaaaatactaagtcagctctatacaaactaatggaaggatacagctatgcaaatatagaacactaaagtgttacatgacagatgtatgagcatattcaccagtaattgtgaactaacaagacctgcattgtctgataaaaccgacatctcatagaaacccaatgacatgctacacagtctaaaattttcatctgcaaaataacgacgcagacacgacttgcccttctgtcagtaaagcacagattacgagaagtcaacttttctggattgaggcaataattgggcatcaagagtccacagtgacaactgaggctggcagtcaaatgtcacaccagttaggaatgactttccttgcccagtgctctcctcagggcacccttgacctctccgttcctcaggctgtaaatcagggggttaagtgttgggttgaaaaaactgtaaaatagaaaaaagaccttttgctgctcctcaggatggcgggacttgggggccatgtacatgatgatggcactgccaaagaagagtcccaccacgcagaggtgggaggagcaggtggagaaggcctttctgcggccctccccagactggatcctc

SEQ ID NO: 208176 - DNA, 338 bp, Homo sapiens
accgttgggcccatgagtaaaagcaagttgaatacattggtgcagaagcttcatgacttccttgcacactcatcagaagaatgtgaagaaacaagttctcctccacgacttgcaatgaatcaaaacacagaggggaagagtgctggattcagagcccacctcaggggaagacaggaccctctccaagatggtttccctagaagctactacctctccctggagggtggagatatttgctggtcaaagcaagaaggccctctgcagatgctgacaccttgatattggacttcccagattccagaactctgagaaataaatttctattttaaataaaaaac

SEQ ID NO: 208177 - DNA, 264 bp, Homo sapiens
cagaactgggaagaaaggaccctgaaaagttagctggttccaagtgaccctccaagaggggaagagtgctggattcagagcccacctcaggggaagacaggaccctctccaagatggtttccctagaagctactacctctccctggagggtggagatatttgctggtcaaagcaagaaggccctctgcagatgctgacaccttgatattggacttcccagattccagaactctgagaaataaatttctattttaaataaaaaac

SEQ ID NO: 208178 - DNA, 530 bp, Homo sapiens
caatcatctagtccgacatttcattttatatgtggggaaaccaatgtgcagaggaattaagtgacttctctaaggtcatgcagtgagtaggtggtaaattgggagaggaacccataattttgtgaaatatatatttggtctttgtccccatttcttggcgtacagtttctaaaactctaggaatccccagagtgataagagtatcttttgtatgttctgtggtttgaatgtgtcccccaaagttcatgagttggaaacttaatctccaatgtaacagtgttgaaaggtgggacctctaagaggtgattaggtcatgaaaactctgacttaatgcatggattaatggtgttgtctcaggagtggatttgttatgtggagattgggttagttacaaaagcaagtttgtccctctctcatcctctcacctttcaccatgcagcaagaaggccctctgcagatgctgacaccttgatattggacttcccagattccagaactctgagaaataaatttctattttaaataaaaaa

SEQ ID NO: 208179 - DNA, 549 bp, Homo sapiens
gcgcacgggccaggccgcgggctgtcccagggagccccgagggcgcggtgcgcgggcgcaggtcgggcgcaggcggggtgacccggggaaggggcgcgcacagagacagagggagccagccgggccccacggtgtcctcggacgcctccgaaatctccctgcgtgtttgtttcttcggagcttcaccggagcctgactctggaaccggcctgtctgcctgctgcagtctgtcattcaacatttattcaaccaaaaatactaagtcagctctatacaaactaatggaaggatacagctatgcaaatatagaacactaaagtgttacatgacagatgtatgagaggggaagagtgctggattcagagcccacctcaggggaagacaggaccctctccaagatggtttccctagaagctactacctctccctggagggtggagatatttgctggtcaaagcaagaaggccctctgcagatgctgacaccttgatattggacttcccagattccagaactctgagaaataaatttctattttaaataaaaaac

SEQ ID NO: 208180 - DNA, 649 bp, Homo sapiens
aaattagagctttggggaacagatttgctttattgtcaaggattgcctatagctgtacattcctttgaaattcaggtttcactcagatgacaaaatgatggtttggtaggcctaggaggatgtgtactttccaaactggagaaaatctaggttgtggtattaatcttaaaagcaccccaatgttagacacagctgcctgcctgacatgtgcctcaggtttatcctacatgtttacaaagctcagttgtaaatctgagtattaatgagaagatgttccatgaaagattttcaacaaataattaataatgcattcagttaaccataaaggcatttcaaggaaaaactcagactttgaagacaaatgatttgaataaatggataaaaataagcttaggggcttttgcagattcatcactcaactctcttacttcattatccacataaatacagcattattcagatgcattttaaccttcaaataactcatacttcttattgctgtttttatcataaaccttgagtaaggtagcctcttaaactatttatatacctaacatagataaaataaaaattaaaaagaaggaaaaacaaaaggaacttggttgggaatatgtaagaactttttgccatacatctttgaggtaatgac

SEQ ID NO: 208181 - DNA, 632 bp, Homo sapiens
tctactactttcttgcttagaatagtcagatatctttgagtactgaagcatatgttagtctaagtacaaataattgtcacacagttacaccaacctgaacaatgacggcaatcttgtctggcagagaggagatatacatatatgtaagaaagaagaaggcaaaaatagctaggtggtatcatgcctcaacagtgctcccagttctcatgatttccatttgtctcaatgactgagatatctaaagcaatggaaaagaagctaaacccttactagtcatttctgcatgcccaaaagaattttccatctcatgttactaatatctgagtaactgctcattttgtttgttttaattcagtcaagggcaacaacagcaaggtaaatgcacttaacacctgttaacatctgcagtaaaatggctttcaaggaaacagacaagatctccatttctaaaacaatgacctataaaaatgtaaagcaggtctgcagcatgctcaatcagctatgaaaagcaaacaccagctttaccacccagtgaagggctatctaacaggtctagggactacctcaacagctccactgttattaattcatttatttcaactacaaaaagttctaagggaaattgagcctac

SEQ ID NO: 208182 - DNA, 470 bp, Homo sapiens
tgtgctgagtctcacctgaaaccagcaagtctcagagccttacccaaggccttcaatgtagtacctgggtatcacttctggttttccaggacccaaagtctcttcaggtagcctgtaatgaatgccgtcgggatgaatgctgaaggacttttcttccaggtggtgggttctcttctggcccaagatgtgtctaaaaatgtcatctggcagtgcccagcgatctctctgtaccatgctccctctacagggattgggggaggagtggcacctgcgattcaggactgttttttaaatcactccagtgcctctttcagcaatatgaaggtaaaaccagaatggacaaatggccaaatagctggaaaagaagaagaagaaagaaagaaggaagaggtggaggaagaggagaaggagaaggaggagcagggaagaagaaagatgaagaataaaaaaagaaaagggtttaatgtaaa

SEQ ID NO: 208183 - DNA, 469 bp, Homo sapiens
agtagttatcacattttgaacctttgctctttcatttttggtctgaatatggtcatttttctgctagggagatgaagtgattacttaagtcagtaatcagccgtagtgaatcagctacaagaaaatgagaccaatctcaagtgctcaagactcagaatataaactatttagagagtagaattcagctggccgcggtggctcatgcctgttatcccagcactttaggaggccaaggtgggcggatcacgaggtcaggagttcaagactagcctgaccaacatggtgaaaccctgtctctactaaaaatacaaaaattagctgggcgtggtggcatgcacctgcaatcccagctactcggcgggggggctgaggcaggagaattgcttgaacctgggaggtgaaggttgcagtgagccgagatcatgccactgcactccagcctgggggacagagcgagactccatctcac

SEQ ID NO: 208184 - DNA, 503 bp, Homo sapiens
atatctccccagtctaccctcacctccctaatccctggtaatcaccaatctactgtgattctatgagtctgactcttttagattccacattaagtaatatcatggggtatttctttcagtgcgttgcttattttacttaacataatgacctccaggttcaaccgtgttgtcacgaaagcaggaatttccttcttttcattttacattcttctgttgacggacatttagaatgatcctgtatcttggttattgtgattaatgctgcagtgaacacaggagtgcagataccacttcaagaaacaaattcttcttccgttggatatatatccagcagtaggatgctgaatcatatggtagttctattttgaattttttgaggagcctccatgttattttccataatagccgaactaatttacattctcacaatcagcgtgcaagggttcccttttcttttttcttttttaagacagagtttcattctgtcaccaggctggagtgca

SEQ ID NO: 208185 - DNA, 592 bp, Homo sapiens
attagatgtgagccatcactcctggtctccatgcttctctaagtcagggtcttgctatgtggcccaggctggagtgcagtggtacaaccatgctcactataacctcaaactccttgtctcaagcaattctcccacctcagtgccccccagttagctaggactacaagcatgtgtcaccatggccagcgatttttttctttttggcagagatgtggtctcgcagtgttgcccaggctggtcttgaactcctggcccaaaatgatactctcaccttggcctcctaaagtgctaggattccaggcatgaggcacagtgcccagcctattccatgctgatgtgacaagcatttctaagctcaatagaagggctatatataccaatccaagcaattacattttgcataacctaaaatcctctatagtcctatctaaaaggtctctttgttagccttgaaaggacagagaccgtatttgttcctaaataccataattttaatatgttagtatctggtgagttataactctaatttataaaacactgcaagcacccttcactataaaaaattgatgcaccaaagaagctagatggaaac

SEQ ID NO: 208186 - DNA, 253 bp, Homo sapiens
gtactgacatgttcataacagcttaattcataaccaccccagactggagacaagactaatgtctatcaactggtgaatggataaacacattgtagtactgtgtgcccatacaacagaatgagctgctcatatgtgcaacatgaatttccagaagcattatgctgcatgcaatgcacatgctgtgtgactccgcttctacgaactctacaacagggaagatggacgtggtggaacacatcaggacagtgtctgt

SEQ ID NO: 208187 - DNA, 546 bp, Homo sapiens
ttgcggtcatatgttgaacgtcgcctaacgaaggaaaagctaccagccataaaatcagggtctaatgggcaggctatcaagtgagaggccataagaagctaaagcaggaacgattcctatcagaggtagtaactgttcccttcacgtgatctacaactttcccaggaaaaaaattaaaagacatgaatctgctccaagttatgatgatcactgtggcgctgcagacgggagccattgcatggttaaggcgggtgcccttcaaggacagaaattctgtcccagattctagagatatgagaacaatatcttcccaggctggatgtagtggctcacgcctgtaatcccagcactttgggaggtcgaggcgggtggatcacaaggtcaggggttcgagaccagcctgaccaacatggtgaaacgctgtctctactaaaaatacaaaaattagctgggcgtggtggtgggcacctgtaatcccagctactcaggaggctgaggcaggagaattgcttgagcccgggaggcagaggttgcagtgagctgaga

SEQ ID NO: 208188 - DNA, 163 bp, Homo sapiens
gtcaaaatcagagtagtaataaaaaatatccagcatcactgctggcctgacatttaatagttctggttagctcattctagctttggattctcatactatcatgggagaaccaagaacaacaggagttccacttccatttgaataagatgtcatcattttccat

SEQ ID NO: 208189 - DNA, 273 bp, Homo sapiens
cagctccagagtatctgaactacagtgtgaacccagcctgattctgtcccctgatgcaccgtgcacactcctgtctgttccttttccatttcttctctcatcttttctttccccttccctgtggcttttctcccagacttatcaactttaatttaatgcccttctagcatcagtgccacccatcgaagtacttagttccatctggttgatgaactgaccagtcatgatgtgcatatactatttccatcttcagctgtccttagctgcctttgt

SEQ ID NO: 208190 - DNA, 419 bp, Homo sapiens
  misc_feature (17)..(17): n is a, c, g, or t
  misc_feature (51)..(51): n is a, c, g, or t
gaacgatttcaccgagngatgctaacaacagcacagagagatcaccatctntccatggttttgagaagaaaggcagaaaagcattagacacatgaaataagatttgtactgggcactctcaagaaacagttaagatacaacttgacatgaaatggtggccaggaaataaaatgttcgcctgagtggatttcaattcagtcactccaggaacacagggactgtgtctgccttgctcaccaccgagtctccagcaccaaaaacagtgcctgaacatagcgggcagtcaagaaaagcttgtctgttcattcaacaaatgcctatcgatgccaatgactgccaaggactgcgttaaggtacttactctcagaggttgacagtccttggtggagacaaacaataaacaagtaaatggacaaaca

SEQ ID NO: 208191 - DNA, 260 bp, Homo sapiens
ataatcagagtgtgtttaatctgtctcctcccacactggaagctccaggaacacagggactgtgtctgccttgctcaccaccgagtctccagcaccaaaaacagtgcctgaacatagcgggcagtcaagaaaagcttgtctgttcattcaacaaatgcctatcgatgccaatgactgccaaggactgcgttaaggtacttactctcagaggttgacagtccttggtggagacaaacaataaacaagtaaatggacaaaca

SEQ ID NO: 208192 - DNA, 743 bp, Homo sapiens
gccatcttccagtaattcgccaaaatgacgaacacaaagggaaagaggagaggcacccgatatatgttctctaggccttttagaaaacatggagttgttcctttggccacatatatgcgaatctataagaaaggtgatattgtagacatcaagggaatgggtactgttcaaaaaggaatgccccacaagtgttaccatggcaaaactggaagagtctacaatgttacccagcatgctgttggcattgttgtaaacaaacaagttaagggcaagattcttgccaagagaattaatgtgcgtattgagcacattaagcactctaagagccgagatagcttcctgaaacgtgtgaaggaaaatgatcagaaaaagaaagaagccaaagagaaaggtacctgggttcaactaaagcgccagcctgctccacccagagaagcacactttgtgagaaccaatgggaaggagcctgagctgctggaatctattccctatgaattcatggcataataggtgttaaaaagaaaaattaaggacctctgggctaccagaatcatctgcaatgtgaggaatgtgactcatgagatctatcctggggccacaacgctggggggaggcaagactttctgatggccacggatagtctttccacgaagcgcattttgtattaagagggggatatagcagacagtcgaatgtggggcaagaagttccgacagcggttctcgtagaccacgaaagacgga

SEQ ID NO: 208193 - DNA, 137 bp, Homo sapiens
cctacgctgctcacaaatggtgatgctctagaatgcttcctgcaaatattacagaaattcttccataaagaagtttaatcaagtccttgttcttcctttggtttgtacaggaaaagtaggataaagagaaatgatag

SEQ ID NO: 208194 - DNA, 437 bp, Homo sapiens
aacatgatgatataaatgtgccctttatttatagtgcaacctctttcaaacctgatacagagaccaggatatacacaacatctaagaagacaaaatgggaatcactagagacagaactgagcttaagctaagagctcaatcaaagctgacccaacagatacacaggggccaagttggtagctgagggtattttactatttctagctaatattagaactctggtaaaataatacaaactttggacataggagaaagattataaaacacaagaggaaaaaataaagagcaaaggattatcaatatctttgaaaacggagcccctctttgttcagaaaacagaaggattcaaatgttcttatgtagcacgtacaagagcctccacaaaagtccatatctcaaattctaacagacccaaaaagaggaaaacgagttcagaa

SEQ ID NO: 208195 - DNA, 439 bp, Homo sapiens
gaaacccattagcagtcactccgcattctcaccttcccccatttcctcccaaccactaagtgattttctgtctctatggatttgcatattctggacattttatagaaatggaatcatgcaatatatgatcttttgtgtctggtgtctttcaatgaacaatattgtcagtcttcatccacactgaagcttgtatcagtagtgagtgcttcctttttatggcggcatactaatccattggatggctatccgacatttgttttatctatgcatcaattgcagtgagcctggaggtggaagactctggtttttttagtgagcccttcaagaaggtacacatcctggtgagaggatgaagacaccggagttcactgaaaggccaggctaatgaaatgatgagctgcccccatctgagttttgtattagaaaaattagaggcaga

SEQ ID NO: 208196 - DNA, 740 bp, Homo sapiens
tctgtgttccatctagtttattggtaaaagtgaatacaagtcaaggctttacaagtattttgctcagatgtgcagaaaggactagctctcctgcttgaaacagtgaaggaaagcgcagccagccccttgggctgaggctgactctcggtgtttctttggagagcgttgcttagtaacagttgcaggggacacgcacagacagggggatgaaagaaggatgcaggagatgagggagggtgcatttgttttctagcatgccccacgagtgggagcagtgggaaaaatctttagatcttttaaccaccaaaatcatgccggcttactgcaatcaacaatctaaagtaaaataaagaaatcaagaaattaagtgaaaagtcaatctcaatcctacttccccgaagtaatgatcattaatagttggggcaatagtttgccccattttataggagagtaacatggaggcaataggtaaggaagcgtttttctggggtcctaagagacacccactgggaaatcgggattggggggtacttaaggctatgctgctcaggggtcctgagaagagggcagtgcagggagctgggaacagggagagggggctggttcctgtgcgcaagtggcatctgttgcctattatcaggagcagaaatcctagcacttctgctcactgagtctcgtaactggagttgccaggggcaacagcacagtcaagcccgggctactccactttactcatacta

SEQ ID NO: 208197 - DNA, 535 bp, Homo sapiens
gggtacatacccagaggaatataaatcattctaccataaagacacatgcatgcaaatgtccactgcagcactattcacaatagcaaagatacagaatcaacctaagtgcccatcagtaacagattggataaagaaaatatggtacacatacaccatggaatagtatgcagccataagaaacaatgagatcatgtctcaggaacatggatagagctggaggctattatccttagcaaactaattcaggaacagaaaaccaaataccacaggttctcagttgtgagtgggagctaaatgatgagaactcatgaacacaatgaagggaacagacactagggtctacttgagggtggaggatgggaagagggagaggagcagaaaaagtacctattggtgatgaagtactctgtacaacaaacccgtgacaagagtttccctatataacaaaccttcacatatacccctgaacctaaaagtttttttaattgtaaataaatggatcattaaaaaaaattttaataataaaattgtctta

SEQ ID NO: 208198 - DNA, 396 bp, Homo sapiens
gattgatgggtcaaaagatgaaaacaggtgtaatttgtcagatattgctacattctcctctctgggggctgtaccattttgcattccctcagcaatgtgtgagaacacgtgtctccacagccttaaccacaaaatgcttgtcaaacttaaggctctttgccaatatgatgaatgagaaatgagtgtttctgttttgttgtatgtttatcttatgagtaaggttacacatttttttcataggtctaagggccatctccccttttctttctataaactgtgtacatcttttgttcatttttctgtcatgtgattggtctttttcctttcagagaatttctaaattagagagattaagcctttttctctaaattgcaaatggtttcctttcttcgtttt

SEQ ID NO: 208199 - DNA, 480 bp, Homo sapiens
gaaagggttatctttgatctttacctcctccaactcctctagtcactatcagtgtccccaaatcctccctcaaatgcacacgcacagtctaagtagaaataacacatttgcctgtaagtggggaccttctctgggtcacggctgcctcaaaagattttcctttagagaaaccccaggcccctggtgtgcaccgtagccacactgtttcatagcccattttttaaagctgtatgttttgaatattttcgcatgtcaagaaatagtcaatacaatacaatgtattaatgatgcagtagtatttagccatcaaagtataccataatttactgatatcatggtcccccgtaattagacatttgcctgtttccaatttttcaaataatccttggatgcacactttgtggtaaaatttctaacatgtctaacacattctttttttttttagaaagatgactcgactgtagaattgacgggtaaaag

SEQ ID NO: 208200 - DNA, 276 bp, Homo sapiens
ttgttgctatagtcttcccttttagaactgttttgctgtagtcataggttttggtatgctttgtttaaattttcattagtttcaagaattttaaaaaatttttaaatttcttcattcacttatgaagaaacactctcccttagttttcttccatcttcttggctctccttattttgctttgtatcttgactatactttctttgtctcaactttaactattgttatttcttttagatttattccaatcatccttttccctctacatattcttcatta

SEQ ID NO: 208201 - DNA, 484 bp, Homo sapiens
tcccatgtcagccatctccagggctcttcccgagaagagggcagtccccgccaagggtgttgcctctcaaacctgccaaactacaaaccctcttggtacctccacacatccctggagtcggctttggggaacactgtgttccatgtctaagtggagtcccgggcctctcccctccagtgtcgcctgtgccagctggacacgaagcagcagatcagtcatgaaaatggctgctcagctccgatctgcccttccttccgcaggactcagggacgcacagctccccagggctggtcacccaaacaacagcattcctttctcctcggcctctccccaggctgcttgggagagaaaacttccctcatcctcctccgcacacactaaatgccctgccggtatcttctttccagtgactgtggccccaggtcgtcacacatggccagacacagctgaatctcaggctagatcatgttggcactgcttccac

SEQ ID NO: 208202 - DNA, 207 bp, Homo sapiens
acctcagactgtactttcctgctcatcctgccttgttctatctctttatcatccctcctactatagccctgagtggcaccatccaagagcaccatggtttctctcctcctcaagcccttttacacttgtaacagaccacatgtccaacctggccataaaacaaaactgagttcctggatccacccagtccataagctccagctgtta

SEQ ID NO: 208203 - DNA, 274 bp, Homo sapiens
aagtgtgataagggtaaatcagtacttgtattaattcacagctacatgattatttggtgataatttttatttccttatttattctacttgaataatcagttctgggatttgctgtgacttgtgttacatttttttctcatggggttattgtctttttcttattgctttttgggcattcattacttattttggatactaatacttcatatcttataaataccttctgttctacagacgttgaataaagaaaactggaatttcaaaagtttgtgaa

SEQ ID NO: 208204 - DNA, 732 bp, Homo sapiens
actaatgagtatttcttttttaaaacaaacatcctagaacaaacatccacaagaactataggcccctcaaagtggttactttaagaagttatgcagttagtatgtataatactgccaaaacagactaggtatagtggctaatgcctgtaatcccaatgttttgggaggctgaggtgggaggattgcttgaggacaggaatttaagaccgacctgggcaacacagcgagacccaaacgctacaaaaaatttaaaaagagtaatttaaaaataccaatacataaaacgtattacagttgaacatcccttacctgaaatgcttgggaccagaagtgttttgatcttgggtttttttttttttttttaaattttggagtatctgcattatatatatttatcagttgagcatcctcaatcccaaaatccaaaatgctccaatgagcatttcctctgagcatcatgttggtgctcagaaagtttccggttttgcagcatttcagatttctcattttcagattaggaatactcaacctgtgtaactccccagttagtgtgacttcaacttttttcccaacagacttgctggcacaatgaagcacaacagtcctgaagcctagtctaaaaagccccgttaatacactactaagttttggggacttctagttccagcaatttggcagactgtgcagagaaaccactcttgttaaggaacacatatatatgctagatattaa

SEQ ID NO: 208205 - DNA, 481 bp, Homo sapiens
  misc_feature (3)..(3): n is a, c, g, or t
agnttgaggcaggagaatcacttgaacctgggagccgggtttgcagtgagccgagatcatgccactgcactccagcctgggtgacacagtgagactccgtctcaaaacaaaacaaaaaacaaaaaagatgaaattatcatttgatataaccaatagcagagagatacctgtactctgattccttcttcgtttatgcagtcaatccttgttatttgtggattttgtattcatgaattttcctactcactaaagcttatttgtaacccgcaaatcagtccaaaggtagtcctttcgtggtcatttctggacattcacagagcagtgaaaaatgcagtttgctcagtgtacacatttccagccactgtgaaacaaggtgactgatttcttgtttcagccctcatactgtaaacaaatgacctttatgtggtctatttagcattacatttttttttttttgtatttttgtgcctttgctggtgac

SEQ ID NO: 208206 - DNA, 463 bp, Homo sapiens
agattttgggcgttatcatgaacagaatgagagccctttgggcatgaggaagactgggcagtctgagaggagctagcaatgtgtcaatcaatcagtcaacaaattaactaactaattattttggggaatccaactaagcatgctcatcgggcaaccttaaaatgaatatgttaagaaacaagaaaggctggggaaaaaacaatcatctatgctttcatctcaagaagtcaggaatagacaaataaattaagcatgtggtagatcacatgtatcggttagtaaataccaaatataataaatttatgatattgggtatcatccatgtaccaattctgtccaaattgatctactgatacaatgtaatcctaataaaatttcaacaggacttgtatgaaaattgacaggctgactctaaaattgatatggaaatgtgaaggaccaacgataatcaagacattctgaa

SEQ ID NO: 208207 - DNA, 690 bp, Homo sapiens
gtaagaatgggtaacataatatattgggggtttgtgttataaatgaggctattttcttatgtttagtattttgtaattttagtagagatggggtttcaccatgttggccaggatggtctcgatctcctgacctcatgatccgcccgcctcggcctcccaaagtgctgggattacaggcatgagccaccgtgcccggtacaccagcgatctttgttagtcacaaaatgctaattttttcaatgatcatcatcagattttatgtttgttgttcaaaatgtcgtcttaaggcagtgaagcaatagaagttgtagattactcttcatgaacacatctaattcaagctttctccttcaatgaatatttgtttcctttttttttaagtcttacattttacaaaatttatcttaggtcatattttgcagtgattttttaagcaaacaaatagaaatccccagtcatctctgtagatttgtcatcctgaaaagaaatgtctctctgcttgggtccagatgacagagaaggtggaactgtaagtgtcagggagtataagtgttgcttctttatgtgactttgaaggactcataaacatcagagatctgactttccagttcctttacatttttatgtttaaattgcacgttaacttcttttgtttctccttgtgtttgggcattgcaggattctgatagt

SEQ ID NO: 208208 - DNA, 186 bp, Homo sapiens
gacaccgggtgctaacgtccggtgtcgagaaggaaaacctacccagctgactaataagtgcaaatgcattctctttgaaaatatctaaccacttttgtgacttaaattctatttgtagtttcttttagtttccaggcaactaaatgtcattaataagagaaaacttgacactaatttgcactccat

SEQ ID NO: 208209 - DNA, 555 bp, Homo sapiens
tagatgaaaggtttgtgctccttgtcctctttcagtttttgatattggtatagaaatacacaattacagaataaagaatctcagaatagattcagacaaatgggaattcaattatgataaacatgaggaataagctttcattagtgggggatgatgtaatttatatggagaaatatagatccttcacatattcaaatgttcacatgaactaaagatttaaatataaaaacttgaaactataaaaatattgagagaaaatacaggaaatataatctcaatgtgggaaaagacttcccagaagctgtaaaggaaaacaaatgtcatttttagctcatctgattgcaaaaataaaatacaatacatatataatatctgggattgttgaagatgcagcaaaatggatgcacccaaacagtataataggaatgcgtattgccacatttttataaataatctgtcatctcttacagttaaaatgcaatggcccttgacacagttattcccacttacaggaatatatcctatacgaagcactactaccttgtctctactaaa

SEQ ID NO: 208210 - DNA, 626 bp, Homo sapiens
tactcaaatagaacaaaaacacattccagagtttattctgcttcagtttattcataccatttccctcagcttccttatcacattagtgtagaaatgcaaaaatggtatacatgtatatcctactatctcattaaaactgttactgtttatagcataatgaaacagtggcttagttattcagtgcttactatgtactgtgtgccagagactgggctaggaattatgaaactgaggtttaggatgatgaggggcaaagttgggaagcatttattttaagatgttttcaattcttttgccccatcttctggtaatgtggtttttcctgataacccattcaagcatattttagttatattcatttttaatatgcttttataatttgctacaaactttctgctattcttaaacagaggctactgaattgaactcagggatcttaaagtcccttagaacctcaagattctattaaccttttggggatatctctagcctcactctgaccctgttatttacagtgtacagaagactcaggagatggctgaacagggtctgatgtagtcatgtcctgggccttgtttcctgtaaaagtctcactgttcgtttattttttgtcatttttctcccag

SEQ ID NO: 208211 - DNA, 441 bp, Homo sapiens
ccatttccacagatttggaaggcccgctgagccattcaacatttgctcccaacaggggtgattagttcatgtaatgctagcattaagcaaaagactctgcctgaaacgtcctctggcccagctccggtgctggagtgacctagttagctgtgtgtcccaggctcagccctccccctgggtagcttctcggtttttttttttttctctgcacctctccctgcacccttagctggttttaaaaaaatctgtccctctctccatcagcctgggcaagagtggcttctcactgcatggaggtctgcaggcagcctgtggcttttctttgattcaacatgcttttctttttggaaaattccttgtctttctgctttgtttcttattgaaactcatgttttgatttgatgactcaaggaacttacttacagtgtctaaccatcatga

SEQ ID NO: 208212 - DNA, 938 bp, Homo sapiens
catggggctggcgtcgaggccagctctgcctcccatgggtgggccgccttaggctcctcctctgcaaaatagggagctgttgcaggacatttcagagctactataaggactgaaggaggccccggggaaaagagctcttgatatattaaggcactgcttagtagtgactatgcttactttgcgagcagggaaaccgaggcctgggtaggacagaggggggcacatgtgtttactgccctctccgcccccgactttggtgccatcagcctccacccctgctgcgcccgtcagaatttggcttccacgttctgctcccggaccctcccagcctaacctgtggatcctgccacacaaagatgggcttacctgggagatcttcagttttaagaactctcagccaggcatggtgggaggctgaagcgggtggatcacctgaggtcaggagttcgagaccagcctggccaacatggtgaaaccccgtctctactaaaaatacaaaaattagctgggcatggtggcatgcgcctgtaatcccagctactcaggaggctgaggcaggagaatcgcttgaagctggaaggccgctatttcagtgagccaagctcacaccattgcactccagcctgggcgacagagcgagactctgtttcaaaaaaaaacaaaaaacaactctcttccttgctaggcatgttgaccttgtataagggcaccctttgaggtccaatccaggttgaggcaggagaatggcatgaacccgggaggcagagcttgcagtgagccgagatcgcgccactgcactccagcctgggtgacagagcgagactgtctcaaaaacaaaaacaaaaatgtccgctcagtccactcttccctgattgaaggacaaatcgcattctaagtttagcgtctaaatgaagcgtttcccagacagagtgaccttc

SEQ ID NO: 208213 - DNA, 248 bp, Homo sapiens
gggaacgtagtcactaaattccaaggcatttagaaaagaaaatttctttatttcgtatgaaagtgcgataagggataggactctggagtagacagatgagaaaagagaattctaacatatttctttaattctgtctgcaaaactatatggaacatataaaactggaaggtgctaatgtaaagattgaacaggaggaggtgggtggtaagaagtactataaaaggaactaaaggtgaaaatatagcatt

SEQ ID NO: 208214 - DNA, 886 bp, Homo sapiens
actgtggggtttcagaagaggaaaagatactgaatatcaataaaacataagccattcaaaatatgcctatcctcatttgtgtagtggtgagtaaaaaagaaaaaaaccatgcctacttctcaatttggcaaatgttgatgagattgacaatccccttcctgataacctacatattgagcgcatttttttccccaggacttcaatccatatggggaaaatgggtaacacaaaagaaaacaaagcagaaagagattcttccaaccttggtgcctgggaagcttctcaacctctcacaatctaagctctaaggcactctttcaggaagtttactattattgggtttatgtttctctaagtatacaggtggagcttctaaatgcctctcatgtataccacttcctgggtatacatgggccttcagagagctatcagtttgctgggcctgggtcccaagttttcagagagctatcaggttgctgttgctttccattgtcttgacccaacccgaggaacaatttagctcaacagttgcagaaaattacagcactcaatgtgctggtgtggtgatctgagcctgattaagtttgaatctgacaacactgctattcaccagctattgcccttaagggagtaacttgacatcaggtttctcatcaacaaagtggagtcaatgctggtcccacctcaaggggttgtttcccagcttgaatgataagggagttaacatgcatccaatgcaatgtatagtgtttttattttattttttattttttctcctgatggagacaatatgcataatactgtgagtcttgggcagacatccaggaaaatctggttgggaaagacctagagaattctgattaaaagaaagaattaatgattttca

SEQ ID NO: 208215 - DNA, 604 bp, Homo sapiens
attttctttatctttaatttaaaatatactataaaactctaaaaatatttagatttgatatagcatgtaagtcaaaaattgagagttgagaaaattatcttgatcctgcctttggattttaaaaacagtttcactgagatatcattcacatttgagagagttcaaccatttaaaatgtacaactgagtatctattagtatattcacagcattttcatcaccctgaaaagcaaccccacatctcctaggcatgactgcagccttcctccatgtccctccacctacccctgttgtaggcaaccaccatctatctacttttgtctccatatatttacctgttctgtatatttcgtatacatagcgttatacaatatgtagtcctttgtgactggctttttcacttagcataatgctttcagaattcatgcatgttttagcacacatgagtagtttatttcttcttatagttaaatgatgtactattccatggctatactggttttccattcattcatcagttgatggacctttaagttagtttccactttttagctattatgaacaatgctgctgcgaacattcacttacaggttattatgtggaca

SEQ ID NO: 208216 - DNA, 498 bp, Homo sapiens
tctcctacctcattacctctaacacatttactggaactcaaagtacgaaaaccacagctttatttttataaagacaaaaggaacattaacattaatcatggactggtgcaacgattactttgtcctaacagaacgctttctatgtgaatgtttcaaaatattttataaacaaaacctctgtggtacaaagtaagagaagtgtgaatattacaccaatttttgaaatgcttattccttgcatttgacatttacaaatcttcacctatattctgggcatctgtgtgcatggcttatcttccctgacaggctgaaaacaccgtgaaggcaaggcgtgcatcttggcatttgtatgtgcagtctggggtctctggcacacacaaggcagccatgagctacttctacaaggctgtgaaattcaattttaggaagctgatctgaacacaggacaagccacattcttcaacactagctgaatcaaatgaaaggtgatattttgtt

SEQ ID NO: 208217 - DNA, 897 bp, Homo sapiens
caatgaatgagccaccttagcaggagcagatttttcccaggaagctgctgcctcttcctgaggcagaaaatggattactaaggctcaaaactaaaagagatgccagcctgggtgacagagtgagacgccgtctcaaaaaaaaaaaaaaaagacctaataagtaccacattgagtcacccctggttgctctgggcgacagagcaagactccgtctctaaataaataaataaataaaattaaatgcttgacctttacgtcaaattaaactggctagctttaaatagatttttttcagattacatgctcactctagaaaaaagagatgtgtgacaaaatacagagtgaaagtatacttcttccctttctattttttgagaagcacaatatagcatcctggtaagtgagcaggctctggaaccaaactggattgaaactgtggcttgggtacttactagccatgaactggaacaatttatctgttttaatttccttctatgtaaaatagggataaaaactatagtaattagagctgtagtgagcattaaatgagttaattaatgcatctaatgtaattagagcagtgcttatcacatagttggtgctcaatgaatactattattaaactccatgtatgtggatacacagagacacaaaataaaggcaattacaaatatgttagaaaaagtattccaaaactccttatggctgtaaaagcagcattacatattgaggtttgaatggctgcctgttccattgtacaacacactgaaactgctacagctaggtctcaagtaacctggtcctttgttctttaacatctgaagagtactttggcacaggtctttggaaaggctccttctcccatcatcagtatgtactgcattatttaaaattacc

SEQ ID NO: 208218 - DNA, 362 bp, Homo sapiens
ttaagtttcgtcatgtgttttgtctttagtaggggggcagtagaaccaggaataggagactagagaaaaggagtcacagccaggcatgttggctcacacctataatcccagcactttgggaggccgaggcgggggtggatcatgaggtcaggagttcaagaccagcctggccaagatgatgaaaccccatctctattaaaaatacaaaaattagccaggcatggtggcgggtgcctgtaagcccagctactcgggagactgaggcagagaattgcttgaacccgggtggcagagcttgcagtgagccaagatcaccccactgcacttccagcttgggtgacagagccagactctgtctcaaa

SEQ ID NO: 208219 - DNA, 228 bp, Homo sapiens
gaagcctttcaacagactttgcatctcattgaccacagttctgtcatatgccaatgcctagttcctggcaagaaggaggagtccaagactgatttgtgtcctggagctggagattttttccttgagcatttgggaagctagatacctaaacaaaactgttttttggttatcagggaagagaaagggtggagaagaatggatattcaagaaagttaccgttgacagccg

SEQ ID NO: 208220 - DNA, 603 bp, Homo sapiens
cagggtggtaaatccttgattcttagtgcttgctggctttttagagtgacatgaactcaagaattttaaatgtaggttttaaattcaattcagtcaattcactttgaagcccacattctcgttaaggtcaggaattgccctatcaaatttttttttttttaatttttaaaatttttcgtagagacagggtttcgccgtgttgccaaggctggtcttgaactgctgggctcatgcagtttgtccgcctcgggctcctaaagtgttgagattacaggtgtgagctgccgcacccggtccagtttggtttctgtgtccttttgatgtacacttcgtctttttgaagtttttaaactttattttgaggtagttttagatttacagaaaagttgtaaagatagtacagggattttcctgtataccattcacccaacttcccttaatctttctgtaactgtggtaactgtggtgaatttctcaaaagtaagcagttgacaccgctacagtattgttaaatgtggactttattcatattccacctgtttttctgctaatgtccttttcctgttctagaaaccatccgaggaacccagattgtatttagtt

SEQ ID NO: 208221 - DNA, 618 bp, Homo sapiens
cttgcagatcaagatttctgttagagagaaaagagaagagaagggaaaaaggaagaagagagggagagaaagagaaaaggagcaagatttagctctagacttgagccaatctgttacattaagcaattttaatctcagtaggtctgttttctcatctgtaatttgggcacaatcctgacttcatggtgctccagtgagctttgggaataatccatgttagcactcatagcgtggaatcaccaacattttttgagtgcttactatgtcctaggccctgttctaggtgcttttcatggattcattaaaaaaatcatgaatttggcacacgtattatcctcctcttagaatgaggaaattgagatacagagcagtttgtaagaacttatgtgtaagtccacacagctaatgaactggggttctaaccaaggtaatccggttaagagcccatgctctttgctgcaaatccatgtccttaaccacactgtactgttaccttaataggagaaatatgaagctattgtgtgatcaattctgtcagtactattattccatgtcacttttattaaaaatgagaaaaagaaattgctatcaaataaatatatcatgtttagtagacaa

SEQ ID NO: 208222 - DNA, 438 bp, Homo sapiens
tgtgggaccttaggtaaatctgttacattactaggcttcagtttgcaggcttgaattgcaagatgggcgtgctggattcaatgatctccaaagcccttaccagtccccaaattctcattatacacatttgagaaatgctttgaagaaaacagggccgggtgcggtggctcatgcctgtaatcctagcactttcggaggccaaggcaggtggatcacaaggtgtcaggagttcgagaccagcctggccaacatagtgaaaccccaactccactaaaaatacaaaaattagctgggcatggtgatacatgcctgtagtcccagctactgctgaggctgaggcaggagaaccgcttgaacccaggaggtggaggttgcggtgagccaagatcatgccactgcactccagcttgggcaacagagtgagactttctctcaaaa

SEQ ID NO: 208223 - DNA, 536 bp, Homo sapiens
tattcgtccatttgtatatcttctctggccaaatgtctattcatgtcatttattcattttaaaattgggctatttggggttgtctttttattattgagttgtaagcgttattctgtatataagtcccttatcagtacatgatttaaaatgtctttcccattctgtgggttgtcattccactttcttgatggtgtgttttgaagcacaaacattttgtgaaactttaattccaatctattgtgttgctgtgcttttggtgtatctgagaagtcattgtctaatcagaggtcataaagacttactcctgttcttccttctaagtgttttatagttttcttgcttacagttaggtctcagatttactttgaatgaacttttgtatgtgatgtgagataggggtccacattcactcttttgcatgtgactatccagttgttccagcaccatttgttgaaaagactatgctttgcccattgaaccgtcttggcccctttgttgaaaattaattggccataaatataagggtttatttctga

SEQ ID NO: 208224 - DNA, 423 bp, Homo sapiens
ggtgtggttctttttattttgtagggctatgaagtacctcctgctcatgagaaaaatgagatggtaagtttgccactgactaaagattagactggtaagaactgactttccatccaggacacaattttcctttagagttggccataaaactttcattccagaggtgcccaccctacacctggaggataggagcattcttatctctgaagacccggggacacagaatgcacctgaacaagcaggccttgccaggtttcccccagtttattaccattagatcatacccttggtcttccggccacacttctgcatgactgtccataaaaatgcacagttgtctctgtttctttgggtcttcatttctgaaggctcccatgtcacataaaacatattaaataaatgtgtatgtttttctcttaaaaa

SEQ ID NO: 208225 - DNA, 571 bp, Homo sapiens
tatctgcaatggctcttttctcatactgcaaccctctccaagcctcccttctaaaaagatggaggacttcatcagaagtcacaaaggaacaatttttgttcagaaataaaaaacaagtcagaaggctgaatctcatcttacaactatgttctggtccccttctatgtttatatttcccctccattttttttgatattggttctgcatagccatctgtaaagcatattcccctggacttcatgcttcccagaacattacacacaaactgtgcatatgtttttcctaaacttagtgatcacatttgtaggactggtggaaggagagtgggggacgggaaaaatttcctcctttcttacgcacagaaatcaatcagcaatttcacttctgtgagtaagaagtggagaaaggaagaaaggagaaagaaaagaaggtaggtagaaagcattctcacttctatatactgtattaagtagccaacataaagctagaaacgaatcaagctgaattcatttttactctattctcacaatgctgttatcttgtctctaacctagggcatccacttccttca

SEQ ID NO: 208226 - DNA, 415 bp, Homo sapiens
actcttgttgtgcctgtgaataaccactccactctaacctaggaagcatagtgagaccatgtctcttaaaaaaaatgtaggaaagatattgcatgggctgcattaaggcctttaatgtggtagctttatttcacaagtaagggaagccttggaagatcagattatctttattgggttatgcagttattgaatggtggagaggagcctaaagcacatctttttagtgcaatgttctttaataattattactagtcttactagaaatggaaagacttatggtggttcattttccaatttagaatccttgtcttgtcatttcagcaggtgtcgctttaaaaaaaaaaccagaatcctcatctgattgggtttaaatattggtagggttcttgaggactgagagggcaaaggaaaggga

SEQ ID NO: 208227 - DNA, 396 bp, Homo sapiens
ataaagtcttactcagtgacttaaagtcacactgtgctttcttttctctgacttctgcaagcctaaaatactccagcccttaactgtgctctatgtcagcattcttggtacgtggtttgcagagatacctgctggccagtgatcccaaaagtccatgaccttgtctgatttgtaattttgttgatggtgtcatgggttagtctgatggagaagagtgaaagaaactaactagttctttacttgctgtccctggcatggttattctcaggaaattgttttagcatgttacttcttcatgaaaaatatctttgcaagaaataaacaagtttatttgggctactaatagaagtaaaggagatagaagatgatttgaaaagtgataagaaatcttagacc

SEQ ID NO: 208228 - DNA, 347 bp, Homo sapiens
gcccctgcctgccctctggtgtagaaggtgaagaacagtgatgagaatcaacatttggttaagttttgtgatactcaaagagtttaaaaatgaaaaagataaaggaagatagattattagtagaccttgtatgacacaaaatgattatatgtcactttttaatgaattttaaagtctcatatccatttctaagtgcattacatattgaatttaatattacttgaattttctctactgttcatacagatttttctctctgcatttaaatgtggcagtggattttgatacccttttgactatgacataaaacagtcctttatatcacaaattaaaaattttttatttat

SEQ ID NO: 208229 - DNA, 454 bp, Homo sapiens
aaaatttccatttggttcttctttatatcttctatttctttcctgagattttctgtttcttcgctgactttgtaatttttgtttgtttcaagtgtgttagtaattgctcattagttagtaattgcatttttatggtggttgctttaaaatctctggcagataattgtaacatctttgttatttcagtgttaccgtccatagattgtctttttaaattcaagttgagatttttcttgttcttagcatgatgagtgattttcaatttcttaaacctggacattttcggttttatagtaagcctctggatcttaaatgttgttttagctgacttccactgacactcttccagcagagggaggacagtactggacagttactggcaagtgggaaaagcagtccaagctccttttagaaaggaagtaaggggagaggagctcctcgttacttctgggtt

SEQ ID NO: 208230 - DNA, 354 bp, Homo sapiens
tttaagtgtgatttatgaggattaagaagatttcatatctgaagagtggaaatttatacatatgtacctaggtctagatagcataagctctggtttccctcagttacttaaatacagatgtaaaatcattgtatgaatatattaaataaaatttaggttgtaccctctgttacttcctattaaattttttttattggctcatctggtaaaatatcataaacactacgtaatttttctgacattgaatatgtagaaaaaaattataaaactgagttttcagtgatctatggttgacttaaaattaaagatgctgttattttagtgatataaatggcaaatgtgaaatttagaaaa

SEQ ID NO: 208231 - DNA, 778 bp, Homo sapiens
ggtctgttcaggttttctattcctgattctatcttgataggctgtgtgttttcaggaatttatccattttctctaggtttttcagtttgtcggcatatatttattcatagtctctgatgatctcttctgtttctgcagtatcacttgtagtgtttccttttttatttctgatttcgtatatttgtttcttctatcttagttattctagctagaggtttataatgtttaaggaaaaccaacttttcattatcttttgtgctttttattctctacttcatttatttctgctgtaatctttattatttcttttcttgtgttaattttgagtttggtttgtgcttgcttttctagctccttgtggtgcattgttagattgttcatttgtaatctttctgctgttttgatgtagttatttattaccacaaacttcccttttagcactgcttttacatatctcacaggttttgataaattgcatttccattcttatttgtttcaaggcgttaaaagaaatttctgttttaatctcttcattgactcagttgtcattcaggagcatgctgtttaatttccatgtatttgtatagtttccagagttacttttgttactgacttttagttttattctattgtctgaaaagatacttggtatgattttgatttttaaaaatttgttgagccgggcacagtgactcatgtctgtaatctcagcactttggaaagccaaggtgggtggatcacctgaggtcaggaatttgacaccagcctggccaacata

SEQ ID NO: 208232 - DNA, 523 bp, Homo sapiens
cttcctcacttcatttgggtctctgttgatatggtacttctctgatgacttcatctaatataacaacccatcctgtgcctcttgtattagtctgttctcacgctgctaataaagacatgtctgagactgggtaatttataaaggaaagaggtttaattgactcacgttctacatggctgggcagacctcaccgtcatggtagaagacaaggaagagcaaaaccacatcttacatggcagcaggcaaagagaacgagagccaagcaaaagcggaagccccttataaaaccatcagatcttgtgagacttattcaccatcaagagaacagtatggggggaccgccccatgattcaattatctctcagtgagttccgtgtgggaattatgggagctacaattcaagatgaggtttgggtggggacacagccaaaccatatcatctctcaatccctgtcatcaatccctgtcatctctcaatctctttaccctgctttactttccttcatagtttttatatacttcg

SEQ ID NO: 208233 - DNA, 473 bp, Homo sapiens
ttctttattttttatatgaaaacttgacttctttcgatcaggaagagaacatcctggatggatcataacatctctaaggagagtttccttgtgttgcctttacaaattggttacttcaaccttataagaaaaatgaagcttactgagtattaagctccattacatactgattcttctacccttgaacacacaaacagatcttgttgcatagctgctataatcactgtgttttatttatttatggttattttttacttatgtttgttttccaaagatatttccatgtattgatgtagtgcacagacatgtcacttttagtggccatatgatatgttcatgtagtaagctcccctcccctttttgccagtcctgtccccacatttgatgaggcatttgggctgtttccgagttattactgttacaaagctgctatgaacatcttcatacagatgggttacctgcccatctccctt

SEQ ID NO: 208234 - DNA, 431 bp, Homo sapiens
ggtgcatatccactgctggctcagtccaccccttgggctgcacagctctattcaggcctagctgccaggaagattactaggtatcattgtcaactcaggctctgtgcccagtaaacctggaaatgtctggatattcttccttgccagcatatagtcataaatctatttggggaagaacttgccatttcatcaaagtctgtacatgtatagcagggttcttcctcctagtgacctgtgacctagtaacccagccacctatgggttcttccatctgtggcttccttacctgaaaagtgcttcaggtctaggaactgagaaagggattgtgatgtgtcattggagccagtgcggttccattcgtgccttatttggttataggcgttaagcagcattcttgttagatgcccatctattttgcctataggggtgtt

SEQ ID NO: 208235 - DNA, 303 bp, Homo sapiens
gtggtaactagcagagtcaagccctacagctgggaaattgtatttgatttccaaagtaatctttccagataaagccatgcaaatcccaggatttgggactttcagagtcatctatattatttaatctgtctagtaataaatctcatttggcccgaggttcgggtctgaacagcatcgttctctttcgtcactactctgtgactcattactttcacgagcacagccaatgtttttccttccttaataaagtgttccaaaacagtatgctagatggaaaaatattggcatatgtcagaaggtcac

SEQ ID NO: 208236 - DNA, 838 bp, Homo sapiens
  misc_feature (13)..(13): n is a, c, g, or t
ggcagtgtctgcntgggatggccttccctgcacgcgcgcgtttaacaccatgcaccccagctctaaagaaggaagactttcaagggaaagatggtaacttatgtctacatgtcccaaatcctcccagtgggatttcattccctagcgtggtggatcacccaatgccagaagaaagagcttcgaaatatgaaaattacttttcagcctcagaaagactgtctttgaaaagagagttgagttggtatagaggccgaagaccaagaactgcttttactcaaaaccagattgaagtgttagaaaatgtctttagagtaaactgctatcctggtatcgatattagagaagacttagctcaaaaattgaatctagaggaagacagaatccagatttggtttcaaaatcggcgtgcaaaactgaaaaggtcccatagagaatcacagtttctaatggcgaaaaaaaatttcaacacaaatctgctggaatagatagaaaactaaacaagtgaaattatcttctaattgcagagcatgaagaatcagtggaaatattaagtgttaaaatgtgatgttttctttcctgcatttaatctgaatattgtcattttttctgaaaatatattgtaaatactattatagcatggtacatatttgggcacttttagttatagtaaagaccttttatatatattttaataaacattttcagaaaagattgctattttttaagtaagccaaattaatctaataaattagtttgttaaaatcaatagactcatgactaagtgattccacaagctggattctaattataaagtatttcaagtaaaataatctgaaga

SEQ ID NO: 208237 - DNA, 1245 bp, Homo sapiens
ccacatttgtgcatcacttctttagagaaagttaagtctgtgttctgcttaggagagataacactttttgtccctgtaggtggcccccctggtgtagccattagttgctaattacttgcaaacaaataaacaattaactccttaagctgctggctgggcaagtgttcattgacatgctaaaactttctaagacaggattttaattagtgacgttctaaatccagcccccttgtcagcggagctataaggtgaactgcaggaagatcccagccctatacacgtggggcagagccagcagaggccagagctgttgctctgtgcagaccacgagaggatgtctcccagccttcaggaaggcgctcagctcggggaaaacaaaccctcaacttgctccttttcaattgagagaatcttaggactggaccagaagaaagactgtgttccattaatgaaaccccacaggccctgggcagacacctgcagctcatcagggaaagatggtaacttatgtctacatgtcccaaatcctcccagtgggatttcattccctagcgtggtggatcacccaatgccagaagaaagagcttcgaaatatgaaaattacttttcagcctcagaaagactgtctttgaaaagagagttgagttggtatagaggccgaagaccaagaactgcttttactcaaaaccagattgaagtgttagaaaatgtctttagagtaaactgctatcctggtatcgatattagagaagacttagctcaaaaattgaatctagaggaagacagaatccagatttggtttcaaaatcggcgtgcaaaactgaaaaggtcccatagagaatcacagtttctaatggcgaaaaaaaatttcaacacaaatctgctggaatagatagaaaactaaacaagtgaaattatcttctaattgcagagcatgaagaatcagtggaaatattaagtgttaaaatgtgatgttttctttcctgcatttaatctgaatattgtcattttttctgaaaatatattgtaaatactattatagcatggtacatatttgggcacttttagttatagtaaagaccttttatatatattttaataaacattttcagaaaagattgctattttttaagtaagccaaattaatctaataaattagtttgttaaaatcaatagactcatgactaagtgattccacaagctggattctaattataaagtatttcaagtaaaataatctgaaga

SEQ ID NO: 208238 - DNA, 1043 bp, Homo sapiens
ccacatttgtgcatcacttctttagagaaagttaagtctgtgttctgcttaggagagataacactttttgtccctgtaggtggcccccctggtgtagccattagttgctaattacttgcaaacaaataaacaattaactccttaagctgctggctgggcaagtgttcattgacatgctaaaactttctaagacaggattttaattagtgacgttctaaatccagcccccttgtcagcggagctataaggtgaactgcaggaagatcccagccctatacacgtggggcagagccagcagaggccagagctgttgctctgtgcagaccacgagaggatgtctcccagccttcaggaaggcgctcagctcggggaaaacaaaccctcaacttgctccttttcaattgagagaatcttaggactggaccagaagaaagactgtgttccattaatgaaaccccacaggccctgggcagacacctgcagctcatcagggaaagatggtaacttatgtctacatgtcccaaatcctcccagtgggatttcattccctagcgtggtggatcacccaatgccagaagaaagagcttcgaaatatgaaaattacttttcagcctcagaaagactgtctttgaaaagagagttgagttggtatagaggccgaagaccaagaactgcttttactcaaaaccagattgaagtgttagaaaatgtctttagagtaaactgctatcctggtatcgatattagagaagacttagctcaaaaattgaatctagaggaagacagaatccagatttggtttcaaaatcggcgtgcaaaactgaaaaggtcccatagagaatcacagtttctaatggcgaaaaaaaatttcaacacaaatctgctggaatagatagaccacattggatgatttaacattacgaatggtgtttaacttaatatctccagcacttaccagggtactagacacagaataggtaatgaaaatgcgaagaggctgggcacagtggctcacacctaaatcccagcactttgggaggacc

SEQ ID NO: 208239 - DNA, 620 bp, Homo sapiens
ccttcataactaaaaatatgcttggcgagaatagaaattcatctcccaatttcacaagccaggtgctccttgaccatgagagagctgaaaggaatgtgaatgtaaatcttctgttcctttttttttttaatgtatagatcatgtatacaataaggtagattatcaaacatgtacagcagaaggctcatttcagatcagaagttctacattcagtgagggtggtagaaatgaaaacattttattcattttgcatgttgcctatattttctaattttaaaaatacacatattgcttctttctgtattaataaaagcttattttaaatgaccgtactaatacagtttgtactgtggttaaaatatacatgaccttgaccatgagagagctaaatcttctgttccaaccgcctcattttgcagaggacaacgtcaaggctctggcctgtggaatctgatggctctgcctgaggggaggggtgttgacaacacacaagacagttggagttgtgtagccttcagaaagccctgtgtgctcatggcctgagttttcttagctaaagtttttgaagttgaaaaaacagccacaagccaaggtcacaagtagagagaggtttttttgtt

SEQ ID NO: 208240 - DNA, 192 bp, Homo sapiens
gacttgtggctttcttgaaatcagtgagatcaagaacccgccaattccggacacaatgttttacgaattgtgtgttagtaggagttgctccttacaactgctatttcacaaacatttattccttgatataacctgccaccactagaattgcagtcactgattcaccaaaaataaatcaatcatgtcgttttt

SEQ ID NO: 208241 - DNA, 302 bp, Homo sapiens
cctcagaatccttctctgagtatgtcaagcagtccctaccagaaatgaaacctgtgccattccaaacctgtagtaattattctgatgtttacatgtgttctataaggaaaggactgtgaatcatgactgctctttgtagtgcccatacttattaccatatgaaaaaaaaacgaatttgaatggtgactggaagcctttttgaaggacccaggatcatcatagaaaaccttattgagaccctgtagatttatcgaaaaaatggtaagcttgacacaccaccaagtgttgtagaggatgtagat

SEQ ID NO: 208242 - DNA, 164 bp, Homo sapiens
tactgacctgagctaatcatggcaaccctatatccgttactggggactggttcaggaataagttcactactcaatttgggacaatgagacatgagaggagtagactgaatgttagaaaataaaccacagcatgccctacaccacacttggcatctctcacaaag

SEQ ID NO: 208243 - DNA, 251 bp, Homo sapiens
actgagcagccacaccagcggcagaaccaccaggaggcagcccaggaagcttgacagctgcaggtgctctagaggggatgctccatcaccatcggaaaccacagtgcatctcttgagcatgtggtcatggacgctgtgacactgtgacccactgtgcgggtcaccagccaggtttcttcctgttggacattctcatgccagccctgaagttgtgacctccctaaggaagagtctagaactcagtgatgtca

SEQ ID NO: 208244 - DNA, 539 bp, Homo sapiens
aagcccagcttgagttctagaatctttaggtcatagagatctctcccttgtctgaaatcggcctcagcattgtatcttttaatgtatttaaatcttattattttgaagggtattactagtggctttatatccatcactattatgcttacagcagacagtcaatcaacactgatacttgaaatcaaaagcagaagtctgtcaataaatctgttctcttaatcaacaattcaaagcaggaatgaacattcaaaacaggaaaaggattctaaacctcctatcagcagccagacatgactatagtctaggtgctgctattaagtgtgcaaaagaattccatttgtccttattttattttatttttattttgtgagatggagtcttgctctgtcacccaggctggagtacagtggtgtgatctcggctcactgcaacctccgcctcccaggttcaagcgattctcctgcctcagcctctcaagtagctgagattacagacgtgtgtcaccatgccctgttaatttttgtttgttcgttccattt

SEQ ID NO: 208245 - DNA, 611 bp, Homo sapiens
ggagtgaattctctctccggcttcagattgctgggagtatcctcagcctgttatgaaggagactcttttagacctgatttactctccagccagcctgaggtaagtctgtagccaaagagagggttagtactttactctgcaaaaattccttatgtcacctctattgccttgcattgtcatgagggcatgtgactttttcaatattgttctttcatgctaattacacacccatgtaaaatgggagtagctccctgctctcttcaacctgatcacttctgtcttcctatgagcaaatgactggagtctaattctgtaaaccaggtgtctgcaggtacactgcaggtgaagctagcagtacaaaccactaccacttacatttggttgtgagatgggaattttgcatcttatttctcttccttaaaattgattggcatagaattctataaaaaccatttgtcacatacccagttggagggtaaatttgcatagatccttcagtaagggttttatgctatttttttttatatcccgggactggaatatttaaagtatttccattttgcatgacatttgaagcactatgactactcttttgcatgtaattttttgtt

SEQ ID NO: 208246 - DNA, 676 bp, Homo sapiens
gatagccaataacctcccatatagttgatgagaacataatctgataaatcttttagaaggaaatccaggcacacatgttaaaggaaagttgtgcatacccttcttctgggaatctatcctaaggaaatggtgagacaaacacaaacacatatataaaaaaaaattcatttgtgtagcttataattagtgaaaaagtgaaaaaaagctaactgcttattagtaaataaatggttacataagtttcagagactcaaaatacaggtataatataatcttatttgttaaaaaattcaaatatgtatacatgtatagaaaacatgtggaaagatgaaaagcctacatatctaaaggggaggaggggctgaagggagagagagagcttgaggtatatcacttctcaatgtgaagaatatgagtaattttcaccttgctccttctttctgtactgtctgaaaatttcccaagatcatgcattacaaattatatgcagaaaaagtaatgatatttggagaaaaaaaacacaagatttttctagcttaacgttctatttctaatcacagcagccaaggacattttgtgaaaagcatgctcacattactttaagttacgtagtagaaatatttctaatttcatctatttatttgttaatttagcttaaatggtattctgtaattac

SEQ ID NO: 208247 - DNA, 412 bp, Homo sapiens
atttagtggctttgtgataagaaaggggaaatgcaaaacttctcttgtaagactcgtggtgtgagctggtcctgaagttcttgatcattttgttagcacccaaactggtttgtcaacaaactttgagagtcaaaagcttgagagacatgcacatcaaagaccatgacaaaaagggaagaaaagcaacaacagcacagaagaccctctggccctctgcaggctgggttacagccttctcttcaccattgcatttagattatagccattgcaacagtacaatgatgctcctacaccctgtacagctgtatcatccaccagattgtcagcttactgagggcagggccagactaccccacagctggtctgtctctcacatatagcaggaactcaataaatatttgttgcactgaaa

SEQ ID NO: 208248 - DNA, 260 bp, Homo sapiens
ttttccccataccatgatgttcatgccaatagattcacaatctagttttggtgtgagatagagacagagatatatagaatcatacaccactataatctcaaagttgggaagattttttgacatcatatagttcagccctcttttggatactgaatattttgtatatcataaaaatgaaaaaataatttatatcagaaaagcttcagcaacaggaattccatacttgtcatgttggatgaatggacgtgggtgaaacttta

SEQ ID NO: 208249 - DNA, 385 bp, Homo sapiens
cttgtctatgtctatgtctgtctacgtctatgtctatgtctaaggtctaggtctaggtctatgtctagtctatgtctatgtctctagctctagctctagctctatctctacctctatctcctgttagttctgtccctctaagagaaccctgactaatacaggatctgaatttaggaatcaataacaaaaacaattttgggaaactcataaatatgtgtaaagtaaataaaatagtcttaaataaccaagggattaaagaagaaaccaaagagaaattagaaaatactttgagatgaatgaaaatgaagacacacttacaaaaaaatgaaaaaaaaatatgtggagtgcagctaaaacagtgcttggaggaaagtttatagttata

SEQ ID NO: 208250 - DNA, 246 bp, Homo sapiens
aaaggagggctggagggcaggttaaagaaaactggagatgcaaaaaggctgggctttgctggcatttccccctgcagtctcctctcctggctgctggccacatgctcagaactgagtctgctggccccagagtaaactgtctcatctctgggcctcattttcccatctgtgactgcaactgcagatgacccctctccccgggtgcgccattgccctgggaggcaaaaaagcatgagccaacccaga

SEQ ID NO: 208251 - DNA, 545 bp, Homo sapiens
ccatcctctagggtcccagcactccaaagtctaattcagctcccggcccggacccccttctcccagtgggagacgagtgctatgatgagcttgcctttcagaccatgatcatttgccacagaaccttaacaggattactatacagctgaggggaaaatggctttgaagactacgtaacaacttgggaaaagtacttataataaaatattaagtggaaacaagaaaacaaaatgtctatgtatcaggatggccatgtatgatcatactggggaaagcttggaaagaagcacagagtggttaggataatgtgtacttggtaggtttccctctgtgttctaaaattttctgcatggtttgctatgttttgatttttgaacttgaaagtctattattcaaactaaaagttacaatgaaattgaccaaaagaccaaactcatctcaacagggtaatagccaagaatataccccacatcattgcccctaaaagggactatcttggtgacccactacctaccacccacgcatcttgcaaaaaaaacaaaaaa

SEQ ID NO: 208252 - DNA, 614 bp, Homo sapiens
ctattttggggtctaaaaggtccttttcattttatctttctttctgttaatgtggtgtgccatatttactgatttgcatatattaaaccatccttgcatccatgggatgaatctgactttgtcattgtaaatgatcttttaaatgtgctcctggattcagtttactagtatcttgttgagaatttttacatctatgttcatcaggaatattggcctatagttttctttttgttgttgttgagtccttatccagttttgaaatcaacataaatctggcctgataaaatgagtttggaagttttccttcctcttcaattttctggaatagtttgagaagcactggtagtagttcttctttagaactaattaagcagtgaagttatcagatccttggtttttctttgattcgagactttttattatttttatttttattttttagctgcaccaaaggcatatcctagctttattaaaggtcctgcgccacagagtcaacataaaaacacaaaaagtctcatcggtttaataacaatgaagaaccccaaaaatggaaaacgaagggggcaggggaagagacctgctcatggcactgagcctggccacagggtccgctg

SEQ ID NO: 208253 - DNA, 202 bp, Homo sapiens
gattttaatgagaccccaagtttacagatttctctgtatcactcactcaaaagtggactttttcttttctagatgattttcacaaagaaagaaaaatgtactttgaaaggagcaaagtgcttaaaacaaggagtgcaccacaaaatcgttcaggggccgcctgctgtggttagctggctgctggttcacacgtgagcccaga

SEQ ID NO: 208254 - DNA, 290 bp, Homo sapiens
gagctacctggaaacatagatgtccattctcccctttagcttcttccagcctccattcctcttggctgtgtcctagtccagtcctccacccagattgggctgaggtgacacagacatccacccagaaggctgtacagattgataaccgattgattcattcaaagggtcttgctctgtcacccaggctggagtgcagtggcacaatcatggctcactgcagcctcaacctccaagctcaagtgatcctcccgagtagctgggatcacaggcatgcgccagcacacctagct

SEQ ID NO: 208255 - DNA, 500 bp, Homo sapiens
aaagcatgccactgagggaaaaccagaagacataatagtctggaaaattagcaacctacctaattgaattaaaagaaaaacttgaatgagattttaaagtatattttaaaaataatttgaaagataaaagaataaaagccacaaagagcagagcattatgaaacaggctgaggtatcgttgataagaatccattaggatgtgtagaaatgagaaaatagggctaggcgtggtggttcacgcctgtaatcccagcactttgggaggccaaggtggtggatcacctgaggtcaggagtttgagaccagcctcgccaacatggtgaaaccttgtctctattaaaaatacaaaaattagctgggcatggtggtgtgcacctgtaatcccagctacttgggaggctgaggcatgagaatcacttgaacctgggaggcagaggttgcagtgagctgagatcatgccattgcactccagcctgcatgatagagcaagagttggtcta

SEQ ID NO: 208256 - DNA, 624 bp, Homo sapiens
gcctccacttctcaccatgtcttctcacaagactttcaggattaagtgattcctggccaagaaacaaaaggaaaatcttcccattccgcagtggatttagatgaaaactggtaataaaatcaggtacaactccaaaaggagacattggaaaagaaccaagctgagtctgtaaggaattgcacatgagatggcacacatatttatgctgtctcaaggtcacaatcatgttaccatatcaagctgaaaatgtcaccactgtctggagagttgaacatgttttattgggaatatattttttctctctgaatctcttatgaacgtgttggttgactgcattcagtaataaatatatgagacctttcatttcaaaaaatacgaaaaaaaaaagaagaaaaattaaaacaaaaaggactgggcatggtggctcatgcctataatcccagctctttgggaagctaaggcaagaggattccttgaggccaggagttcaagacaagcctgggcaacatagtgagactctgtcactacaaaaaactttaagagccagatgtggtggcacacacctgtagtcctaggtactcagtagactcaggcaggaggactgcttgagcccaggagtttaag

SEQ ID NO: 208257 - DNA, 234 bp, Homo sapiens
cacatattttgccatatgggagaatcggaagtcttccaaagatttccctggaaatcttgtactttctgtactaacatcattgaaactctaatgcctaccagtaagtcattcatcaactgtgtttgaataatatgatttccagcacattttctataaagaagaaaagacattattacaaaaggaaattcaaacaaaagtgtgaacatttctaattatcagcaaaataaatacatt

SEQ ID NO: 208258 - DNA, 184 bp, Homo sapiens
agtggctaatggaataggaaagatgctcaacctcaccagtaaaggaaaaggcaaattaaaatgctaatgagctattttggggggatttcattacacttatagaaatataaagataagacatgtagaaatatgttcacagtagcattgcatgcaatggcaaaataccagaaaccacccagatggc

SEQ ID NO: 208259 - DNA, 336 bp, Homo sapiens
tatatttacccaacccagttgagctttgtagtctgaaaagtcaacctaaaatatcctatttctctctacggccacctgctcttcacgttatatcattctgaaattagttgttgaatatattttctcgcaaaaaaagttaggactaaacatcacctaatattccactcatagttcaagaaatactcaattgtaagagatcaatacacattcctggaaattgtcacaccacaccctaactcttaacatgagagaagatacttttaagctaatatttttgagctaacactaatatagaaaataaaaactctctgtggtcatgccccaaatgtttctgaa

SEQ ID NO: 208260 - DNA, 251 bp, Homo sapiens
tcccctatgagacagatatttgtgataccagtttacaaggtaaaaatgagggatctaatgaagagaaatccagaatgacagctttctagaatagtctagaaagtgaatgacctaaattagtacaagaagttttttagcccaagaaatatttcttcaagaaaaagaactggctgagcacagtggctcatgcctataatctcagtactctgggaggctgaggtgggaggatggtctgagcctaggagttcaag

SEQ ID NO: 208261 - DNA, 241 bp, Homo sapiens
tgcttagcctgattggtgcccgcagtgtagtaaatggccaataaatgctgttatcgtactggaccttctgattattttccttttgcctcccgtccctgcctcagctcacacacttcagattcagtaatacttgctgaatgattaattttaaaaccagactgagaggggatgaaggaggtctataaactcagggaggagagagagagagaaaaatgcagatttcttcttaaaatcccaccct

SEQ ID NO: 208262 - DNA, 272 bp, Homo sapiens
gatgatcgcagtggtggtggtgatgataatagtgaaggtgatgtctcaagggagattgtatgagactcctatagggtagaacctactctgaaagaactcacctcaattaagcttgattggagtaaaagccaaggctagacacctaagcttcagagggacagagaagctactctaagtaagagaggatagggagttgattttcctgggtgaggatggagagtctagtgggaagagggtcagaaatgaggcctcaaaagacaaataactttggg

SEQ ID NO: 208263 - DNA, 551 bp, Homo sapiens
ttctcattgttcagctcccacttatgagtgagaacatgcagtgtttggttttctgttcttgtgatagtttgctgagaatgatggtttccagcttcatccatgtccctgcaaaggacatgaactcatccttttttatggctgcatagtattccatggtgtatatgtgccacattttctttatccagtctatcattgatgggcattaggattggttccaagtctttgctattgtgaatagtgctgcaataaacatacatgtacatgtgtgaaaggctctttcaaatacgagacttgacatctggtagaacaaataattaatggtgtccggaggtagttaaaaagggagggatggaagacaagcttcaactccagtgccaaccccaactgagcaccacgaccatccctgggtccccgtagctatcactgcataatatccaccatgcattacaggctttggaggtagcaccagcatctctagggcagccagtcatttctctagaatggtgtagaacaacagcaccaggacgaagggggatggacgcggggccgcg

SEQ ID NO: 208264 - DNA, 322 bp, Homo sapiens
cctgtatctttggatacggaaacaggcgtgaacgttgctgaacgtggaccctgtagtgagtaagagctgtttgttagtgactgaaggtcgtggtgtgttgtctgtaggaaagtgtcttactattccacatccctcatttgcatgtggggaacagacagccatggaagaaaagagatttgcccaaactaaaatagggggagccacagccaagacaagaactggcctggtcactggtctctaccgctttggatcattgctatctctgagcatggacaagttgactgtagagagctttaaaggctaaaaatataattggtatatt

SEQ ID NO: 208265 - DNA, 939 bp, Homo sapiens
taagcaaacccttaaagtgggagcaagcaggatcaaaaccataatttggattgatgacagactgcaaaaagtacattggaggaagatatgagtaggaaggtttttgaaatcatgtcaatgaatgggaagagagaaatgggagaatagcttgagaagttcaaggtcaagggctgctttgtcgagtacaaaggactcgagcatatttgaaatgaaaggtaataactgatctactcttatggagcaaccgagtttcctgatagagatgtttatctgggggaaaaaggcataagtcaatcttcttggagagaatgggatcagaaactgacatattgctacagaggttacaaaagctgtagtcagagggcttcagtgttctggatatattaaaggacaaggtcagatacccaagtgggaccgtgagtgattaatggcagcagtccactgacagcaccagtaggaaggcgctaatgaaaagatctctaaatatcagtaaggggttagctgccattaataatacaactttatagctttactattttttcttttattgttgaaatagtgagggcacgtatttttctaattgtgtttattacaaagaaaacagacccgaagaacttaaatgacttctccaaggtccaccacggttttcatagccaggtgcgccgattaaacccgctctggggccccactcagggcctctcaacctcccccaacacgcttccttcttcccaacctgatgagcagcgcggcggctgtgccccggaaccccgcaaccccggggacccacgtcccccccaggcccacctacgcccgaaccccgggaataccccaccaccgtcccaactcccacaccgccatattccctcatgtacagtgactcccgcggaccgcacaccgccccccaccaccgcgcagacagcggccgcacgcacacccccc

SEQ ID NO: 208266 - DNA, 339 bp, Homo sapiens
acctggcacatagtaagttctcagttcctggtgactccccttgcccttcctgttcagatggtttctagggcctccgctgccctggaaacctgcgacaatgctgcggcagtacaggtaaaaccgttcccccagccctgtctctgagtgctgccaccatcacagaaactgggctcagcaaaaagaaagctaaagaacttaaaacctttgtttgtatcttctaatgctgtgaaggggattcacgcaataagaatatgtcttttaaaatttccctttttccctcttccacttccccaagatgccacagctgcatcagaaccaacgtcttcaatgctccccctc

SEQ ID NO: 208267 - DNA, 496 bp, Homo sapiens
atttttagcaagtttctgctaatgatgcttacgacggtggcctcttcactggtcttaacaaccactgttcaacagcctttcacagacagaaatccatctgcataacaaggaaaggtgaacgactatctccagtaataaatctgatttacaactcaagccatccactaaaacagaagcatgaattaaataaggagagcctgtgatattaagtacaggaggaaattagtaataaatattaaaatctaatttcttggaatatttggagctaacctaattggcagaatgggcaaatgacaatgaggaagggggagaaaatgaaacatgcccctgaatctggggcatattaaatccataatctagatgaatggcaaaggccagccaagagctgtggccatgaagcagttgaaacatgattaaagtgtgaactggaatcttaatggcagatgtaattgaacagccttgagttttatgagagttaaacaaataatattatcta

SEQ ID NO: 208268 - DNA, 723 bp, Homo sapiens
ccaatggaccccgtgctgtgccctcctctctgctcatgttacctgcctataggactcttaacctggcaaagctgcccgtcaaagtgccttctcagggaccttgaggtccctttagcactaaattttatgatggcattaagagaacactgtgctgtccataacttagtgaaaatatcacacatctgtcctggaaaaggctgaaccagctctattattatcctatgatgttctctagtatatcacacttagaggaagtacatgatttcttgccactgttgccttttcttacttcagagagcttactaatgccctttgagacaaattgctgctggtggtagagctcgcttcatttatttatgtaactcagaaaatctgtgctgagttacttagtcatatcttcatccagcttgccagtcttatctgagaaaaagtacttgcttcatcgttctggattccatgaaaaccaccatatatcataattcaacagaggtaaagtgtctctattttctcttaaatggagaatgcttgctgatatgattgggtgctatttcaggctagtctccacatgtccgaaaaaatatccagggacagtgtaatgtagatagaatgcaagccccaagttcttgacatctgacagccccatgtaatttggggggtcaatttaaaaatgacagcttactcataggatctttattattattccaaattagcaagcattaatat

SEQ ID NO: 208269 - DNA, 603 bp, Homo sapiens
ggataaatagctaatgcatgtggggcttaatacctaggtgatggtttgataggtgcagcaaaccaccgtgacacgattacctatgtcacaaacctgcacatcctccacatgtatcctggaatttaaaataaaattaaaaatatatatggagagaatgatatttaagacaaaaagatgttctttctacctatttagattgtttaatcttcaattagcgtgtttggaaaagcacataagcatgatgatatgaggtgctgaagtaaacatgtagataaatataactaaactctaaaaatgccacctcctccacaaaaatcttcatcagcaccctagaaagaggtgtgattcttttcacttgcaatccattacatgttcaaacatgtaagcaatagtcacctaggctctgagcctcattcattgagtatgagggcaccattttaaaataaatttgggtggaacagagtcatagtccatacacttacagttcattcattgattaattcatgcattgaacaaatatctagtaagtgcataccctgagccaagtcctatcttagatgctaagaacactatagtgaacaaggtacagtccctgccctgata

SEQ ID NO: 208270 - DNA, 251 bp, Homo sapiens
tgtgaagtttgatagcacaataaataaaacactgaaaactgtagatgttacttataaaacactggcactcagataaattgggtttggtcaagaagacagtgaagcatatccctgttgggccagaggctgttatcgttttgctctgaattcaaaacctgatatgtctccaaatttgcttagggttgttatcctggaaaatagaatctgatagaaggtgggcactggtaccaagtgcaaggtggaggtgatca

SEQ ID NO: 208271 - DNA, 426 bp, Homo sapiens
tagagccatttttctttctaaaatcctcccagtttgtcaaaaggcagattaggggtagggaagctgaaatgagatttcaacagcctcatgggtttgtagagtaaacaaacaaacaaacaaaaaatgtgatttcagtacttgttaatgatgtgtagtactccattcaggtcttagaatatgaccatacaggctacatcctatgaataaaggtcaacagatcaacctgcaaagggattgaagccgagttttgagttatttaataactgatactagattaaattatttctgagttgatcctctaggtttatgccttctctagaagaaagtaaatctcctaaggctgaatttttgaatatatttttatttagacaattcagtgctcaatagaaaattaacaggattttatggagtaaaatcacatgatat

SEQ ID NO: 208272 - DNA, 563 bp, Homo sapiens
gatattccatattcatggatagaaagactcaatgttgtcaagatgtcagttcatcccaacttgatttatagattcaatgcaacctcaatcagaacctcagccagttattgtgtaggtattaacaaacttattttaaagtttatgtggagagaaaagaatacctagaattgccaacacaatattaaagaagatgaacaaagtcagaggactcataccaactgactttaagactaccttactacaaagttacagtaatcaagacagagtgatattggtaaaacagtagacaaatagattattggaacagaatagagagcccagcaatagactcatataagtatagtcaactgattatgacaaagaaacaaagacaatacaatgggcaaaggtagtctttttaatacatggtgcaggaacaacggaatattcaaaaacaaaaaaagaacctgtgacacatatcttatgccttttatacaaattaactcaaaagggagcataggactaaatgtaaagcacaaaactataaattcctagacagtaacatattagaaaatctacatggt

SEQ ID NO: 208273 - DNA, 365 bp, Homo sapiens
tctgtttttaccttaaatataaacagattgaacagataatcaaaagccaaagatttagactgacttgttttttgaaaaatctagctacttggctgggcacggtggctcatgcctgtaatcctagcactttgggaggccgaggtgggtggattgcaaggtgaggagattgagaccatcctggttaacacggtctctactaaaaaaattagctgggcgtggtggtgggcgcctatagtcccagctactcgggaggctgagacaggagaatggcgtgaacccgggaggcggggcttgcagtgagccgagatcgcgtcactgcacttcagcctgggtgacagagctagactccatctcaaaaaaaaaaa

SEQ ID NO: 208274 - DNA, 563 bp, Homo sapiens
gtgggtgccgacattgggcactagagaagatgaaagtagtaagagatcataggctgaaactgttaaactcccaaagtacagggatatttaatgcacttgctgtcagctgcaccttgaacttcccattatgccaacagctgtgaagactgagcccccgtgaacccctgaagggccgtggcgggggtagacttgctttcgatgtttccaggggagcctctgctggaggtgaagacctacactcagatccttccaggcaccactgggcatggaaagatacttgttcagggtcagaggagtagccaccctctcccaagacaaaatccgtaagaccctgagaaaaggaggcaggagagaaacacaaatgcttcaaattcatttttaaaggctttttcaaggtcaaggctaggttgtgtcccagtcaagcacatgtaagtagacctcacgttgccttaagtagacctcacgttgccttatgatctggtgagcgtagaaggctctccattcactagctttgtaaaagaaacaaaatgtgctgttcttgactttctccttataatcctcac

SEQ ID NO: 208275 - DNA, 390 bp, Homo sapiens
tgatttcagtgcgcagctggggttcaggtgcacagagctgggcaggacgtaaggtacccagagcgggaaagctgccttctcagcatggacatggttggaggcccggggctgaagccgcccaactggcctcaggagacccggtgtccccggtcacagctgagcgcggggctgtgcagcgccttccacatgagcagcatctcgtagggcgcgaagcggtgcactagcagcaactcgcggtacatgcaggggtcgaaggaggactgctgtgcgccaggcaagctgcacgccgaagggccaggatgccctcgtggccgctgggcgccaggccggcgcgctccaagacacatgcccatgtaggcgtcgtcgatggggaagagcggggtgtggcgg

SEQ ID NO: 208276 - DNA, 350 bp, Homo sapiens
aagtcacatcttacatggtggcagacaagggagcttgtgtaggggaacttccctttataaaaccatcagatctcatgagacttattcactatcatgagaatagcatgggaaagacctgcccccattattcaatgacctcccactgagtccctcccatgacacgtgggaattatgggagctacagttcaagatgagatttgggtggggacacagacaaaccatatcaccaaggcttggtgaagtagcaaagaaagaggctttcttcaagaggagattgctgactgtcttagttaacaaatccagcataccctgcggtgccaggaaaaatgtaaagcaaatgtatgtgaagg

SEQ ID NO: 208277 - DNA, 284 bp, Homo sapiens
aggctgtgggagcagtgtggccagatcttttctagggaaaccagaaatctttttttttcttttgagacagagtctcactttgtcgcccaggctggagtgcaatgatgcaatctccactcactgcaacctctgtctcccaggttcaagcaattatcgtggttcagcctctcgagtagctgggattacaggtgcgtgccaccacacctgactcatttttgtattttaagtggaggcagggtttcaccatgttggccaggttggtctcatcctgacctcaagtgatc

SEQ ID NO: 208278 - DNA, 350 bp, Homo sapiens
gaaatagtatttacagatgtaattaaagtgtcttgagatgagattatcctggaggtaggggctggactgaggagccaaatccaatgactggcatctttagaagagaagggaaaacagacccagagacccagagggagggccatgtgaagatgaaggcagacgttggagttctgcacccccaagcccaaaacaccaaagactgccagcaccccgcagaagtctggagaagggcgtggaatgaattctccttcaagccttcagaatgaaccaaccctgccaacaccttgatttttagacttttgaccttctcaactgtgagagaataaatttctgttgctttaagccaccaa

SEQ ID NO: 208279 - DNA, 585 bp, Homo sapiens
atttctcagactgacagacacttagggaaaatagaaaaggacccatgctgaatatcgggggttggtttcccccaatacatgtgtaaaatatacagtggtcagatggtgatgagtgccacggacaaagttaagcagggaatggaaggaaggaatgctggcaagagaagctggtttaaataaggtggctaggtgggccttcctggaataagccacgctgccacatgaggaagagcactcaaggcagagaacacaagtgcaaaggccctgaagcgggctgtgctggctgtgtttgaaggccaaataggaggccgggatggctggaggggagtgagggatggtggtagatgaggtcggggtgggtgatggaccagatcgatagggccatgtaaggccagccattggatggccatgggcttttaggctgagatgggaaggttttgaatggagcatgatctgactcatctttgaaagggatttctatcattctggctgttgtgtggagcagagactgtaggggagaagatcttctcccctgaaactcttgttactgagtcacagagatcaacaagattaaaaaggtgatca

SEQ ID NO: 208280 - DNA, 451 bp, Homo sapiens
aacggattctagtctttgtcttctctacttcaaaacagtagttccctatatttcaacagactgtgtatgtgctagacaaaatgagtaatcctggattaaaatctttccttttcattggcctacagtgtcatagacagaataatcttttaaatgtgaccaggtgcaatggctcacacctgtaatcccggcactttaggaggccaaggtaggcagattatttgagcccaggagttcgagaacagcctgggcaacaaggcaaaaccctatctctacaaaaatacaaaacaatagccaggcgtggtggcctgtgcccacaatctcagctacttgggaggctgaagtgggaggatttcctgagcccaggaggttgaggctgcagagaactgagattgtatcactgtactccaacctgggtgacagagcaacaccctgtctccaaaataaataaata

SEQ ID NO: 208281 - DNA, 573 bp, Homo sapiens
cctgcctgcatatttattggcagactttctctctaggctgttggctcaagagcaaagcctgcatttttgaagtcatagccatatctccagaacctagtacagtgtcgggcacacacttgatgctcagtaagaatggactgaatgaatgaatcattacctatctcatccaaatatgaaatggcaataaagggctcgaccatattgtcttctcctttgttctttcactaaacacatctgacacaaggcgtcgtaactgagaattactaactctacctagttttattctcctaattagatcggatgctgcctaaggagaggatctctattttctatttttaaaaattccttcttgcagcactgtaaccacagtaaagtacaaacctgattattttctatgatttgcagcatacatcacataaagaggtattataggaaaaaacaactttttggccaggcgtggtggctcacgcctgtaatcccatctatttgggaggctgaagctggaggatcacttgaacctgggaggcggaggttgcagtaagcagagatcgtaccactgcactccagcctggg

SEQ ID NO: 208282 - DNA, 313 bp, Homo sapiens
atactgctaaccaagtatattgtaagggtttaagtaataagtattgggaacagagagtgggagtataaatgtagggagcctttttaattctgaaaatataggttttgctataagaataaattgctgtttgctaccttctgtatttctaggtttagtgatagggcagtaggaaagatacgacattcaattaagacaaaaggcattttatggaaaaaatggtaaataaatgccaggttatatataaaaaattgaagagtgggaaactcactggagtaggatgtcagggaagaatttttggagttgggaattatat

SEQ ID NO: 208283 - DNA, 235 bp, Homo sapiens
gattataggcgtgagccatcatgcctggccaatttttttttttttttgtagagttggggtgttgcccaggttgatctcgagctcctgggctcaagcaatcctcctgtcttggcctctcaaggtgctggaatttcaggaatgagccactttggcctaaatttttacagcttatttccaagatgatttgaaatagtttataacattaaaacactatgaaaggatggctaaagatgat

SEQ ID NO: 208284 - DNA, 677 bp, Homo sapiens
gagtaagggaagaggagaggaaggggagccggaccgttactacccagatagtagcctggatgtaatgggtttgctagaagagtgcatgttaaccagtgcctgctgtcgatctcttgcctctgttcttaccaccaacaaaacactagaaagactcaacttgcttcaaaatcacttgggcaatgatggagttgcaaaacttcttgagagcttgatcagcccagattgtgtacttaaggtagttgggcttccattaactggcctgaacacacaaacccagcagttgctgatgactgtaaaggaaagaaaacccagtttgatctttctgtctgaaacttggtctttaaaggaaggcagagaaattggtgtgacacctgcttctcagccaggttcaataatacctaattctaatttggattacatgtttttcaaatttcccagaatgtctgcagccatgagaacgtcaaatacagcatctaggcaacccctttgatcatgttgtacgtaaacagtatttattataaattactaccgtgactgggatgcaagagaattaggactataattttcctatttgatgtgtgtgtgtgtgtgtgtgtgtgtgtgtgtgtgtgtgtgtgtgacctagatccagtcgaaccattagaaattcactacactgtctcaagagtattaaaagg

SEQ ID NO: 208285 - DNA, 667 bp, Homo sapiens
gcaggaatgcagctgctatgtggtggtttgagacatcccaactgcatgttggtgaatattgggctagaagagtgcatgttaaccagtgcctgctgtcgatctcttgcctctgttcttaccaccaacaaaacactagaaagactcaacttgcttcaaaatcacttgggcaatgatggagttgcaaaacttcttgagagcttgatcagcccagattgtgtacttaaggtagttgggcttccattaactggcctgaacacacaaacccagcagttgctgatgactgtaaaggaaagaaaacccagtttgatctttctgtctgaaacttggtctttaaaggaaggcagagaaattggtgtgacacctgcttctcagccaggttcaataatacctaattctaatttggattacatgtttttcaaatttcccagaatgtctgcagccatgagaacgtcaaatacagcatctaggcaacccctttgatcatgttgtacgtaaacagtatttattataaattactaccgtgactgggatgcaagagaattaggactataattttcctatttgatgtgtgtgtgtgtgtgtgtgtgtgtgtgtgtgtgtgtgtgtgtgacctagatccagtcgaaccattagaaattcactacactgtctcaagagtattaaaagg

SEQ ID NO: 208286 - DNA, 552 bp, Homo sapiens
agagactgtttagcctgtgttcccagtaaagccaaaacagattcaacagattctagctctccccctctccatccttgtttccctgaaggtagaggaccatgtccaactccctcccctactggaggcagcctcatgatttcccttcaggcttaggcctatttattatcttctcttccaaaacatcccttccattcactgctatctaattctacccttaagcatttcagtatttaatattaaaaaaaaaaaattggtcgggtgcggcggctcaggcctgtaatctcagcacattgggaggccaaggtgggtggatcacaaggtcaggagattgagaccagcttggccaacatggtgaaaccccatctctactaaaaatacaaaaattagctgggcgtggtagagcacgcatgtagtcccagctacttgggaagctgaggcaggagaaccgcttgtacctgggaggtggaggttgcagtgagccaagatcgcgccactgcactccagcctgggtgacacagcgagactgtctcaaaaaaaaaaaaaaaaaagaaa

SEQ ID NO: 208287 - DNA, 810 bp, Homo sapiens
cctagaccattcgtgatggctcgacgggcccagatactgtagtgatgaaccctgtgtcgtatctgtatcctaagagatcggcgcaatgacttactgccttggattctcagatgataacaagaatggaccgagggggacgcatgcgtactgatcccacctcccagatggcattccctgggtcattcactggaagtctatcaaacagagagtccactcgtacctcgatgtcagtgtatcctgacccccaatacaagcatttgcctacaggtcctcactctatcagttatacctatttggctgaacccattctttgggcttctcccatatggttccctgcatggtgtaccttgcctccctctctaggacctttgagtataataaatcctttaatttcatttacctctccaagtataattcccacagctatgttggagtgatccttgaggaccccacagggagacttactccctcccccatttaccacacagagagttatagatgataagctgattattggtggttgttgccatcagcagtcaaagaaaagagaatgcccagggttttttgtttgtttgtttgtttcagaggatagagaagaaaggcattttgagtttcatgggacaagagtcatttgaaatgactctataaatagtgtgtcttaccatatgtgatatattcagtgattaagaaaaactaaacctaaatctgatcaagactctagctccaactgccagtttgcaggacatacaaagaactaggcacatattctaaatgatgtgatggggatacaaccagcaaaatccagaatgt

SEQ ID NO: 208288 - DNA, 916 bp, Homo sapiens
gatcacttgagcccagacggcagaggttgcagtcagcccagatcgtgccactacactctagcctcggtgacagagcaagactctgtctcaaaaacaaaagcaaaaatctatcctctggattcagggaatttcaaggcaaattagtgatagtacattttttaaaactttgtattttccttgtgcctcaacatccccacaaacaggccgtgaacactctgccctggcaaccagatgcaccagtatgataaggctggtccctgccacaagttccccttcataaccttccctggcagtgccctagtgaaatttaacgaaatcacctcatgccttttgtttgtgtatcctgacccccaatacaagcatttgcctacaggtcctcactctatcagttatacctatttggctgaacccattctttgggcttctcccatatggttccctgcatggtgtaccttgcctccctctctaggacctttgagtataataaatcctttaatttcatttacctctccaagtataattcccacagctatgttggagtgatccttgaggaccccacagggagacttactccctcccccatttaccacacagagagttatagatgataagctgattattggtggttgttgccatcagcagtcaaagaaaagagaatgcccagggttttttgtttgtttgtttgtttcagaggatagagaagaaaggcattttgagtttcatgggacaagagtcatttgaaatgactctataaatagtgtgtcttaccatatgtgatatattcagtgattaagaaaaactaaacctaaatctgatcaagactctagctccaactgccagtttgcaggacatacaaagaactaggcacatattctaaatgatgtgatggggatacaaccagcaaaatccagaatgt

SEQ ID NO: 208289 - DNA, 376 bp, Homo sapiens
ttgtccagggtcccattcagatagcacaccctttcactcttaaaagtgacccaagtttggatgacatattacacatcaccttagttataagcacactaataaaagtttacatgtagctaagaaattaatacactaccagtagcagctattcacagtgcatttgcattttccttttatgagtgctatattctagttcttagcctccttaaaacacaaacatgcttctattctgcctactttgccctctaacccctctacccatgaccatttttaacaataatctctgcttctgtttttttcaccccgggaaactcatctaatttcttaacctcaaagaaaatctctatgcaaatcattcacaaatttcttctcagaa

SEQ ID NO: 208290 - DNA, 357 bp, Homo sapiens
ctgtttgcagagaatgtccagcctatcctgtgtcactctactcccaagggaagcctggctccacccttgatggctttcacttggcttggtgctagactactcttggacacatttttcccaagctgggatgagaacccaacctctattgatgtcactatagactctgatctgtgagtgtatttgtgaatgtgagggagatagaaaatcaccactgggcttcccttttccctgctcagctgacttctgcatccacatgccctctcctctattctcatgcattttgtgaggtggtttgtgaaagccagtgtgaagtctgaggtgtttaccattgctggaggggacgttgtgggtaacaga

SEQ ID NO: 208291 - DNA, 412 bp, Homo sapiens
tcgtggtgcacacctggtagtcccagccactctgaggcaggaggactgcttgtgcccggaagttcgaggctgcagtgtagctgtgattgtgctactgcactccagcctgggcaacagataaaggaaactccatctcttttaaaaaaaaaagtggtctgggattacaggtgtgagccaccacgtccggccaatttttctcatttctatgcctcctatattaaggtctgtgttggcacagatgagtaactgccatgttctaggtcagttatacccaagcacttctggtggtttaaaatgtgattctgtaacttttttatttttatttttttgagataatttcactcttgttgcccaggctggagtgcaatggcgtgatcgctgctcaccgcaacctccgccttccaggttcaag

SEQ ID NO: 208292 - DNA, 187 bp, Homo sapiens
gccatctgacagtacttagaagatagaagagggaggttatctatgccattgcccagacaacagaccagggtccatctttccaatgatgtgttaacagcagggtgcatcttcagcagattgaattagtgcttcctttgactgttttttcatatcactaatgaagaccagagagactccctaattgaat

SEQ ID NO: 208293 - DNA, 838 bp, Homo sapiens
tgcagtcatcaccacagtaacttccctaacactcattttaacatccattcaccttaaatgtgtcagttgcatcaagaaatagaaatgggatggtatatgctatgtgatcacaaccacaaccattttttttttctttttgaggcggagtctcactctgttgcccaggctggggtgcagtggcatgatcttgactcactgcaacctctgcctcctggcagaaccctcctgggttcaagcaattctcctgtttcagcctcttgagtagctgggaccacaggcatgcaccaccacacctggctaatttttgtatttttagtagagacagggtttaaccatgttggccaggctcgtctcgaactcctgacctcatgtgatccacctgtcttggcctccgaaagtgctgggattacaggtgtgaaatcataggcctggcctatgatttcttttaatcaaaaaagaaaaaataaaaggcattagcaatggaaacagacgtacgtcacttcatggtccttcctttactgcactgtgtagatattatggtttttacaaattgaagatttgtggcaatgctattcactttgtctctgtgccagcattttttagaaataaaagtattttttaaatttagttatgtgttttttagacataatgctattacacacttaatataatataatcacacttttatatgcattgggaaaccaaattgtgtgacttgcattattgctatatttgctttattgtgatggtctggaaccgaaccagtagtatctccgaggtatgcctgtatatggaattgtgggcaattgctccttttcctttcttgggctttcagtat

SEQ ID NO: 208294 - DNA, 372 bp, Homo sapiens
  misc_feature (78)..(78): n is a, c, g, or t
  misc_feature (100)..(100): n is a, c, g, or t
cctctttttcaacatttataccccagtcccttcacgatctcatccagtctcatagttctattttttctgtatttattnattatttatttatttatttatntatttatttttgagacttggtctcactctgtcgcctaggctgtgatcgcaccactgcactccaacctggttgacagagcaagaccccacttaaaaaagacatttaagctaggtaagaagggaagtgaaggctgggcacggtggctcacacctgtaatcccagcactttgggaggccgaagcaggaggatcacttgaggtcaggagttcaagaccagcctggccatcatggtgaaaccccatctctactaaaaatacaaaaattagctgggcc

SEQ ID NO: 208295 - DNA, 753 bp, Homo sapiens
gaccctggttccttttggcttactgctctgccagtcccgggacatgttttctgtccttatggtctaaggtagcagcattcacaaaccaagcagcaggatggaggaagggaggaaaaggagggacaaaggctaatcctcctcagaaaggttcctgtaagttgcaaattgatgcctacctctcattggcaggaacttagccctgtggtctcagcagctgtaagggaggctgggaaatgcagtcttttttctggattgccatgtgccatgctcacattctcctgctttacaagatgggaaaaagagtgtaggaggctcttcattgaatttgtcactttcagacaatgtctattatctgtgttcctggacaggtaagctcctgagagagggactttgctgtgttccttccaggagtcttagcatctagagcagcacctggcatgtagctggtgcttgattgtcgttgaatatgttttcatcccattatccacatccttcagcttgccagctcttacctttctgattccaatttggccatcctttcctctaggacagtggttctcattaattgtgcaccgtgacaaccagtcagaaatgcatatttttggttcccaccccagacctatggaactagaacctctgggggtgacctagcagtctgggtctcagtatgctttatatacagcgatctgtattttaagcaaccctgaaaggatcctgatgcctgtttaagcttcagaaccactgctcagactt

SEQ ID NO: 208296 - DNA, 997 bp, Homo sapiens
atgtgtcttctgagctgttctttttctttttatactttccttgaggactgggatgaaagtaggattctccaggaaaaatttatgtttgtttgtatcaggcttctacaggcacttaagatcaagggccatttccaactaaattcttttattgtttgttattccacacaaaattgttcataattgtcaaaacttgaaagtgaccatgatgtccctcaaattttttcttatatgaattttctgtgttctggtccttttttttttctgttaggttgttggtcttttattacagatttaaagcagtttttcacatatcatatgctatagatgctgttcatatttttctctgatgcataaggagactgttacattgtatagggtgttcacatattatctgtgaacacatattgctcatatttttctccaagactatcattgcaactaaattcttggctggaagatttggagaccactcaggcagtgtgaatttagactcctaactgatgggagggctgccttgttgctagagttcccaagagatgctcttgctcccaaatattttgtgccatgattcaagataggtaatttcccttgtagcccactgatggaaatgaggtgaccctgcttatttctaattattcctgccactaaggatgtgttcctttgggccctcaactacacagaatagtcttgttagaccctcgctaccttgggaaaaccttaagttttacataatcttccatgaactttgtgagatttcaaaaagcaatgttccagttcactcaatttaacaaatgtccttagggttaaagcctgacctagtgctccactaacttatcttagttcatacctttacttattccctggtttaagtattccttgcatttttgcaagtcataggaacatatcaaaagatatttttgtattatatccaacatttttcgttgtttttagtgaggggatcagtttggactcctaggctgccatagtgacagaaatt

SEQ ID NO: 208297 - DNA, 340 bp, Homo sapiens
atctttctttacacacacacacacacacacacacacacacacacacacacacgaaaacctcggagatattgtgggtttggttccagaccactgcaataaagtgaatgaatattgtaatagagttacacgaattttctggtttcctagtgcatataaaagttatgtttacattatactatagtctattaagtatgcaacagaattacatctgaaaaacaaaatgcatactttattagcaaatactttattactaaaaagtgttaacaattatctgagtcttcagtgacttaatatctttttgatgttgatgacttttccaaataaaggttttcactcctca

SEQ ID NO: 208298 - DNA, 493 bp, Homo sapiens
aaccacattgaaagaatattgcaataggactcgagcagctgatcatggaattaagtgactttaattttcaaccctaggactctgtgattctatgtacacagaattcgaatcttaagtagagtgtccttgtgaaacccctacaactttgattgaaaatatatactgaattaaaatctgtatggtaataagtttctttttagtgaacaggaaacatgccaaagtatatcttaacattcagttgtagataattatgtgagctgattttgtgtcaatgaatctgaagttctgatttggtattagaaaatcatacgacaccccaagctttctcctaggaagttgtcttttccatttttagcatttcatttggttgtctgtcatcacctataacacacacgtgcatacacatacaaatgctgctataattaacattttgggttcctttatcattttttaaacctcaaactttttgttatgtaatgcacacttatttgaa

SEQ ID NO: 208299 - DNA, 245 bp, Homo sapiens
taaaacatagctataacaaacaggacatctaccctggcataaactacagattgacacaactaaaatagtctttaatctgcaaatctttattcctcacttcagccaccaagctgtagcattatgctttctcaactcggttgcttctcttagtttcaaataaaaaggtctaaaatggtggcagacagatgaagagcagtatagagttcagggattgacttgcagatggaggtatgttttgatataat

SEQ ID NO: 208300 - DNA, 201 bp, Homo sapiens
gttcaggtaaaatttggaagccaggtataaataactttacatgtattccttttaggttatgtttctcttattttcttagtctcctacatacgtgattgctatgtaatggcttgtgccttagcttatgtgattccgtctgtcacttacttgttcacatgattgactcctactcattaagactcacccaaggaagtccacatt

SEQ ID NO: 208301 - DNA, 249 bp, Homo sapiens
gagctcgttaggcagtgtgttcacatcttaagtggaaaagacacgttcatcgggtttatagatgcaagtaaactaagttctgggtgttgagaaaaaaatggaaatttaaataagaaatttaattcaaacaagagtaacagaaactggtaaaaggaatgaacaggtaaatgaggcaaaagccagatatctttacaaggaagtaaaagactatgtttattttccattttttctcaccacacgctgaagagg

SEQ ID NO: 208302 - DNA, 256 bp, Homo sapiens
ttcaaaagatatctttaagacattagcaattaagactatcaggacatcaataggatttaagccaagtggtcaatattaacatcaacagtggtaagtcgtattgattgtatgtgcccttgatatggtgtgatcgcagtagcagtttacctctgtggccttccacccaaaaactcattaccccagtctagccattagaaaaatatcagtcaaatctcaattgacagtctacaaaatacctgaccagtactcttgaaaa

SEQ ID NO: 208303 - DNA, 615 bp, Homo sapiens
gcatagctataaatgggtgtcttcctctaggcctctggaagagcaggacctcccccagactgtgactgggaagagtttgggatggttacagagtaagttcagaattctcactggaaccaagttaggtggaacattttcttgtctgtagccaacaacagtagtcctgtagtttgccacctgaatgagggcctgccttctaaacagaattatcttcaatcttgggctttagcagagtttcacaactcccttcctggatctcagaactctcttaaaggcacttttttttttttttttttgagacggagtcttgctctgtcacacagactggagtgcagtggcgaatgcagtggcacgatcttgactcactgcaacctccggctcccaggttcaagtgattctcctgcctcagcctcccgagtagctgggattacaggtgcccaccaccacccagctaaattttgtgtttttagtagagattgggtttcaccaggttggctaggctggtcttgaacttttgacctcaggtgatccacccacctcagcctcccaaattgttgggattacaggtgtaagccaatgtgcctggccaaaggcacttatttttgagatggggtc

SEQ ID NO: 208304 - DNA, 396 bp, Homo sapiens
cacatttttatttatttgttcatttactgcacacccacgctgtgccaggccctgggctgctttctggggacgcagctgcaagcatgactcagtgcctctctcaggagctctcgcacatcctccggcagcaccctcctcctcccagcctggagccttggctgttaatgaaaattcttcatcacctcctgcttctccagagctgcctgagcaggcaccacctcccctgggaccctgcagagctccttcaaggcattagaaaatgccctaggcttgggagctggtgccctaggtttgaggggaccttaggaaagatcctaggccttagtttccctacctgtcatgggagaggtcagcctggctgagctctgagattcttctgttttctaacctccaagc

SEQ ID NO: 208305 - DNA, 184 bp, Homo sapiens
catccccctgtattgtagcacaaagtctggtgtatattaggaactcaataaatatttattgaataaacgaaggaatggaaagaacggtggtaaaatgtacctaaaggaactgaactaacctgttgagaggaatttttaactatttataatcctgcttaaactagttagctaactttaaaaatgc

SEQ ID NO: 208306 - DNA, 481 bp, Homo sapiens
ggagcagttgagctcaggagtcggagaccagcctgtgcaacctgggagaactttctacaaaataaaaaaattagcggagcatggtggcacacacctgtaatcccagctacggggcggggcggcgagtggggagcaggctggacaatggagtgagatcctgtcttaaaacacaaaataaaagcagctctcactcaagctcctgactgctgccttgtcctaattttcttctgagcatttgtcactgtatgtgtgtgtgtatgtgtgtatgtgtatatatatatgtgtgtgtgtatatgtgtatgtgtgtatatatgtgtgtgtttatatttaaatgtaagtttataaagaaatgtttacatgtaatgtgttatatttatagacatgtttatatgaatgcataaaatttgtatttatgtaaacttataaatatgtatatacattatatataaatggaataaaaaacataaataacatatcctat

SEQ ID NO: 208307 - DNA, 695 bp, Homo sapiens
atagcaagaccctgtctctacaaaaataaacaaaaaacagaaagaaagaaacagtctacttagagttaatattgtaccactttatgtaaaatgttgaagcctgacaactgcatagttccatttactgctcctgctttatgttatagtttaaaatatatagaacctctatatatgttataaattccacagcacaaggttttaatttttgctttaaactatcatatgcatttttaagttaagaagaataatagtttttaaatatttactgtttctaatgctcttgattccttttgaagatacaggtttccaaatggtatcattccacttcagcctacagaacatcttttaatatttcttatagtccacattggctggctgtgtaaaaagggtgtgttagaaacacatttttagcattttttttaattggacaatgtcagattcctggaggatattttcactggatgtcaagttctagattgctagttttgtctctcagtcctttaaagatgtggtttcgtctctactaaaaatgcaaaaaaattagccgggtgtggtgcgggcgcctgtagtcccagctactcgggaggctgaggcaggagaatggcgtgaacccgggaggcggagcttgcagtgagctgagatcggccactgcactccagcctgggcgaaagatgcagctccgtctcaaaaaaaaa

SEQ ID NO: 208308 - DNA, 742 bp, Homo sapiens
accgccgagcaagagtgtgcctaggtgtagattaagccttcgattcgccgtcccgcttttccacacccgctctgctgaccttaaaatccccgcatcgcgcccttcacccgaggtaaatacggacctcgccatgtgggtaaaactcgctctgagaccagtccctgtcccctgccattcgcgtcttcttcccgcataaaaccctttcctgacccctcctcccgccccgcgctttttaaagtcctcacctgcgaggtggattcccgtcctgagcgcctcccagcctctccgtcgtcggccctggagcgcagcgccgcagaccgcgtcctccgcctggtcctaggctcctgcagaccctaccctgtcctaaggcgccgtcgccccccacctccctcctcctcgtgccgggccctgctgctccccaggcctccccttcgcagtcaccgcttcccctgcgcccgcgttggggaggtgcccggggcctgtcctgtgacacccggtgttcttgcctgcccagctccacccgctggaaaatgtgctcctccaggatccaggtgtcttactccaaaccctcctgtgaatgtgtgggccaaagggatcaggaaacagagaggggctgagagtgaattacaaaaactgagaggaaagaatgaaggaaacccataaacacatggcaaagtagaggatgggtcgggattcgcagagacgggaagagcgaaagaaggatccaggcgcggtggctcac

SEQ ID NO: 208309 - DNA, 380 bp, Homo sapiens
agtcaaggacggcatctatatagtgggtgtggggaacagcagcaacatgagagtggtcacatagaaaggggctgattgactaagaaaatattttgaggataatgaaagccaagttactcactgtcagaaaatggagttacaattatgaaattatcgaacgaaccctgtggtattagactggaattggggatatcagtgtgaactcatggtgaaacttggcaaaaacaaaaacaaggccgggcgtggtggctcacacgtgtagtcccagcactttgggaggccacggctggcggatcacgaggtcaggagatcgagaccatcctggctaacatggtgaaagcctgtctctactaaaaatacacaatatttagccaggcgtg

SEQ ID NO: 208310 - DNA, 334 bp, Homo sapiens
acaggctgtagaggaagcatggctggggaggccatacgaaacttacaatcagggtgaaaggcaaaggggaagcaagcacatcttcacatgttgacaggagagagacagagcaaaggaggaagtgtcacacactttcaaaccatcatatatgagaacacactcactatctcgagaccagcaagggggagatccgcccccatgatcaaataacctcccaccaggtacctcctccaacaatgagaattacaattcaacctgagatttgagtgggaacacagagccaaaccatatcatagccagactatattatatatatgtgatttatgaagcttaa

SEQ ID NO: 208311 - DNA, 573 bp, Homo sapiens
acatggatattatcctaatgttattgaggctcagaaagctaaataacttgctcagggttacagctagtaagtggtaaaaccaagatttgatctttgtctctaaaaatatgaagagaaggaggttaagatacttaaaatcaagggtaggcagatgacattgtaactctaatacaaggtaatctgtgacagtggtagctaatgtttattgagtatctgtcattactggcattgtgctcgacagtttgtttggtttacctctgtttacttctgtagagtataaagtgagtgaagggttcagtgtgagataaagtggggcagtggtttgaagccttgaatgcacagtagaatgctgttgaaggttttaaagtagagaaatagcacagtcagatttgtatttttagaaagtccttgctgtttagtgagtttggtttagaatgaagtgggcttggaaggtggtgatcatcttgaaggctgttaaattcaccctgaagatggttgatccccttgaaggctatcctaatgagaggtgctgaagctttcagttacagtagatggtagtgaaaaagatgtggg

SEQ ID NO: 208312 - DNA, 582 bp, Homo sapiens
ctgcagtgagccaagatcacaccactgcactccagcctgggggaaagagtgagactccatctcaaataataataattttaaaatttttgctaatttgatttttttaatggttatttaattttattttgtatttcccttactcccaatgaagctgagcttctttcctatgattaggaatttgcgtttctttttctgtgaactgcctgttcatcttctgtcaattttttattggtgactttaatctttcatattgatttataggacccctttagaatcaatattaaaaacatttatacaatgcaacatcaaattatcattctcagccaggagcggtggtgtgcacctgtagtcccagctatttggaaggatcacctgagcctaggagttcaagtccagcctgggcaacacagcaagaaccccatctcttagggggggaaaaaaataggcccagtgcagtagctcatgccagtaatcctggcactttgtgaggctcaggtggcaggtgggagatttacttgaggctaggagttcaagaccagtatagacaacacagtgagactcgatctctccaaaaaatttaaa

SEQ ID NO: 208313 - DNA, 370 bp, Homo sapiens
cttacatagacatgcatggagtacagatttttcaaaggacatgcagaaacatggagaaaagcacaacatggggaaaagctcaatctcttaagtacaagagaatcacaaaaccattaccgaagcttcagcagaggtgaatctgaggtttgtgaaaaactcttaaagacaggaagtctgccagttcggccgagctccactggaccttctgttctcatctggctctcactctcctcctcccttcccaaacaccacagggctacagggacgtgctggctctgcacgcagacacatctgtgtctaagcctgggacactaagaaggttactttatttctctgagccctggtatcctcatcagcaaacctgggtaaa

SEQ ID NO: 208314 - DNA, 393 bp, Homo sapiens
cacgtggcagtgagacaggcggagggatgtggggaccccgggtggcctgctgggcatccaccatgtggcccactctgtgctgagtggtccctaatgctcctgctcatctgtgactggggcctgaggaccctcctctgctctgcccaggcctccagccctcagggagctgcggtccagatggagcctcacgtccttcctggtgttttgtcctgtcctgtgatgctgctgagccaaggtggttcctttccttgaacagttgagatataatttacatgccactaaatctgcctgttctaggcatgaaatgaagtagatttcagtatatttacaaacgtgcagtgattcagcacaatacgttcagaacagagaaacctatgcactgacagggtactg

SEQ ID NO: 208315 - DNA, 346 bp, Homo sapiens
tagtgttatttctgtctctgtcattcttttacacaccaggttttactttacttaaaaattaaaagaccctcgaagaagtgatgtgacccactgtaaagaaacaaacagttaacagaatgagggaccaagcctggatgttggactcatcagatgaagatttaaaataactgtgataaatatctgtgaaaagacaggaaatttcagcagagaaatggaagctatacatttttaaaagccaaatggaagtggaaatgaaaaacaggatatcaaagatgaattctttcactggacttattgccacactgggcacaagagaaaggagtcaggttcaaaagaaaccatctac

SEQ ID NO: 208316 - DNA, 447 bp, Homo sapiens
agttggagggggccctaaataagggggacaggaagagccgggacactcaatagctgcctgaagttgcttttttagttttggggaatcattaccttttggattgcctgatatgactgctaaaagagcttggttgattgtccagtgcatgcaaaggtctagtaagaaggccatgcccttgtgcaaaagcagtttcaggattaaaggagtctcagtgcttcagaatgcacttgagcggggtgcaggctaaagatggctagaaagctaggggagacaaggagtcccttattcccctccttcctttagaatggcccaaggtagacaggaagacaatgggagcatcccccaactgttttcccttcttggttccctgagcctcggcatctgttaaaaggtgctactcttggatgcaggcatgtccctcaggcatggatctagagaagctaagtg

SEQ ID NO: 208317 - DNA, 178 bp, Homo sapiens
aatttgtgtatgtgtatgctgcatgtttgtgtgcattgatgtttttgtgttgtgtatggcatgcatgtatgtgtatgttgcatgtgtgtgcatgtatctctgttgcaggtgtatcctgtgtctatacacatttgtgtgttgtgtgagcatgtatttatgtgtgttgcatgtgtgtgca

SEQ ID NO: 208318 - DNA, 373 bp, Homo sapiens
aaagtactgaaagaaaaaatgttaaattaatgtattaaaaaaactctaaatatgaaaaataattactttttgaaaaaacaaaaactgagaaattcatcacctgtggacttatactactggaaatgctaaaagaacttttttaggcaaaagaaaaatgaaactagatagaacgaagtcatacaaatgataaatatcttgtgggtattattttgcccattgtctgtctcttgaaaatgcaattgcctgtttaaaataaaaataataactctatgttgtagagtttataacatacatagaagtaaactataagacaacaatggcccaaaggacaggagcaaaaatatagacataaaccattgtaagcttcttgtac

SEQ ID NO: 208319 - DNA, 387 bp, Homo sapiens
ctaagcggtatcataaaaaatgataaatttattacctgaggtacaccaatttttctgcaagcttctaggaaatttggcaggtttcgcctgcatttcgccattgttaatttaggctgaaatgaggaaaagaaaatgtgttactagagaagttttgtttctgggacagggtctcactgccacccaggctggagtgcagtggcgcaagcctggctcgctgtatcattgacctcccaggctcaggtgattctcgtgcctcagcctcccgagtagctgggattacaggtgcccgccaccacacctggctaatttttgtattattagtagagacggggtttctccatgttcgtcaggctggtctcgaactcccgacctgaggtgatccgccca

SEQ ID NO: 208320 - DNA, 465 bp, Homo sapiens
gctcatcttcagagagtctgttttagttgtgtttcctaggatctgcatctgcctcttcgcgtgtaactttggtagcccttgtgcaggtcttggagtctccagtgactttttgtcttctagttttgctgaatatgggatttctgcctcattcccccccactatgtctccctatcactttgcataatttctaggaggaggaaggggaagattcggtcaaatattgctgcagttcttatactataatcatattgctttgtaatataaatttcccccactttttccattataaagatagctgtaggccagatgtggtggctcatgtctataatcccagcgcttgaacccggaaggtggagattgcagtgagttgagattgcaccactgcactccagcctggacggcgacagagccacgcactgtctcaaaaacataaaaataaataaataaatgaatgtttcatctttt

SEQ ID NO: 208321 - DNA, 674 bp, Homo sapiens
tctcctcatggtgcacagcagctggaagacattcactcctcgacttccacgctcctaagcatatgctggggaaacccacatccccgggccctggttcccctcgccctccccaaacacagagcatgctaactcctgattttgcatcgttctgggaaacccttccaacccctggatccaccaaccagcctcggcccacggacagcacagccggatggcccagccccaactctgtaccttgaactgcacaacctgggacagttatgcagctcactcctccttccgcatctttaaccagacaggagctccccgagcaggcgatatctcagtgctaggctgagacactgccctgtggaggaagcctggccagggagggatgaaccaggggcctgggcagaggagcccccatcctctactggcaggaagccatggctctcgaggggaggagtcctgggctctggtccttggcaggggagggtccagctcacaggagagtctggatagatagggctttggattcagatgcactgggcagtcctctgaggccacctgacaatgtaccaaatgtggctgtaagaatcctcgtcctcaaaggagacactgatgggtaggcagacatgagtaacacacagggctttccagagcacggggagggcaccagccacctttccacttct

SEQ ID NO: 208322 - DNA, 359 bp, Homo sapiens
tttggaaaatttggcaaaaatttaggggcaagagctgtgtgattagagtctttttttgggtagcggaaatatctccttgataaccctcaatatctcatgtagataaactacttattattcttacttaaaagctggttgaactgatgatatcttttaaagcaatatctgaacctactaaaatggtttctttttccttggtattactaaatatgcattacagtgttaccaaatgaatccttggcttttcctagcagcctgtgttttgtgatgaaggccacaggaatgtgttcaagagttcctgtaccttttcaattaaaatgagttgctaattgcatcggtgcttgtagaggaaaccatta

SEQ ID NO: 208323 - DNA, 550 bp, Homo sapiens
aagattagacgaccttctgggaaatggtaatctggtacaaaacaaatgtaactagaaagagtgagagacgacatggaatgcaacctgtatgtactattatagttttgtgaactttgaattggatttctgaaataaagcagctcacttttgcattatctggaacctgtccaaaatgaaacaccaacgacctgtgattcctcaaggccacacaaaagcccagctctaatgatgaacaataacctccattcttcctgtttcttagcctactgtcactgatggctttttaaatggctgcaaaagtgacaattacccaactctcagagaaaaaaaaaaatgtactgccaaatcaagggtgtagctagctcatttatacagattaaaaatatcaatattctttaccactatttttcatcttgccctatagatatagaatcacccaaaagctagcggcccaaaaaaaattacatcattttttagtattttcatggtacaaaattgttctcatatggctggtaatctgaaagatggcttatatttaaaaagaacttca

SEQ ID NO: 208324 - DNA, 523 bp, Homo sapiens
atgcccggccagagataactggtctgatggtttcaatttgcattgcagttagaagctggggaagacatcccagtaaaagctgagaggttggaggcagagcatcggctgtggggtcatagagaggaggcaccatctgggtcttttgggagtggcacagtgtgccttggtggccactgagatgtgaggaggcctgtcatccggctagtgacatggccagacagtgtactactgtgaacttcaactgtgataactgattagaaaacatggaagaagtcagtttctcgatcccccagccaccaattcagagtctattgtttattgcagaacaaaaaagatagacacacattgagaaataaggaaggcaaggacgcccgcgtgcacacagatttgtggggtttggggagtgtgcatgaggaaaactggctaacgtgatttctggagggactttgtcacctaggattagcgtcagccatgagtaagacaggccccacgtcacagtggcttcaacaggctggaaggttat

SEQ ID NO: 208325 - DNA, 312 bp, Homo sapiens
tcgttaaatggtgttttacagattgcaggtttgtggcaaccctgtgttgagcaagtctgtcaattccatttgtccaacagcatgtgcttactttgtgtctctgtcacatttttgataactctcagaatatttcagactttttcattattattattatatgtgtaatatagtgacaatgtaattattatataacggtgatctgtgatcaatgatctttgatattactgtgctaattgttttggagtgccatgaactgcatccatataaaaaacactgagtgaacttaatcaataaatgttgcatgtgttctga

SEQ ID NO: 208326 - DNA, 218 bp, Homo sapiens
ctcattagtaaaaatgttgcttagggagatctaggtcatcggcagattttaaataacaatttctgtgtactgggatacctcagaggtattgcaggtttgccatcagaccactgcagtaaagggaatattgcagtaaagtgagtcacataaatttgttggtgttctcaaaaaaatagtttctggatttaatataagacgcacctccttatctcttcata

SEQ ID NO: 208327 - DNA, 399 bp, Homo sapiens
aaactggcttgggtggggtggagagtgaaggtgttcgtaggtagatgggcatggtccaagggggtagaatatccaccctgcaaggtgccagaggggaccccgaatgaggccatggccttgagaacaagagagagatgggattgaggatgcatggggagggattggccttagacatgaagagggacgcttcctctctcagagtcccatcagtgcggaggccaagctggggcgccatctggtggtaggggaagaaaatgagactccttacaaggcctctgcttttcttggtggtacttgaggccagctttcattggttgtgcagggagggttgggagcaggccggaggttaggtgagagggcttcaggtggaattgttgagagtaggaacaacttttccgg

SEQ ID NO: 208328 - DNA, 367 bp, Homo sapiens
catgacgtggaaattcaggctgtgacatcaaaacgtcaccccccaggagagcgagtctattctgtgccattctgactccagtcagccttattggttccagccagtttcagccagtcagccagttttgttgcaagcagagagaattataacaagctgtttcttcgtctgtcttcttgcaaggcaagctcaaggattcttgttaaccccatggggcaaattttcactattaacattgtcttctttcggcttccacaatacgtagttactctctgcatctctgctgttgtctctctgcctactcattctcctcggttaaatcctggagttcctcaaaactcaaacccaaaaatatttgatgactaataaa

SEQ ID NO: 208329 - DNA, 245 bp, Homo sapiens
tccagaaagctgatccttaaggacctgagttaagagaggcttgtgaaaaagaaaacatgttaaagaggcagagaataaggagggaaaggaaagatttcagataagtcatagtgaatgactgtcacttacctgaaagcttcaaagaagaggaagaccagaaatgtaagaaatctgtgggaaaatacagccttaattctgacactgttaacaatccgaaaacccagcttgggcgaaagtcttttaca

SEQ ID NO: 208330 - DNA, 214 bp, Homo sapiens
tgtgtgtgtctgaggctcctatctccccaccaaaagagagacagggaagcacggggctttaaagctgggcactgggggcagattgcccaagatcccacaaattaaccatgcaaccttgtgtaaacagatcacctcaccgcatgccagttttcttatgaggggaacactagcattataccacacagagatctcagtgaggagccaacaggtggaa

SEQ ID NO: 208331 - DNA, 375 bp, Homo sapiens
caggcggatcacttgagctcaggagtttgagaccagcctgggcaacatggcaaaaccccgtctctactaaaaacacaaaaattagccaagcgtggtggtgcacacctgtagttccagctatttgggaggctgagacaagaggatcacttgagcctggtaggttgaggctgcagtgagccaagattgcaccactgcactccagcctgggcaacagagtgagtctccgtctcaaaagaaaagaaagaaacaggttctgggtaggccttttgttagctgcagctttagaataaaatggttttctttttcttacaggggtcagacaccataggataaaatgttaataccgtgcttctgctgacatctctctgtttacta

SEQ ID NO: 208332 - DNA, 343 bp, Homo sapiens
gacagaaaaagggtcagatcctataggttcagctcaactgtcacaaactgaacatactcatggaatttccactcaaattaagaactagaaaatccctggccctcttagaggctccttcgtatcccttccagtcactaccaaccacccaccccccagggtgaaccctgtgcccacttcttacagcacatattagtcttgtttggaatcaaccagcctgtgctcttctgtgtctggtttcttttaccaacattatgttctcaagattcacctgtgttgtgcggcattacagtttgttgtcattgctgtgtagcattctcttttgtgactacaccacgacacagtg

SEQ ID NO: 208333 - DNA, 386 bp, Homo sapiens
cacagttttgctgggatttactacgttttaccacttggctgcatccttaaacaatacaacttagatctgtccaattgtaagcctgacagaaacagcaccacacgcgacgcgccctccttgcctagcaccctgtgttagacgccgtagtcggccgcaggtgggggatgcacagctgtggcttattcattctcatggctgtgctgcgttctgctgggatagatcacacttcctcaatatgtcaagtaataccatgcatggttcttactctctttcttccactcagcattacatctggaatacttccatatcagcaaatactctgcatgctattccctaagtggaagcacaatatcctaatcaccattcccctagggacactgaggttg

SEQ ID NO: 208334 - DNA, 428 bp, Homo sapiens
tatatatgtgtgattaaataattaaaaatattggaataaaaacaaatgtgtgtgtatgtatgtgtgcgcacacatatacatggtttgtatatatatgcatatgttatacatatatgtatgtattatatttatatatgtatgtattatacatatgtaatatgtgtttgtgtgtgtatgtgtatatgtatacatttggtttttattccacacatttggtttttttaaaccacacatttggtttttattccaatattttaaatcatttgccttatactgtagaattattactttgctaacttttgtttcagtgatttatatgagtccttatatagcaggatatatttgtaattttttttctaattcagtttcttgaacaattatttaatactagttttgttttaataaacttaatattttgagcgaatgca

SEQ ID NO: 208335 - DNA, 360 bp, Homo sapiens
tccaaaaaattaggataactaagataattctatttcctcctgatctgctctgtagactgtcactgatgtatggagatggctctgaaatagtgaggaagggaaggtacatctcagcttttgatagtagagtcaccgtaattttttaaaattgggtttatgcatgtcaagctctcagtactgagaagtaatatggctgtaactgatagatatatttcctgagtttctcttagtttatagaaatcacacacacacagagacagacagacagacacacacacgttaaaagaaaatgtgttcaactttctctctcaagaactaattgcctttggtccataatctataatggcttcataacaactg

SEQ ID NO: 208336 - DNA, 239 bp, Homo sapiens
catttggggaatcttccacatgaatagcagcacagtagcaccgacaactaataaagtaactcacaaagacagaactggggccaaatcaggccaaactgggccaaggaaaaagaacttatttactgagcattttctatgtgctctacccagaaacaggtgtcaagaagaacacagaagtgttaagaaatggtccttaaaaggcccaaggcacatatccttcctgagttttctctagatac

SEQ ID NO: 208337 - DNA, 591 bp, Homo sapiens
ctgtctactcttagcatactaaaaaaggacattcccaagctggtccatacctctccagtctcatcccttaccgtcccccaccatcttatatacatcccacacctcagcagtcagacaaaacctcaaagtttcctttacccacaatattatttttacatcttgaaccctttgcacatgttgtcccgtcttcctggaatacctttctgctcccttttccagacatcacctcttccaagaagcttccctaatgctttagtctaagttatacatactcacaggaatctgtttttactgctattatagaagtatcaccccaggttcttattatctatatgttccctgcactacacagtatactacttgaataggaattggattttctgtgtctgtaaccctgggcatctagcataatacctgctatataatgggtactcaatatgatgctgaatgaattttacttttcaaaaccaactccttcatgtgtaccatgccttacctcttctataacttttccatcactatcctaacctctccttttatttctttcagcttttttttttttcgggacggagtctcgttctgtcgcccagg

SEQ ID NO: 208338 - DNA, 216 bp, Homo sapiens
agaatttggtcttaccaaattgtgtaaatctttaaaattgtgtatttggcttaatattatagaatctgattgatttaatctaccttgtttcatttagtatgttgacattttcttgagaaatttgttatgccaaatgattaacataataatattttaagtttagatatgattttgaatttacattttcaaatgcaactttgtgtctgtggccttttt

SEQ ID NO: 208339 - DNA, 374 bp, Homo sapiens
tcactgagacaacagttaccgtgacaaccgagcccgagaaccggagccttaccatcaaacttccgaaacggaagccagagaaaaaggtggaatggacaagtgacactgtggacaatgaacgcatgcgccgccgctcatcaaaatgctgctctatttatgaaaaatcccgggcctttggcgagagctccacggaaagtgatgaggaggaagaagagggctgtggtcatacacactgtgtacgtggccaccgcaaaggatggcgtcctgcaaccctgggaccgacccccaccacccctccccggcctcctgacccttcctagacccacgcagggccaatgcagcactaaattcctctttcccccaccatgcctgaa

SEQ ID NO: 208340 - DNA, 542 bp, Homo sapiens
ggaaagaagcaaagatgtttcacttttcctttgtattgcctgtggagactttgtaaggatgtgatacctggagctaatgcagccattttgtgaccatggggaaactgctggcacattgatgactggcaggttagaaagatggaaagaaccttggctctgatgatttgttaagcaactttattaactaacctggaacttctttactcctggaatgctttttacataatgcagcttaagtcactttttgatgcatttatctagatatttctgaagctcgcacctaaaagtaattcaactgatatcatataaacaatcataatttttaaaatattagcggttaacaaatatactcatggagtctcagagttgggagggaccttaaaggtcatcgagtctaatcccctgcttatgttatccaaattaaaaatttgatgcacaatctatagtcactgttgtgcattagatgttgtgatagtaggcttacactgaccttctgaaattattgtcacaatgactaaataaatggtatattattaataaga

SEQ ID NO: 208341 - DNA, 485 bp, Homo sapiens
atcatccaggataaagatgatattataccagaaggagtggggaataagctgaggaataggaaagtggcatggtaagtgtttgaggtcattgagaccagcctggcaaaacatccagcaacactctccaggcctagggaagggctgataagaagtgttccctgaaggaaggagctgctatggtttgaatgttcccccaaaatacatgttgaaacttaatcaccagtgtgacactattaagagatgaggccttttggaggtggttaagtcatgagggcagaggcctcatggaagggattagggccattacaaaagggcttcagggagtgagttagttttcttccattcccctgtggggacacagcaacaaggtgctatcttgaaatcagagattggaccctcaccaggcagtgaacctgcagatggcaccttgatcttggacttcccagcctccagaactcatgtgagcaataaatttctgttcctta

SEQ ID NO: 208342 - DNA, 208 bp, Homo sapiens
aattagagaaggtaattatttacaagttttttaagaatacaagttagcgaccgggtgcagtgaattctaattaatatatgtagctacaattactagaaacaataagggggaaaatctatatgaaaatatacaaggaaggtaagaaaaaggaatatatgaaaaagaaatatacaaaggaagctaaggaaaagctataagacgtgaggat

SEQ ID NO: 208343 - DNA, 690 bp, Homo sapiens
tacacagttatacacagaaaaggcctgaggctgcctattggtgaggagggaaggaagggaaccactatctctctggaaccattggcccttgaaccaccagcttgtgtacagagaggacactgtgctgtgtgtcagaaacaagcacggtcatctactccccagtcatagctgaagagaagagacactgccaggagtggggctaagaaacagccaaggaccagacgcagtggctcatgcctgtaatcccagcattttgggaggccgaggcaggtggatcacttgaggtcaggagttcgagaccagcctggccaacatggtgaaaccctgtctctactaaaaatacataagttagccaggcatggtggcaggcgcctgtaatcccagctactcaggaggctgaggcaggagaattgcttgaacccaggaggcagaggttgcagtgagccaagatcacaccactgcactccagcctgggcgacagagcaagactccatctcaaaaaaagaaaaaaaaagaaaagaaaaagaaagaaacagccaaggaccaaggaccagtgtccgttccctcagccactcaatttccaagacctagtcttccttccccaagccaaaaactcccatctttggggggacccaaacttgccccgagtccagaagggaaaagggtgagctactcctcatctaactgtgt

SEQ ID NO: 208344 - DNA, 412 bp, Homo sapiens
cccctgcgcctcacccggaacatccacagtgtgggactgctgcgtctcacccactgcacctgccgtgcaggatccctgagtctcacccgccgcacccgccgtgcgggatccctgagtctcacccgccgcacccgccgcacctgccgcatccgccatgcgggacccctgcgtctcacccaccgcacccgctgtgcgggatccctgtgtctcacccgccgcacccggctcatgggagttgggagcagctgtgcctgttaagcaccagtatttaaaacagcacaccagatcaggtgcggtggctcacacctgtcatcccaacactttgggaggccgaggcgggtggatcacctgaggtcagaagttcgagaccagcctggccatcatggtgaaaccccattgctactaaaaatac

SEQ ID NO: 208345 - DNA, 129 bp, Homo sapiens
accatgcctacctgagaagggaattttctagtcttcatattcttccctagtcttgacattgatttggaacagacagctagaaagaggagagaaaaacagagtatatatttatgaatataaaatcttgag

SEQ ID NO: 208346 - DNA, 363 bp, Homo sapiens
gtgctagatggctaattactggagttgaatagctgtacagagcaagttcagagtgtgaaagtgtgactttaaaagtgaattaaggccaggtgccgtggctcacgcctgtaatcccagcactttgggaggccgaggtgggcagaacacgaggtcaggagatcgagaccaacctggccaacatggtgaaaccccatctctactaaaaatacaaaaattagctgggcatggcggcgcgtgcctgtaatcccagctacttgggaggctgaggcaggagaatcacttgaaccagggagttggaggttgcagtgagccaagatcatgccattacactctagcctggcgacagagcacgactccatctca

SEQ ID NO: 208347 - DNA, 399 bp, Homo sapiens
aggcgaccagcccatgggcacggccagtcgagagcagcccctgaaggcgagcctagatcccgggaccagggtcagcttggtatttgaggggcgcggggaaggagagaggtccccggagctcgcccgggacaacagggcccccggaggcggcggtgaggactgtgcctgcctcactctgcagcccctattggggccactggggaaaaggcccagcagcgaaaccaactagtccaagccaggcaaggaaccgtcctagacggctggtgggaacaaccgcgcagctgctgtggaaaaagcccggcggttcctcaaaccacgagccctggagtctccataaaacccagcaactccactcctaggtgtctgcgcgcccaagagaaataaaaatgtttgtccaca

SEQ ID NO: 208348 - DNA, 580 bp, Homo sapiens
ataagggattaatatctggattatgcagaaaattcctaaaactcaacaatgaaaaaaacgagctgattcaaacattggcagaagacttcaataaatacttcttcaaggaagacatagaaacagccaataagcacatgaaaagccgctcaatatcactactcaattaggaaaatgtaaagcaaaaccacaggataccacttcacacctgagaggatggctaccatcaaaaaccagaaaggatggctgaacgcggtggcgcacggtggctcacgcctggctttatgtagcattcttaaagtcactagggagatggcaggtgaagtaaaggcagatttccaaaatcactaattttttttagttttttgtcacttaacctttcttgcatatacttctttccacagctcattttcttacttgtatattaataaagctaactcatcttcctgaatatacatgattttatatgagaagagcaggaagcttaggcttggttagctaaaactaagatattgctgcccactaatcacacagggataaaactaatagactgttaagattgtcagtactcaataggaagtat

SEQ ID NO: 208349 - DNA, 382 bp, Homo sapiens
agcacttttttttttgttaagtagcaggagtttaaggtttcaaggcaatgtggaaaattgagaataccagaaaatgaatccaaacaaaattagggtatcccaaattctaaaaatctatgactcatattgtgaattgttgggaggagtagagctgccctaggcagctgcaggttgtgcattgcagagctccaggtggcaccattcgcttagagtgcagtgtgactagagtcctgagtagagcaaatactatctgaagggaccagaattccccccacgttccttcaacctaggttactttgtgcatcattttcagaaaagttcctgcttttgaaatataagaatggcctcaagccatcaaagtggatttaagagtataactacg

SEQ ID NO: 208350 - DNA, 175 bp, Homo sapiens
caagacttcaattaaattgacctaaggaacatgtataaacattctttcccaaaacagaatatgcattatttgtaactgcacatgaaactggaattttactaagataggtcatattttggacaagacagaacaagtctcagcaaatttaaaaggattccatcatacaatgtatatt

SEQ ID NO: 208351 - DNA, 319 bp, Homo sapiens
gcagatagaacgccatgcctctccccaggtggcctccctcaccctgacaatgtaaaaaaacagctcatctttacaagcaggggacaaagacaagactagaaatcctccctcccagacaaatgtgtatttgacttcttcctctactctttatttacttaactgtatgtaaaatcagatttattgagctgaatgcataactgatggctcctctttccctcctgcctgctcttgcccctttatgcatatttgtgtggtgttgttttttgagaaagggtcatgtgtgtctgtgtatatgtgtgttttttggtttttattttgt

SEQ ID NO: 208352 - DNA, 632 bp, Homo sapiens
gccaaccgtcccggccctttgcttcagtgggtgcctgagtctgcccagactttaggttttgaaagcctgagccccaaaggaaagggtcaaacactcccagagagctggggtcccccatgcctaaatgcctcttccaagtcctgccacctgagcagggagggagactggcccactgccttaggggtgaggcagttttcttttatttttgagacagagtttcgctcttgttgcccagactggagtgcagtggcacgatctcagctcaccacaacctccgcttcctgggtccaagtgattcacctgcctcagcctcttgagtagctgggattacagacacacgctatcatgcccggctaattttgtatttttggtagagatggggtttcaccattattggccaggctggtcttgaactcctgacctcgtgatccacctgcctcagcctcccaacgtgctgggattacaggcgtgggccaccacgctgagccagcagttttcattatttcagaagcagtggcgctggtccctctaatgagaacagatgagggaggttcttaaaactcaaatgccaacaggggtgaggagttaacagagaagagggaaggaagcacacacagccccccttgtctccc

SEQ ID NO: 208353 - DNA, 573 bp, Homo sapiens
gaagaattcaagttcacgagggactgagcaatatcagagtcataaaattcagaggcaaagagacccacctgtctcttccctgcttaagacttcgtgttgaagctgctggcatcttccttggggaaattgccctcaggaaagggataaagttaagcctttgtttatatcacccaaacatttagaggctttaaaaagatggtaaagtttatttattagcctgtttatgataattggccaaaatagttggaatactatttgctcaaatgattttatgatagattttaagatgtctgcgattttattttgcatggatgatagctgggacagcagacacccatcaaagcgttactaataaaaatgaataaaaataggtctcttgatgtttgacattttctattaaagaagactttcaaggaaaagatcatcataaactttcagaggccaggagaggggagcctaacctttctttagtgtgtaccacgtgtcacatactctatacgtgatttttcagtcccaacagtgcttgcttttctgatgttacaaatgagaacacaggttgaggcaggtcacggt

SEQ ID NO: 208354 - DNA, 590 bp, Homo sapiens
taaaagagttttaattgagcaatgaacaatttgtgaactgggcagcccccagaatcacagcacattccgagatattccagaggtgcctcgttaaagacaaagttcttgactgtaaaatctaggaaaacaagcaagtcttaaatctcaggggagtatgaaataaaatattttaaagaaacaaggattttgcttgttttgagaacaaggttttaacaagagaaggggtttatctgttccaacctaccatgcacttaacagcagttatttcatcaaatgttcttccttttgaatttgaaattaaaatgtagctagaaaataatttgtaaaatggtacttttgggacacagaggctaatgaaagtattttgtataatatatgcactgcttaagcaggcatatgtaaagtatgtatatccatttttggggcagaacgcagtggctcatgcccccaattccagcactttgcgaggccaaggcaggcagattacttgaggtcaggagttcaagaccagcctggccaacaaggcaaaaaaaccctgtctctacaataatataaaaattagccaggcagggtggtatgcacctgtaatc

SEQ ID NO: 208355 - DNA, 1656 bp, Homo sapiens
  misc_feature (659)..(659): n is a, c, g, or t
cgccgctgcgctggtaagcctgtgttttggttcgctatggcccgtactaagcagactgctcgcaagtcgaccggcggcaaggccccgaggaagcagctggccaccaaggcggcccgcaagagcgcgccggccacgggcggggtgaagaagccgcaccgctaccggcccggcaccgtagccctgcgggagatccggcgctaccagaagtccacggagctgctgatccgcaagctgcccttccagcggctggtacgcgagatcgcgcaggactttaagacggacctgcgcttccagagctcggccgtgatggcgctgcaggaggccagcgaggcctacctggtggggctgttcgaagacacgaacctgtgcgccatccacgccaagcgcgtgaccattatgcccaaggacatccagctggcccgccgcatccgtggagagcgggcttaagaagtggcggttcggccggaggttccatcgtatccaaaaggctcttttcagagccacccacatcagcacttggaagaagctgtaccgcttgccctccgtgctcctccggcattagagcggggaaggcacttccgcttaggctcccaacaaaacggggtcgggtccccctgctgcggtgccgtcttgagctttgccgacttcggccaattggnctatccgcactggccgggctgcggacgctttcctgggcgccggctcgcgggctttggcggtccggctccccccgcgcgtgaccggggccctgcgtggcgggggggccggggcaggagagacggggcgtcgggcacgaggccaggggtcactagggggacgctcagggctcgcggtcctgagcgcggctggcctttgcggaagtggagcgccacacgcccgtgcttcgcgcccaaaccggcctcacccggcgcggccatccggctagggagggaaatgaccacctcggcctcgccggggttctgcggacaaacgtggggagaactgcgctggggctgccgttcagtccccgcgccacctccactagcacagtggtaacccccatatcctgcccctaagccaaaattcccgggggcacggggtgtgggcggaattttgtgaatctgggctttatcgagccgttccctgtccatgtccacagaaggagattcactattccagtgaaggcactcggtcctcttagaagctgcatggtatgtctggattttctgtccagactcagtagttcctttacgttgttttcgtcggacatgtgggcagacgctggtgcccgagttcagatccttgggaagacagtagatcagacaggaagaacgtgggcctccgttgggcaaatgaagctcttcgccttaggaaatcgtgacaggaggccacagaggtgatctctacagtctctgggagctgggaagtccaaggcctcttagtgggaaagtgaggcagggtcttgcagagcccactctacacacggccagatacaaatggctgtagaggtcttagataacaccttctcggtcatttatttgcacctcagaagaagccagggcttcggttttctgtttgtttcatcacagttgacaggttaaaagcattcactgcagcgatctatgagaattaagaggggagaaggggaaatggaataaaacttcgttttgtaaagct

SEQ ID NO: 208356 - DNA, 580 bp, Homo sapiens
gatctggctttttttttaataggaaagttttaaacataagaaagtagaaataagagtagaattagctagtttcaacaattaccagcttaaggccaatttaatttgttctaaaccgccccctgctttttccttcccctatccatattattttgaagtgaatcttgacatcatatcatttcatccataaatatttcattatgtatctctacaaaataacactttaaaaaacacatgcaacactgctgtcgcccttttctcctcaaagcaaaacacaaagtccagtttctccttaagatcatttagagctgggcatcgtaacttgcctataatctcaactctttgggaggccgaggtgggaaaatctcttgaaggcagaagtttgagaccagcctaggcagcaaagtgtgagaccccctctctacagaaaaattaaaggatcagccaggtgtgaaacgcctgtagtcccagctacttgtgaggctgaggcaggagcatctcttgagcccaggagtttgaggttacagtgagctgatcgcactactgcactccaaccttggtgacagagcaagattgttttctc

SEQ ID NO: 208357 - DNA, 371 bp, Homo sapiens
aaaaacaaaagtgggaacgatataactgatcttacagaaataaaaagtgtgataaaagaatactatgaataactgtataccaacaaattatataacctagataagatggacgaattcacaaaatactaatacagaccaaaacagaaattgaaattatgagcagacccataacaagtagaaagtttgaatcagtaaccaaaaaccttccaatgaagaaaatgctacacagatggcgtcactgttgaattataccaaacacttgaagaattcacaccaatccctctcaaactcttccaaaaaacagaggagaaaaaactttgcaatacattctatgaggccagtattacatggattccaaagccagacaaata

SEQ ID NO: 208358 - DNA, 643 bp, Homo sapiens
ccttccaccaggtctccctctcaacacctggggattacaattcgggttgagatttaggtgggaacacaaagcctaaccatatcagggggcaagggttggcagtgacttgtgatgaagagagttgaggttggggactggaagggcataaaggtgataaagccccagttgaaggaaaggcacattatattatttatgccagaagaaggttttcaagatcagtccagaaccaggacttggcagaaatagttagaagcccctaatttctgtgttgggtttcaccatcattcacaatttttaaccacatgaggtaattggactatgcctcagttaacttttacttacttaactcaaaacctgagctaggccagacacggtggctcacgcctgtaatcccagcagtttgggaggccaaggcaggcagatcacctgaagccaggtattcaagaccagcctggcctacatggcgaaactccatctttactaaaaatacaaaaaattaaccaggcacggttgcgcttgcctgtagtcccagctattcgggaggtggaggcaagagaattcgcttgaacctgggaggcggaggttgcagtgagcagagatcgtgccattgcactccagcctgggcgacagagcaagactccgt

SEQ ID NO: 208359 - DNA, 564 bp, Homo sapiens
ctccacattccgggttcaagcaattcttctgcctcagcctcctgagtagctgggactacaggcacacaccaccatgcccagctaatttttgtatttttagtaaagatggggtttcaccatgttggccaggatggtctctatctcttgacttcatgatctgcccgcctcagcctcccaaagtgctgggattacaggcttgagccaccacacctggccccaggtcatacttttaatcaaaatgagaaaaaagattgacttcactggagtgcttatgtcttgttttatattcaagttttaaatttatgttcttgagattattacatcttgagttacttgataataccacggttgaaatccatgttgttgaatccttcaaccccttgaggactgagaattccctttaattatctgtctgaatcattaaatacttgtaaatcaagagttcaatttagaaatgttatacttgatacattttttaaagctggataaattaacctattaaacaaaattatctcttcttcaaaaaaaaggcatcacttcccccacaaatgtgtaatttaggaa

SEQ ID NO: 208360 - DNA, 162 bp, Homo sapiens
cactttagtttaatgatgaaatctttgttcatatagattaaaaaaccccagacagtggtggaactcgatgtcactcaacttccaatttagtgcttccactaaggttttctttaaaaaaaaaatgctttgtaggttttctgtatcctctgttgtttgatttat

SEQ ID NO: 208361 - DNA, 621 bp, Homo sapiens
gattgcttgagtccaggagttcaaggtggtagtgtgctgtgattacacctgtgagtagccactacactccagcctgggcaacataccaagaccccatctctttaagaaaaaaaattttagggcaaggaatgtcattatataatgataaaggaatcaattcagcaagaaaatacaacaattgtcaatatatatggacccaacagtagagcacccagacatacaaaacaaatattattagatccaaaaagagagatagattccagcacagtgtcatttgcggatttccgtaccctatgctccgcattgaacagatcatctagacagaaaatcaacaacaaaaaacccacattggctttaaagtgccttttagtccaaatggacctaacagacatttccagaacttttcatccaaccattgcatggtacacattagctgcttcatcacatggaagataatctaggagagatcagatgttaggccacaaaacaagtctcaacaaatgtaaaataattgaaattgtatcaagtattttttctaacaataataaaataaaactagaaatcagtaacaaggggagcttttgaaattgtacaaattcatgaaaattaacattctcctga

SEQ ID NO: 208362 - DNA, 695 bp, Homo sapiens
caaggctctccaagctccagaattcctatactgtttcctgaacctttgttgtcaccgtttcccaaactacttttctttttgtcaatcctgaccctttccctctcctactacagatgttggtcactcgaatactcgcagcacacttctatgaatgaatctttgtctcagagattgctccccaaggaacccagtcagtgccatcggaaatcaaaacatttatttatttattttaaaaatatgtaaataaaatgattattttcaccattttaatgtacaagttagtgatcattacacatttaatacttgcatgaaaacatcacatttaccgcataaatatggacaactattatgcatctattataattaaaaataaaacatttataaatgagaacatactggaaatgtgtagtcatgatggtggcaccatcttatgtttttaaattaagaattttggagcaggaaatgttttctgtctgtacctaggtctttacatatcagaaaatttcataaaagaccagaataaaagtagccatacaaaatacaaccacaaaatatgtattaaatagcctaccaaaatgccacaatgtatcattataatcactattaaatatttattatgcaacagtatcatttatgcaataggattttttataaaccagcaatttgcactttgaaattcaatttcagtgaatcac

SEQ ID NO: 208363 - DNA, 685 bp, Homo sapiens
cgaaattcaagctccaaactctaagctccaagctccaagctccaagctccaagctccaaactcccgccggggtaactggaacccaatccgagggtcatggaggcatcccgaaggtttccggaagccgaggccttgagcccagagcaggctgctcattacctaagatatgtgaaagaggccaaagaagcaactaagaatggagacctggaagaagcatttaaacttttcaatttggcaaaggacatttttcccaatgaaaaagtgctgagcagaatccaaaaaatacaggaagccttggaggagttggcagaacagggagatgatgaatttacagatgtgtgcaactctggcttgctactttatcgagaactgcacaaccaactctttgagcaccagaaggaaggcatagctttcctctatagcctgtatagggatggaagaaaaggtggtatattggctgatgatatgggattagggaagactgttcaaatcattgctttcctttccggtatgtttgatgcatcacttgtgaatcatgtgctgctgatcatgccaaccaatcttattaacacatgggtaaaagaattcatcaagtggactccaggaatgagagtcaaaacctttcatggtcctagcaaggatgaacggaccagaaacctcaatcggattcagcaaaggaatggtg

SEQ ID NO: 208364 - DNA, 803 bp, Homo sapiens
cgaaattcaagctccaaactctaagctccaagctccaagctccaagctccaagctccaaactcccgccggggtaactggaacccaatccgagggtcatggaggcatcccgaaggtttccggaagccgaggccttgagcccagagcaggctgctcattacctaagggtcttgctgtgtcgcccagactggaattcagtggcctgatcatagttcactgcagcctcgaactcctgggctcaagcagtcctcctgccccagcctccctagtagctgggacttaagatatgtgaaagaggccaaagaagcaactaagaatggagacctggaagaagcatttaaacttttcaatttggcaaaggacatttttcccaatgaaaaagtgctgagcagaatccaaaaaatacaggaagccttggaggagttggcagaacagggagatgatgaatttacagatgtgtgcaactctggcttgctactttatcgagaactgcacaaccaactctttgagcaccagaaggaaggcatagctttcctctatagcctgtatagggatggaagaaaaggtggtatattggctgatgatatgggattagggaagactgttcaaatcattgctttcctttccggtatgtttgatgcatcacttgtgaatcatgtgctgctgatcatgccaaccaatcttattaacacatgggtaaaagaattcatcaagtggactccaggaatgagagtcaaaacctttcatggtcctagcaaggatgaacggaccagaaacctcaatcggattcagcaaaggaatggtg

SEQ ID NO: 208365 - DNA, 474 bp, Homo sapiens
agccaagattgcacctctgcactccagcctgggcgacagagcgagattccatctcaaaaaaaagatttattttatgacccaggttctggtaaatcttgctgaatcttctatgggcgaagaatgtgtaccctgctattgctgtgtgaagtctcctgtaaatgtcagttaggttccattggtcgatgatggtgttcagttactgtattgtttgctgattttctttgctgtttttttcctgtaatggtctaagcttccgtatatcctgtttctttgtatattttatagttttttgttgagaacgttgcattttaagtgttacaatgtaatgaccctcaaaatgtgattctctcagtcacctgggattgctgggttttgcttgttgaggtctggagctctcggtttgttacttttccaaactatttttgcaaagcgtttcttccttgtgtttgtgtggtcactgaaatttctgtgtca

SEQ ID NO: 208366 - DNA, 216 bp, Homo sapiens
ggccacccatcgagatttttcatggaaagtgacaattttgttctcaaatgtatacagacatgcaaaggaactacaatggccaaagcagttttgaaaaagaagatcaaagatggaggaatcacactacctgttttcaagactgacttactatgaggctatagcatcaagaaagcatggattggctgggcacagtggctcacgcctgtaatcccagca

SEQ ID NO: 208367 - DNA, 506 bp, Homo sapiens
ggactctgaagactaatgacaggtggataaagacttctctgaagataagactgggattaggggacctgttaatatttctttcccatgttctccttcccagagcattaaactgtagtctttacaataatgttcactgagaaaccttaagactttatcagttgttattatctatgctaagtgatcaaggacattgtgaggtctacatccatacacacatgatactaagtttatccctttgattattatctctactgtcataaaaatcacattatttttattttgaatgaagtattgtcctctgaggcttgagttctggttgtgacagtcagaataagaaataaattgactactcatggctggaaaacaaatgcagaaagtagataggacaatgttctgaccaaatgaaactaattcatcataaagaaatggaacaattgggaaatacgaatttggatgatacttggaaaatcaggtaatctaaatttgtcatttatatataaataaca

SEQ ID NO: 208368 - DNA, 704 bp, Homo sapiens
ccacacctggtgaatttttaaaattttgcatagagacatagtcttgctgtgatgcccaggctggtcttgaactcctggccccaagcaatcctcccatgggcctcccaaagtactaggattacaggcgtgagccactgcacctcgccccaagttgctttcatttttaattcactcttaatttttcacctttttctagatagctagttcagaattattctagatatatacatcttagtaagtatggtgatttaaaattactttggacaactttaagtttactttttttaaaaaaggaattttcaagattgttaggtacctgcctgttttcaggggctttgatgacttattccaagaaaatggaattgtctgttgtgactggagtcatcactggattaagctgacaataaactactgttattcttcaagaaacatccatcttctgcacagaccaaagtagtgatttaatttgagtgcacagctcggttgtactttgtcttgggatgtgaaaagccagaaagaatgtcactcccatagtgatatcactcccacagaacaataaggataaagacagataatctacacaatttcaatttttttaacctactagacagctgagattgataacatctaggtagtctaaaattcaaggaaaaaaaataggcttttccatgtggagaagagaaataagcactggctcatgtggt

SEQ ID NO: 208369 - DNA, 976 bp, Homo sapiens
ttgaaattaaagggtgtctggatgccatgttaattttattgagcatgagaaagtatttgaagaaactgttgcacaacatatgatgaaattttgatttctctgaatctcagagtaatttaagatgggcaaatccaatgagttgatgtaacccatctacattttgtggctatttcatgtataaaatgaaaggctttagttatttctagaggagtcccatccaacactatttggcgactgttaatatgttataattattagacagtggaaaagcctttattgactaattgatttaacctcagtccaaagaacagtctctatacttgccctcatttactgataggctgctactagttaccatttgattgtcttgactttcgtcttcagttgaattggtgaaaacatcaacaaaaacaaaacccactgtgtcttaaaataaaatgttctgcattgtagtcaataaagggcttaagatgtaaaacaatgcattttctctctcaagatgtcctgtgttatactttacaattagttgtatcaacttcagattcattaaattttaacagctgtatttagttataatttttgtatcttacaacagtatatataaagactattattaatagacaaaagcaaacccacgtttttgacaagccagcatattgccaatgctcgtcaaagacatttatgtttcttttacattcatgacagctaaagtattaacttggaatttttttttttttttttgactggaaaatccctagttgtttgaattaactgaataaagtgcagggcgtaatagtgactggctgggggcactgggcctttgtgttttttttcattcctgtgtttggatactaatcaccctcgtatctgcagcctgaggtagtcaggtcattgtttcaatgctgcccttggaaagaagactttgacttaggtgctttgggatctaagtgtggtttgtgactatccccattattta

SEQ ID NO: 208370 - DNA, 561 bp, Homo sapiens
ttgaaattaaagggtgtctggatgccatgttaattttattgagcatgagaaagtatttgaagaaactgttgcacaacatatgatgaaattttgatttctctgaatctcagagtaatttaagatgggcaaatccaatgagttgatgtaacccatctacattttgtggctatttcatgtataaaatgaaaggctttagttatttctagaggagtcccatccaacactatttggcgactgttaatatgttataattattagacagtggaaaagcctttattgactaattgatttaacctcagtccaaagaacagtctctatacttgccctcatttactgataggctgctactagttaccatttgattgtcttgactttcgtcttcagttgaattggtgaaaacatcaacaaaaacaaaacccactgtgtcttaaaataaaatgttctgcattgtagtcaataaagggcttaagatgtaaacacacattatattaaaaaacactttgcgggcggaagcttattccttttattgagggttaatttttagtttggcactggcccgcg

SEQ ID NO: 208371 - DNA, 321 bp, Homo sapiens
gtcatctcagctcctcagggctgctggtctgagggcctgaagttcacccatgtgacctcctgggtgcaggatcctcacggtaggcttgacgttgatttcaataaggaaagcagaagcctctgcgtttgcatcctgaactttgcagcctaggaaaggaaatagtgcgcaggctggaggagctgggggtgggggcagcggagatagcaggaggggtacttgtgtaatcagattctttgattttgttagcctggctcatggcctattaattagattactctctctttcattcttgatttcacatccgtgtttgttcctgtatcc

SEQ ID NO: 208372 - DNA, 514 bp, Homo sapiens
attattttgggatgaagtacatcctatcctttcgtgtatgaatatctcttaggatgtttaaaaggctgctcaaattgaaggtttgcaacttttgtggcaacaccctgctttagtaggtgctcaaatgtcagtatgctcagcttttccccactagccaccttactcaggaaggaataatagaaaaagcattaaattgagctccccaaattgtttatgtacactagtgtgatcaaaatcacccgatacatatgataactctcaatgtcattctgcctaaaaacagtcaatgatcgaattagttgcagctatagatgctgtggtagcagaagtttttgtttagtgaattgccagctttcaatgaactgtgcaaggagcaactgtgtgaaaatagaagtcagtaatccccctgttcatctcttcacctctacctcattgtaaggaggatttgggttcttagattggttgaaagaatagaggttctgtgaataaaatagaagaggataattttctgttc

SEQ ID NO: 208373 - DNA, 460 bp, Homo sapiens
cctatctcctgcgtcagtgtttggttgaaaccctgcttattttgccgacttatataaatatctgcctggtggccataggcctgaatttgccacttacggtctagccatctggaccactttgccatgtgaaaaggactagagatcttttcagtgataaaatgtataaactaataatggtacatttacagtgaaattcttggtgactgctcagatgttagggattatttaggacagtagctgctcatctcctcagcatctacctgtaaggagggtgtcatgtgtaaagcgttgctgtgtgattatgctttcctactctggtcggcacccaggccgtcgggcggtgtctgctgatggcttaggaaggatgaggccacacactcagtcctgggaagtggagccctgggtttgtaactataacacgttggcacgtaccatgcaactctttcatcacctacaatga

SEQ ID NO: 208374 - DNA, 337 bp, Homo sapiens
aataggtgtttggtaaatgtgtggagtagacccataaaatgaggaagaaagagtaaggggcaatctcaaggcatcacagctagtaagtgacacaacaagagttaaaattgaggttgtgcttctgctagtcctggcctacttctgacacatcttcatatatttaatcttgcactaaaaaatgtataatgtcaaagccgtaaaactagcatctcttgctggttgcaacataaattgttaaagctctttcacaaagcaatttggcagtatgtgttgagtgctatgagaatggacatattctgaccccataatcctacttctgtaaagtggcctgaaatat

SEQ ID NO: 208375 - DNA, 729 bp, Homo sapiens
gcgccaggagccctgtaacatcagccatcgtcaaccccaccgtgttcttcaacatcaccgttgacggcaagcctttagacctgcgtctccttcaagctgtttgcagacaaggttccaaagccagcagaaaacttttgtgctctgagcactggagagaaaggatttggttataagagttcctgctttcacagaattattccagggtttatgtgtcagggtggtgacttcatacgccataatggcactggtggcaagtccatctatggggagaaatttgatgatgagaacttcatcctaaagcatacaggtcctggcatgttgtccatggcaaatgctggacccaatacaaatggttcccagtttttaatctgcactgccaagactgagtggttggatggcaagcttgtggtctttggcaaggtgaaggcatgaatattgtggaggccatggagtgctttgtgtccaggaatggcaagaccggccagaagatcaccattgctgactgtggacagctcttataagtttgacttgtgttttatcttaaccaccagaccattccttctgtagctcaggggagcaccctccaccccatttgctcccagtatcctagaatctttgtgtctcgctgcggttccctttgggttccatgttttccttgttcccttccatgcctagctggattgcagagttaagtttatgattatgaaataaaaactaaataacaaaata

SEQ ID NO: 208376 - DNA, 529 bp, Homo sapiens
ctcatttcagcactagctgaggtctggctatcagcctgtcacagagttaggagtatgtcatcacagtgatttttctttcccctcctccagcctatttgaaggaggccctgttatgtgttaccattagggtctttactaagcaatgtctagtttttttccttgaaaaacttgaaatgcgaatggctctctcaacatgcttctctttgtaacagccacattgtgaatattaatggcagtacttaagcaggtcgattgtgcactgagaatatgaaatatgcatgtcacttaaaaacaaatgattgtccatacagtgcttgggctgaattattctccctcaggttgtcacacctgatgcagagggaagctaaggcaatgcatctgtgccagactttatagatcccaaggtcaggatcaaaatgtgcagattcaggaagatgctttttcactaatgatttgttaccattaacttgacgcactgggtggatttatatagagaaaaatgttaataaaatgttcttcgagctacatt

SEQ ID NO: 208377 - DNA, 118 bp, Homo sapiens
aaagttgctagaagtttgtttttcttaaatgttaaaatagtttcatgattaagtctaaattacaagttgtggtcacctgcaacacatgtttatgaacactaaatctcaaaagataaaa

SEQ ID NO: 208378 - DNA, 274 bp, Homo sapiens
catggtggctgagattgggctgttttttttgtttgtttgttttgtttttttcatttctgtatctcctcctccaggaagccctccatgactccaggctgggtcagccctgtccctgtggattccccatcccagtcttgcacactctgggttgtcactctcaatgagtctgttcccatgctagactgtatgccccaggagggcaggcagatgctgtcatggtcagcactgggtccccagccctatgtctcagatgttcagaaaatatcttgaatgg

SEQ ID NO: 208379 - DNA, 181 bp, Homo sapiens
gtgatcacagtactgggtaacaagctgcctgcaaaccagtttctttttctggggaataagtgatgacaccctgtccccatggccagagtttgcaaaaccattgtaacttgtttgttagcaatatgtgacaacactacagtcatgccattaaagtattctacatgactctgtcttctggtgg

SEQ ID NO: 208380 - DNA, 434 bp, Homo sapiens
acatggacacattatcctggattatgtcggtgggcccttaaaggaaagaaggcagaagaggcagtgaaggagacttggctcaagaaaacgtaggaaaggtgaggccagtagaaagaatctatgtgctggccgggcgcggtggcctgtaatcacgcctgtaatcccagcactctgggaggctaaggtgggcggaccacgaggtcaagagattgagaccatcctggccaacacagtgaaacaccgtctctactaaaaatacaaaaaaaaaaaaaaaaaaaaaaattagctgggtgtcgtggcgcatgcctgtaatcccagctactcaggaggctaaggtaggagaatcacttgaaccggggaggcagaggttgcagtgagccgagatcgcgccattgccctccagcctgggcaacaagagcaaaactccgtctcga

SEQ ID NO: 208381 - DNA, 784 bp, Homo sapiens
gtataataatttataattgtaatgcatttttatagacaccatatgatctaatcttcacaaaaacctagtgaagtgacatttagctacatttcacaataagaatcctgaagctcaaaatttactgacctcaaataatccctagcactttgggaggctgaagcaggtggattgcttgagctcaggagttcaagaccagcctgggcaacatggcaaaaccttgctagaatagaatggaaaaattagctgggcgtggtggtgtgtgtctgtgatcccagctactcgggaggctgaggcgggagaatcgcttgaacctgggaggcggaggttgcagtgagccgagattggccattgcactccagcctgggtgacagagtgagactttgtctcgagtaaaaaaagagaatgtaaaaatcgaaagagatcgtgtaggaaatctcaacctaatgctgccggggaggaagtgcacctagaaagattaatgagaaacaatgaaaccagctaacatgaacgattggatgcccatcgccaaggagtatgatccactcaaagcgggcagcattgatggcaccgatgaagacccacacgacgcgcggtctggagggcaatgctggcacgatatgtccccaacaaaggtgtcataggagatcccctcctcaacctgtttgtggcagactaaacttgcagaccaaggcagacaattaaggagtcttttccgtatggtgacatcggcggtcggtggtcgggactggtccgggttttccaggctaaccttcttgaattaagg

SEQ ID NO: 208382 - DNA, 327 bp, Homo sapiens
agccattataaactccatccccaaaatacttttatcaccttatcttacatgtacaatcctggaaaagctgctcccttatttgctttcccacaaaaattctaattagatacacaaaatttcctaatgatttctaagagttgatgtctaatctgctttgttcaggtgtgaattcaagaataagtagcagccaactcaatgtgactattcatgtgcccctatgtataaataacttataatctgccaagtaacttatttcttcaatttgtgttatcatacccattctgtcttcacatgctatcatttagacactacctatctcaaaggcca

SEQ ID NO: 208383 - DNA, 772 bp, Homo sapiens
gcagaggcaatagggttgagaagaagagcagagatgagctgtttggggggaaatcaactggactctgggagtgtttggaagtgatgccagagggaggaggaatggtgacaggtaaccttgaggtccttggtttgggtgacagagtgaatgatagtgcagagatagggatggctcaaggagaagataatggccagtgaaatctgccagcttcgttcagtaaaccctgggcacaccctctcgggagaggatcagttggaaggtcttgtagacccctgtctggacttgggccaggcttccctttgctttcgcctgaatcagcacctgggagaagggcagctttccttccttcacctttcctctgcccagatttaaccagggaggtgaacctcttcatgtttcacatctataaagcgataaatcttcagccttccaatagccctaagagcaacccttccctctggcaatatccaccccgattcagcatactacagcccactgatggggtcctgaacagcagagaccctcaggggagagaggctttctcagtgccccctggagatcttatctagagagaggtctggaaattggatttgctgcctgaagctggctcagcagattcagtccttcttctcaggaaggactgatatctgccagaggccacccaggacttgctcagaaccttcagggaagggagagaaagctgcccagtgtccttgacccttgaagttctaagggagccagaagctgtccctcagctggattggactatagt

SEQ ID NO: 208384 - DNA, 350 bp, Homo sapiens
ccattcaatagcctcccagcagattaactttttgagtcaacctcaaaccaattccctaccttggctagatagaggctgagagaaaggtacatcattcactgaactgtgtggccatcgtcctggtttcagacatccttttttttgttccctccctctggcctgactgctctggcatcctgcatactactctgggttcctctgaactctaaagttcgaactctaagtaaattgccctgttttagctaaaacaaacaaaagcccggtggtcccttaagtcatctttccaaggaagggctcagaggatacataaactttaaaaatttgtttaatttttgtacagaggtaattca

SEQ ID NO: 208385 - DNA, 400 bp, Homo sapiens
agtcttcagcgctgggagaaggatgaggagttgggccagctgtccaccatctcacctgtgctctatgccaacattaattttcctaatctcaagcaagactacccagactggtcaagccgttgcaaacaaatcatgaagctctggagaaaggttccagcagctgacaaagccccctacctgcaaaaggccaaagataaccgggcagctcaccgcatcaacaaggtgcagaagcaggctgagagccagatcaacaagcagaccaaggtgggcgacatagcccgtaagactgaccgaccggccctacatctccgcattcccccgcagccaggggcactgggcagcccgccccccgctgctgccccccttttaatactcaccaataaattttacttcctgtcca

SEQ ID NO: 208386 - DNA, 508 bp, Homo sapiens
gaaaaaaagaaaacaaaaaacaaaacacccagtctatggtgttctgttacagcaacagaatatagacaagtgcatgatcctaataagtgtgaagtggtattttgtggtttttacttgtacttcctcaatggctaataatgttgagcatcttttcatgtgcgtattgtccatttgcatatcttctttggggaaatacatatcagatcctttgcccgttttttacattagttgtcttactgagttgtaataattctttttatattagatataagtgctttatcaggtatgattttcaatctgtgggtcctcttttcactttcttgatggcattcattgaagtgcaaaagcgtttaattctgatgtccactttatcttttgttgtgcttttggtgtcatatctgaacacaagtctttaaaggatgaatttgcttggtgaaacacctttcctttggataccaggttcataagattggacacagtcaacatttttttttttgatctcaatcac

SEQ ID NO: 208387 - DNA, 167 bp, Homo sapiens
ccaaagtattaggattacaggcgtgaaccactgtgtccagcctctgcaggagttttaagtacagtctgtcctcacctgtggctgtgttcccctttaaggtggtaaaggagcactgtgagatacagtatttcatagcacagttgtttcttgctatcccctggggactg

SEQ ID NO: 208388 - DNA, 604 bp, Homo sapiens
gtcccttctaggcagctctttcacatgatcacttcccggatctacaggcctgattcccagcagcttgcagtccaccaaaacaagaactgatttggccttgcctaggttatatgcccactactgagacagtccttgtggtcagagagatagctactctgcctgcccagaaggagatggcatgcctccccagagctggcagaattatggggtgggagggagacaggagaggtgggcagggcattgacatgagtcctatggactaaaacaaggagaaggaaaatttccaaaaggaaaattatgctgtcattaccagaaagtaggtgaatgcatgctgaggtgacagaaacaatagccactgtatgtagagaaagacagagtgataaaagatgagttatgtcttaatcctttggataagtttgcatactatcttggttcctataacatgcctagatccatgttttcaaagtgtgtgaaaaactgaatcactctggataggatatgataaaagaggagacaatgaatggaaaatacaggaggcatctcatgcatatatgattgtactcattcttgatataaaatatatttctcattgtgaaacacagtg

SEQ ID NO: 208389 - DNA, 927 bp, Homo sapiens
cggcacgaggcagatgaataaatgtattaaaccaatttcacaggcaagtttcccttgaaaaacaactccttgccataatcatcacattcattgagtgaccatctaccaaatgctttactcccatgatttcatgtaatattgacattcaccctacaaagtagatggtattacagtgtctgttttacaagtgagaaatccgaggaacaggaagtcaatttgccaagtgttgcacagctaaatcgagattccagagaatgtcacctcaaagcttctagtggggctgtcatgtaggttgtggtcgctttggataacaggagacgctaaggaaaatcagtactggttactgaggatggaagaggcgcagatatttcaccacaggcgacgaaaaccccacttttaggctggccacacaggagccccgaggaaactatgcgtccccttcctccccgcccccacactgccctggcctgggcggagcagcggccgcagtgtaactgctgttgcccagatcgaaccaagcccggtcccagtgacgagcagcgcctgcggggccagagcgtctgggagcctttcatgaccccaaagcccagggaggtccccgcaccatcggccccgcgccctagctcggtccgccgtcgagggtgcctggaagtcccctgcgggcgccggggagaaagcccggggcttagcctcctccatccccagccatctgtcaccgcctcctaggccccggctggagccccatgggcgcctcccgcgcctaccaaggagccagggagacaaggatcccggagacctctggggcgccctccagctgaggattccgccgcggctcccgcagccgcttctccccattcggtgcagcccacctggcccagctctcggccggtctccctcggaggtccgaaaagggagagggcgggccag

SEQ ID NO: 208390 - DNA, 203 bp, Homo sapiens
tgatttagggtaccccagatcctagcatctctgcccacccgcccaggcccctcttgagccagtcccttcctccacagcccacagggtgggggggttggtgggaagctccagaagggcgggtggatggcctcaggcccctgggaggctgcagtcagcagatcatcttgggtgcagcatggtcaagtctaggttggcccttacag

SEQ ID NO: 208391 - DNA, 600 bp, Homo sapiens
ggatccatctggttattgttgattcctctggtgtctactaagatccttattttcatctggctctggtccactgacgcagtccctattgtcatttccttgtccagccacatggcctccaggtcttcaggctcctgggtcactctgtcccttcttgggcctccaggaaatctgttcatggctgctgggagccctacctgtctggacacaccaggcaaccaggttgcattccccaccagggaagggcctggctctggattcttgctcctttcttcgactctactcagaaacacggctcaggatgcctctgcttttggattcctggagttcatctggggtttctcacatcccctgatgggtcttactcccttgcttcccctccactcccttcttcctccaaccatgagggtctcttgcaggttgggggtgaatgaaggtcgcatctgaaagggaaggctggctgagtgatcatgtatattttctaaaccaactggcaagtatcctaactttttttttttggaaaccttaaagccaagtattgacatctttgtccttatttctgaagtctgcttgccccaaagcatggaaggaaagggctgggag

SEQ ID NO: 208392 - DNA, 351 bp, Homo sapiens
tcaaacccatttggcaacctctagaaatgaatgtcaaattgtcacacaaactaatgcaaaactgcatttgtgctgtgtgccacatataccttctagccccctatttggaactgttttgtcctcatccagacataaagttttcatgttcatacactctgggagccctttcaatgctggcattgcggtggaaaactaacacattgtaaacctgagtaattgtcaggctttgagggcaggatttaacccatgctacgttcaaatcctggaagaaccagcattgtgaaaatccagtcacgtgtctctgtcctggtggtagaaatttttttttaaccactgtcatttatagatgaa

SEQ ID NO: 208393 - DNA, 496 bp, Homo sapiens
taccctccagcctgggggacagagcaagacttcatctcaaaaaaataaaaataaataaataaaaggtacttcagctgaggcagttcatgcagtagtgtatcattttggaatgtgggtaagcacccctgaatttacatggcctggaaattttttatatttgattttctcaaagtgcagtataacatactcatctccttgtgaacagaaatgtttgaggatgggttaaatgaactgtagaaagcatctcagaaaaaggtgttatgcaaggcataattattttccaagtgctatctgagcagctttcaccaatcaaagcttccttgaaatagagattacaatcaaagttcatctgtatactattgtgtttggagtacatgccaacattccaacttgaagttgctttgagggaaaagttcttcaaattcatcagtgttgtggggaaatgtgatttaaattctgattactggaagccttattacagaggaggtggcaagca

SEQ ID NO: 208394 - DNA, 262 bp, Homo sapiens
ttggggtcattctgaaagtaaatcattctgtgacttgtccaagtgatgactaaacagttgataaaatattgatactagttctttgcagaaatcatgttaagatttcttttgtaaaagacatcttaaacttttcttaaatttctattctcagataactgttaggtgattaatattgccttgttttagatattattggagaatggaatgaggcccagattcataaaattaatcattccaataaaactaaaaggttaatttttgt

SEQ ID NO: 208395 - DNA, 310 bp, Homo sapiens
ggttgcttgaggccaggagttcaagaccagcctgggcaactctgtctgtacaaaaaattagccaggcatggtggcacacgcctgtagtcccagctactgggaaggctgaggcagaagaattgcttgagtctaggaatttgaggcctcagtgagctatgatcacaccactgcactccagcctgggcaatagagcaagagtccgtctcaaaaaaattgtgttttaatcattctttataatattaacacaatagaatgtgaatcctgggaatttataagaaaaatgttcattttaaaatacattctctatgac

SEQ ID NO: 208396 - DNA, 277 bp, Homo sapiens
acacccttaatagctaactcataactgtagtacgtaaataggagctaatgtaaatgctaagcttctatagataaacaaataatatttgatgtatcacccttcagtgagccgcaaactgaaagaaagattatatgatcaatttaggcctgaaatccttagcgcactgttggtgggaatatagactggtacagccattatggaaaacagtatggaggttcccgaaaaaattaaaaatagaactgtcatacaacccagcaatccctcttttgggtataca

SEQ ID NO: 208397 - DNA, 313 bp, Homo sapiens
  misc_feature (7)..(7): n is a, c, g, or t
tgtaagncgtaagactccatctaaaaaaaaaaaaaattagccaggcatggtgcatgaacctttattcccagctacttgggaggctgaagtgggaggattgcttgggccaaggagtttgaggctgtagtgggctgtgatcatgccactgcactctaccctgggtgacagagacttgtctcaaaaaagagagaaaaaaaagaattagtattaaatttcaacacatttactaacaatagtagacattattgagtgttttctgtgtaccctttatctaagatttttccttgccttatctcatgtactccttacaaca

SEQ ID NO: 208398 - DNA, 120 bp, Homo sapiens
cggtaacgccacgtttaatgttttctgttttttctttagtcagctttggtgagttacatgttttctccttgagaattatttctcaattttattatatctaaggttttaaagtttattggc

SEQ ID NO: 208399 - DNA, 315 bp, Homo sapiens
tctatcccaaatgaattcaagggaaaaagaggtaatacaaagacactaataaaaacagaaacaatctgaatatgcattgatatggttaagctttgtgtcctcacccaaacctcatcctgaactgtaatccccaggtattgagggacagacttggtgggaggtgactggatcatgggggtggccccccatgctgttctcatgatagtgagtgagttctctccagacctgatggttttataagggcctctttctttcttctgaggattgcagaggatatagttatcaatctctagttgtcactttcctcttccactt

SEQ ID NO: 208400 - DNA, 185 bp, Homo sapiens
tgcatgcttattctatctctttcttttatccagaaatttaacttatgatcaaacatattaaagcagttattaaattctgacttatgatatccagatacatagcttgtactaaaaaaaaaagtattcaagttttaatttagtcagtatttaaacttctaatccactaggtgcaaaatctgcagatg

SEQ ID NO: 208401 - DNA, 292 bp, Homo sapiens
gtctcaaaaaaaaaaagaaaaagaaaaaagaaaatatcagcagattgaatcaatattgtatcaaagaatctagcaaatatcttagtactggtatttgggaatatcttaatactgggcaactatgaaggagaacatagtcatctccttcactacaaaaaagacatacggcaaaatccaacggctgagcaaatgctgctatctgctacacgggtgactccctaccacgctgccctgggcaacggccacagggaggcctgcctaagaaactcctcagacaggtgcacttgaccat

SEQ ID NO: 208402 - DNA, 234 bp, Homo sapiens
tcccccttggtggggtggctctgccgctgcgtcactttggtcacactgggcactgggaaggatgttctgcaggtgacctggtgatgctcaacatttcagtgacctgggaagggctgagggcgtgagagcggcaggtctgcccggcaggcagctggaggggacttcaactcatccttgccactcgcttgacgttcccaaacacaaggggccatcctattgggtgtttgctcaatt

SEQ ID NO: 208403 - DNA, 423 bp, Homo sapiens
cttagttataaggtagcgcccccgtccccaccccgtagtagaagttagagaaggatattaacagcctgtgctccttctgtgctccatgagcctcatctatactccccagtttcacattccttagagctctgtgaattcttgcttacctccccagcacagctgcaaggtcataagattgatacgtatatattacacaaccatgtattcccaaggatgtaagacatggagtaacaactgcctttcttctcgcttctgtaagtacgcttcctgcatcacgtaattcccaccactgattgtttaaaaggtggctgctctctttgttcggggctcagactttcctggacgctagtcctactgagccaggtgctcaccttaataaaggctctcctgaactctgttcagtctctcccatctctgattgtc

SEQ ID NO: 208404 - DNA, 354 bp, Homo sapiens
ataaggtctaaagtgcagttaacagtaatgtactaatgtcaatttcttggttttgctatagtactacagttatataagatgtcaccatttgaggaagttaggtaaagggtaaatgggagggattctttgtactatttttgtaacttcctgtgagtctataactattttgaaataaaaagtttaaaaacaagtctactgaacagaaaaaaagaatactttttttaaacgtttttgagacagggtctcactctgttgcccaggctggagcacagtactgtaatcacggctcacgacaacttcaaactcctgggtgcaagcaatcctctcacttcagcgtcccgagcagctggtact

SEQ ID NO: 208405 - DNA, 477 bp, Homo sapiens
ctgctcattggcctccaagaacttaaactaaaaatccctccccacgttttctcaagcgacctctccttcctactgccttacaaactgggccccggaggccctcgtgcgctcccgcaccgacggtgcagcacttcctggctccccctctccagcgcccagtgactcgctgctgagtcacctgtggccctgccctggggagagcttccaactgcgccagtccacttgagaatggaggcaggcacctccttggaagggaataattaactttcacgttgcctaatcctgcatttctggtgttaatctagtggtaggtttatagctgaagctttctacttaagccgggtttaaaaacacgtccacaaaaggatattttcttataaaaccagagttggcccggcgcagtggctcacgcctgtaatcccagcacttgttcgagacaaacctggcgaacatggtgaaaccccgtctctactttaa

SEQ ID NO: 208406 - DNA, 370 bp, Homo sapiens
tcccctggttaaagcacacccattcaaagtacatgataggccatagattttaatgttaacggagtatgaaaagttcactgcatatggtattcagattctacacgcaactagtcttataagaaaccaccacacctggctagcctgtggctttatcttgattcctttcaaatttaggtgaatgacattgatcctaatttcctggattctccctgaaagcgcagggttggaggctactctctaaagcagtgtaatgttaaggaggtgtcctgggtatggcaatcaaaccgagcaggaaggggtattattgtcaaggttaactaaagtgcatagaggaaaggaggaaagagggtagtgaaggttacagggaaat

SEQ ID NO: 208407 - DNA, 553 bp, Homo sapiens
aaggagggcaacgtgttagtgttgtttttgtgttcttataaagatacctgagactgggtaatttactaagaaaagagatttaattgactcatgtttctatgggctgtacaagaagaatggtgccagtctctacttctgctgagggcttcagggagtttacagtcatggtggaaggcaaagagggagtgggcctctcacatggtgtgagtggagggaggtgccacactcttttaaacaaccagcagttgcatgaactaccagagcgagaactcacttgttaccatggggatggcaccaagccattcatgaggcacctgcctccatgacccaaacacctcccatgaggccccacctcaaacaatggggattacattttaacatgagatttggaggggacgaacatccaaactatatccagcaacatatgacactctgacattcaaattatatgaagtttggattaagggaaataaaaatggaaggtagagaaatcagttgcttcctgagctttgtcgtttccctaacagccaaattttggttctaagaacattaa

SEQ ID NO: 208408 - DNA, 284 bp, Homo sapiens
gatggttgcctgtgatgcctggtggtgctcccacaaaggtgggttccagcttatgctcctcatcagctcacgtgcctgtgtctcatggtacttggttctagctgggatgtttttgttcctcgaggagtccaggtgtcctgtttttcactctctgggccatgtgattccagtgtgtttatctcaaataatgtgttctgttgcaaaagggaaagagctaacattaattggatggaattctcaagcctaacattgtactagccgttttacatgcattatctcattta

SEQ ID NO: 208409 - DNA, 444 bp, Homo sapiens
tcttagagaaccagaatggtcagagactctgatgatcccctggtccacacgtgactgagagttaataccttaggtcactgttctcagaacctggatatttatatgcacgtgcacctcagtgactgatccattctcagttttcaggtccattgctttcacatttgaaatagtcaaggagcatctttatgactggggctgagcttctgcattcatgtacagccctctgcctgccagcagtgccttgcatttgtgatcctacaaagagcctgtggacttaatggtttactgtatagggaaaggcttgactttgtgtcttctacttaagaagcttgaactttttaccaaatattcgtactccttttcctgaaaatactgatctaggctacagatccatctcttaaccatatttgaaaaattgaaataatatcttctgccataacttga

SEQ ID NO: 208410 - DNA, 311 bp, Homo sapiens
cattctcaggtgtctacttcttctatcccgattgactttagctcctcaagggcagaaactatatcatatactccatagtatttgttctaactccagcacagggccttgtacatagagggcactgattaatgaaataaacaagaaagaggataagttgatgggagaagtgtggacagatggatggatggatggatggacggacggacggacgagtttctaacatgcttaaccttttctcagagaataagctagttacctgagtgaggacttactacttatttaaaagctcccatatttatcagttaaaaaaa

SEQ ID NO: 208411 - DNA, 104 bp, Homo sapiens
taaaaagaaaaagacaatactaaatgttggcaatgatgtgaaacaactggaactcccacacactgctaatgggaaagcttctttgaccatttcttataaagtta

SEQ ID NO: 208412 - DNA, 407 bp, Homo sapiens
gacattggcgtaggcaaggatttcatgaccaggaacctaaaagcaaacgcaataaaaacaaagataaatttctgggacttaattaaactaaagaatttttgcaaggcaaaaaggaatagtcagcagagtaaacagacaacccacagaatgggaaagaatcttcacaatctatacatctgataaaggactaatatccagaatctacaatgaactcaaatcagcaagaaaaaaaaatcccatcaaaaagtgggctaaggacataaatagacagttctcaaaagaagatacacaaatggccaacagacataagaaaaaatgcttaacatcactaacgatcagggaaatgcaaatcaaaactgcaatgcgataccaccttactcctgcaagaatggccataatcaaaaaat

SEQ ID NO: 208413 - DNA, 561 bp, Homo sapiens
gaggagttcacatttatggtgagcccatgcaagaagaccctccgacaggtgcctgtcacccctgaggagtcactggttgcagcccgttctgaagtgtcattgagatagaaaccaagtcaaagccgtggcctagaaagagagtctgggcagaattctgcaagcagattctttatttgagaaacatggatgccacacctgaaaggcagtggccatttcggtaatcacctgaggcaagatcagaaaaaatctaaaagaattgcagagatgctgaccttgatgacttcaagctgctgaaccaagtcccagggaaatcaggattatagttgtttggctgtttcagacacacctgctggtcattcgccacctgaacccacaatcgggtatttggactcggcagtgagtcctgccacggaggcagctctgacgcgactggtggaggattagcacttcacgtgggaagaagcagcaggaaaggatgaaaatcttaagtagcaaagatcttgttttcgtctctagaactccagtaataaaggccagtggcaatgctctcgctagtaccag

SEQ ID NO: 208414 - DNA, 797 bp, Homo sapiens
ccgaggatcgcgtttaccacaggcttctcaccagatttctagattttcaaatagtggattctttctgtttaggttgatttttaatttgctatcatctaggattctgtgtagcctcttgtttcttttcccagagaatggagattattgttttctgtagatgttctactgtttagatttatatcatcaataaaagttgtcatagtagagtcataaagaatttaaactgtgcaggtgaaaaaaaatcattagatgtatagagattttcgttctcttaaaaacttattttagtttctcaatgtagttaggctgagatttgggtggctctgtggtttactgctgcaagtctgtggtgttagtacagctggtgtcgtactagggaggatgggaacacaaatgctgctgacttgggcagagtgtaagtctaggctgttggcgtaagatgcacctgttgtctagtgcctggttttatatctagaaaagcaaaaaggcctgtcatcctgagtctaactgttgctgaaactggattgctgaaagtgctcagttaagccggaaggatctgaaaaatatcttagatgtagtagcagggctgagtccaggaatgtcacataggatagcaagaagcagaaatgtaaatctgagaccaatgagggtctgaagttggagtaatcagaaagtatttaacctcaaaagcagttcctatatcactgaagaaaggagggactattttaaagtgtgctgggacagttttctatgcctatgtacaaaacatactggtcttctacttcacactaattaca

SEQ ID NO: 208415 - DNA, 165 bp, Homo sapiens
ccaaattctaatctgacattgaatgtcaggtgggatggaggccagggtttcagaatcaagctcagtgcctcccatctgctcacccatgagtcctcactggtatagtgtgcaggtaatcagtacttcagctgggcagaactgccttgggtaattgcttaaggggaa

SEQ ID NO: 208416 - DNA, 378 bp, Homo sapiens
tgcatggaaataatgccttttgttgaatcacatcgttttaaaatgcttgtatttgtttttttatgtaaagaattttggaagggacataaaaatagttaacatttttcatttggttcattttgtaaatagattcacattacaaatgttttagctaaattgcatggaagaactttaactatatatgtcagtcttgactgactaaatttaacatcccagtacaattatttaaaatgaattaattaccagattgaatgaactatgaaaggaaataatttgtggattttgcagagaaatattcactgattagactctgaaattgctaactcaataaataatccagtgattaaatctttaaataagtaaaaaattcttcatgct

SEQ ID NO: 208417 - DNA, 424 bp, Homo sapiens
atttggtcctggtatgacaaggtacagtggaaagaaaaagaggaacatgccagccagtccccttaatattactgcagcttctttatcatcacagcagcttacatgccgaaagaccgtcttaaattaggaccagaaagggaagggaacattattaagagccatattaagacagagcctgaggccgggcatggtagctcatggctgtaatctcagcactttgggaggctgaggcaggtggatcacttgagcccaggagtttcgcaccagactgggcaacatagcgagaccttgtctctaaaagacaaaacaaaaaaattagccaggtgtggtggcatgtgcctgtgttcccagctacttgaggggctgaggtgagagaatcccttgagccggggaggttgaggctgtggtgagctatgatctgcac

SEQ ID NO: 208418 - DNA, 307 bp, Homo sapiens
ctaccgtcaacactggggattacaatttgacatgagatttagtggggacacagatccaaaccatatcagtcactgatggacgaatacagtgtttatcttaagaaacaagagaaaaagaagagcatctgaaacccaaaccatatcagtcactgagacactcttctcttttaatataggcatttaatgctataaattttccttgaagtcttattttatctacatcctatatgttttgatatgttgtttttattttttattttattttatttgacctatagactctgaaatgctggccgggtgtggtgac

SEQ ID NO: 208419 - DNA, 437 bp, Homo sapiens
acctaacagatacaattcagcacggatatctaagaaacacagatctgtgatgatctgggagagtcgggctgaatgcaactggattttgcattacatttggaaaaaaatgtgaatcagtcactactggaactgcacaaactggccactgacaaaaatgacccccatttgtgtgacttcattgagacacattactgaatgaacaagtgaaggccatcaaagaattgggtgaccacgtgaccaacatgcacgagatgggagcgcccgaatctggcgtggcagaatacctctttgacaagcacaccctgggagacagtgataatgaaagctaagcctcaggctaatttccccatagccatagggtgacttaccttgtcaccaaggcagcgcatgtatgttggggtttcctttaccttttctataagttgttccaagacacc

SEQ ID NO: 208420 - DNA, 991 bp, Homo sapiens
ggttgcggggagccaagattgcgccactgcactccagcctggcgacagagtgagactctttctcagaaaaaaatatgataattaaaagttgagacgttcttcgccgagagtggtcggggtttcctgcttcaacagtgcttggacggaacccggcgctcgtcctgcaccccggccggccgcccatagccagccctccgtcacctcttcaccatgccctcggactgccccaaggcccccgccgcagctccagcgccgcgtagccaccactgccgctgccgccgcctctccttagtcgccggcatgacgaccgcgtctacctcgcaggtgcgccagaactaccaccaagactcagaggccgccatcaaccgccagatcaacctggagctctacgcctcctccatttacctgtgcgtggcttactactttgacagcgatgatgtggctttgaagaactttgccaaatactttcttcaccaatctcatgaggagagggaacatgctgagaaattgatgaagctgtagaaccaacgaggtggccgaatcttccttcaggatatcaagaaaccagactgtgcggggagaatgcgatgggagagcgggctgaatgcgatggattacatttggaaaaaattgtgcattttgcattacatttggaaaaaaatgtgaatcagtcactactggaactgcacaaactggccactgacaaaaatgacccccatttgtgtgacttcattgagacacattactgaatgaacaagtgaaggccatcaaagaattgggtgaccacgtgaccaacatgcacgagatgggagcgcccgaatctggcgtggcagaatacctctttgacaagcacaccctgggagacagtgataatgaaagctaagcctcaggctaatttccccatagccatagggtgacttaccttgtcaccaaggcagcgcatgtatgttggggtttcctttaccttttctataagttgttccaagacacc

SEQ ID NO: 208421 - DNA, 414 bp, Homo sapiens
tccttgatgccccgtggtcaagtccctaatgctttgtgtgatcttagataagtcaattaccatctctgagttacttcagctttcaaatgagggggttgaacaagatgctatgtgggggttctttccagttccagaattcagactccattttcaagttgtgatcgggcggcggatgcagcatgaataagaattcagactccattttcaagttgtgatcaggcggcggatgcagcatggataagaattcagactccattttcaagttgtgatgaggcggcggatgcagcatggataagaattcagactccattttcaagttgtgatgaggcggcggatgcagcatggataagaattcagactccattttcaagttgtgatgcggcggatgcagcatggataagaattcagactcca

SEQ ID NO: 208422 - DNA, 221 bp, Homo sapiens
  misc_feature (7)..(7): n is a, c, g, or t
  misc_feature (43)..(43): n is a, c, g, or t
tggaggnatgacaaaccagcaacagctggccggacccaaggcnggggcagactggacagccaggcttctggcctcacttgcctgtgatggactctcaagaaaccctgtgttgcttatacaaacttaaaacaagttgaagattttatacttctgaatttcaaaacattactaagctacagcaatcaaaacaatgtggtacggccaggtgcagtggctcacac

SEQ ID NO: 208423 - DNA, 514 bp, Homo sapiens
gtgagccacctcacccggctgtgttttcatttctttataaggcaggtgatgttggctttacatatacagtagtaatttaaaattatctttttttttaagccaaaaaaggaagtcagttttaaagaaaaatataaatagcttgtacttggatgtggttaaaaaaaaaacacacacacaaacgttggtattacagaaggtttctgacttaattatttaggacaatcatctgttttatggattctatgttaaggatcacttattgcatcattcccattaaatatgtagtatgattttctgaatggcaaattgtagaagggaatctaaaccaaagggtaagcggtgggtagcagagtttgtaaaggcctgtaaagtgctgcccaagagaacttcctgcagtgataactgttgagcactcgaaatgtggctagttcaactgaggaactgaattttaaactttatttgattctaataaaactttaagttaggtaaccatatctggctactagctactgtg

SEQ ID NO: 208424 - DNA, 1022 bp, Homo sapiens
ggtcaagctggtctcaatctcccgacctcaagtgatccacccacctcagcctcccaaagtattgggattataggcgtgagccgccgcacccggccagtttactcttatgtagtaagagtaggtcagccttcctggagtctgttaaggatggaagtgggctttcaaggccaggccatatccagtcaggcatgcctttgagtgcagcatacagttggaaggactagggcaagaatggggagaaggtataggagcagttcctttatcttagtgggtttccagttggccatgccaggagggaataaagtaactgaactctggaaaagctacagaatcctgctgcagggggtacatttgaggagaagccagaacattaaatgaaggtaagaaaatgcaagaaagaagaagcagcacaggtgaatcagagctccttcagcaacatctgacaggggctctcttttgggcatgaagctcagggttcatttttaaagtcatgctaaacagaaactgtgaattcaagccaggcgtgttggctcacacctgtaatcccattactttgggaggccaaggtgggaggattgctgtaaccccggagtttgagaccaccctgggtaacatagtgagactctaactctacaaaaaatttttaagcaggaggctctcttgagccccggagattgagggtgcagtgaaccacagttgtaccactgcactgcagcctgggcaacagagccagaaccctgactccaaaaaaaaaaaaaaaaagaaagaaattgtgaatcccctggaggtgcttgttagatgaatggagtccaagtcctgtctcatagagattctgatcaggtctcagatggactcgtggaatctgtatgttttcaaatgctctagatgagtcttatgcttgggtaattttgagaaatactctgctgctagattatattaatcctgttgggtgggactctatgtcggctggctccctaggggtccagtgagtaatgcatcgtgaatcacttggatcatggtca

SEQ ID NO: 208425 - DNA, 1078 bp, Homo sapiens
ggtcaagctggtctcaatctcccgacctcaagtgatccacccacctcagcctcccaaagtattgggattataggcgtgagccgccgcacccggccagtttactcttatgtagtaagagtaggtcagccttcctggagtctgttaaggatggaagtgggctttcaaggccaggccatatccagtcaggcatgcctttgagtgcagcatacagttggaaggactagggcaagaatggggagaaggtataggagcagttcctttatcttagtgggtttccagttggccatgccaggagggaataaagtaactgaactctggaaaagctacagaatcctgctgcagggggtacatttgaggagaagccagaacattaaatgaaggtaagaaaatgcaagaaagaagaagcagcacaggtgaatcagagctccttcagcaacatctgacaggggctctcttttgggcatgaagctcagggttcatttttaaagtcatgctaaacagaaactgtgaattcaagccaggcgtgttggctcacacctgtaatcccattactttgggaggccaaggtgggaggattgctgtaaccccggagtttgagaccaccctgggtaacatagtgagactctaactctacaaaaaatttttaaaaattagccaagtgtcgtggtgcatgtctgtggtcccagctactcgggaaactgaggcaggaggctctcttgagccccggagattgagggtgcagtgaaccacagttgtaccactgcactgcagcctgggcaacagagccagaaccctgactccaaaaaaaaaaaaaaaaagaaagaaattgtgaatcccctggaggtgcttgttagatgaatggagtccaagtcctgtctcatagagattctgatcaggtctcagatggactcgtggaatctgtatgttttcaaatgctctagatgagtcttatgcttgggtaattttgagaaatactctgctgctagattatattaatcctgttgggtgggactctatgtcggctggctccctaggggtccagtgagtaatgcatcgtgaatcacttggatcatggtca

SEQ ID NO: 208426 - DNA, 554 bp, Homo sapiens
cggccgcacagcttctcctggttccacacattaagatgccataacgacactgcgtatattgagctgagctgggtggaggaggaggtggtatcatgtgagctgagactgaaagatgaagaagcagcctccagagatgtcaggtaagggttagtgggagcaggacctgccccaggcagggacctatagggcaccaaatgtggatgcgtgaggagtaacgagaacccagtgtcgggagagagagcgggagtggccagcaaatagtaaatgatgtggggccttgtaggccatagtgaggagcttggattttattccaagtgtagtgggaagccgttgggggacaactagagaagtaataaaatctggcttatattttaaatgatcatctcatctcccacatggaaaatggattatcgaaggctacaggtagaagccagtgaccactttaagaggccattgtggtttaaatgtgagatactccagccccatctcagaggcagatggagagaatggactgattcgagctcgtaggatttgctgttgggtttgatggggca

SEQ ID NO: 208427 - DNA, 425 bp, Homo sapiens
acagaggggtcagaaaccactgggcaagatggggggaccttatctgtctggctttggaacccatcagtcttcccactcatggatcccaaattaagaacccctggactaagtcacctgaagagtttccagctctaaaaccatatgattataagatacggttatttgtcctcccacctccccccacgcccaagtgattcattcattccacattgatccaacatgaattccagctcctgctagctgggcatccttcatcaaggtcctccactgctgaagcctcagttgccttatctgtaaaatggggataatgatagtctcttccttaaaggattattaaaagtcttaaaggagatagtggatgttaagctctgaactcagtgccttcctgacatgtggaaagttcccaataaatgcttattagcctt

SEQ ID NO: 208428 - DNA, 1131 bp, Homo sapiens
cacctcctggatccgaccacttccttccatcctcttggcccctacccttatccctcctggaccccacctggaccaaggcaatcatctcctctctggcccacacgcctccaaatttctccaagcaaccagagtaatcacctcaaaagagaaatcctaccatggcacctgcttgcacaaaatgcttcaggggctccctgctgcaattgaagacccaagtcttaaattagacatagtaacactatgtgatctggttctgctttctccacccctagcctctcatttcatgcttcagcaatccccagctgtctgagttcatccatgatggctctcacctctgcctctgccttctacttgagtaactcctacccatccagtcacctcttctaggaacctccttggatattcccatgaaatttcacacctgcaccaccaaccccagctgcccatgcttccatgtcccaggcacctctctggccttctccttcctatgtatcattttagtgtctgtctgtgtgtttttcttaactctttgaactcccaagggcaaggatcatatttatcttcagtgtgtgtgtgtgtgtgtgtgtgtgtgtgtgtgtgtgtgtgtgtgtgtgtacttttatagatacaggatcatgctatgttgcttaggctggtcttgaacttctgagctcaagcaatcctcctgccttggcctcctaaactgctgagattacaagcattagccactgtgcctggccaatatttaaaaacctatcatcatgcctgacgcaaagtagatactcaataaatgttgagtaaagttacaggccacttactctctctgaaaacttctctcttcttccgactttccaagaagtgtacaccaattcacattccccccagtagtgtgaaacagtgcctattccactatcctcatgaacattgggtattcttaaatttcttcccctaatttgttagggaaaatttgtatttccttgttgtttttattgttgatctttggttattagtgaagttgaatgttttttcaaaaagtttttcagtcaattccatttcttttcctgtaaactcaattcaggtgacttacacacacttacctgttttgcttttactattaaagttttgggtgtg

SEQ ID NO: 208429 - DNA, 422 bp, Homo sapiens
tctatcacttccccatacaaaaacctttcccacagacacctggccttccaacctacttctaccagtgtagaagcttttgtgcatacttttaacccagacagttcatgtctaggaattctcccaagaaaataaccacgatcactttttttgactgaaaagaataaaatggatctcggggtttaaactgttgatcagaaaggttatcacaagttcagtattattttcctgttcaaccaacagtgcgtaagtggctcaaggtgagttctattttcatgctaccaataaaatccagtgcatttatatatattaacataatttataactttattttgtaattttataaattattttttaaatattacttcatgtttacgtgcattttataaaatttatatataaagttacattttatacataatgag

SEQ ID NO: 208430 - DNA, 389 bp, Homo sapiens
tgtcagctgtgcatggtgcatgtgtgtgagcagcagggactgctggggtgagtccgagtgcccattatatctggccaaggacaccccatgaggctggggagccctgtttggcctggggaccagtccagcttcctgccctcctttgggggaggtggactggtgaggctgggggctgtcctgcccctttgctccaggaaggaagtttggggtgggtctttctcctcctgcatgcttactgacgtccttccttcctgagtgtctgaaaacccttggggagccgggggtggggcacacacatcctagggctgggctggaaggcacccagccccccatgcttcacctctgatcctctgggcagcctttagacaggggaggaccctcgatctgca

SEQ ID NO: 208431 - DNA, 372 bp, Homo sapiens
gctctcttcattgaggaggcctagaagcataacatctcagtacctatgggcattcctagtactgtgatcttaagaagagccaaggttccttgaaataataaggagctgaagtgggagtttcttctgtttgattacatgactggggaaatgaaagtacaagatgatccttgactacccttttgctccagaaatgtaaggaatgctaagaaaacagacacttttcagaagaacacaggaatcagcttaaccagatttcttttggccagataagatggaatttgagattgaaaagaaatgattattgtaatgagttataatccattaaaaatatatatatgtccatgttttcatactaataaagatgaatgaatg

SEQ ID NO: 208432 - DNA, 367 bp, Homo sapiens
tgcacccagcagatgcactatgaatttcttataaaaattgatttgtatttcctcttttaaccaaggtttcttttgttaatctgtatacttttccaagaggccacgtagtttgtggtagaattcaaataggaaaaatacttaacatcccctccatctgtccttctactcattcctaaaaatagaagtcaacttttcagactaagatttttaaataaaaaatttgggaaattggtcaattacatatgctctggtagagatagctaataaccccctggataaagcacccagacatactgattttcccaggacagttcctgtttacgcttagtatcccagtgtaatcagtggtagtggcatctttcactgt

SEQ ID NO: 208433 - DNA, 403 bp, Homo sapiens
caactcccaaggtccttggccctattccattaagaggcttacctaactttctctcagtcactgtgaggcagagttcgaaccagagccagaactcctagtctagttctctaacccttactgtctcacactgacactacgtttgtttttggaaatacaatatctgtctgaatttatgctatctttttagttaacactctgcccttagtaaatatagaaaagtaatgtattcttcaaaagtaaggtatttaatcaaggcttagagaacttttttcctagacatttactttgcctaccctaggaggagtcactaatcaatattattgttattaaagtaataggattaatacaagacccactttactgatctttcactctgggccagggagtatgctaaaccctttac

SEQ ID NO: 208434 - DNA, 365 bp, Homo sapiens
gctgtgtctacaataataatcgtttacagcataaccaggggaggaatgactaacttctcttcttatctacaagataatgaatagcctatttaactttttttaaaaaaaatcaatgtttgcgttgatttttgtatggttacaatagcagccaaagagaaaagttgcatggtaaatttgaaattgctgactgatttttataaatattgaagttcaaggagtgctttaccattaatggtcatatttattggggaaaacagtattggggattgacatctgaactgagctcatagaacatgtagcatagaaatagaaggagacaaggaaaatgacattattcccatggtgcaaggtgatgtttagcaggg

SEQ ID NO: 208435 - DNA, 462 bp, Homo sapiens
catcacaatacatgaaacatgttctggttatcaataggtactagatacattaacatcaaggggaagatcttcattccagtaacgaagtctccattctcttttctcctgccactaaactgaactcaaagatggccttttttttttctggatacagtgaatattctcttagtttaaaagggattgtcttccttctggagggtagttcagagagaaaaagcaaggctaagaaggtgaggaggacaagtcttgggcaagtgtgacttagtgaggagaatcatacaaacagacatccatttcctaaagtgtgccagaagcctcttttatctgcatcaggatctctttaaagatgtccatcttgctgagataaaaatgtatacatgtacccaaacattacactgtgccctattaatttgtacaattattattcatcaattaaagatcaaataaaacattaaaaatgtc

SEQ ID NO: 208436 - DNA, 349 bp, Homo sapiens
ttaagtttatgtttagcccgtagggtatgaaaccaggatttgatttctactcttgagcccagcagtctttccatttaaccatgttgcatttattttgtaggacatggaagcctttcaagattttttgcctgcaaggggagtaaatgataaaactaggccctttttggacccaaatgctcccaaccagtactcacacaaattggctcaagttcatgaagtatttgtgtgtttaatctattgaaaagagattttgcttttgactttgctaataagtatgaatagtgtatgtaaacatatgaaagcaccttttataaagttggcacttattgtttccaagcctcctagaagc

SEQ ID NO: 208437 - DNA, 230 bp, Homo sapiens
actttattattagcccctgttcccaaatttaaaatgggtccctatttcagggatattaagttttcttttctttcttttctttttcccttccctttttttccttttcttttcccttcccttttttccttttctttttccttccctcttcccttacctttttccttccttcttcccttccctttttccttccctttttttcttttctttctttcttttttttcttttttttt

SEQ ID NO: 208438 - DNA, 603 bp, Homo sapiens
gaacactgttaattcagaaagtgagtcaagtcagtctgctgggaaatcacaagttttggccacattcatgctgttgaaataataaaatgtgtccatgtgctaacagtgcttatgggagctactgccttgtcttgggcttgttggcaaatgacgtaatacaaaccagggaaatgcaccagcgtaagcctattatactggtatttttcagtgccaattccaggtttaagagatcatggtggaaagaatacttcagagtgcatatctgagaacagaaacatcccaagatcaaaagtcacaaatgaacaattatagattgtaaggagtctgttgtgttttctcagtgttcttgaaaacacccagtctttactcctttttctaagtaaggttggccctttcagcttctgataattatatattgagccatgttgtgactaggttgtatggaatgctagagctcctgtttttactctcatggttttgattggagttgaagcctctctcgtctggcttctattggtggcatttactaattttctggcctggtaaatggcttgtggtagctaagaatgtttattccagttttttggagacagggtcacccat

SEQ ID NO: 208439 - DNA, 449 bp, Homo sapiens
ctccggtcaccctgccaaaagatccttgtgttgccacgtaggaatgggctgcttggggacccagcgagctcccagggcctttcccgctgcttcctctacccctgtatttcgctctgctctctaaattgactcaactccaggtaaggttggaaacttctctcgaaaactagaccttcagtttccccagtgggggtgtgtgctcgggggcggaggatcttcctttcccatttccactgttggggcactcacagtatttggggtgtctcccaggtcctgcagctgtctgcttccttcagagggtcggtgggtcctcttgggattcctggtttgttctggatctaaacttaatgatgtgagcctccacacactgctcaatccatctgagtcggagctgcaatctagtcctgactcccatctgccacgatgatccacgatgctcttttttcaaa

SEQ ID NO: 208440 - DNA, 359 bp, Homo sapiens
agatctgttctaggaggagtaggaagctctggttgtgagtgattgaagaccactgcactgttcagaagcagctgtcgcatcctcttccgttcagcacctgattattatgtagctttatttaatggtgcaaaataccaagtagagaacaaggaacataagggcaaaattaatggctggatagctgttgtggctacgtaattctgatctaaaattagtttagaaattacaattgaaaatgcaattgtgaaatatcattttgaaatactttaaaatgctgcctagcctactgaaatgtttctcagttgaggtacccatgtaaaatgtgtgcgtacacatggacacacaaacaggctaagaaa

SEQ ID NO: 208441 - DNA, 1271 bp, Homo sapiens
aaaaaatactgaattcaaaataatgaactggtcaaccttgctcattgaactgtattgtttattgttaggttcaagctactctaattgaatttgaagaaagaagcttggtcatttggatgggaacttgaccaattaggcaacagaatgaaactgatgaaaaataaaagatctgtgtttccaagcatctacttactcttctaatttggataccaaaagtgctgtgaaatttattgcaagattaaaggaatcaacttccttggtatttggtaaattttataattatctgtgaaatttccaatatctttccagggacaaacaagtgctagttttgaatcatccaaccatgaattcttctgcctagttgagtatcaagaactggcctgtgccattcatcaaaccctttgaaaattcaaagaggtttactaaagttaaatacagcatgtaataatccgcaaaatagagaactcaaatgttaatgagctgtcatttagccttgatttttatttcaatgtgaaagtgaatttgtgatttacattctgaatactttcacatatttgtatcgtggcatttgaattctaacttcacatattttgttttatctaaaaacaagcaaaatgaaaaccaatatgacataaacaatgatctaccagtgtaacatattgttgtgttcataatcatattcaatttgaaaatttaaagtttcttgaaaaatatatatatatatatatatagccacaaaatatttctctattacttacattctataattctaaagagattttggcagttttcccataagaaactcaaactcaactaacattttaatttctagtttggggatgaattattattacaggagtctagttttcttctttcagattattaaattaagcaagtaataacaaagcataatttggttttgctgcagtctctttccaacaatttaaaatattttgggatttttgcatgtgaacagtaataatatactacaaatccctaattcaaggtttccctttccatgtttagtcatacatacccggaattggctcaattcacactcgttgggaccgggatataaggcgacacctacaccctccataaacgcgaatcaactaggagctccatgtcccataatgcatacggcgacgtatcgaaacgaaccaacgtccacacgaacaatagtagcaaccgctgcgcctagttaatccccctgatagaattaattccggcaccggagcattcctacacatctagtagtatcagctgtaccc

SEQ ID NO: 208442 - DNA, 728 bp, Homo sapiens
atttggccgtaattcttccttgagctaagcgaggcagaagctctgcctgcttccaggagtggaaggtgaagaatttgttcccaactccagttgaggcttttgattccctccaagcacttcaccaaatcaaagccagtcacagagaatggagacacctgcccagaatacccaccgtccagggagattagtgtgctttgttcttcctgaccgagactcacaaccacattctgaggtcactcgagtgcccctgtctcatacattccaaaggaagttgaagctatagagacaacagtcaggggctggtggtggtgcttttgggggtctaggagagcccaaggccctgatattttaaaatgtcctcctcggcatctccagcaagttgccactgctggtgagcttcactgtctgccccgttgacacgatgggtttctagtaggggacgccattgatggaaggtctgtgaagacaatgctcgccaaacccctgacagatgtcgtatcatttgactcagcaactcagggcggggcggggtgggggaaattcataacacaaattcatttatttcacaaatatatgttgagtttttaccatgtgccaggcatagtacctgccgagtcaagccctcgaggaaaaaaagcccttaattagtcaacgttcgagctcacattctaattctcaacttcgtgatttgttaatccatcttataggcgaagaaagcgaggtataga

SEQ ID NO: 208443 - DNA, 558 bp, Homo sapiens
ccagcttatttttcagcttcaagacaaggtctactgtttctacttctgtgtgtttctggatccagagaaaaaactgcccttcaattctaatctcacctcaaaaacagaatgaggaaactatttctgtgatcaagaaagctgaaaccaaaggcgtggtccatggaatagaccttgacctagtgaaaggagcgcctacactcaactgtatctctgctactcaaattcaaatgcctttctaggtctctttactttgctttcaagctcagtcttggtgtaaatctatcaccttcaatataactggataaatatgtaaactttcattcacactaataaacgtgaaatgtaagctctacagaaacaaaaagcacagtcacaaataaagcattaatctaatcattagatattaaatgcttgatataatactatcactgtgtgagattatttttcaaaatttggttttctcatctcttggaaaacaagaatttttttttttttttgagatggagtctcattctgttgcccaggctggagtgcagtggcacgatctcagctcactgc

SEQ ID NO: 208444 - DNA, 462 bp, Homo sapiens
caaggtctcactgtgttgcccaggctggtcctgaactcctgagctcaagcagtcctcctgcctcggcctcccaaagtgttaggattacaggcatgagccaccgctcctaacctagaaaactctactttacgtttggcccaccacgctttctgttagtatgatcagtttgtgatggtttgtccaggactctccctgtttcaaaactgaaagtcctgaatctatgagcactccctgatgctcacctccaaccccttcctccatcttaggtaaaccagattggtcactctactttatctgttgcttggtctatacataagtgggctctgcctgactgatacttgtgtatagtgtgacttggcaccaaacagcacagatttttcagagaccagcaagactgttcatagagatctttgtgcccactgaattctgtcaccatttttctctgttcagcaaacaagttct

SEQ ID NO: 208445 - DNA, 299 bp, Homo sapiens
gtacaccccatgaaccgcaggccacagtccatcatggctgctcttccaggtccagctccttcttgctcccgaggcaggcaacggtcagggcacagttgacctgattgaaagatggaaagagcctggctccttacttgtgtctttgatcactgcatcagatatttttatgtcctgtaataaatgttattggtcaagccattgttgttggggtttctgctatagtcatccataggcaagccttacccaagacattgttttgttttgtaacagccccagtccttaggggagcaaagaggcct

SEQ ID NO: 208446 - DNA, 239 bp, Homo sapiens
gctccctgcccccacgaccctgttccagaccccccagcccagcaacaataataaacagcaagctctttttctttatgacaccaaatttctccaagcccaacagctccttccatcactacctcagccatagatcacattaaaaactcacagagggcaacttaaacacatcacatttgtttctctctatattatttcaaaagtaacggcattaaaaatggattttactacagaaaataaat

SEQ ID NO: 208447 - DNA, 688 bp, Homo sapiens
aaatatcattgaacttgatggcatagcaaatgatacagcccagagtgaagcacaaataaagaatggttaaaaaaaaaagaaaatagtctcaatgagctgtgggaaaataataagcattgagtataatataagtacaattaatatcccagaaggacataagaaagtggagggaggaagcagaaaaaaaaaatcatcatttagaaatatttcaaatttgctgaaaacaataaacccacaaatccaagaaagtcagtgaacctcaagtagaggaaatatagaaagccgtatcaaggtacattgtaagcaaattgttaataattaagtataaagagaacattttaaaagttaacaaaaatagtaacaatagaattattaaaaatgatgtaagctataagacaaaagagtgacattcttaaagtactaaaatttaaaaatatttgtcaacctagaattctatctcaattcagtattttatttcttgtatagttcatttattttcctgttcttcattgcaacactaatgatttttttctaattaaaaagcaaaagactttttcaggtacacaaagctgagagaatttatcattagtaggccagcatatcaagaaatgttaaaggaagctcttccttttgttttcaggtagaaaacaaaatgatactgaatggaaatatgaatgtacataaaggg

SEQ ID NO: 208448 - DNA, 392 bp, Homo sapiens
gtctcctctaaaccagatcactcgtgggaagcatagtgggatgaaagcctgcattgttgacagcagtttggagattaatttacgatcctgctgtaatatctccggttttgctatacatctcacagtaaaataaatgctagtctggaagcatgtggaggtccccattacatcgtggctgaaccactgaaagcaattactgtgaagatcaggtgtgctaaatgcagaatcaaattaacagttcccctgtgcattcatatctaaaagcaaatcagagaggaagctttgaggaggggtaagtgaaatcttaaagtacagtgcctgcctctgaggttgaggctgcatggattaactgattttctctgggtggtatgtgtcattgttccttcctaatc

SEQ ID NO: 208449 - DNA, 249 bp, Homo sapiens
agcctcccaagtagctgggactggctttgggggaagaaagcactaagcagttgagatggtctgagtttcttgtctcacatccggcttgcatggagaacagaaagtgagtgccatgagcaagactgggcctgcagcccttggagagaatcccagcaccatgggcccagcaggaaggactgatcccaccaaaagcatctctggcccctcctggctctcagcctgggtagtgcctacccctcacagaagtct

SEQ ID NO: 208450 - DNA, 793 bp, Homo sapiens
ttattaggcattcaggttccttctgtgaattttgtttctatttttcaccatttattctactaagctgtttgtcttttattgttgacttgtaggaatgttctgaatacaaccctttgcaagttgtatttattccagaactcccagcctggagcctgtctttgcactttaaactccccttccaccctcctggtcctccaaggtggggggcatacttgaggatcactccttactctctgctcaggccaccatgagtccctagactcaggctgcatttcccctacatttcccatctgggtgggactgtagggcaggcacatttcccagaggcagggcagggctgtagggcaggcatttgggatagaagctgcctctactcccaggatagagcccagattccccagtaagtctgcctgtgcccaaggcctgttccctcaggtttagagacctgctctcctggctgtggctggtggcagcacccaagccacctgtgttgtaggtgggcccattcgtgacctgtcagacaaccaaatgagcagtctatcccactgcccacttcctcatcgcagggctttgggggaagaaagcactaagcagttgagatggtctgagtttcttgtctcacatccggcttgcatggagaacagaaagtgagtgccatgagcaagactgggcctgcagcccttggagagaatcccagcaccatgggcccagcaggaaggactgatcccaccaaaagcatctctggcccctcctggctctcagcctgggtagtgcctacccctcacagaagtct

SEQ ID NO: 208451 - DNA, 455 bp, Homo sapiens
tactaagataggaaaagttacattgatcaacttttcatttgtcctgtacttccctcttgttgcacttactattctgtgttataattgcttgtttatattttccatcagattgaatcagacttgtttaccacagttagctcagtggtcactcagtagttatttgctcatcaaataagtaaatatcattggatcctctttttaaaactaacctgagattccttggtacctggcctaattgtttcacttgctctgacttcagagattttggtacttgttctctcagtgtttcttttctatttttatgctggcatatgcaatatattctgtttacttttagctatttggaagccaatcaccatattgctaacctagtaataattttcttaaaacatcttagacatttttcgttctgtgcttaatcaaaactggtatcttttggctcactttcacggaaa

SEQ ID NO: 208452 - DNA, 935 bp, Homo sapiens
ggctgaagtcgtcctggctgcacggagcagcccagtcttgtctctgtaaataccgcagatttgaaaaatagtcctattggaacccgtcagagggatgtaatacaagggactgtgatggctcttgaacggagccagagactcttcctgaaggactggactacctccccgcctaggaaggttgggtaacccaaagttgccacatttctgggctgcacaccaaggagaggccccggccactccacacaggaaatgcacgtctgggcacctggagccgcaggacctgagccactaactgtccctggatcccttctgcttcagaggcaaggaagactgccggagtcattgcttgcctgctggcttcaccagcgctttctgtttttccagttctcctcaccactcttcctggcgcctttctctgcctcccgcacccctgcctcctctaaaacccacagcatcatccctcagaacagctggaagcggacagctgatccttctccttgctggtcccccagcccagaacacagcctgggacatacgtgcggagccacagtgtctgttggtctcacctgagagctgcttgtcactcccacaccctctttcaaggagaagctgtcagcattgtccttctgcagcattcaacaggggccaggcattgggttagggctgaaaacactgatggagagccatcatctttgccttctaaagggcttggactgtgataagaaggtggacacttgaagcggctgcaggaccggcattccagtgctggaggggtgtttagtcctccatcagctcagagaagtaaaggcacatttattggcagggaaaacccaaggagggcttctcaggagagacacacatttgactctgggggaaagtggtccatagtaccatgtacaaaggtttaatttgctaatacattttttcaaatgcca

SEQ ID NO: 208453 - DNA, 998 bp, Homo sapiens
gtcacatgtgtcggtgccacagactgagtcacgtggacaaggagcgggtgtgcatgctggggtggtgtcggcggctggcgtccttgcagccagcccagctagagtaagtggaagagaggacagaaggtgagatggatgcagaggcggccaactgtaaaggggagctgaaaaggtcagtcgccggaggggatgtgaagctggcagtaggagactgctaggcgccaggaaccaaggctcaagcttaggtctaagcatgaactggagcaggaacgcttcgccctttggaatgtgtgtggacaagaatgtgagcagaaagtttgccgacccctgctccaggttagagaagagcaacaagagatatgaactaaaaagcctgaaataaatgtagatcagtcacttgagctgacatatgaagcagtcaactttactctgagacgttttgtttgatctttcaagtttctaaaagtatttggaagcgggaaacactgttcttcatatgagataaaaggaagaaaaaaggaccttatagtcaggctcattgtgaaaaaactaatattaagataagctgaagcaatcaaatgagagcatttgcaaatcacttgttggaggtaaagctggaagcctatgtagttcaggaaaatggaagatgagatggctgagatcccacgaaaagaccacgtccaatagaaactgtaataaaacagagctcagctacaggaattttcaatgatgacaaaattttaaagacatgcttctacttttgtattgactaaagatcttcaggttgaaagtgtcaagatctgcttaatagcatatcctctgttgcaacattcaaaatcatcaggattcttagatctcagtgaaaaattgatgtttgaagaataattgaagtattcagtccataaggaagcctgaagctccctatacaccttgaatttcatgctaaataatctgcaagttctggaaaatgctgcttaactctagaaaaactgactaac

SEQ ID NO: 208454 - DNA, 664 bp, Homo sapiens
atagatcaccaggagaaatgaaaactgtccacataaaaacttgtacatgaatgctcattgcatataaggaatacatatgacatatgtaatctattgattattcttaatagccagaagtgaaaccgaactggtgaataaacaaaatgtagtacatccatataatgaaatactattcagttactgaaaaaagaaagaatttaaaagttgctacaacatggttgaacttcaaaaacattatgcaggctaggagcggtggctcatgcctataatcctagcactttgggaagctgaaacaggaacatcacttgagcccaggagtttgagatcagtcagggcaatataatgagaccctgtctctataaaagatttgtaaattagctgggtgtggtgatgtgcacctgtagtcccagctactcaggactgagctgggaagatctcctgagcctgggaagttgaggctgcagtgagccgtgatcacaccgctgcactccagcctgggcaacacagtgagaccctgtctcaaaaaacaaaacaaacaaaaagcaaagcctttttggaaagcagtaataattcataagtaacaacttggcaagattagtacttagaatagtgcctaacacaataagtgtttaatgcatttttactgaatgaataataattatag

SEQ ID NO: 208455 - DNA, 264 bp, Homo sapiens
atggatttggatcaacaggtatgaagccgggaactgagagtggagtccaaaagagcagctgggacaaagtgatgaatcttgtactcacattgagagtatgactatgctgaaattcttaaaagatacagagagcagggaaccaagagataacaaggaaaaaggcaagtttctactatctgatatggtagaaactatgtgatatggctcaagtgagccaccacatcagagaacccacaggaacaacacatgccacactgacagccc

SEQ ID NO: 208456 - DNA, 188 bp, Homo sapiens
gagagttggatgaaggatatatgagaactgtgaactatctttacaaattttctgtaactgtaaaattgctcccaaataaaaacttaaaactcgctgatagtttcagctacttgagaggctaaggccagagaatcgcttgaggccaggaggtcgagtctagcctggtcaacagagtgaggcactgtctc

SEQ ID NO: 208457 - DNA, 192 bp, Homo sapiens
atcatgtcagttgcataaaaccccactgcaaagaatccattttaaggtctagagaactccaaaccttgtttccttcacatttcttatggaaaaaacatattatgcattctcctttcttgccccaaaccaattacctaaagcaccccctcccccaatactgcaaggatttgtctgcaaagaatgccacagcct

SEQ ID NO: 208458 - DNA, 213 bp, Homo sapiens
taagtggtgtggaaggagaaagaagaggaaggggagattaagaggaggagtaggaagagaaggaagacaaggaaagagaccatttattctcttattctcattatttcaaagcagacatactaggagtagctgaatcttgggttcatcttccatgtttgcagtctgctaagagcccagcacgagcctgcagggctccaggctgggtgaggagac

SEQ ID NO: 208459 - DNA, 415 bp, Homo sapiens
caggctcaagccgtccttccatctcagcccctgaagcagctgggactacaggcgcacgccaccacacctggctaatttttgtgttttttgtagagacggggttttgccatgttgcccaggctggtttcaaactgctagctcaggttatcctcctgccttggcctctaaaagtgttgggattgggggcatgagtcaccatgcccggtcctggaatgtgcattttaatgctagaccttttcatgtaaggcattgattcttaaaaacttttcctgttttcaaagataacttatagaaaagtgtgcaaaacagaaatgttctgtttaatgaataattacaaaacaaatgctcaggtaactgcaatccaggtcaactcattttcttgctgctgtatatctcgatgggtgtgacattttca

SEQ ID NO: 208460 - DNA, 201 bp, Homo sapiens
agtgctgggattacaggcgtgagccactgtgcctgacccatatttcttatttttaacacaaagagaggtatcactactcagaggaaatatttcatgaactaaaactgtttggagtcaagtgagctcatctgtccttgtgcaaatacagctgtttcaggaggcaagctaggctaatagcttcagaaagtgaattggaggatt

SEQ ID NO: 208461 - DNA, 467 bp, Homo sapiens
tcagatgttttacaaagttacgcccctgtataaagatagagtacctttcggcgaggctgtgtaaagatgtacattgtgtatacatacactttatgccaactcttctgggatgatttttccaggacctctggaatttactttttgtattctaacctaagaggactggattctgttttacacagttgtctagtattttcatattagcaaacataataaattgagtttgttcagtgtgggcattattttctctggcatagataagctttattgtttaattagaaaagaaatgcagaaaaatattaaagattaaatcaaattaaacatcctcacttaaataatgacttatacctcttccttcagtaagtacataggctcctatttgaactaaaaaatgtaattctatatgctgtttgctgatagcttgctttttctatcaggggcgtaacccataggatccgtgacgccca

SEQ ID NO: 208462 - DNA, 356 bp, Homo sapiens
gcaaggtacattttcttcccgcaattttttggtttttaaaaatcagttgaggatacattgattttgtagttttgtgttgtgccaccccttcaagaaatcaacatgctatctaatgaatatagaaccctacaattttaagttcacttcagatgaacaaaacagataaacgctagctttgtataatgtgcatttattcgaagtaagaatttgaaaagactgaatagtggaaggttatctgtggtgattacgccactgagagaaaaggagtcctgtagagaccacccccattttaaggtttcacagctacctcacggaggttaaaaactatcctctcattttaaggatgaaatgtgcat

SEQ ID NO: 208463 - DNA, 280 bp, Homo sapiens
acaaaggataatccacatccagggacagtatgaggtatcatcacactgctaagaacagcatgcagtgtaaaacttacggatgtctgttgctgggactatgcatttaatgtttttggaccacagataaggtgggacaaagttcaccatttagccttattttctaaatattatgtgacaagacaaatatgtaaatttagcagggagctaggcaggaaggctagcttttcttgctttggtcaatgagatgtgatgttcaatatctgttgccaaaaaaaaaatt

SEQ ID NO: 208464 - DNA, 342 bp, Homo sapiens
gccatctgtgtctgatgttttctctgtgggaaggttttaaaataatgaattcaacttctttaatagatattggattaaaaggttttctatttcttcttctgttagctttgattaattgcttttttgaggaatttgtccaatgcaaattgtcaaatttagtgatataaagttgtttataatatcctcatatcattttaatatctgtaaggtctgtggtgatgtctcctttccatctatattattagtaatttatgttttatcttttttctcttgaactagtccagcttggaatttatcaattttattaatcttttaaaataactaacttttggggcctggcat

SEQ ID NO: 208465 - DNA, 158 bp, Homo sapiens
cccggcctctgcccactcctggggcctcatctgttcaatgagggggttggattaaaagagatcctctcacttcagagttcctccactgtcattagtctgggttccccgactcccgatccctccattgctcctctcattaaagtccattctaattaggg

SEQ ID NO: 208466 - DNA, 667 bp, Homo sapiens
tcggtaccgaccactcctatagatcagtgcctagtcttgcggcccagggttcactccctggctgcaactatattgagaaggatgtgaacagggtccccttgggaggagccactgtgggtcactgtggccacctgagaccagcagccaagaggggtctcttctaaaaacagcagcccagcggacacagaccagaaggccaccaggagcataaagcctttcttcaaataacaagttaagattgttttcagcaggaatccctttggcttaggaggttttcctgggcatcttgaaaaggctgtctatttttattgcaatcaattttgttaaagttggatttactaaagaagaagatgaaaattgcccatgttatctgctgcttgtcagaaacttcacattccaatttctgttctcggccggacttgaggccccaaactcctcctgcaccactgccaggaactaaaaatagctgccagtgaccatgtgcgctggcacagaggcccagcatctcaggatggctgcctcagagccccacccgaccagtctttcccaggtgggctcagcagagccctgggactcccccaaggccaggtctccatctggaaaataacagaagtttctcctgtgagatgagacagcattaaaacaataaaaatgactgggcatggtg

SEQ ID NO: 208467 - DNA, 235 bp, Homo sapiens
attacaagcatgagccaccgcgcctggccctttctttcattttttaagactgatttgtattccatcattagaatgttccataattggtgcaagaattcctttattgtaaagtgtttaggctgcctccaaattgaggctttttcccatggccaattataatactaataattttcataatgaagaaccggcatcattaggagctggaacaaattaggtttttaagctgcagctaagt

SEQ ID NO: 208468 - DNA, 1096 bp, Homo sapiens
tctctttgccagctgccatccacgtaagttgggatttgcttttccttaccctcctccatgattgtgaggcttccccagccacgtagaactatcaaccctgaggattgggaaggaattatacataccaggaggcaaggagcactgggggccctcctgggactgcctatcacagcgtccttaaaggacaatattcaaatgggaatagtaacagctccagtctacagctaccagtgtgagcgatgcagaagatgggtgatttctgcatttcaacactgaggtaatttgatctttatactcacaccttcacacttcaacactggaatgaagtcttagtaccatctaacctgactggtaggaccgaaaagaaacaaagtcagaggctcaggaggccaattcacagtgagagctagatcagcatcacccaagacctaaatgctgtccttgcaagctaagtaggagcaatttaacactgattccgacatcagaagactaccgtccatgcactattgcactctgtctacacagaagaagctaccagcctgtgctgacaacaactttgacttcattacaaatcactgctaaagtgatccatacttaccgaacactgtacacctatggctacaaccgtgggttaccaacttccagttcagtatcgtctcggtccactcgacgttatgcaacaacctcaggatccgctagcaggccacactgagcagataacagatcgtctccatgtgcctttagaagcagaatcctgacctaagctgaacacctcacacggtgctctacgcggcacatcccgcagcgcgcgcacaatccacaccacgacaacgcccaacagccttaagaaagggaaggcctccaaccccataagcagacaccaacgcagccacacaccaagcaaccccacaacaaagcaccactcccgaagacaacaccagaacacgccgacaacaacgtgaacccgcaagcgcggcacgcgacagcggcacgacaacagccgcaacaaagacaagacacccacacaaccccgcgaacaccggagcactacgacaccacaacgcaaacacgcaacaacaacaccgagagcaacccc

SEQ ID NO: 208469 - DNA, 419 bp, Homo sapiens
ttaccatgcagactatctttgagctgactctgcaggccagtgaccagggttcaacttgctcagtgtcatcctgaacctgcatgtgatggtggatgaccattgcaaaaatgcaaggacactatgccaggagttgcagccaagtggggccctctttgatgctgcaccactcacaatgcaacccagctatcccatcaccaaagtggacaccagctggggcataaaggctgactgtcctatcatgtgcttcaggccagctaatgtggctcttcaaactagggatgtgcacgagctagatgcgtgccgtgtcactgtgggtaacagagatgcaacctgccaaggtttgttggtcaccgtggtcaatggtgaatcatcacgctgaaacatcacctggttgctgctcatagtttgcaggagttgct

SEQ ID NO: 208470 - DNA, 384 bp, Homo sapiens
tcctggactcaagggatcctcatgccataacctcctgagtagctggaatcaccatacccagctaattttttaaatttctggtagagatggagtctccctatgctgcttaggctgatcttgaagtcctgcacccaagtgatcctcctgccttggcctcccaaagtgctgggattataggcgtgagcctggccctgtttttcctttaagtaatgtttgaataaatgaatgatggctataaaattttgttctacccatttgtttcaagaaattttaaaatttctttcttaactgctttattgacctgctggtcattcaggagcatactgtttaatttccatgtatttatatagtttccacaggtcctcttgttggaggttattggca

SEQ ID NO: 208471 - DNA, 283 bp, Homo sapiens
ttcaatatagattgcaaaataagaattaggaaagtgaatcttgactttttatttttttttaatttttaaaattttggggagaacaaggtcttactccatcacccaggatggagtgcagtgacacaattatagcttactgcagccatgatctctggagctcaagtgatcctgtctcttcagcctcccaaagtgctgggattataggcatgagccactgtgcccagccgtcatgactccttttaaagcttatttgtgttaataaagcctatttttattccaccta

SEQ ID NO: 208472 - DNA, 857 bp, Homo sapiens
caaaaaaagaaagatcaagatagatatgatgaagccggggagcttgcttacgacaggggagaataaatacttacagtacactctctccatttaagagacacatggagcacatgggggagggagacctgtctaagaactggatcatattaaggagaaaaaagcaactggaatctcaggcttcagttgttgcattatgctgctgaagcatagaggagatggtcctttgtgatcagagcgtctcaactcgtttctggcaagctaagatgaactttggggttgtggatagaaagataaactgatctgcaaaagaaatgcacagaagtattgaaggctagaagttggcagacaagaaatgaaaagcatttagagaatgggaggcctgtgaaggtagccacaacccaggacttaaggagaacacaggctggagaggaactctccaaagcagagaatgggtggtgggttttccaggcaatggtgcctagtggccagttttaagttgttgcttgtactgtgctcagctacactcccttcatgttgccccaagccctctctaaagtctgataaatgatccaccactctgcagcagtggtctttgggacaatgaagacacctcggtggtgggtcacttagggaaatacaatctggaaggggccaacagtcccagagacaagtggggtagcagaaatatgcagaaccaagagttcagagtgatggtcactagaagaaatgtggcctctaaggatgctcagacaagtggatatgtatagtaggaccctagctttaccatcctggcatatcattcccatcatagctatttcatttttttccaattagttgctgaaatgtctacatgttct

SEQ ID NO: 208473 - DNA, 127 bp, Homo sapiens
tgacggcggggaaaggataggtgggctgtgcgctagggctccggggggctcgagggacgatgccagactggatgcccctcctcgccttaaggctcttcccgtttccctgatccggcgcgagcgtgtg

SEQ ID NO: 208474 - DNA, 250 bp, Homo sapiens
gcctgcgctggggtcgctgcagtccccgcagctgccccgggctgcttgcccaggcgccccggccttattccagcctggggagcgcctcggtggggagcacgggacagcgagggaggccgaggcgggggccctgggcgcccgatatctccgaaccggggaggcggccccgattccgagagccggaacgcagggaaaggcaaggacggggcggccggcggaggggcgggcgccgctcatcagccacgccagt

SEQ ID NO: 208475 - DNA, 431 bp, Homo sapiens
ggtaaatccagagaaacagtagattagtggtagcccatgtcttgcggggcaagagaaatgtgaagtgactgttaacaggtgaggggtttctttttggggtgatgaaaataatctggaattagataatgatgattgtggcacaatcttgtggacacactaaaaaacactgaattgtgcacttaaatttactctttaaaaagggtaaatttatggcataggagttacatcacaaattttttaaaatgacaaatataataaataatgtaatttcaatcagaatcccaacagcattgtgttttggggagaagaggaaaaggggcactttggggaggccgaggtggtaggatcggttgagcccaggagtttgagaccagcctaggcaaaatagtaagacaccccccacccccgcaccccctaccaccccggtctct

SEQ ID NO: 208476 - DNA, 389 bp, Homo sapiens
aaaaacccacaggcatttcacagaaacagtgcagatggtaaagtgtgggcctcatcagtaagtggggaaatgcaaataaaacaaaactgagatcttattttgctcataggcacatatcagagggattaataatatccagtgctggccggggtggaggaaaacaagtacacgttagtaggagtgaaaattggtagtcttctgggagggcaacttggcagtatcaacaattttagtatgtgtatcatttgacccagaatatgtctagatagtctagtatctagactgcactaggtacacatttgcacctagagaaatgtgcaaatgtgaacaaagtaacatgtaacaatgttcactgtggcagtatttgcaatagcaagaaattagaaata

SEQ ID NO: 208477 - DNA, 770 bp, Homo sapiens
ggtgtggtggctcatgcctgtaatcctagcactttgggaggctgaggcaggtggatcatctgaggtcaagagtttgagaccagcctgatcaacatggtgaaaccccgtctctactaaaaacataaaaattagccgggcatggtggcagatgcctgtaatcccagctacttgagaggctgaggcaggagaattgcttgaatccaggaggcagaggttgcagtgagccgagactgcaccattgcactccagcccgggtgacagagtgagactctgtctcaaaaaaaaaaaaaaggaatataaaatgttgctcctaatgtctgctgttttaggtggaagaaatatcccaccacacagaaaagagatgcttaaaaagcaaacaccccctaccttctggagcattttagaagactctgaaatcacccagacatttgagtcgtcagctgtgaaaggcttcctgtactgtacagtgagaaattgtctttatgcttattatctcacttcataagaaagtctgagaataaataagaggaaaaatatgagggatgcccatgatgatcacttgagttgaaagactctgaaaatggaagtcattagtatctgaaaggctcatagtaaaatataaaatgcatgatatattttgacaagatattcaatgataaaatatagatccaacttgcaggccatttatcaacttttgtccttttggaggaaataaacttgtctactgtagacaagctggtatacagaaggagagaaaagtttcttcaatg

SEQ ID NO: 208478 - DNA, 217 bp, Homo sapiens
aactaaaattttagaatctgttcacactatagatctacatagccaacaaacagccatatggaagggtatgcaagatcatctcctggttagacccccgctcctgggggtcactctttgactggaaaagaatgttactaattatactcatgattgtcttatctaggatgcaaagccagaataagagcaacgatcgccacacctgacaaatctgttcctg

SEQ ID NO: 208479 - DNA, 418 bp, Homo sapiens
ccgcggctgatgggggcggctagtgccgccccgggcgcaggtgacactcgcccggccagggtttcctctggctggggagagccccgggagggcgagactcagacacctctggggcggaggacaaggcagcgatggcccgagagctgagccaggaggcactactggactttctgtgccaggctgggggccgcgtgaccaacgctgccttgctgagccacttcaagagctttctccgagaccccgacgcgtcccccagccagcaccagcaccgccgcgagctcttcaagggcttcgtcaactcggtcgccgcagtgcgccaggaccccgacggcaccaagtacgtggtgctcaagaggagatacagggaccttttgggggaggaggggctgcagcgaccccgcgagccgcccgcggccgc

SEQ ID NO: 208480 - DNA, 188 bp, Homo sapiens
tagctccaatcattttctgccttggtaacaccacacttgctccttgcttgggctgttctgtacctggaaaactcttttcacacccaccttcctggacagcttggggaacagtagtaccaagacacttttccaaacaacagcttgggcgtccagcgctctcttctctgttagtccctgtgcattatgag

SEQ ID NO: 208481 - DNA, 980 bp, Homo sapiens
gatgagaattatagacaaataatatgcagggaccccccctggattcatcttagtcttgagctcatatagaattcagagaaatcaaaggcagttgacaaggagggtcaaggctgagtgcaagtgaacgcaactactcctgctggcttgatccccccctggtcatgaatggtggctgcgcgcacatccacgaccaaggcaagcctgagagacgccttggactctagcacagcagagggaaagactaaggatgcctttttctcccctctctctttctaaatgggtagcctgcactcctctcaagtgcgagacattgggactcctttgatcctcagactctgaagaaaaaatacctggtatttatcagtagcaaggcttggcccagctagaagttggaagatggggagacctagtcagctggggaaaataacaactataatactatcctatagctagatctcttcaaccacagagaaggaaaatggtccaaaattccatatgtataggccttttttgccctgcagaataaccgcaagctctgtcagcaatgtataatagaccttgcacttatagcagtgatatccagccagacttaatccagacagaagggaaaaaacagtctgcctccttagaagaggagacagaggcccctgcaccagcccaggtcccagctcctcttggatcatctcgtcccccttatccaggcccccttttgaacctcatcctgttagaagagttcgacctggatgcgctccagcatcacttcttcctttacaggaaatgcatagtgaatatggtcctatcaaagtacaagtccccttttctttacaagatttgaggcagataaaaagaaatctaggacaattgtgtcgacctggataggtatattgaagcctttcagaaccttaatcaaatgtctgagctttcatggaagggtatcatgttacttctcaactagactcttagagcttcagagaagcagg

SEQ ID NO: 208482 - DNA, 144 bp, Homo sapiens
tggaaaatcaacttcagaaagaaagttatccactgtgagcagggcaggctcgcggcttcttggtccggagacccaggtcccactggcccactcacccttggagagagcttgccgaagctgggtgtccgatatcactccactcct

SEQ ID NO: 208483 - DNA, 284 bp, Homo sapiens
gtgtataccagcaatagttgagaatgaatagtttctcctttttttcctatcactttctgcctagattgctttgtgatggctgtgatcttcctttgcctctcttttctatctctccgctcctattatactccagccccaatatgattcttgagcatcacttttgtttagtcgttcctgtttttttccaaatccatgatgatatctcctattgccaactaaaatcttcagtttagcatgcaaatcttacaagtgtggacccagcctactcttccagcctcacatcc

SEQ ID NO: 208484 - DNA, 794 bp, Homo sapiens
aacaccagttctccttcaagttgtcatacctgaaactgcacttaaaatagtctttctgaggctaactacctggaaaaagatctttttggaactattttctacttttgaaaagaaagacttttcttgcttactttaaaataatgaactggctaatagatataacctaagacactttactttctattgaaaagagatccacttctttacaatacaagtgctataaaaaatagcacacaaaattaaaattgttcctccctcacacaatcaagttgttttcaacatgtcatttaacacctctgattttaaagacttgcaaaaagtctcagagcttgaaggtatgaagaatgataccatatcaacttatttttgtgtagtgctttctactttatatagcactatcatatcattcatttgttcaatgaacagttattgaacatccgctttgttctagcactgttctaggtatcaaacaaagatcctgcctggggagcaaacagctaacaatgcagtgaaggagaaatctcgagatttctccttcagctgtacgcagcacagcaccaggcctcttcacctacctccagccctgctacttctttccctcctcccccttcctctggagcatccttccagcatggcggaccaggagctccaccatcatcttcagcttatgcactgcctcctggaacaacaggtacactgcctgctgacagtgagctgcctgcgtcccaaagaacaggtctgcgcttgaaagggatttggtttggccccctcctttatttgtttatgaccagatg

SEQ ID NO: 208485 - DNA, 1281 bp, Homo sapiens
gttgcccaggctggtcttgaactcctgagctcaagcaatctgcctaccttggcctcccaaagtgctgggattacaggcatgagccaccatgcctggccaatttcttactgttgggtagtaagagttctttatatattttggatataagtgctttgttaggctgtgtgatgttcatacattttccccatctgtgccttgtgtttcattgtcttagcggtgtctttttcccagagcataagttttaaattttgatgaagtctgatttaccacattttttcttttacacatttggtgttcatctaacagctctacctaacccagaccttgccagactttttctgtaaaaggtcagatagtaaatatttcagccttgctgtccctgttgcagctctgccattgtagcaatgaaagcagtcatagacaatatgtaaatgaatgataatggctgttccaataaaactttatgaacactgcagtttgaatttcacataatttacaaattatcaattatattgtttcgattattagaaaaacaggtagtggattggccatggtttgctgattcctggcctgacaaacccaagttcacaaagattttcctctttgattttgttgtggtcgttgttccacaccttcttttttcactgtttccttaaggtagagtgtacatatttataagggtacatgtaatattttgatagattgatacagtgtgtaatgatcaaatcaggttaattagggtatccatcatctcagatgtttatccttttttttgtattgggaagataacaaatgttctagctattttaaaatatacactaagttattgttgactctagtcaccctactgtgcaaataaaaactgaaacgtattccttctatcttgctgagtttttatgcccatgaatcaacttgtcttcatccctacctgcttcccagcccccggtaaccatcattctactgcctatctccatgaaatcaacttcttaatctctcatatatgaatgagaatatgtgatacttgtctttctgcccttggcctatttcacttaacataatgtcctccagttctatccatgttgctgcaaacagattttattttccaaaccttaagctttatagatgacttcactttttaaatggctgaataatatcctcttgtgcatgtatacctcattttctttgatttttctttctttctttttaaatagagatgagttctcactatactgcccaggctggtcttgaatttttttgctcaagcaatcctcctgccttggc

SEQ ID NO: 208486 - DNA, 401 bp, Homo sapiens
acccaaatatccttcaactgaagacagataaaaatttaaatttaaaaacctgtgatacatccatccaatggaatattactactaagcaagaaaaaggaacgaactactgaagtgtgaaacgatatggatgcattaagataagtgtgagaagccagatggaaaaggcagcttattgggtgattccatttatttgaaattcaggaaaagaaaaaccacagggacaaagaacagatcagtagttgtctgcattaagggaagaagagtttgtggatttggctacaaagtggcagcatgaaggagtatctcgattgtgttcatgatgacacaactctaagtatttgtcaaaatatatagtgctctacgtcaaaaaagtaaattttaccctaaatttgaaataaaaa

SEQ ID NO: 208487 - DNA, 237 bp, Homo sapiens
aaatttgtaaataactgagacccaaacttacaactgtacatttttcttattgttgggctgttgctaacctcaattaagaaggcttgatgatatttgtaaagtgtcatcactccaccatggtccagtaacatctgatcactccaccatggtccagtaacatctgaatggtcaagaaatatctaaacgtatgtaccaaaaatttgtgtatactactgtaccaataaaccatttgtttcc

SEQ ID NO: 208488 - DNA, 562 bp, Homo sapiens
tgctgtttacaggataatgagtagcatagctattttaagtgttgaatgatttctataatacgaacttccacattcctgacttggtggcttcagtctcttgctgtatttgttcttcctccttttttggatttttagatccctctaagaatcagatgaaagaacatacacacaaaagacccccagtctctgtgcaaagatcccactgtaagaacccccacactaatggaagaagaaaataggatgatggagaaaaatgagagacaacaaacgagtctagacaagaagtcctggtggctaaaaatggggttaaacttaaagctagacttgaaaaaaaaattaggagggaataaagatttgtgtgtaagaagggaggtgcttgaggagtagggagagaattgtagttacatatataaatcacaattatttttataatgtcgagaataattttattctctcctgatagatgttctattcattattcatgtattcaggtttccactctcttacaatgtccctctgttgaaattcctacattaaaaatatgcctactttccacactgaa

SEQ ID NO: 208489 - DNA, 423 bp, Homo sapiens
aacacatacactcacgaggatcaggaaaaaaacagatgacaaatatatggcatcctgaggtttctaggtttgatttctaaatttgctaaaatgcctaatttttgttaatgtacactttgtccaccttctcatgccaattcatgtctcacatcctttaagacctagactatgtgttggacaagaagctgttaaaggaaaaaaaagacctagactaactcatcttcctcaaggaacttttccccacacatgtggccgcagcaattgtggccatccagcagcctcttcttgtttacttttaactgactctcatttcctactcagtaatatttgctctgttctattattaaattttgtaacatcagggatcaatctcaaaactttgtatgtcctcttacaaatacctagaattgcactgcataaaca

SEQ ID NO: 208490 - DNA, 270 bp, Homo sapiens
tgatcgaaagttctcccacaagttattaaccttgaattacacacaaaaggcaatttcactgattttattctttggcagtagccaccttaaaggataagaaaaatagtgaacctttcagaagtttttacagttcatctttggaattttttttattggaatctattcgggataccaatttttttaaaaaatgtaactatgaaagaaaaactaaatttcttgcttcttaatttatagttgagctcaaagaacacaggactggtatgaattatg

SEQ ID NO: 208491 - DNA, 242 bp, Homo sapiens
gaatttcatctaggttgaaatgaatcttacttttttttagggcagctaataaacagtaatttaaaatgtttaacagagtagtaaagcccaccagctttgtaatcaaacaaccaagtttgatttctcattctgccattttctgtctatattactttgggcaagctactaaacctctttaaatctttgtttcctcatctataaagtgaagataattatagtgcctttctcttagggtaattgtg

SEQ ID NO: 208492 - DNA, 531 bp, Homo sapiens
gaaacatggtgattaatccaagtatttcactgtacagttgggaaactgaggaccaaggattactctcctgttaagccctgtcttattgactggtctgtgggtcattttacttactaggcattatagacacagtaactggggcctgcaagcttttcaaatacatactgaaagtttaagagaaactgaaaacacacaaattggctccaataactgtcaaaaagacaaagaaacataatggttcttgaagttcaatatgattcaagcactccaaacaccctggcagctttgcaaatgaatacgtttttctattgtctaaggtttatgtttagccatacgtatctatcgaagcaacacaaactagaatcagctattgagaaaagacaagtggaagaaaagcagcagcagagggatagttttcgaaactgaaaagagacagaaaagatacattgatcaaattccccaaacaccccaatggcttagtgagcataatctaacaagataaatgttcacaggcataaacatatcattcta

SEQ ID NO: 208493 - DNA, 921 bp, Homo sapiens
aaaaaggcatctcactttaatagtaagaggccagaatatgatgctggcagcatgttgtgaggaaatgtattagatgaaagaagttaaattccagttctccttttttcagaaatgaggtataggggagagaaacacgtactttgaaagaattgacccagctgaattggaaaatgtgggaaggggatggggaagaggctgctccacctgagatctggctccaggacttacagcaaggggaacttgggcaagttacagactgtctatgcctcagtttctttatcagcaaaacagaatcatcccataaactataaggtcgatggtatcagcgggtccccaaactgactgcacatctgagtcatgttaacaaacacattccaggccccacctgagccctctgaatcagaatccctgtaaggaggatgatgaacttgaatttgcactgactttcccagctgtttcttactctgatcaacttgggggtaggacccattgagctgcatcacatcattccaaagccaaaacacaacagcaggacaagaatattttcaaggcagtctctaaagcagaggagaaactgttgagggaacttagaagtaaaggagatctggcttgctgggctccatttgaactttgagtacaacagagacatgagcccttcgggacacatgcctgaggtagtgacaatccaactttggaagagtggaagccctagtttcaaattcaagcatgctttgagtataaattaagtttacctctttttgcacagcaacatggccaatctttcctaagctgctcagcttacaagaaaaggaatcatactgctaagaattcaaacttcagcagtcataggtaagtaaggaagtcttataaacctattctagccacctaaccagaaactcgaaatttagcaggttctttcag

SEQ ID NO: 208494 - DNA, 468 bp, Homo sapiens
aggctgtgctgcttgccacatgtgtgaccgtgattgtgttactttacgccttagtctattttcttgtaagtagaaacagaaacacctacctcaagggacagggggagcgtgagacagagctggtatctatcaggtgcctggcatgtggcagctcctagcacacactgctccctcccctgctgttttaggctatctaaccatatgcccttctgtgaaaaataaaatcaaatgactccaagacaaagattctagtgacaatttactacagtcagttggacctaatgttattttgttagactaggaaatacaatcatatgtttcaaaatgcagagtgtgcaaaaagatgtatggtgacaatccctcccatcctgttccctgttacccactttccctcccacagagcaactgtctcaccagcctcttatgtagccttctagagacatttttttaaattgttattttgaactg

SEQ ID NO: 208495 - DNA, 532 bp, Homo sapiens
cagaatataacagtcaagaaagtagaattaggctgggcacagtggctcacatctgtaatcccaacactttgggaggccgaggtgggtggatcatttgaggtcagtggttcaagaccagcctgggcaacatagtgaaaccctgtctctactaaaaatacaaaaaaattagccgggcgtggtggcatatgcctgtaatcccagctactcaggaggctgaggcaggataatcacttgaacccaggaggtggaggctgcagtgagctaagaatgaatatgaatatttacttcaaactctacctctctcagcttactggaaaggacatttagtagttagaagaaatgtattttaatggtgggaagagtttgctaagaatgattttcagagtattttgtagggatccaacagaagactatatgctaactttctcaaaagagagttaagcatcagtcttttttctcttgtaaaggaatcaagccacaagctgtatccctgtcaccagatctatggaattaaaacttctctttgtatttg

SEQ ID NO: 208496 - DNA, 702 bp, Homo sapiens
gtcaggcatgatggtgggcacctgtaatcccagccactcaggaggctgagacaggagaatcacttgaacctgggagacggaggttgcagtgagccgagctcacaacactgcacttcagcctgggtgacaaaccaagactctgtctccaaaaaaacaaaggtaatatgtaagccaggcacagtggtgcacacctgtagtcccagctactccagaggctaaggcaggagggtggcttgaggccagcctaggtaacatagtaagatcctgtctctactaaaagaaatagataaaagtattatctatttatttgtggaattgtgaaaaataagaaaaatctgttggctaaaattaagcttttcaaaaatacaattttggccaggcgtggtggttcatacctataatcccagcaccttgggaggccaaggtgggaaggttgcttgagaccaggagtcagagaccagcctgggcaacatagcgaggtcccatccctataaaaaacaaaaaaaatatcaaggcatggtggcgcacacctgtagtctcagctacttatggaggctgaggtgagaggatcacttgagcccaggaggtcaaggctgcagtgagccatgactgtgccactgcactctagcctgggcaacagagcaagattctatctcaaaagtacaattttgcatatacaaagttggagtcaatgaccacaca

SEQ ID NO: 208497 - DNA, 760 bp, Homo sapiens
acaaacattcgccatgaccgtctatgctctttcttttccgcatgagatttggctttaggtaatcctgtggttcgaatgatatcactatttagtttgagtgcatcaaagatcatcttttcatctagtttgttagcttcccgacctctcagctcaaatacactggaagaagtaagggcaccattagagcataaagaactaacatccagtgttctgtgactgtagggtaaagttcgatctgtaaaatgcctggaagatagactaccttttgaaccagagtctatctgttcatttagtctaacagtatcatagattgaccgctgtgggacgtaacagtcttcgatatttaggtcctcctcttcttcacccttccctacacatgggggattctgacgtaaacagtctggtctgctgagtggcttccccattttgcagatagttaaaacaaatattgcagctcttgacacagataagaaataagataaagcatcttccaaaaaagtatacttctgaacagagctatggagtgtctttagcataaagacacatgctcaaataatatatttcataatacatgaggtgtttaaggtcatcagcagtgcatcagtataaatgcaactatccttttacctggttgattttaggatgattctaaacaataaagtgcatcaataacagagaacaaaaatctccctttgtccacctttcccagctcccaaagtccccgttcacactccaaaacacagaaaataaacaaacacac

SEQ ID NO: 208498 - DNA, 1160 bp, Homo sapiens
gagagaaggtgtctcaggtctcgggcgcgggagggggtggcggagaggacagggagattccccagcgctggctctgaaatctggggcaggctttccttgccttactgccaatcccaactgtgcctggtagggtttgtccctggcgtcaaaggtaggaacagctgagcccttagatgtacccctgacggcgagagcccaggagtgggcgtttcacttttcctgcgtttggggagtccctgaggctatgccctttgacctttgacatgtgtgcagcttctgcttctccagataatctggtattccatatgaaaaatgagatgagaaacatcaagtacaaaccagtagactatcaacaattgcgtgcattaactgaagcaaagaaattggcttctgcctctgcaaagctaaagatcagaaaagcaatgttgacttcaaagttatccaaagaacaaacactaataaaacaacacaagcaagtgtggtggcaggaataccagaggctgaatgaagtcagatgtaaaatggaatctgaaataaaatcccttctcaatgaagagaacattggaaatgaatgtctttgtgaccttacaaattttgagcaagagctatcagaacaacagtgcacatatcttaaaaatgtaataaatcctattcagcagctgagagcagatctaaaatacagacagcatcacactttgcagcattcacacccacatattgagtttaactccgtgaaagtattggaagaggttgactttgtgaagaaacaattgaaaactgtctttgaaagacttaggctggagcaacagagaatagaaaatgatctttcagactggagtataaagattctagatcattctttggaagaaaagactaacccgcttagtgaactgcccattgaattagaaagtttggaatgcccataccctgatttgaaatcttcaattctcagtgagttctataagtttacacagaaatatcagaagaagcttcaagactttaatctgcagttggaagacatatacaggtgataagataaaactgagtcctgtgtagacttttgacactaactttttatttttgtttgggatcactatacttccaacttactgtatagttactatgtaactggaatacaatcaataaatgtttagactgac

SEQ ID NO: 208499 - DNA, 1903 bp, Homo sapiens
  misc_feature (1644)..(1644): n is a, c, g, or t
  misc_feature (1659)..(1659): n is a, c, g, or t
  misc_feature (1661)..(1661): n is a, c, g, or t
  misc_feature (1668)..(1668): n is a, c, g, or t
  misc_feature (1679)..(1679): n is a, c, g, or t
  misc_feature (1713)..(1713): n is a, c, g, or t
  misc_feature (1749)..(1749): n is a, c, g, or t
  misc_feature (1799)..(1799): n is a, c, g, or t
  misc_feature (1810)..(1810): n is a, c, g, or t
gagagaaggtgtctcaggtctcgggcgcgggagggggtggcggagaggacagggagattccccagcgctggctctgaaatctggggcaggctttccttgccttactgccaatcccaactgtgcctggtagggtttgtccctggcgtcaaaggtaggaacagctgagcccttagatgtacccctgacggcgagagcccaggagtgggcgtttcacttttcctgcgtttggggagtccctgaggctatgccctttgacctttgacatgtgtgcagcttctgcttctccagataatctggtattccatatgaaaaatgagatgagaaacatcaagtacaaaccagtagactatcaacaattgcgtgcattaactgaagcaaagaaattggcttctgcctctgcaaagctaaagatcagaaaagcaatgttgacttcaaagttatccaaagaacaaacactaataaaacaacacaagcaagtgtggtggcaggaataccagaggctgaatgaagtcagatgtaaaatggaatctgaaataaaatcccttctcaatgaagagaacattggaaatgaatgtctttgtgaccttacaaattttgagcaagagctatcagaacaacagtgcacatatcttaaaaatgtaataaatcctattcagcagctgagagcagatctaaaatacagacagcatcacactttgcagcattcacacccacatattgagtttaactccgtgaaagtattggaagaggttgactttgtgaagaaacaattgaaaactgtctttgaaagacttaggctggagcaacagagaatagaaaatgatctttcagactggagtataaagattctagatcattctttggaagaaaagactaacccgcttagtgaactgcccattgaattagaaagtttggaatgcccataccctgatttgaaatcttcaattctcagtgagttctataagtttacacagaaatatcagaagaagcttcaagactttaatctgcagttggaagacatatacagaaactgtcaactaagtgaagaagaccactggatttaccaggctattttggatcagtaccctggagatctctttggaagaaggactctgtatctggacatgttacaaagatattttcctcacaaatctaggcatgatttggttgaacacgagaaatattgtgaccaatatcgctttgctatagagcagcaaaatatcctgatatcaaattggaataaaaataggaaagactttatacagaaggctgtgctgacactcactgaggcttgtgcaacacatgaaatggagagcatgttggctaaggacaagaaaaagcaacaggaattgtgtgctgatctgaaagccaaggttcgtcaatggcgagcccaccaagaagaggtagcaagactggaaatggaaatttctgccagaagaagagaaaaggaagaggagaaagagaaactgtggaagaagaaggaattgttgcaaagagcagagaagaaaaaaaaaataaaaaaatactgggccaagaaaaaacagaagtggcaagaaatggaaatgagagatcttcagcgtctagaagaactgaagaaattaatcgctgaacagtcactaaaagacagagaaagggttaaatatngacaagaattatggnanaggcgtntgatggagaanaaggaagtggccttcaagaagctcatgaagacanagagagagcacggcggctagaagcccttaggaaacnggttgctgtgttgctcaattgatcctgtcaagaatgatgtccagatacantggcctccaangctagaatggcgcttgaccttggcagaacgattcattccttccaaacggcctcttcactttgactaccttacatgaacagagaataattcctg

SEQ ID NO: 208500 - DNA, 483 bp, Homo sapiens
gtgctccctttatcccccaacagggggtgcagccccagctctgtggcttttgcatgcaggatctcagtgagtcctgaaggcactctgttcctcagatgccaggcagccacatctgtgaagctctcccattcctgaatttatctcacccatttagcctagactatgacctcttagagggcaggaactgtttgtttgtgtctctgttgatcctcagtgcctcttaattcagtgaacataagaatgaatgtatagtacttgaactgtttactatagagaatgaagttaggtgtttataagtaacatacatgttgtttttatcaggaaacagaattggttaagaattctatgcttttttttcaaatttaaacagaggaaggcaagaaacaactttactagaagtgggtaatttctccttgagcttaaggtgttcagcagtactagtggagtaaacttcagtattagaggtaaaaaattcatacccct

SEQ ID NO: 208501 - DNA, 182 bp, Homo sapiens
ccttgaaaagacagtagtggggaaaaaaagtaccattttaccatgtgcctcaagtttgtaatactggttgcttaaacacccttcccttccacggtgggattttctcttcactttcccttgggagtctcaaatgaataagttacagtttgacagcagcagcagagcataagattttatgaatg

SEQ ID NO: 208502 - DNA, 853 bp, Homo sapiens
taatatatgttagtatatccaaaataattcaaagctttctttgaactataaaatgccatgaattaagccttcgaattcaaattgaactggaaggcattctgatcttgttaaaattattctctccaattcacacttatctgtacaatgtacattaataactaatttgttagatgattaataccaataattaacttgctagaggacccaggaaacagaatatctgcaaggcccagagtagatcataaataaataggaatgcagacataagatgttcagttttggaacagtaaagctataatgagttttctttaaaatcaaacaattgtacaatgcattatagtctataacttattctgtagttcaaataaataaaactttcccctgttacagaaagacagccctcctcccagcaacatttcagactggatggattgattcctcacctgacataactctaaaatcctcactgaagaagccaggaagtcaaactgaggctgaagacctgaaagtacaggggactaaacccagaaagcagtatctgtagcaaaatagttgacctgatggctggttggctcccaagaatctctctgtcctggtagccagataaagtaatcaaagggtaatcctatacttggtaagccagtggagtacttaggaacaagtctcatgttaaagggcttcttccatggagtgtggttaatgtgcaaaaacatgtctataaataaggctgttaggacagactcaccataacaggaaataccagagagatcaagggtatccaggaaagtccaaagatgacaatgtaatacaaatagagcaattaagaggttacattcttgcattgtaagacatg

SEQ ID NO: 208503 - DNA, 636 bp, Homo sapiens
atgcataaactttcttatcagctatcgttagtgtattttttgtgtggcccaagacaattcttcttccagtgtggctcagggaagccaaaagattggacacccctgacacagaggctcatccttccctaaatcaaattcttgtttgttataaaccttttctgtttcagcctctcgtgtacccatttcacccttctctcaggcccctgtaccttcaagctatactctcctgaacttggaatacttcagaggctctaagtgtagtctttctgtcctcagatttcctattttcattgtccccatttcccatctcaatctttcattaatgtgcatcagatcttgtctagatgttaagaagaaaacaatctgatggaactaatttacctttatctgtaaatgactcatgagctcttaactcttcccaaggtttttcacattttttgtaagtctgtaagaggttgctattaactcagataattttaaagtaaaaattgcaggctgtgttgggggaaggaatttctagtcttatgcataaataagtcaggccttactaggattttgcccgtggtttcttcccactcctggaagtgtgttcatatgtgtattgctatatatgtttgtgtatgtgtatctaataat

SEQ ID NO: 208504 - DNA, 654 bp, Homo sapiens
gagtggaatgctgaatttggtattggatcagatgggtgacaggagtgtggaattttgcagatgactcaggaagaaactcgttttcacattggaggtctgctttcatccactctggatgacaggaaatagaaggaagtaaaattataaaagtagagtgaggccatgttgaatagcaggctgtgactggtggataaagttttctaagcagctatttgatttaatatgaactaaacttttagaaaagatattactggcaggttgattatacttttactatcaacaaagatacatgctgaaagttgttgtaagaactattcaaaaaagtggacgttcaataaaatgaaatgatccacataatagacattatattctcaaagtttccattctcccaactttgtatccaacattaagattgtgaattttgttggatttttctttaatccccttatccctaggcatttattcgtatctctaacaaaattgcaataatatttgtgaaaatatagctatggtacacattaacaactgcaaatccatttaccgttcttccttactgataaaattctagttaaaaatgctgtctcagactcccttgtaactagggtgaccacataagttagttctggccagtcagataaaagcagaagtctcctg

SEQ ID NO: 208505 - DNA, 705 bp, Homo sapiens
tctatagataagtaaaaagtagctttggtcctcaaagaactgatgttgtcctgaataagtttaaagaaagaaaccaataattgtatcactgtatattaaagagtaagttcagtgtggtaatgttttataacatgcgtaacttagctttagaagcattcctagagttgacagtgattacatgtgttttaaagtcgttagtttgaaacatttatgtgggagaagacattccaagaaaagggaatagtttatacaaagccatagaataaagagagaacagaatattcaaggaactgtaagagtttaatatattggttctactgggagcaagagatgagactgaagcataggcagtggtcagatcatgaagaaccttatatgctgtggtaaggaattttaccttttctgaagacactataaagctacataatatttttaactaggcatgatcagatttatgattatacatttatgtgaaaatagttgtggatagtgaattatgggatgatgattagactagaggcaaggagacagttggaggctactgcagtaatacaaatgagaaatgatattccagtaacagttacagtggagatggagagggaattaggcctttgagaagtaactcagagattgagacacaggttttggtggccagttattggtaatggagcaaaatgattcaaggacaattcccaggtttcttgc

SEQ ID NO: 208506 - DNA, 1269 bp, Homo sapiens
  misc_feature (369)..(369): n is a, c, g, or t
gtaaaatatgaaaatggtcaaccaaagaactaattatgtggacaatgtggatagtcttacttgcacaaattggctgtcttctagaacttgatatgctcatgattcttaaaaaagtgatacgtgaagatagccctgaaaggattgaaaagattctcgttgacagagtttcacaaacttctaaaagaagagtcaattggtaaaaaactaacacagatgaatcctcaaagatactactcatatggctgaaaaaatataaaaatatttattaggtacaaaagatttatgactatgactttgtgatccattataggtctagaattattcaggttatctcttagaacaacttatgcttcaaatttgagaggactntgacccaggagagcagcatataattttaaggaaagagttaaagtgaagttttatttctgataatatggcagggtaggatccataaataacctacatactacaatttaaaacgtaatatttaaagaactccttatgttgagacagtacaggagacaaagcctagtgctcactttacaagatgagaagtgtaataggagacccagttcctgtaattctgagaagacttaatgtacaggtaaactagaaataaaggtgtttactttctcagtcagtttcctggggatctgtaaggaaactcatacatccaaagcattagtgctgggtagagggaagggaaaaatgctgttaagaaataaccacatgtcagtctgcacagaaatttgcagcctgaattaatattttctgattttggctgacaaaactcaaacgaaatttaaaggaccctaaatgttagtgcccccagacctcaggaagaggcaaacatatattccctcttcaggaaatcaccttcagccaggcatcaaataattcttccagctaaaattccaaaaggaaattttgctgttaaaaattattaaaagggccaggcgcagtgactcacaggagaaaattattagatcctagcaacaggtacctgtaatcccagcactctgggagaccgagacgggtggatcatgaggtcaggagatcgagaccatcctggctaatacggtgaaaccctgtctctactaaaaaaaaaaaaaaaaaaaaattagctgggcgtggtggcaggtgcatgtaatcccagctacttgggaggctgaagcaggaaaatggcatgtacctgggaggaggagcttgcagtgactgagattgcaccactgcactccagcctgggcgacagagtgagactcttatctc

SEQ ID NO: 208507 - DNA, 289 bp, Homo sapiens
caagtaaacaaacacacaccttacccaggggcccagaacaaataacaaacaatcggggaagagggcatgacctctcaggtagattacctcctcattgtcatttctattttcggtagaatggctgatttaacaggtctctatatccaccggggactccctggttgtgctgatgtttgctgtagttaccagcctaatggctgctttgtaaattgtttggatttgctaataattcctaataaggataattaagcaaacaaagcaatgggtagagaatagagtgtgtaaatac

SEQ ID NO: 208508 - DNA, 708 bp, Homo sapiens
cgatctttttttatgcatctctttagagcaaacaaggcaaaaaagcaaaaagcttcaaaagccctggttgagggtgttcactactatgtagttgatcatcccccatccctgagatgctttggtaagtttctgattttgctattagtcttgctatgttgccctgtctggtcttgaactcctgggctcaagcaatcctcccactttggcctctcaaagtgttgagattacaggtgagtctcagtgcccagcccacagggtcatttttaaagcccatgttatcaaactgctttccggaaaagttgttctgattcttgttcctgcacaaggttgcccatctcaccacatcatcactgacactgagttatcttttagcttcacatagttaactcaatcaggtggacatcttctgattcctgccttcaagaattcagtctagtagggagctcagacctttctaatgggaagctgtctctagataatcatgcaaggggcactcacacttgaagagtgtagtggaggggagaggggccgcttttggcccttgcagcatcacaaacgactgatgccagaaggggccttttctcctgctttctccctgactcctgaccattcttctcacctctagcactgcttccctgcaagtctgttctctatagagccggcaaagtgagtgtcctaaatatgtacctgatcatgtcactttctgtt

SEQ ID NO: 208509 - DNA, 180 bp, Homo sapiens
catccaacaagtatttattaaatgtttattgtatgctgggtactatgttagctggaacaatttgctaaagggattttttttaatcttagaagaactttaatttatcaaatataatagcaggtcagacttagtcttggagtaaagaacatgtttttattttgttttaatgaagggcaagaa

SEQ ID NO: 208510 - DNA, 300 bp, Homo sapiens
gggtagaaggtaggcccccaaggtagagaagggtgggtgagacacttctattttttgtttcaagctgcttagtcatatctaacttttaaaattttatatattttacttggataaaataaaattaattgacataaaattaactggcagtaaaagatttggaggaaaattgagaatagtgctatgatgggtaaaatttgaatgaaaactggaaaaaagaaaagttagttcattaaaggcaggaaagtgaaaaaaatcaacacacctccccaacaaagaaagcaaattgaacaagcctgatgt

SEQ ID NO: 208511 - DNA, 389 bp, Homo sapiens
cggggtttcaccgtgttagccagaatggtctcgatctcctgacctcgtgatccgcccgccttggcctcccaaagtgctggaattacaggcgtgaaccactgcgcccaacctcttttcaacatttatacccagtcccttcacgatctcatccagtctcatagttctattttttctgtatttatttattatttatttatttatttatttatttatttttgagacttggtctcactctgtcgcctaggctgtgatcgcaccactgcactccaacctggttgacagagcaagaccccacttaaaaaagacatttaagctaggtaagaagggaagtgaaggctgggcacggtggctcacacctgtaaatcccagcactttgggagggccgaagc

SEQ ID NO: 208512 - DNA, 323 bp, Homo sapiens
gcctagatgagatattctttaacaagttgagaaagtttcttctctattccttgcttactgagaggaaattagctttcttttgattagtcattgcgtagtatatctttgttcatccttttacttttgaccttttcacattcttatatttaaggtttcacccttgtaggcatgtaagatttgcttttttgaaattaagtttttttctaattcaaagtatttactacactatatctaatgtgtttactgatagacttaggtttgaatgtaccatcttactaataattctttctatcggtttttctgttactgtgttcttttctttt

SEQ ID NO: 208513 - DNA, 256 bp, Homo sapiens
atgtagttgaagaatgatcagaagctgtaaatggaagacataatggaaaagaggactgtgaagttatataaatggtgtcatattcagggaaacatttccaatgctcaatttaggtaatgtgcaatgtctgattcattctgcaaaatgctactcaaaggctggaaaaaacctaagaagttagaactccaataatcaaaactagaaaggcaaacttgtttttctctatccctccaacatcctcctcccctcaaaaaaa

SEQ ID NO: 208514 - DNA, 420 bp, Homo sapiens
tggaatgaattgtttaaaaaactttcagagaaggatgaaagtgatgacagaaaataataagtcatagggaagaaaaattgatgtaagaaataaaatgaatgtcaaatatgaattctggaaggaaaatatggcaatgatatagaaccctaataaaacaaatttccagggttgatgaaaactcttagtattcagatggttccctttttgctgagcaatatatatgaggaaagaggtttttgttttattttgtgtttgcctcagcctcccaagtaactgggattacaggcatgagacaccatgcctggctaatttttgtatttttagtagagatggggtttcatcaccttggccaggctggtcttgaactcctgaccgtgtgatccacccacctgggcctcccaaagtgctgggattacaggc

SEQ ID NO: 208515 - DNA, 567 bp, Homo sapiens
tctccccaaagaacctgtatttgatattttaaacctatcttcaaatatttaaataccattccaagtaaaacaaatacccgcctagcatgatcagccattccttacagctgacattatgtgggtgagacagggggaggataaaaaaagatcagtattattgcaatgaaccaaagaaaccctgaaaagaatcctgtgtgccggaaacaaacagaagactgtgtgtgggtgttccagctcgatcacccttgtacctttaggcttccagaaggagggaaggccactggaatccttgcaaatccttgccaggatgctaataaggttattctgtaatcatcaaggtggagtcttcctttccgtttcattttgagtgtttaattttaacatgacaaagtaaattggaaaaagcatcatgaataatgtatactgctccgattaaacactgacagcagaatgatggacatactgaggaaagaacaattagctaattcacaaatgtggatgctattaggcttctatttccaaggctaactgttcaaaattctacacctcgaatttagccaatataaa

SEQ ID NO: 208516 - DNA, 292 bp, Homo sapiens
tacccgcaggtttgtgcctctctccatgggaaagcagagaataggaatgagttctatttctaaatgcaggacatagtagtgcccaacacacaacaagcactttaaaaatatccatgatactggccaggcacaatggctcgcgcctgtaaccccagcactttgggaggccaaggcaggtggatcacctgaggttgggagttcgagaccagcctgaccaacatggagaaaccccatctctactaaacatataaaattagccagatatggtggcgcatgcctgtaatcccagcta

SEQ ID NO: 208517 - DNA, 640 bp, Homo sapiens
tatgggggggtgattttatttatttatttatttatttatttatttatttatttattttgagatgacgtcttgctctgttgccaaggctggttgcagtgagcgaagcttgtgccactgcactccagcctgggtgacagagcgagactcatctcaaaaaaaggtgagtggagggtggctattgcccacacccacccccattttagttttctcttttcccctttaagagccagacattaaagactagcacattcagaataggaagcgactgcatatgcacatggacggtcaggctcagagaagacgtaagaaaacttaagtgtatacctcagattgatccttgacacagagatagcctataaaaaacaaaacaaaaacaaaacacacaataataaaacacaaaaaaccctggggaagggagagaattggatttcaagagttaccacattattaaattcaaatgtccaattttcaacaaaaaatcataaggcatacgaagaaaaaggaaagtatggcccattcaaaggaaaaaaatcaacagaaaatgtctttgaaaaagtcctgattgtggatctaatagacaaagatttttaaatagctgtcttaaagatgctcagaaaactaaggaatatgtggaggaagt

SEQ ID NO: 208518 - DNA, 213 bp, Homo sapiens
cttgaataaacctcacgtacacccgcgttagcttaatgaatggctttatgtttccaactgaaattcccgagcggcaacatttcaccagaaagtcttaggcactggatttttcacttgtaagtccaaaaagttgtgttcacttctaatttatgcttcttaaaaaaaaaaagtctttaatcaattagggtcagagagagaggctttctgttcact

SEQ ID NO: 208519 - DNA, 434 bp, Homo sapiens
atggatggtggcgatggttggacaatgctgtaatgtacttaacaccacagaactgcacacttcaaaatggttacgatggcaagttttatactatgtattttttaagcacacttttttgttttttgtcttttgttttaaggagcagagagtttaataggcaagaaagaagggggaagaaagaaagaagcagcttccctgtacacagaccggcggggggtaggggaggctccaaagccaggagacggaaccccaaacttaggtaatatcagccagctatattcaatggctggaggaggcgtttaactataatttttaaaaaacagtcaaataggccaggagcggtggctcacacctgtaatccgagcactttgggaggccaagacgggtgggtcatttgaggtcaggagatcgagaccagcctggccaacatggtg

SEQ ID NO: 208520 - DNA, 279 bp, Homo sapiens
aggtacaattcctcagcaaggagggagaacattgtgagctctggctctgtgacctgtgcagagtggccaagaagagccggagtttgttgggagaagtggcatgagaggaagcagcagtttcagatgccaaggaaaagtgtctgtgagcaccttccttgcaccctggggtgagagctgggcactgagctgtgaggatctcacctcatctgggcactgagaagggaacaggccagggagctgctggtggcaacagaaccggggctggcaccaggcagtagg

SEQ ID NO: 208521 - DNA, 455 bp, Homo sapiens
gctggaatagccaaggccagagcaaggctaataggtagagcaacagcttacaggtgtgggggtggcagatactggcacccttgaaatggattcctcatgcccacgcttcactattcttctctgtggctaggggatttatggataaaccaaaattacagttaaaaaccagccataggccaggcacagtgactcacgcctttaatatcagcactttgggaggacaaggtgggcggatcacctgagatctggaatttgagaccagcctggccaacatggcgaaaccccatctctactaaaaatacaaaaattagctgggcatggtggtgggcacctgtaatcccagttactcaggggctgaggcaggagaaccacttgaacccaggaggtggaggttgcagtgagccaagcttgcaccactgcactccagcctgggtgacacagcgacactccgtctc

SEQ ID NO: 208522 - DNA, 413 bp, Homo sapiens
gcacttgttctatattgttcttaagggtaaaaccaagttacaaggagacagcactagattattttcataaatggctgtgtgcacagtgattagatatctccagatggccaacttcatagctgaacaattctagttcttagaaagttcttgtattggaacaaaaactgccttcctataacttggtcctgatctcaagaacaatacagaacaagtgtttttgtcctcagatttctttcacatctaagactttataatcttgtcctttaaactgtctgtaacaatgaagtccaaaagagttttctgcaataattttttctatgtgcatattcaatatggttgccaaaaccatatgtggatatagagtacttgaaatgtggctagtacaagtgagaaactgaattttaaatttaaat

SEQ ID NO: 208523 - DNA, 187 bp, Homo sapiens
ccttactatctgatctgacaggacattccaggctcatgttttacattttctgttccaactctttatttttatttatttatttatttatttttgagacagagtctcactctgtcacccaggctggagtgcagtggcgcaatcttggctcactgcaagctctgcctcccgggttcacactgttctcctg

SEQ ID NO: 208524 - DNA, 725 bp, Homo sapiens
tatttatttttctatctagctaacagtgagtttgcatagcggtcactcaaaaatatttgcataactaattaagtgctcaaagtgacagagaatttttaagagaggaggatttaatttatatttatgtatttaaagtttaacctggaaatgaagggacctagagctgtgtaaaaggcctaattcctaaagaagtctgaattacagagagcataaacttttgttttaaacagaagctgaatttataacaaaggaattaatactgcactttatatattttttcccggatatctaattttctctaaagaatgttaccatctaaaatgcacataatacatggttttaaaatttacatgtggggatattgatttacaagacatgatatcttttatgtgtatacaactcaattgagcagttttagttgtattaaagggaaataattgagataaggaaaatgtttctctcttcagtattgaagagcatttaaaatatgtttgctttatgaaagctgaattgataatacttatacacattatattttattatgtatacctgagtataaatcaagaaactctaaatatatgattagtttggatagatgcatatctccatcctatttgtgttgtttgttatcttgagaaagtaaattgtgatttattaggtagatacctaataatctaatatattgtactcagtgtagaaggaaacagagaatagacaagagaatc

SEQ ID NO: 208525 - DNA, 443 bp, Homo sapiens
tgttgtcctacatagtgtcgtcctacttaggtgtcctacatagtgttgtcctacatagtgttgtcctacatagtgttgtcctacatagtgttttagatcaccccctccccaataaagctaaaactcacctgagttgtaaaaaactccagttgacacaaaataaactacgaaagtggctttaacatatctgaacacacaatagctaagacccaaactgggattagataccccactatgcttagccctaaacctcaacagttaaatcaacaaaactgctcgccagaacactatgtagggtcctctatagtgttgtatagcagaaatgggagttcttgggggtgagcttgtgaaaacaatgtccgacggaactaatgatgaaagggcctggaacccacatagttaggcacgccagaaggaaacctatgggaacattagcccctgct

SEQ ID NO: 208526 - DNA, 372 bp, Homo sapiens
gctacttaaagaagtttcctcatatccctggtttattaacgatttttaaaaaggaacatatgttgaattttattaattgctatttcagtatctactgagatgactaccagtttctctcctttatcaacaacattaattccttaggcaatttcttctttttctttctctctctcattctttctttctttctttagagataggatcacattatgttgcccagactggcctcaaactcctgggctcaagagatcctcctaccatggcctcccaagaagctgggactagatttctcaatagatggctttgtttttttgttttgttttttttttgagataaggtctcactctgttgcccaggctagagtgcagtggc

SEQ ID NO: 208527 - DNA, 279 bp, Homo sapiens
tggtgttgacagtattgtcataattatttctgctggtaatgttagaaaactttgcttccttgttttttaaatccaccctcattttttagacaacatttaactataaaacatatttattagttcggtttgttgaagcaaataaatgaagcaaatttgttatattttggaacacaatatatttttgcaggttacacaccccaacctccctctctctggtcttgtcattactgatgatctgttgggcctattggtgccaagtaagcactgataaatattagt

SEQ ID NO: 208528 - DNA, 258 bp, Homo sapiens
gctgagaagttccatgacctgccatctgcaagctggagactcaggagagtgggtagtgcaattccagtctgtgtccaaaggcctgggaaccaaggggcctcgaggtgtaaatcccagttgaagggcaggagaagatgagatgagatctgcccacgcaggcaggcaggagaattgcttgaacttgggagatggaggttgccgtgagctgagatcgcatcattgcactccagcctgggtgacagggcgagacgccgtctc

SEQ ID NO: 208529 - DNA, 352 bp, Homo sapiens
cctcatgataattgtgtctgccctttattgattgctagtgcttgttctgggtgttgtgctaagtgctttgcaggcttaaatcattacatttgagttgccacacagtgagtggcacggggtcggtgggctttaccttcattctgcggaggagaaaatggaacctgcaaaaggctgaatgacttggccaagagattctgaagctagaaagtgacaaatcaaaattcacatagcttgaggggtttgggcaatggcaatcttcatccgatggggctggatatacaggggcactgctaaaatcatgaggaaatgcaacctataggaaatgggaattgagtgggacacacacatgcat

SEQ ID NO: 208530 - DNA, 201 bp, Homo sapiens
tttgagccacttgtcagacgctgaactatgtgtctgcttagaacccagagcagaatttagagctcagtttgaaagcttgcctgaatgcctgtccgtgggaagagcagtcaccagtcactccaccgccctccagctttggatcaggccattttaaccttcactgtcttcaatcttgatacccacatagttcagcgtctttga

SEQ ID NO: 208531 - DNA, 279 bp, Homo sapiens
agctgtcttccctcagtcacgccttcctccccatgcaggctcatccagtccctctgccctgctccagtaccctctccccacctttcaccgtggatcaggcccacaaggtcacctagggacgttttatatccaaagtaacatgacaacatctcctcctgcactgtctagtcacatgctctgaggtcaacagtggtgcgtccactaataacacatttcatactattcagcacaactcacaaccctgcaaacatagattaaaggaaaaatgccggaatatgg

SEQ ID NO: 208532 - DNA, 351 bp, Homo sapiens
gaaggtttatagcatgtcagttatcatagcacttttgacaatggagacttcatatcttgaggtgggccaggtgagtgtgcaaaatgaaatgtggttagaatattaaggcttgtgacagagtacttggccctcaagctgttctgactcttccaaatacattcagttcaagaatgcatctctggtttctattcctggtcactcgggaaatgactccttgtctgtaggtatttgttttgcatgaaaccaattatgatcgtgtttctcatgtgtagacatcattattatgagtgcagttttagttcagtccagtatatttatgtctatggggctagtttcttgtaattcaaatta

SEQ ID NO: 208533 - DNA, 416 bp, Homo sapiens
caattctctatttttcaattttctgcaatgaataggaatcacattttaataagcaccaagaaccatggaataataactttctatttaaaaaaaacatatatatatatgtatttttaaaactaaatctcagtgatcagtattttactctatagtctcagttgctgaccaccagagaaactaaaaccggagtgaaacttttccaggatcattaattgaaagaacaatgaaatccctccttagtggccttgctgtcctcttctatgtactcatttttaccgtatatccttggggtgggttctccccagaaggaatcctctctgaatctctctataacatcagctgtatcactgcctgatctacaattggagcttgatacatttttgctgactgaaataaaagctgaattcatgccttcc

SEQ ID NO: 208534 - DNA, 410 bp, Homo sapiens
ttcctttgctactttataatcatgaaatagaaaattgcttttgggaaatttctgccagagtactgaaaagtttccactatgttaggaataaacaataacaaaacagtttcttcctttcttgtggaggaaaatgaacactgcattttgaaatttcttctgggagaggcacatcaccgtcactgagagatctactcactgccgcactctccattccattccttcaacccagaaagtgcctccaagtgaataatttgatgtgtgaaaccatctcttcttaaaagccaatgcttgcaagtaaatcccagccagaatagcttattacaaatggtatgatatggaaaatgaacactcttggagggccacactgtttcttaagtttgtctctttttgtaaaagctgtttcacaccct

SEQ ID NO: 208535 - DNA, 233 bp, Homo sapiens
cacagacgcctttccatgtattccactgcccccatcccagtgcagtccctttattaacctcctccttgacttcagtaatatcttcagtattggtctccttgcctcatctctctgctctcatctgttggcccacctcaaccatgcttactttatattcatgctaatccattctgcttaggctgctatctctgccagaaatccttcagggattctccacttagtttagaattttt

SEQ ID NO: 208536 - DNA, 423 bp, Homo sapiens
tgccaaaggtggcaagaatgcacactgagaaaaaacagtcccaataaatggtggtggaaaaactagatagtcacatgaagaagaatgaaactaggtacttatttttcactataaacaaaaatgaactctaaataaattaagacaaatacaaggcttaaaactatgaaactattagtagaaaatataggggaaatgcttcatgaaattggagtaggcaaagatttttcgaataagactgcaaaagcacagaaacaaaaccaaaaatagacaaatgggataatatcaaactaaaaaacttctttacagataaggaaacaatcaaccgagtgaagagtaaaatatggaggggttgttgcaaactatgcatctgacaatggattattattcagaatatataagaaactcaatgattcaatagcaaaa

SEQ ID NO: 208537 - DNA, 393 bp, Homo sapiens
tcatattataatccacataatgcatttatacatatatgttatagagttatatagtctctctgagtgtactctaaaataaatacatattatagtttatttttataagagtatgtattagtctgtttttatgctgctgataaagacatacctgagactgggaagaaaaagaggtttaattggacttacagtttcacatggctagggatgcctcagattcatggcaggaggtgaaagttacttcttacatggtggtggcaagagaaagtggagaaaaagcaaaagcagaaactcctgataaacccatcagatttcatgagacttattcactatcataagaatagcactggaaagactggcccccatgattcaattacctcccactgggtcccttcc

SEQ ID NO: 208538 - DNA, 508 bp, Homo sapiens
aaatcaaagattatcagagactttgttgctgtagattatatcggtaagaatgaaacactccattcttgcctggagagtctaagctcttttgacacagaagcagtctcaatttacaacccaggtgcagagagattcagataaggggtttctggatacaacaatccatcttcatcctaactttgtaccttgcaaagaaacaggagcctgggtctatttcataatccaaatccttatccctgttttctttgaacctttcaaacactgcttcatttaaatactatctacattccactcattcccaaaatcctataataattctatcttttcctttgctgagccacctctgctgtggtccacagccaccttcactgcattgcatccataaagtcaactgtatcagataacaggtttgctcctggtgttctcagggtgattgggctggggaaattctcatccgtttaccagaatagtatgaagaacctagacagaagccaacttagaagatcag

SEQ ID NO: 208539 - DNA, 733 bp, Homo sapiens
gggataaaatctacaaaaaaaacaaaagtggggggtgggaaaggttaagttatagtaaaagatgaaggaaattttgaaaggttaactgaatttactttctttggtataagaagtgacttgggtttaagtatctgctatgtcactaattagttttgagatcttggacaagttatatagcttttctgagcccgggtttcttcatctgtcaaatgaagataatactggttacaaagacaaagtgaaataataaatacaaaattcctgacgcatagaaggcattggataagatatgattattctgagtggctgggaaacaaatgggtcacctcttgtgttgtttacacctcagctttgttttctttggcccttgggatatccaaggtctccagagacccaagcaaagattacttaaaggagtcagttccaaaagggttgtctagaaagtacttttgcctgaggttaaaccatttttaggaagctcctccttgattttttgtcttcccatttcagtctactctagctctccggggaaagcaaggacaaggagagacatacagagttgaaaaagaaaaaagaaagaccagaccatcagacaactgaacatctgagacacccataaagcccttttattacctttaggccacatgccagtgtctgagggtataaattgtacttaaaattttataaaagtcagctcttccttgcttaaataaagtgtgccccccacaaacac

SEQ ID NO: 208540 - DNA, 344 bp, Homo sapiens
agggagccggctccggcctcggccatcccaggaaggggcttccacagtgcagcggcgggctgaagggctcctcaagcgcagccagagtgggcgccgaggccaaggaagccccaagagcgagggagggctgccagcacactcacctctcgccatctactcaggaggctgaggcaggagaatcacttgaacctgggaggcggaggttgcagtgaactgagatcgcaccactgcattccagcctgggcgacaaaatgagactgtctcaaaaaaaaaaaggagagtctatgctaatgtttgggtttctacaagttgtgggtaatggtaaagttgaaatcttacgtgga

SEQ ID NO: 208541 - DNA, 535 bp, Homo sapiens
acactagagttaccgcgaatgatccagagagtcacgagaggtagacactaatggtgatgtccctaagtagataggacagggcagagttgtctgcaagacgtggacaggagaagtggaagaagctgacaccccacagtcttccaggatgcccttgtgattcactggctaccaagaccaagactaacagttaatctccccaaggtcctaggcagaaaacactgaacccatctctttccccatctgtaaccaaagagaaaggtcttccacttccctgagcagaggttgtgagacagagaattaagcatgttcattagcatatatgccctagaaaggcaaagaggaaatggagcagtttctcagactgggcttggtagcaaaatgttcaatggaaaacacagtttcagaataagtatagaacatgctacattctaggcccttccccagggttcaccagctacagttcccaatcaaaggctctgacaagccctgctgcaaagtgatctgtttctttttaactcagctgagcttcatctca

SEQ ID NO: 208542 - DNA, 325 bp, Homo sapiens
aagacagactccagagctaaaatggctataaggatatctctacccactgctaatttagcaactgccaattttcagacttgctgtatgacgtgttagttgaaacaataactattaatttaagaaggaaaatttcctttcactgttgagaaaattaagtggtgatctttcaaacattataagatggaaaggatgtaatggaacaaaactcccaatggcctttgaaagtctaaattggaaaatgcattctcaatgtaattttaattaaagcaattgaatttaagcagttgagataaacaagaaattggaagccttaaaccttaattta

SEQ ID NO: 208543 - DNA, 178 bp, Homo sapiens
aggaggctgaggtgacaggtggaagcgtgagctggggccagggctgtgaggatggagaggaagggacgaggccgagagagtcggggtcagggatcagaagggacagactgggggctgccggccatgcagaagtgagggggataagacagtggtgctatttagtagacgaatcattcag

SEQ ID NO: 208544 - DNA, 449 bp, Homo sapiens
tatgtgttttgagtactcttaagcaaaggttggcaactaactaaatggtaaatgaaacagtctccagacttggatgacaccatcagaagtctggactgcttctccattatactttaagaaagacaatacaggtaaatgtgggagagaacaccgtgctttggctgaatgagggactgcctctgtttctgggaatacatttattatgtttgccttttctttctcagagtgtggatgtgcaagggagagtgtgttagatatgtagttttgatttaaagcacagtggataagagcaggcttagttttatatacgagtggcctcagcaggtgataaattgtttttgactttcatcagttgccaacaaataagaaaagtgagagatttatcatgtatgtaaaaactgtagcaacattctctatcatgtaaaataaaatttaataaaatagcattt

SEQ ID NO: 208545 - DNA, 594 bp, Homo sapiens
tagcagagaatcaccaacttttcctttggttgttaatgtttcaccatcacagtttataaagtggactgtcactttatcttctgagttgctccgcgcccctgccgacacgctcagcggccggctcgcctccgcgctccggcccggtccccggctcctcagcaggccgctggctccagcgcgggacccggcgtggtgcagccaccggccggccgggtcgccgaggaccgcagaagcggcgcgcagcagccgggcgcccccagcggcagccatcgcccgcggtcgggaactcaaaaggaattatttaaagatagttttaaccttgtgacatttctcatttgcgttgctgtatacctagcctatactatttgtagaatacttggcataaacgtacatatgtcataagcattgaagttttttgttacatctgggattttctggcttgagtgggatgtgaattcataaatgtgatggttttgtgggggaactgagagaacttggcataaacaggtatacttactgatcctctctggatatttaagtgtggtaattcattcttatcactcaataaagtataggcattataaaaaaaaaaaa

SEQ ID NO: 208546 - DNA, 193 bp, Homo sapiens
ttaaatatcaccaaaataaatataagaactcagagaactacaaacaagcaaatcacaagaggataagaagaaaacatacacgaattatacggaggggaaggcctagatactaagacatgggaagaaaccaaaggcaaggtgagtagacaaatttgaataaatatgcaggatctagatacatcaattatcattg

SEQ ID NO: 208547 - DNA, 649 bp, Homo sapiens
tagaggtgaccctaaataggccaatacagaaaaatacggcatgatattaagaaaaaaacaacagcaagttgcaaatcacagaccaaaatttacatatttaatcccatgtatttttaaaatattcatgtcatgatagttaattttatcgttaatgtgactgaattacaggatgtccaggtatctggttaaacataattgctgggtgtgtctgtgagagtgttttcaaaagagattagcatttaaatctgtagactgagtaaagaggattactctgcgcaatgtggatgggcatcatccaatgcattgaggctctggatagaaaaaaatggtagaggaagggatgattggcactccctctctgcctaaatgcttgagctggaacatcgatctcctcttgcccttgatactcctggctctcacatcttcagacatgaactgaaatctacattattggctctccaggtctcaaatcttcagaatacaccactggccttcctgggtcttcagcttgcagacagcagatcatgggagccctcaacctccataattacatgagccaataccttataaattgctttagtgtatacacacacacacacacacacacacacgcaaatcagtaaataccatatctgttaatctgtcaccg

SEQ ID NO: 208548 - DNA, 553 bp, Homo sapiens
gaacgttaatggactgtatctccttgtgaggtcccatcaggtgtggcccgtgtcggccaggtggtttcccaggctcccacctgggggcagcagcaacacgacatcctaacgggtgggtgcctgagttccactagagtgaggctagactctgtggtctttggtctagcctcatgaccatcgctccatcaccggctgcttgggacagccaggcagacactgtttgggaaagtgttccagcatagtcctgtggataaccctttttcctttccccaaacaccagggtttttggaaccatcacctgggaagatttaggaatggctccctggtagtctcctaacagcctaaagaccccatgggcttttcttggcggtgttgcttatctgcatgccaaaggaccaatcctgtgggcaaggggctcgatggccccacctggaccctagacaaaatgaacgtactagggggatcccagcactggggagatttgcctggccttcctgggggagcagtatggccgcccacggagccggctgctggtctccctttcccataacct

SEQ ID NO: 208549 - DNA, 840 bp, Homo sapiens
gagggtggagggcaaaggcatagtttgaaaatgcataccctcttcggtattctaatatctctcctgatggggaatcactgattgacattgtctcagaaatacattttctgtcctttaaaaattctgaaataatatcaaatttttctcccctcagaagcctacgccaaataagtgctgtaatcttagtacaactttgtagtacagtcagactcatttgttgatgtctgactggctgagtttttaaaacctattattcccccttccgccccatatctggacatgccagtaagaaagctcaaatgcttccacctttgtgcctggtggaagttcaaaccacctaagaatcctcactgcagccctacctccaagccactaggaaaagccaggctcctctactttccctgctcaagccatttctggacctgcttgagaactcgctgctctctgtaaaagcctcgtgtgagtgataaaccttttcatatctatttggtcctaatgtaacatcagtcctaacacctaaaccaagttttgggtaaggggttcaacctctcctctgtgggatgactaaacactttatgcaacaagcagagggtctaggagatgaccactaccactgcagggctctcctcttgctttagtttgctaactgactcttgctggctagaattttttttttttttttttttttttgtcactgctggcaagctcatgctttgtgctgtgctgctttgtactgcgttcactgagccttaccaagcttctgttatagatgtgctcagctaagttggaatttttgataattggcatttaagaacaagaataaagtggcatttaagaaca

SEQ ID NO: 208550 - DNA, 500 bp, Homo sapiens
cagcctacctataggagtgtgcctctgagtgaaggtaaacagtggtgtgggcagctgagccagggctacgcctgcaggtgatggcctagtggggctgtgacccatctggcctgactgggaggaggaagcagtgtcttctgtggtgacatcctctctgcacagacaagagtcacccagtccagcaggttgagagtcagcttggggcccctcggcagagtggccagtgacaaaccatgagaccaccaaaacatggacatgcctcagtttgtgatagtggatttcaagaatgtagaatggatttttgtggttgcccatcccacactgggcactctttctctctcagtgactgtctttcatcccatttgctgagcagtctggagagtcacttgactccgattcctggcattgccattacgagccccatgtgttcttaggcacatcatttaacctttctgagcatctgatttttccattaatcaaataaagaaaataactcatga

SEQ ID NO: 208551 - DNA, 557 bp, Homo sapiens
ctttcaattaattatggagaggcaattgaactgtactctataaacttccatccatgttagctttgcactctaatttagattgttctgtctcctcacctgcagcagttctagtaaagaggattttaaaattcagcaagttcattaggatacttcaacatcagcaagtccacgaggatacttcaacagcagacaaccagtgcaaacactgttgaaaggagctgttacaattcttctctgttttctggcatatagattttggatattgtggcttgactctgaattttctgaatcctcttttgcatttttaggcttctccttgtgctttcatatgtacattaattatttagatagttctgtattacacttttccttggtgatggttaataccctttgccattatctttatgacttctagttggttttaatattcacttacttaatcttctctttcttgatttacaattttgctttatttcttcataacttggtcaaaattttcattcaattaacaaaaagtgtgtttgaatagcgtttattatatagagaggcagcaaagt

SEQ ID NO: 208552 - DNA, 410 bp, Homo sapiens
ctttcaattaattatggagaggcaattgaactgtactctataaacttccatccatgttagctttgcactctaatttagattgttctgtctcctcacctgcagcagttctagtaaagaggattttaaaattcagcaatccccaagttcatgatatagggttgtcaagatttagcaaatacaaaaaaagtaagatgtcaggttcaatttgaatgttagataaacaatgaaaactgtttcaggataaggatgccccacgcaatatttgggtaatatactccataagatatccttatcctaaaacattatttgttatttatctgaaattctaatttaactgagtatcctgtattttatctggcaacttatcctagtgggtagaaatcagactacctatatttctgaaaccatct

SEQ ID NO: 208553 - DNA, 383 bp, Homo sapiens
tttcggatagctacaaagaatcattcaatggagagctgaacctgtggtctagagcagtgatccccaaactttttggcaccaggttttgtgaaagacaatttttccatataccagggtgtgaggggggatggttttgggatgaaattgttcatcagacattagattctcataaggagcaggtaacctagatccctcacatgcatatttcacaatagggttcatgctcctgtgagaatttaatgctgtcattcatctgacaggaggcagagtgcaggcagtaattcttgcttgcctgctactcatctcctgctgtgcagcgcagttcctcacaggacacacattggagcagtccatggcctgggggtttgggatccctggtctaa

SEQ ID NO: 208554 - DNA, 742 bp, Homo sapiens
caggtatgagccaccacacccagcctaaactccttttctttatgaattacccagtctcaggtatttctttctagtagtgtggcacaagcctgtagtcccagctactggggaggatccgttgagcccaggaattcgaggctgcagtgagctatgattgcaccactgcactccagcttgggcaacagaaccagaccctgtctctaaaaataagaaggaagaaaggccaggaggattataggccatatggtgtacttcatcttactgggagatatctggtagacctgccacccgtggtgctaggttgatccatgagggctctaaggtaacccctgggatgagagatactgaggtccttttcagcatcctattactcagcagcctctcacctggtggtcttagcatccattggttatcattgtctgaatcctttgtttcactcgcggttgcaattttatgctttttcaagatcctcccttagtgaagactctgcacccccacttcccttcagcatcactggactcagctttttaaagtacttggattttcattattatcttagataaagccaaggtttcatttctttcagagaaaggccgcagagggaaacaaattgatccgtccatgtttggagcatggctattcttaggatgcggggatggtgtttcgactctgtgaagctcctgggattgtgtgcacggggtggggtgtgcgtgtgtgtgcgtgtatgtgtgcatgtgtgtgc

SEQ ID NO: 208555 - DNA, 416 bp, Homo sapiens
ccggctgcaggtttaatatgcctagttggtggcaagtggcacacctgggttggggtggggattgaggaggaagactggaatttcaggtctctggcagcaggggtggggtggctggggaagaaaggggagagaatacacatgggaagtaggatttgggctgaggcccatggatgatgatgcctccaaagctgaaaggtaaggcctcttgcacaggtcttctctcctggggcctagacatgcctgctgactacaagcacccagtttacattcttaatggaccaaatgatttgggagacatcatgcttgctctgaggctctgtttcccttcctctgaaatgaggggaactttttctgccccatctcactctctactgcctcatattctgtctgagcagattgaataaaataatgtcagg

SEQ ID NO: 208556 - DNA, 164 bp, Homo sapiens
catgtgtaaaatagacactggtagacctaccctgggggctgttatgaggacccagaaaggtttttcacatacggcatctgccaggtagtaggtattgagtaaatggtcgttgttttcacataatttggaagagggaggcagttgggagatcagggatagcaaca

SEQ ID NO: 208557 - DNA, 160 bp, Homo sapiens
gggtctggcactcagtgggcccttgataaatacttgttcagtgcgtggaactggataaggtggcggggatgagttgaggttgggggcaaaggggataggcctgactcacgctaaccactctctgagcccaaaccaagaataccccataggaagccagtgc

SEQ ID NO: 208558 - DNA, 465 bp, Homo sapiens
ttcagcagaaaagccctcagcactggcagcagaagcccctaaaagtatcttatgaaaataaaaaacaagtgcctactgccttccaacccagccacaggactttggtgttctgctattaactccatttttcccataagccctgagagttttagcaacagtttcgcagagcaggaggtttctgaggaatgttaccacgctgtggcagaaacagccacactagtttagtatctctcttctctagaccgtgagctcctttagggcaggaactgcatcactcttactcggcactgtatacccagagcctagcacaagggctgacagataaagtgtcttattgatggataagttacaaaactgacttgaatggaaccaataacatctcccccagcagaaacaggactaaaatcctggatgaacatcctgctcagaaaggaaggacactctggcctcagggcacactgctcc

SEQ ID NO: 208559 - DNA, 518 bp, Homo sapiens
cttgaagatatggaatacttcctgcctacatcttcaactcagagaccgccaggggatttcagtgtttattgcttttttctctgggtttggaacagttccgaccagctactatttgaaaaatgtagaagtatttttttgcttattatcaaaaggagaatgtagttttcttgcaacaaaatgagaacttgatatctttcttgcctcgagggtgtgtgttgggagacgggggtggtgttcagccttctcttcctccacctctgtatcctggtagccagaattgaagttccaagccacaccaaggagggtggctgcctttcatgaaaggcagacatgtagtaattacctttttgcctatctgccgccgtccccttgtgctgagggggttcccttgccgctctgtctgttgtctgcacactgcatttgtttgtctggaatgcagaactccttgcacttgacaatcactacagtctttctgctttttctcttaaacagcttttttaaagcacccagagaccctt

SEQ ID NO: 208560 - DNA, 491 bp, Homo sapiens
gtgctacctaggagaatatacctgcaacataaaaaccaataatgcataaagagtcctaaatccaatacggaaaaaaatggtaaaggatacagagaaaatccacatgaaaaaaatatacaaatagctaataaacatgagactacaatttctgaacctatactcaatgaagagatgacaactttaatactcaaagaaatgcaatttaaaacagaaaatgagttttcacctatacctaggcaaacgtgaatactaaacacagaccgcactggtcaatatgtgaggaaatgggcactagctcctactgttgctttaaaacaattttttttaaaaaacctggtgtgatcttttcagaagcaacagagtggtatcaaatttaaatatacataatgtctgatccagcaatttcatttccataaatttattctataaaacatacaagtatcccaaaatatataaaatgcgttctgttcctagtccatggagtttttaaa

SEQ ID NO: 208561 - DNA, 374 bp, Homo sapiens
gacatatgtcaacttaaaagcttttgagaaaaaattatactaaatgtacatttcaattttgagatgcatccttatttttcagagcctcaagacttgaaaagtcatgcacgttagatttgaagaaatgcagtattccaaaaatagttattctttaatacagtggtttaaactaaacttattctcttctagatacacaaaaaaatgataatgtttatacatggtacactaggaggatacacagcctgaggtaaccagccttctggacctaggctgagataatcacactggttaggaagttctggtttaaaccaactatatgatatagatttttaattaaatgacaaactttagaatttaggactttcataattctc

SEQ ID NO: 208562 - DNA, 895 bp, Homo sapiens
ttcctaggtgagttataaaaagaaagtatactcttaaaatagttttaaaggtcctgtctgcctttggaaactgtgttagttggcattcatctatttatccagcaattttttttttttttttttttgaaagggaggtggcagatgagctgaaatcgcaccattgcagcctccatgccgtgggcaacgaaggagcaaaacttccagtcgtcaagaaaaataataggaagacacaaaataagattacccctccttttatagggggtattagataggcttcgcagcagcttttattggagccttaactggttcgccaggggttagcagaccgccggatatttttttacgcagcagttgttatgttacaaggtggctggtgattgtctcttgcaaacacagatatcacccaaatacgttgcatacaaatgtgggcggagacagaacacatataaacgcggttgggggtcggaccgccttggtggcctggctttgtaactttgcttgctcccatatattagggagacatctatgtcccttgtggcggacacgacagtctgtggcctgacatccaagaaggatctctccacaagaaagggccctgtgtatttcccccaggggggagattgatctctctaaatcatgtgtggtgcgccactttatggggagtatatgatccccagctctggatataatagcaatatttttggcataaaagcgagaagggttataactctttttgttcccaacaccaaagatttcttataattaaagaaggatgattacaccccctggctgactaaagaattaaagggaatctgtttgataatgacagacccaccgagaggaaaagggcattgttatcggcggaggaaatatgatacgcggctactaaataagg

SEQ ID NO: 208563 - DNA, 401 bp, Homo sapiens
  misc_feature (17)..(17): n is a, c, g, or t
caattgatagcctgttngcaagcatctcgactctttaggatcccccaaccgatgtgccctccactgggaatgtctttgtcttatgcacgtagtctgccttgttgttgcaaataacatttctgctataatcacaggatgccccggcttcttcactccattcgacgtaaccccttcccacgagctccaccttcactatggggtccaccagggtgctgttcagggttaagatcacctgcccttttatgctggagccagccaggtagattctatcctcgggcagcactaattcgatcgacttcaccacagacatggggggttggggggtagagagacattcctctctgtcccccatgtccctgaaattcccggttcgttggccctagtgaggtaatccatctatg

SEQ ID NO: 208564 - DNA, 562 bp, Homo sapiens
gagttgcttattttattttatttattgtttcattgagtgacagagggcccaaagataagaagatagacttgttcctctataaactagacaggaaaatacatattaatagcaaatctttactattacgcacataacattttctgaagaagtttatcattttatttccttctcctagtgacaaaagagaagaggaaaatggttatgatccctactaagtaagaaaagaaggtctaagaatgaaactgagctctcctcgctataatctgacttcagcaatcatctgaaattgggagtagagttaaaaataaagctcccacccaaaggcagccaggatacaacccagttacgctgagtcagcatctttctagagacacttcccaggcagttagatatagccgtgcacagtcctctgggccagagcctggagctaatgagggaatctgggaaggagcagtgagacttttaacaaaagagccccacaagccatcgcgttcatattatgcctcttcaaaatgtcccagttcctttctcaccgtcaagtatcaccacactgacaaacagg

SEQ ID NO: 208565 - DNA, 463 bp, Homo sapiens
cactaacagatgactgccatcttgtacagatgtatttcgcatacagaaaattacatttaatcacaatattgtttgggtgggttagtctgtaacttgaagtaaaatgtattgacaggataaaatgaaagctttgaaacagtgcaaaggtggaaaaacgaggttgagcgagaagcaggaattaccaatcttcatggttagaagattcattaaacgcatttgccttcaaatattagattctctacagaatggtggtaaaaaggccagtgagaaattaacaatagtgagaacaccagagtagtgttaaaccaccttgataatcagatggctcggagcagtttaaagccctcacgaaagaggatttttttttaccttccctgtctcccgcaattaatgccatttctaaaagagaaaatatgtcacacatcagcgctcaataggctgacatgctcctcaaaacgttcct

SEQ ID NO: 208566 - DNA, 468 bp, Homo sapiens
cttataaaatagtagagtgtaggaaattatttccagggacagtactaggaaagataatattgctacaaataggcagggtgcagtggctcacccctgtaatcccagcactttgggaggcggaggcaggcggatcacttgaggtcaggagttcaagaccagcctgtccaacatggcgaaaccccatctctactaaaaatacaaaaattagccaggcatggtggcaagtgcctgtaatcccagctacttgggaggctgaggcagggagaatcacttgaacccaggaggtggaggttgcagtgagctgagatcaccaggcatagtggtgcgtgcctgtggtcccagctactcaggaggctgaggtgggaggattacttgaggccaggaggttgaggctgcagtgacctgtgattgcaccactgcactacagcctgggagacagagtgagaccctgtctcaaaaaacaaaatt

SEQ ID NO: 208567 - DNA, 306 bp, Homo sapiens
tgcctgcctccaccttccaaagtgctgggattactggctgagccaccacacccagccttcaaaccgtacttctctactctgcatctgctgtagatgacaggagtccatctcttcatttcattggtcgttgggaacaaagctcccgagtgttggatccttgtcttccagctggcctaaggacatgcaaagattagaagcagcacttctatgttcattgagccagattgtgtctgcttctgtggaaatggcctaggggactcactggccattctgtcctgggtccagttgccaggttaattcctgtga

SEQ ID NO: 208568 - DNA, 665 bp, Homo sapiens
  misc_feature (525)..(525): n is a, c, g, or t
tctgccttttaaaattgttttttgtcttttgttgttcagagaacgaccagagtattttctccccagtgtgtcccaacagattcttaggcaataatttttcttgttgatgatcccgtgctcagtagcacactacattgaagaaccctggccctcaccattgtgtgttggtttctgtgttaatctctgtgatctgaatcatgtcagagtgatgatagattttgtcattttgttgtgattattagtaatgttttactactgtattcattggggctgtgttgagaccagccaaatccatttatagctttactgagccggattgatttgtcaggatttcccaagtgaaagttgggcatattgcccagctcctgctggtggtatcagaatcaccaaccaccagagaaaaaaagactgtggggccctcccctgccaactccccttccctggccgcccactcaacccacacctctttcacgcaggacaggctgcccaccctgtccacgtgaagtgccaacgccctccccaccntgggccgagcccccacccctccctgggcccccaagtgagattgcacatttaactactgtaaggagaggagcggcgttggcaaatgtgaaccatgagaatatcagtgatactgatgagaataaactaaacgcctttgtaac

SEQ ID NO: 208569 - DNA, 405 bp, Homo sapiens
  misc_feature (405)..(405): n is a, c, g, or t
tctgccttttaaaattgttttttgtcttttgttgttcagagaacgaccagagtattttctccccagtgtgtcccaacagattcttaggcaataatttttcttgttgatgatcccgtgctcagtagcacactacattgaagaaccctggccctcaccattgtgtgttggtttctgtgttaatctctgtgatctgaatcatgtcagagtgatgatagattttgtcattttgttgtgattattagtaatgttttactactgtattcattggggctgtgttgagaccagccaaatccatttatagctttactgagccggattgatttgtcaggatttcccaagtgaaagttgggcatattgcccagctcctgctggtggtatcaagggagctgatggaaggggatcctn

SEQ ID NO: 208570 - DNA, 309 bp, Homo sapiens
agactgctgtcgctacaactaagaaagccaaataatacctactttcttatcctctttcctgtgttcgaaaacatacataacacgaagcaatgctttaaaaaggaatagcaagtacaaatatgttagactatcttttctaagtagtttgcttcaacttttttttggaggacatgaggagtggaagaggaaactaatgggagtcggaaagtgggctctagttatttttacaagcgtatttattttgtaagtcaactagatggaggcgaagaaagacgttccagcgttcgggttcacttcacacacacccca

SEQ ID NO: 208571 - DNA, 535 bp, Homo sapiens
agcttcagtggtggcctggggagtgggtagggtgtctcccaatttcccttcctcctcatcgcaggactccatctgttgaggaggagcgagaagatgagtacacgggcagtcttcgctcccagctgctcttcacaatggaaccaccacagttcaggccccacaatcactgccgtcgcaggtctaagtcactcgggctcctgcctctgccctcagccaggaaagcggtcactcaccgctcgaggggatgcctccaccctgaggtaacccaatcagacccctttgcctgtctcatgcctgtaatcccagagctttgggacgctgaggcagggggacgatttgaggccagggacttgaggcttcactgagctatgattgcaccaatgcactccagcaagacctcatctctaaaagaagaagaagaaggaggagaaagagaagaagtagaagaaggaggggaaggagaaggaggagaaagagaggaagaagaagaagaaggagaaggagaaggagaaagaagaagaagaaggagaagaag

SEQ ID NO: 208572 - DNA, 781 bp, Homo sapiens
ggatttagatattttgctcattccctgtcatcagattcaactgacagattcatcacaagatttctttaaatgctaaggtctgaaataaggtctttatttttttcattattcatcaacagatagtgcctactgcagtaggtctgagagttacggtagtataccatcaccttcaagatgtccatcttgtaataaaggagtcagattactaaggaaccaattacaatattgtgaacaaggtcttgtgtgtcatgttaatgttatgcttatggtgctacaggagcacacacatcctaggctttcaaaaggtggatcctgaagggtgaaggtggactcaaaggtagatgaatagttagtgtaaaagctcagaggcagcataacctagaatagtgccaactgcaaatataatgagatatacttaccaaagaatgcaaaactggaagcatccaaacagtgttcagctgtttaaaaagtcatgctttttaattgaagaataatttgccagtagtgcatggcatgtggtgaaagagtgatgtgggagccgtaaatgatgccttagtggtgtcataatcacgtagaatggtggagccagtagttttgggatgacattatagtgaacataccaattccaggtcatttatatgttgtgatgagtaacaacttttttatggtgttgaattgcagttgcgcaaatatccattacatatctcattcttaatttgtatactggaaagtaaaaccaaaacagtgcatctttttttgaccacaactcacaggaagaaga

SEQ ID NO: 208573 - DNA, 500 bp, Homo sapiens
ccatccgctccagtgtccaagaccctgatcttgggtgcacctctggggaccaggcaggttaccgagaggatgggccagcaggtcacacaccttttttcccaggtcctacatcgagtcctggcccttcatggggagagagagggagtgaggagggggtcttgatgcagggacagaagagctagaatctcagcacatgaccatcagtaagaaccgttggctgtgcgtggtggctcacacctgtaatcccagcactttgggaggctgaggcgggtggatcacctcaggtcaggagtttaagactagccaggccaacatggtgaaaccccacctctactaaaaatacaaaaattagccaggtgtgttggtgggcacctgtaatcccagctacttgggaggctgaggcaggagaatcccttgaacctgggaggcagaggttgcagtgagccgagattgcgccactgcactccagcctgggcgactgagtgagaatccgtcttgaa

SEQ ID NO: 208574 - DNA, 151 bp, Homo sapiens
taaatctatatagagatttgtgcatttgtagagtagtggttgcttagggctagagattgggggaaattgggaaatggggagtgactgctaatgggtatagggattctttttggggtgatgaaaatgtcctgaagttgactgcagtgatggc

SEQ ID NO: 208575 - DNA, 269 bp, Homo sapiens
gacagagcgagactccgtctcaaaaaaaaaaaaaaaaaaaaaagataaaaagaatgctgagaacaagactgagatatgggcagatcaaagattctggcaaatacctgaagacatagaggacacatgagccagagtaatggaagccatggctcagagcctgaaaaagagaaatttgtagcagaagtgattctccagcctacctaccaacccatcaaagtgagcaaagagcagatagaagaatataaataagaagctaaatggtcttcttt

SEQ ID NO: 208576 - DNA, 319 bp, Homo sapiens
tgtgtatatattttgtgttataggattagatatttaaaatcctcaaagtttaagaaatttattaaggtttaaaatgttctaacacacatgaatactcacaggcaaactcctcttctgtggaaataaactggcatggtatttagataatatgatgtatgaagctcaactttgaagtaatgagactaattcctataaaccatagaagaaaatcagtcttattaccttatatgtccaccttatacagtgcctctcatctccgtaccctaaatacagggcaaaacactcaaaatgtctaacttttccaaaaggattttaaatt

SEQ ID NO: 208577 - DNA, 464 bp, Homo sapiens
taactactagtcgtggtatgttggtcttatctgacaggagaatgctgtcggataatctcaatagtctacatatgggctatggtatcttggctgtgaacgacatctattgcaacgtcatgactgtttaataaacacatggcattctttagaaagctcattgatgggtttttatctaagcaagtataatgatttgtatgtatctctgacatatcattcatatgtacctctgaatcacaaatggactaggaggaataactgctgaccctaaagtattttcttttagctttatgctagccacaggatcttttcatcagtaattttgaatcatcactatctcaaaaattagtgatggcacaaggtcttaagtccttctggaatcaagcagagcttttattaaattatggtcaatatagagttttagttttatctgtatcctagacttacagatgtccagacacaggtag

SEQ ID NO: 208578 - DNA, 441 bp, Homo sapiens
  misc_feature (31)..(31): n is a, c, g, or t
  misc_feature (33)..(33): n is a, c, g, or t
ttagtcttagggaggatcacttgcaggtcantngtttgagactgcttggcaggtttgagaccaacctcggaagataataagaccccatctctactaaaaatacaaaaattagccgggcatggtggtgggtgcctgtaatcccagctactggggaggctgaggcaggagaatcgcttgaacccgggagatagatgttgcagtgagccgagatcgcaccattgaactccagcctaggcgacaagagtgagactccatctcaaaaaaaagagctatggggagagtggacaatgacagtgatctctgagatggccgatatgggcaagctcctaaagtggtaaagatcaggaccggaaggatggggcagattacagcactcattgtttagaggagggtactggaaagccggttagaccaccgcagcttgaatatgtcttcttcaaa

SEQ ID NO: 208579 - DNA, 315 bp, Homo sapiens
ttcctgggagcagcactgatacagaaatgaattattatagacagaaccaatacatgtaactattcgaatgtccattgacaacttgatgctgaaattgtcagagtattaattactaatttccctgaagaataaagaaatggtgtgtgtgtgtgtgtgtgtgtgtatgtgtgtgatcatatgtgaaacattttataagtacacagggtggtaggcatttaaacaaattgcatcctcaaagcatgtaattaaatattccaaatcacaatttcttgtcgaaataaatgtaatactgtctagaatgggtctttatatata

SEQ ID NO: 208580 - DNA, 263 bp, Homo sapiens
actaatacttgtggatcaaaaggagctatcacagatactagagcaccaacatcgggtggtggcagcacgtttgaggggtgtttagtaggtgagtgtttccattcagacatttgtgcaagcattataccaagggacccagagccaccctgaagctggctgtctttgcagggtgagggctgtgtgaactctaggacagccccagttctcacaattactttctgcaggtctcaattcctcctacagttccagttagatactattca

SEQ ID NO: 208581 - DNA, 417 bp, Homo sapiens
cagcaagcattttggatgacattaatgaaagacctgtgttggcatagtgtgctgcaggaaaggtcgggggtcaccacagccagtaccagaccttaaatataatcctgaaattaaatatgtacgtaaaatagtttctagagcacaaaaggtgaaggtaaaggagagtgctactgatcttttgtgtgtgtgtaataaagatttcgatgtaaaatgtacaacagaaaaaatactgtatttcaataataagaaaaatatataaattattcccccagtgctccaaatcccttctgtgtcatacaaatctttctcatctactttgctgaaagttgctcaagaatatcttattcacctttgactctcctacttaggtttatggatacagaaagtattcaataaagagtgaataatttagtctct

SEQ ID NO: 208582 - DNA, 465 bp, Homo sapiens
atagcatgttccagtttcagtcttagtgtaggtgcccttattacagacttgagataaagtccagggctaaccactcttacaaatttacactttgctaaagggtaccttgggacagagggagtgcagagcagagaaaacctacctgtgcaactgagaaggccgctcaggccacggggacagggcaggaatgctctcaggagtgtcccctgaacctgaacttgatttcacgccatcaccttccacctcttaaccagcatctcctggacagtcagccgagtgtttccatgataccagccatacctgatgccaggagactcgctacacttggaagctcttcaaggtgggactttctgtcttgttcagtttttcattctcagtagtcaacacaggaccttatacttaaaggaaataagtataatgtcctaacaagtgcttctggaataaatgatcatggctgaaatgaga

SEQ ID NO: 208583 - DNA, 536 bp, Homo sapiens
ggcagtgtttgggtatccaggctctgaggctccggcctcacctttccacggggtagaagggaacctctcctgatgacagcagtcgcaaagggccgaccatgatgatgaaatcccaggcggagacgggggaagcagcacgggatcccagcctcaggcctgcacggacggtgttggttgggggtaccttgggacagagggagtgcagagcagagaaaacctacctgtgcaactgagaaggccgctcaggccacggggacagggcaggaatgctctcaggagtgtcccctgaacctgaacttgatttcacgccatcaccttccacctcttaaccagcatctcctggacagtcagccgagtgtttccatgataccagccatacctgatgccaggagactcgctacacttggaagctcttcaaggcatgcttatctttgtgaactgaatcttggagaagcaggattgaaaataagagctatctttgaggctctagcacctacaagagacaccctccctctccaccatggatcacctgtctc

SEQ ID NO: 208584 - DNA, 710 bp, Homo sapiens
cgtggcagtgcttgggtatcgaggctctgagactccggcctcacctctccacggggtcgaagggaacctctcctgatgacagcagtcgcaaagggccgaccatgatgatgaaaccccaggcggagacgggggaagcagcacgggatcccagcctcaggcctgcacggacggtgttggttgggtcactgtcatggctaagaaagcaactccaacccacacactgcaaatatgaaggaccacgaaaggcacgcaggctctggtttgcatagtgaagatgagcgtctgtgttcctaagcatgaaggaggaccacatgagtatcctggacacctactgcatgaatgtattcgccctttcagatctagggacctgggtaccttgggacagagggagtgcagagcagagaaaacctacctgtgcaactgagaaggccgctcaggccacggggacagggcaggaatgctctcaggagtgtcccctgaacctgaacttgatttcacgccatcaccttccacctcttaaccagcatctcctggacagtcagccgagtgtttccatgataccagccatacctgatgccaggagactcgctacacttggaagctcttcaagatgtgtattgaatttgcagaaggcctcttttccaaatgatcaatgaatttcaacaccagagtcttggagtcagacaaggaaactttcagtacataggtag

SEQ ID NO: 208585 - DNA, 483 bp, Homo sapiens
ctcaacagttgcctctctctggcaaaaagtatttggtgtaatatttaaggatgattatgctagttttgcaagtatgacagcttctaatggaatggaaatatttttatgtgctctgcatagacttaaaaagttttatgttactttcacattgaaacagttcatgagcatctatttggcagttagagtattgtactttgacatagtaggtggcactgctattttgattttttttttcaccaagacagtgtgaagatacagatgtgttgggaaatattgaaagacagtttactcagtattatttcactgacagctgcccaggattccaatgaaaatgttatctgtataaagtgatgatggtatctccatttgaccatcacaaatgagataccatcacatcttgtaaggtagtttgtattattgtcattttacagatgagaaaattcaggtacaacaaggttaataaggtgtaaatgatagctaaat

SEQ ID NO: 208586 - DNA, 1019 bp, Homo sapiens
gtgttaaagctgatccttagccagggaagagctgttgagtgattttaactcaggaagcaacaggctgagactggatgtttataaggggcctcctgctgttgtgtgggttgtagaccataaaggatgaagcagagaggcaaatatgtcagacggtagcagctgctatccaggtgagagaatcaaggcctgtgctggatttgggggaataatagggattagattctgagatccctttttccctaacaggacatgatccctccatccctgccctcacccttagcacctggcatagtgtctgggccccagcaggagctccatggatgtgtgggaagtaactcattgatgccaaaaaccatccccaaagtcctgcccacaaggccactgtaggggaagacgcaggagcaggaggaaaagagggcataacagggtgctgcccatctctgtctccctagctattttaggaatctgagggacaggaaaatggggcttaggggagctagaagcagcttgagtcacttattctgtgaacacagcctgttgtctttgatttgccttcctcctcagaaatcctatcccatcagccatgcccagggtttgctgtcctcatccaacttgacccaactttacctcctgccattctgttgactattccctccttgaaatactgtcttcattcagtgtgcacaagccatcgctcctggatttccctcaatcctactctctgctcctcacctactcagccacccctcttcctcaagttgttgtttaatgatagaaactcctcagagctctgcccttacatgtttgcgctcttccctgagtgagcttgtcatactattgtagtgtagtggcttacaaggcagctgcaatccctccctctcttccctgcacacatgcctctttgaaatgtaactgccattcctcttatcataaggtagaatctatttctcagtctttagaactgggcttgctttggtcaatgggtaatttttaaaagtgatgaaaataaagacttaaaa

SEQ ID NO: 208587 - DNA, 124 bp, Homo sapiens
ttatatgcatgaactgcacatatttttttcctcaaaaattctttgtcaatcacctgttatctctatatacattgttgtgccaggttcctgcaaggactcattgagagcaagtgccaaataatct

SEQ ID NO: 208588 - DNA, 391 bp, Homo sapiens
tagaacattttaagcacttaataaatatttgtcaaaggaatggattcaaggtcacctaatctgattccagagctccaatgagtagcttgaatacattactagacagtgagttcttaaggctaggatctcttgtataggatctgcctctctctctctctctctttctctcatgctttttttgttttgttattgccttgcaattccacagtacctgaaaaaaaagtgtccactgaaatgtttgttgaatttagttatattttatagcacctctaaaaggaatggtgaaaattgtggctaactttaaagaaatctgttgtcatagaacagcttctcagtctgaggcctctttgatcttatgcaacaatttataaaatgggatgcatttaccatg

SEQ ID NO: 208589 - DNA, 408 bp, Homo sapiens
cccaaaagtatttggtttgtatgctttgtctgtggcagctataacagtggtaagaacattttgaagatagctttttaaaggaaccactgattttttcaaaaatcatcctgggggaggaattttggcatttcatttgagcagggattttgtcagaaaatgtgttttgatggtaggtcagcagcagtgctagtctctgaaagcacaataccagtcaggcagcctatcccatcagatgtcatctggctgaagtttatctctgtctctcaggataaatccctgtaggacaaatccctactatcatttctaccttttggggtgacatgtggaatcatacaaaggcttaggaagaaatacgtttgtttaaaccaggatgctttacttacttgaagtgacttcaatctagatttc

SEQ ID NO: 208590 - DNA, 409 bp, Homo sapiens
ggctctccctgtgggtagcaacaagagaaaatgaggaagaagcaaaagtggaaaccctgataaacccatcaggtctcgtgagacttattcactatcaagagaatagcacgggaaaggctggtccccatgattcgatgacctcccccgggtccctcccacaacacatgggaattctgggagatataattcaagttgagatttgggtgggggcacagctaaaccgtatcacttccctaatgtactgagagaaaattgtcaccctgcacccagcgtgttcagatgaggctctgttttcagtggaaggtgtctgtgctgagcagatgtctagatggtcgatggccccttcctgcctgagcctgtcatgtgggctgtgtcctccatctggcactgttgtgcacacacaggtccc

SEQ ID NO: 208591 - DNA, 802 bp, Homo sapiens
aaaaaataaactctgacccttcttatattccttatccctgatgatcacatgcttccctgcatccctgaatttaaaagatgaaacacatggcacatgcctgtagtcctgtagtcctacctactccgtagactgagacgggaggataccttgagcccaggagttcaaggccagcgtgggcaacatagcgagactccatctctttaaaaaaagaagtgaaacacaattttgagaagtgaggatgagtttctgttgcatactttacttggtaattaaaaaaacttaactattaaagtaagatggtggcttatggctataatcccagcactttgggaggctgaggcaggaggatcacttgagcccaggagttcaagaccagcctgggcaacatagtgagaccttgtgtctacaaaaaagttttttaattagccaggtgtggtggcacccacctgtagtcccagctacttgggaggttgaggcgggaggatcacttgagcctgggaggtcaaggctgcactgagcgatgatcatgctgctctactccagcctgggcagcacagcaggcccatctcaaacaaatgaaaacactatttgctgtcatctattaaagtccatgtttatttaggtaaaaaatattctgacaaaactccacttggattgaccctaactggagtattaaagcattataggcagcgtcgtctcctggatacttacctatggggaatattttagattctgactgcctcggtctaatagcctcaggggttcgcaccaagcaagaccatggcggctccagcgccgggtg

SEQ ID NO: 208592 - DNA, 434 bp, Homo sapiens
ttgttttgttttgttttgttttttcagatggagtttttgctcttgttgcccaggctggagtgcaatagcactccgcaacctccgcctcctgggttcaagcgattctcctgcctcacactcccgaatagctggaattacaggcatgtaccaccatgcctggctaattttgtgttttcagtagagacggggtttctccatgttggtcaggctggtcttgaactcctgacctcacgtaatccaccggcctcggcctcccaggcatgagccaccacgcctctaatgttaaaatttatggaaggccattgttttggactgagctcctatactaggccccaacagaccaaaccaacccagaatggaggcactctcacgtaatcaaactgaactttaaaaagtgccagtttaaattaaaaatgaaaaccaggaccaaaaac

SEQ ID NO: 208593 - DNA, 195 bp, Homo sapiens
tccagagtgtgtggccagaaagaatgacaagtgtctcccattagctcttggcacagtgcctggctcatatgtgcccaatgagtagccattccctggagatgtcgtttaggccccaaagcaagaagattcctgtgccccaatcattcttcatctctctgggccaccctgttactattccaaaaggtttggattgaa

SEQ ID NO: 208594 - DNA, 618 bp, Homo sapiens
ttctaaccagactgggagttactgctcaatttttctgacatgtgtttttccagattgtatttggataacttcaggcattgtgaaaatgaggaaaccatggagcttgttctttctatctttgtaaaatgatgaccatgcaaaaggtctctttttacactaaatctgaatctctctctacaagtttcacacactgaccttaggaaaaccccaaaggcaaaacacaacacatttatgacctcttccataaaacaatcttcaagaatttgaagacaggttatgttccttaccaagtcttctctatctcagcttaaaatatacaaaatgctttcaatttccttcatagcatctccttatgcttttccccactacctctctttttgaatctacaaggacactctattaaatggaactcaagcttcttggctgatttaaatggaattaactggattctcacattactatttctaaattaggttttattatgataaaagctcattctctctatatttatcattattgttatttttatcctataaaactaattaccttattattatataaattaaaacaacatagagttgtaaacataatgtatgtgcttcataattctagcttctg

SEQ ID NO: 208595 - DNA, 377 bp, Homo sapiens
atttcataatattcagaaactaatattagctattatagaaatttttcttatttttcctttttacaccatatatacattacatcctgtgtcaactacagctcacttctgtggttctgactattcaacaagaattcctaggtctgtcctgtgtaccatattgttattctaattatccatataattatactgcattaaacactgctatctgtgaataggctcatttattttactaagttcaagataatactgatattttttaattctgcaaaaaatataaaatgcatttttatacctactacccagaatgagcaaatattgtctttatatttcctttaaattgctttttttaaagaaataaaaattacagatttaaccaa

SEQ ID NO: 208596 - DNA, 551 bp, Homo sapiens
gaataaacagggtttaactgttaattgttacattatgctggaaaccacttaaacacgacactaaggtggtcactgtataagtagccctgggaaagaaggcccaggggacattgtaattaatatttttttgtaatagacttttgccctaacctgggccaaaaacgccatgactttctatcctattaaaaagtcagtaacactgttaatgtggagattgggagtaacaggcagtctggacttgggtctggacttgggctggcgcatgaggtgctgccgaacggcagttcttttttttttccttttgagacggagtttcactcttgttgcccaggctggagtgcaatggtgcgatctcggctcaccgcaacctgcgcctcctgggctcaagcgattctcctgcctcagcctctggagtagctgggattacaggcatgtgccaccacgcccggcttattttgtatttttaacaaagatggggtttctccatgttggtcaggctgatcccgaacttctgacctcaggtgatccgccctcctggcctcccaaagtgc

SEQ ID NO: 208597 - DNA, 315 bp, Homo sapiens
cagagagagcccaagggattcagtgactgacaagcaaccagctgggggcacctcatctccttggctggggaatgatcttgaccacatgaaatagaagtgtattgggatgcttataggtgagacgagattcagaagcagtcgtacctcctctatgcaaaccagttggcctatggaatgtctagctgccttccatccttctagatatggtcagcagcagcaacttgtatgtccccagttctaggcacccaactctggagaaacaggtttcaatactaaacaacaggagacaggtttgatagtaatttcaaacccacc

SEQ ID NO: 208598 - DNA, 347 bp, Homo sapiens
taaatccccagtcactacagggcaattcaaactatacaacatggcatacaatctgtcctcagtttatcttttcagtttcagatccaaataaatattcctccagtctgctatattatgttctagtcactttgctagctgttggctaacccatatactttaacatcactactgtttatgcttttccttctggctgtgctcctccatgacctgtgtacttttaacattttgtatatactctaacatagcaattaacacaccatattatagtttgactgtcaattattcgaaacagcagttatggtttattcacatgaaaatttcccaatccttgggtgggcgcgtggctc

SEQ ID NO: 208599 - DNA, 852 bp, Homo sapiens
agtattttttttttttgtatttttagtagagatggggcttcaccatattggccaggctggtcgcaaactcctgacctcaagtgatctgcccgccttggcctcccaaagtcctggtattacaggcatgagccatgacagtcagctattttttttggcatattttaagggacagaaattatgctttttaaatgttgcttattgcttttcaaggatttgattcttataagctacttcttcatttattaatgagatttaagaaagaaatcaggttacaaagttatgagcaattgtctctggaacccagaagttggttttaacactagagtttctgctgcagggcatttttactggactgtgattcctagaaggcaagtataagcactgtttttttgttgtttgtttgttttagaaacaagttcttgcgtcacccatgatagagtgcagtaatgcagtcatagctcactgtaacctccaattcgtgggcttaagtgatcctcctacctcattcttttgagcagctgggactctaggcatgtaccaccacacccagctactttataaattttttgtagaagtgtggttttgctgtgttgtccagaatagtcttgagcagtcttcccacctcagcctcccaaaatgctgggattgtacaggtaggtgtgagccaccatgcctatccctgctgtttttttttgagacggagtctctgttcaagcaattctcctgcctcagcgggaggctgagagaggagaatcagttgaaccagggaggctgaggttgcagtgagctgagatcacacaccactgcactccagcctgggcgacaagagtaaaactccatctcaaaaaaaaa

SEQ ID NO: 208600 - DNA, 691 bp, Homo sapiens
tgctgagattccaggcatgagccaccacacccggcctgtccctactttttttaatgccaagatttgtgtatttcatcttcagttgggattcatggcatctgtcaataattgatgtgaacttaaatggcaatttacctataaaaagataacttactactcttcttttaaaagtctatatacttctgtcatttgctggaaatgaattattagtctttattcagcaaacatttatagaccaaatagtgggtaccaaaataagtactaccctgcagctgcttgatgatggtaataactaacatgtaaatctttaataaacagtgtacattcttaatctgtccatcaactcggtacagtcagtattgttgtccgtatttcacagattaagacaccagcctagaggccgagtgcagtggctcacgcctgtaatcccagcactttgggaggcccaggcgggtggatcaccttaggtcaggagtttaggataagcctggccatcatggtgaaaccccacctctactaaaaatataaaattagccaggtgtggtggcacgcacctgtaatcccagctgctcgggaggctgagagaggagaatcagttgaaccagggaggctgaggttgcagtgagctgagatcacacaccactgcactccagcctgggcgacaagagtaaaactccatctcaaaaaaaaa

SEQ ID NO: 208601 - DNA, 563 bp, Homo sapiens
ctttggtgccaggtatttttggatttcagaattttgaggaaagatttgttttagattttggtaagagtaatcaaacacaatattaatgtggaacatggatagtcacattaagtgagagaaataaaagataaaaatagtctcccatcagtgctcagatgaagttttgccattatatattaggattaagctttgccaccaacatagttatagaactttgagttttcagagattttaggatttcagaatttctataagaagtcggtttcaggctgggtgtagtggctcacgcctgtaatcccagcactttggaaggccaaggtgggtggatcacgaggtcaggagatcgagaccatcctggctaacacggtgaaacccatctctacctctactaaaaatataaaattagccaggtgtggtggcacgcacctgtaatcccagctgctcgggaggctgagagaggagaatcagttgaaccagggaggctgaggttgcagtgagctgagatcacacaccactgcactccagcctgggcgacaagagtaaaactccatctcaaaaaaaaa

SEQ ID NO: 208602 - DNA, 502 bp, Homo sapiens
ctttggtgccaggtatttttggatttcagaattttgaggaaagatttgttttagattttggtaagagtaatcaaacacaatattaatgtggaacatggatagtcacattaagtgagagaaataaaagataaaaatagtctcccatcagtgctcagatgaagttttgccattatatattaggattaagctttgccaccaacatagttatagaactttgagttttcagagattttaggatttcagaatttctataagaagtcggtttcaggctgggtgtagtggctcacgcctgtaatcccagcactttggaaggccaaggtgggtggatcacgaggtcaggagatcgagaccatcctggctaacacggtgaaacccatctctacgggaggctgagagaggagaatcagttgaaccagggaggctgaggttgcagtgagctgagatcacacaccactgcactccagcctgggcgacaagagtaaaactccatctcaaaaaaaaa

SEQ ID NO: 208603 - DNA, 2011 bp, Homo sapiens
gggcagtgaggggcagcagcgcttggccgaggcccctgcggcgtcccgtagcctcgcgttaagccttgttcagagcgggggcttttgctgtcgcagtgggttccggagagtgcaggtgatctcgcagcaggtttcttgtgctggccgcgctcgccggacgaagaagagaagggcagttgggcctgcggccttggcgttcatgaggcctcagagagctccggaggagctacaactgtgagggggctgctagagttcttctcctcgggtgtgtgagaagcagcctaggaccccgggttcggggagtcgcaaagaaggccgtaagggcttcacttccttctccggaggcctgccttctgcgcgtcgattaacaccgcattctttcccacttcctctcaatgttttcttcatatatctggaaatatgatcagcgcccctgacgtagtggccttcaccaaagaggaagagtatgaagaagagccttacaatgagccggccctgcctgaggagtactcggtgccgctcttccccttcgccagtcagggtgctaacccctggtcaaaactgtccggggccaagttttcgagggacttcattcttatttccgagttctctgagcaggtgggaccccaacccttactgaccatccccaatgacaccaaagtttttggcacttttgatctcaattacttctccctgcgtatcatgtctgtggattaccaggcttccttcgtgggccatcctcctggatctgcctaccccaagctgaacttcgtggaggactccaaggtggtgctgggagattctaaggagggcgcctttgcatacgtgcaccaccttaccctatacgacctggaggcccgtggcttcgtgaggccgttttgcatggcttatatctctgcagaccagcataaaatcatgcagcagttccaggagctttcagccgaattttccagagcttctgagtgcttgaagactggcaacaggaaggcatttgctggggaacttgaaaaaaagctgaaagacttggattacaccaggacagtgctacacacagaaacggagatccagaagaaagccaacgacaaaggcttttactcatctcaggcaattgagaaagccaatgaactggccagtgtggagaagtccatcattgaacatcaagacctgctgaagcagatccgctcataccctcatcggaagttgaaggggcatgatttgtgtcctggtgagatggagcacatccaggatcaggccagccaggcatccactacctctaaccctgatgagtctgccgacacagacctttacacctgcagaccagcctacaccccaaaacttatcaaagcaaagtccaccaagtgttttgacaagaagttgaagaccttggaggagctctgtgacactgaatatttcacccagaccctggctcagctcagccacattgaacacatgttcagaggagacctgtgttacctcctgaccagtcagattgatagagcacttctaaaacaacagcatataacaaactttctctttgaagactttgtggaggtcgatgacaggatggtggagaaacaagaaagcataccctctaagcccagtcaagacaggccgccttccagttctctagaagaatgcccaattcctaaagtgttaattagtgttggttcttacaagtccagtgtggagtctgtgttgatcaagatggagcaggaactgggagatgaggagtacaaggaagtggaagtgactgagttgagcagtttcgacccccaggaaaacttggactacctggatatggatatgaaagggagtatcagcagtggtgaaagtattgaagttttgggcacggagaaatccacctccgtgctttctaaatctgacagccaggcaagcctcacagtaccattgagcccccaggtggtccggagcaaagcagtcagccacaggaccatcagcgaggacagtattgaagtcctcagtacctgcccctctgaggccctcatccctg

SEQ ID NO: 208604 - DNA, 540 bp, Homo sapiens
caaatgcggtctcactgtgttgccgaggctagtttcaaacttctggactcaactgatcctcctgcctcagcctcccaaaatattgggtttataggccaggcataagggactgtgcgtggcttaagtttccattttctaatgtaaagacaaaaaggcgtgaagtgtccaaagaggtaaatgatcccaaactcattttcattgccttttggacatgtttttgtattttgatattcaggtgtttaaatatcctctgatgttgagttaaaaaagaacaaaaattgaagccatagtatgacataggatgctggaaatgcacacagctggtgtttccattttgattctccctacctgtaactgctccctactgggaaaactttgggtcctcacaaagtgagctagctttctttcaaactttgcttggagggtaacagtgccaggaatatcagaagtgcctgatgcatgtagatctatttatgaaagcttgcttgaatggtttgctgtaactagtaagagccactttttataaaagtgcacataagg

SEQ ID NO: 208605 - DNA, 1177 bp, Homo sapiens
gtgatggttaccatggttattcagagtgatgggtggagaaggcaacaagagggaattggggggaacatctggagagatacatgatattatcaaggtctaagctttcattagggatgctggcttcccaggtgcttagaacattaataaaggttaactgaataactagaagagggctatgcacagacagatgttgagagtcttccatgaaccaaggattctatctaattatgtacacttgagggtcaagtaaaacaaagaaataaacaaaagtcaggatgctgctccactgggcctttgttgttccccttacacaacccacttgatttcctgctcagccttccagactgagatctggtcttgccttctctatgaagcctctactgcttgtcccacagctcttcacccacctcttgcctgggatgtcctttgtgctctcacagcaccgtgaacacactacttccactcatcctccacgctgtcatgaccatgtgtctgtgagcctgtctttccccgacagtgagctcctctgaggctctatgtgtcacatggacagagtgatggtttttggctgaatgcaccaaagtgtcacttccctcacccctaaggacattatcttgccttatctatcttgccaaatcctgacatgttttagtccccaattcaaactggctctttttgaggaacttacagtgaattctcaaccctctgtccctgcccttcctcctctgggcctcctcctctcctccctggatcagtctgccttcctccagttctttctccacactgagcaccagagatctttccaaagagtactctctccaggattaaaaccctcctgtggtcctcactcttcaagatcagtgagactcctcggctctttcctgtggggctcgtgctgccatcctctcacctaccctgcaactgctgcctcagggccactgaatatgccatgtgtcagcttcactcagggaaagctcttgaccctgtaccccaaagacagggagccactgcaatgcgaactctgctctgagatcatgtgttacccaagcacaccacactcctcacaactcttaaccagctcaagttccagcacctgacacagggcgtggcacagaatgggtggcatctgctgaaaggaagacagggactcctatttttgtatatattttataagaca

SEQ ID NO: 208606 - DNA, 535 bp, Homo sapiens
caggtacgaccatgaatacggattcactgttcgtcgttttacatcaagattctgctaagaccttggttactgtttttctgggtgtgttttttacacctagaatccctccccagtctgccttcctccagttctttctccacactgagcaccagagatctttccaaagagtactctctccaggattaaaaccctcctgtggtcctcactcttcaagatcagtgagactcctcggctctttcctgtggggctcgtgctgccatcctctcacctaccctgcaactgctgcctcagggccactgaatatgccatgtgtcagcttcactcagggaaagctcttgaccctgtaccccaaagacagggagccactgcaatgcgaactctgctctgagatcatgtgttacccaagcacaccacactcctcacaactcttaaccagctcaagttccagcacctgacacagggcgtggcacagaatgggtggcatctgctgaaaggaagacagggactcctatttttgtatatattttataagaca

SEQ ID NO: 208607 - DNA, 629 bp, Homo sapiens
gagctgactagaggatcccaacacattaccctcatcctgagtgggatggcagtggatgctagtcactgtcactgggactacagcctgcacttctccttcatgagagttaactccctcaagactgagctccacatttactactatggagctgtcaattctgcaaatcttgtttctttcatccgtggctccagctcctctaatgctcctcctgcccagatgctgtactccctcccatccctcatcaccagttgtttttcctttacacactgatattgctaatgctgttggataccagcaattagaattcctgatggggaacaaactaggacatatgtcattgatatactctcaaaaagggtttaggagacaacttagtcctgagccagccctgccctttgtgcttaaatgagacaggtgggtggaaagtccttgaaagaaggaagggaaaactaccatttataagtagcactggagggcataagtcatctcctcctatgctgttggtgttggggtagggtgaacagacatagtacgagagctggagagagccttaagaaatcttagtcaattatccaagtctcccatttctttttctttctttttttttttttttttgaggtggagtctgg

SEQ ID NO: 208608 - DNA, 283 bp, Homo sapiens
tgttcatgcaacatttactggatacccaccatgtatcagacactgctggtgtttgaacagtgaatgagatacatcaagtcactattcttattcagtgaagaagacgtacaatgaacaaatacacataaatatatgataaaattacagatagtgttaagtgctataaggacaaagtatggtatgggaatagagagtgatgggggagattctatttaagatagtgtggccagattgggcacaatgactcatacctgtaatctcagcactttgggagacgggggga

SEQ ID NO: 208609 - DNA, 237 bp, Homo sapiens
ggtgaacattggtcagaaggattttttagacagtataagtgagctacagggaggacctgaactaagtcagtagcaggggctagagataaggggacatatataagggacgataaggaatccacaggatttcgtgactaacgagacatgggggatgtgaggccaagagagaagacggtgaggatgcctaggattctggcttaagggcctgggacaatagcggtactgttcgtggtagag

SEQ ID NO: 208610 - DNA, 413 bp, Homo sapiens
aacagtgtggcccaagctgaaattcaaaaccaaatctgggaaaacggaaaggttgatgatctttcctagggtctgtgtgcataaatgtaaatgtatggataatattccaaggagatttctaaagaaaatgagaactgttttacacagaggcctaaaatactagagagaaaagtgaacagcacaaggcttaaaatattatcataaagccagaagttgacaggtaaattttataataggttttatgagactcagtacagaataaactttaggattcaggttcacagggaagtaaaattgcagggaataatatcaccattcttccatacagaacccaacagtgccctggctcctggaatgccaggaaattgaagaagctggaaaggcacctttggtatttgcaaaaggcgttagat

SEQ ID NO: 208611 - DNA, 849 bp, Homo sapiens
agtgcagtctaggcctccgcctccgttaccctggagcccaggttaccgccgctgccacccaggagccccgatcctcgcctctgtcccatccttgtgttcaaacctcccgcatctcggcaacctcggcacccgcccggcagcctccgcaggaaccaggcacccgctctttggcggtcagacgccgaggccccagctgggagtttggtcctaagagggaaggcaaggaggcgggacgccgcatcggctctgctgaagagcctgcgggttggagggcaaaaaagtttatcttctggatgccaatgtgaattgtggtctacaaatacattgtggagaaaatagattgcacagaaatgaatattatcaggatctgaagactgtgaaaatgtttttcagtattgtcatagtctcctctggagaaaataatctgtgaaattatgtgaatagagaccatttttcaaaacaatgggggaaagagcaggaagtccaggtactgatcaagaaagaaaggcaggcaaacaccattattcttacttatctgattttgaaacgccacagtcttctggccgatcatcgctggtcagttcttcacctgcaagtgttaggagaaaaaatcctaaaagacaaacttcagatggccaagtacatcaccaagcccctcggaaaccaagccctaagggtctaccaaacagaaagggagtccgagtgggatttcgctcccagagcctcaatagagagccacttcggaaagatactgatcttgttacaaaacggattctgtctgcaagactgctaaaaatcaatgagttgcagaatgaagtatctgaactccaggtcaagttagctgagctg

SEQ ID NO: 208612 - DNA, 1004 bp, Homo sapiens
agtgcagtctaggcctccgcctccgttaccctggagcccaggttaccgccgctgccacccaggagccccgatcctcgcctctgtcccatccttgtgttcaaacctcccgcatctcggcaacctcggcacccgcccggcagcctccgcaggaaccaggcacccgctctttggcggtcagacgccgaggccccagctgggagtttggtcctaagagggaaggcaaggaggcgggacgccgcatcggctctgctgaagagcctgcgggttggaggtgggctttgaagtgggcgtggagacggcgggggaggtggaggtgcgagtataaatgatcaaccagaaattatcttcaaaggaataaaaccagaagtatgtaaataaaaagcccaagataaagaaacagaaaagctgacactacatgaagcagagggcaaaaaagtttatcttctggatgccaatgtgaattgtggtctacaaatacattgtggagaaaatagattgcacagaaatgaatattatcaggatctgaagactgtgaaaatgtttttcagtattgtcatagtctcctctggagaaaataatctgtgaaattatgtgaatagagaccatttttcaaaacaatgggggaaagagcaggaagtccaggtactgatcaagaaagaaaggcaggcaaacaccattattcttacttatctgattttgaaacgccacagtcttctggccgatcatcgctggtcagttcttcacctgcaagtgttaggagaaaaaatcctaaaagacaaacttcagatggccaagtacatcaccaagcccctcggaaaccaagccctaagggtctaccaaacagaaagggagtccgagtgggatttcgctcccagagcctcaatagagagccacttcggaaagatactgatcttgttacaaaacggattctgtctgcaagactgctaaaaatcaatgagttgcagaatgaagtatctgaactccaggtcaagttagctgagctg

SEQ ID NO: 208613 - DNA, 385 bp, Homo sapiens
ggccatgaggctggggatgagggcagaactaaaacgtggctgggtgcctcgggcttcccatatgtcttttattaagaaaccatgccctaatgtgtttcttccattacgctcatttgttctgtttcagagttaggaagagggtggagggagcagagaggacgttcacggcgtgtcagattcttctgctcatttaaaggaaactttccacccaggttcccgctttgcttttaaggtggaaggttagacagtgagaagatggaattataaactttacatgaacagttcagaaaagagacacttttcattatactggacagatgttttctgctgtaggggagaggaaaatgggattaaaaagttttcgccttctctgtatctggagatc

SEQ ID NO: 208614 - DNA, 267 bp, Homo sapiens
tgctaggattacagacatgagccaccgcgcccggcccactccctttatttttataataactcttagattgtttcagttcacgtttcctcttagaaagaatttttgctgtattcagtcagttacaggtctcctgtaaaaggtctcctccaccctgtttcagcttggctgtgctctctcagagtttctcagtgggcgtgctttcggcatgtggtgtggacacttcttcactgtgtggggcatattacaagacctctggcctcctcccac

SEQ ID NO: 208615 - DNA, 632 bp, Homo sapiens
agacataccttttttcaaattttgaaaaaagtctgtgagtgtgtggcagttaccagaaaactttccagttacattgtttttgctccaagtgaaattggttaagattaattatattttccttttttaatacatggcacttgatccatcatattcttggctagaaataaatttttaattaatatttgcaccaaattaatagatgtttcaaaccacaacatggtggttctggaattatagcaagggacagtatgctgggttatataattaaggcttagcaattatctagtggattaaacagaccattgtggaactaactgcttgctttattaagacggtaatgattacacctgagaatgtaatgctggcccgatgagaaatttgaccttgctgccacatttcttgagttttaaaggaggcagaggtaagaaatgaggagatcagagaacagaggttccataaatcagtaccacagatgacaggagcatggataagtgcataattgtagactcaggataaagcaaagaatttagagctattacaaagtaatttgtgtgccataactctccgggaaattataattatcagagaaataatagactcatagtcaaacagcttctgaccatattacttgg

SEQ ID NO: 208616 - DNA, 402 bp, Homo sapiens
ttaagtttcctattaccttgagccttgctacattgtgaacaaaatattcacagcctgatctgggagatgggcatgtaactgacaaacacctggggcttggctctgtgctctgggcttgggaggcctggactcagttgtcctcacaggctgcaattaaagagctattagtaggattttgtacttggatgtttattctccctgcccccacaccctaggctggccctggaggggtacatgaatagagggtgggacccagggttctgggtggggagaccctgcactctggcttggctaacactggaggcttggctaacaagggaggggcttggcttggctagcactctggcttggcaacagggggccacgggccttctccagggtctgatcagatccatctctgga

SEQ ID NO: 208617 - DNA, 314 bp, Homo sapiens
cataaacctttacatatctgtcaaattatttttcttctaggtctctattcttaacatatccctgcaaacaaagatgttccctctttctgggcacctgtattaagtcattctgtctgcgagatatttacaagcctacattcattaattacatttttggatgaatttccattcatgtttcatcgttagacaacctggaaaccaactaaggttccagctctccaagtcagcaacaggatgggtcaatgactccctaagcagtggtatcaggcagacccccgctcctagacaatgccatcctggttatcaacatgcac

SEQ ID NO: 208618 - DNA, 144 bp, Homo sapiens
cttaactacacatatttgataggaagtgtccctttaactgtgagaaaatggtttcctaatgatactttttgcttttcactcatgaaatcactctgggttagcttctcatcagtccataaatgcccatacctggttctgtcaaca

SEQ ID NO: 208619 - DNA, 246 bp, Homo sapiens
ggctaattatatagtctaaaataatctctaagttaaaaatgtgttcagcaataagaaggagaatatataggcactttttacttccaaatagtttacaccaacaaggcaaatcattttcttaagaacttgaattttaattctggaaatgtgtctctgcattattttttaaattctgaattctgctgctgtttctgttaaagattttgaagtaattgttttaaagacaagaatcgtggggtatttggg

SEQ ID NO: 208620 - DNA, 392 bp, Homo sapiens
taccagatcctggtcacaaacgcacaatttcctgcggaaatcaggaacctcgagccggttactcagctgtatgtcagtgtggatgccagtaccaaagacagcctgaagaaaatcgaccgcccactcttcaaggatttctggcagagtgggcggtcgattttcttcaggctgacgctcgtgaaagcggtcgaccggggattccgggggtctctgaactagcacatcaagcagagtgagggcagggccaccacaccaaaaatgggatcaaacaggagttacaagtcgaagacagaaatatgccctgtccccagcctcttccctgtcttctccccaacactggcagccaggtccctaatccctgccaggactggaagagccatctgcaggaacct

SEQ ID NO: 208621 - DNA, 1892 bp, Homo sapiens
cctctcactcttttttttttttaaccgctacgccacagtccccgggagaattcagatcccaaccggggcttccggattctgtagtggctttggcctgtgtctggtctgaggacgcccggaaggcattgcactgaggctaagggaaaggtctctggagggagcctcaggaagagcaaatggaggccagagactggcaggagcgcgccagcgcaggatttaatcccgacgagcggattcagagccgtgcttatataaagcttcaggaagcgccgttccgacgatgaggtcgacacgcgagaggcgacctcaagagcggcggcgccagggatctgtgcgccaagggaggacgggagggagcaggttcgccataattcctggctccaggctctgttttgttggaccgagccactgtattttagctcacacaggagaattctggccctgggaaaattggtctcagcatgctgccaagctttctcatggacgtcagcgaatcccaacacactgtcggtcaaagccgtgctggaagaaacaaaacagttctccctcggtagaactgagaggggattggtccagggcccccgccgataccaaaatccaggttgctcaagtctctcatagaaagtggcgtagtatttgcacataactatgcacatcctcccgtgtactttaaatagtctctaaattacttcgtaacacctaatccagtgtaaatgctatgtaagtaattgttatactgtttttatttttactatcttttgttgtacttttttttaaaaaagaaattcatttgtttaatattttcggtcttggggaacccgcgtatatggagggcctgctacatagagaagactgagggatattctgtgcatccgtttctacggatcctctaaatcggcctttgttttcagccaggatttagtgcccagctgtgtcctttggaggccccacatggagctagcaaagtttgctaaatcgggttttgcaagaggactgtctgctccatactgggagtagttaccgcaaactgccctatgaaattggttggggttcttactgttagcatgtttattactttatcagggctctctgtaggagagtctatgagaaaatcttctggtttctgctgaaagaatcgtgttttgttggggtttttttcccgaaaaatattatttttaaaaactcttctgtgccctgtttaatctctcccttggatccaccttctgtgtgctcataaatcgtaaatctgtattcagacttctggactcgagacacgtagatccacctggtggttcttcagtcattttaagcccaaaactcaaaatctcccgaaatcaaaatgtttaaacttataatctccagggtgtgactcacgggggatgaggggagcaattctctccctccccgcataaagctggttctcctgtctgctcattgaacggttccactgcgcatcacagcatctacatgcctaaaccaacaccccagcattggcaacagatatcttcctctcccttggctgcttcaggacagggaagaaacatgcttgcccttttctgactctttagtaactctggccgaatctatcacattattttacatctctttacatcttactactcccccatcttggctgtgtgttccctactggcagtgatttttgtttattcatttttgtaaactgacacttagttcagtgtccaatataagctcaacaatagtttataaaggaaaagttcctgcctttgattgcttttaaacactattagaaaagacataaccaaattgcaacatgataaaacaaccgcaaacaaggctgagagaagtggtgatttctggtgtcagagggcacaggaccctgggcagaatcagagatacggtgtctgtgcagt

SEQ ID NO: 208622 - DNA, 1727 bp, Homo sapiens
cctctcactcttttttttttttaaccgctacgccacagtccccgggagaattcagatcccaaccggggcttccggattctgtagtggctttggcctgtgtctggtctgaggacgcccggaaggcattgcactgaggctaagggaaaggtctctggagggagcctcaggaagagcaaatggaggccagagactggcaggagcgcgccagcgcaggatttaatcccgacgagcggattcagagccgtgcttatataaagcttcaggaagcgccgttccgacgatgaggtcgacacgcgagaggcgacctcaagagcggcggcgccagggatctgtgcgccaagggaggacgggagggagcaggttcgccataattcctggctccaggctctgttttgttggaccgagccactgtattttagctcacacaggagaattctggccctgggaaaattggtctcagcatgctgccaagctttctcatggacgtcagcgaatcccaacacactgtcggtcaaagccgtgctggaagaaacaaaacagttctccctcggtagaactgagaggggattggtccagggcccccgccgataccaaaatccaggttgctcaagtctctcatagaaagtggcgtagtatttgcacataactatgcacatcctcccgtgtactttaaatagtctctaaattacttcgtaacacctaatccagtgtaaatgctatgtaagtaattgttatactgtttttatttttactatcttttgttgtacttttttttaaaaaagaaattcatttgtttaatattttcggtcttggggaacccgcgtatatggagggcctgctacatagagaagactgagggatattctgtgcatccgtttctacggatcctctaaatcggcctttgttttcagccaggatttagtgcccagctgtgtcctttggaggccccacatggagctagcaaagtttgctaaatcgggttttgcaagaggactgtctgctccatactgggagtagttaccgcaaactgccctatgaaattggttggggttcttactgttagcatgtttattactttatcagggctctctgtaggagagtctatgagaaaatcttctggtttctgctgaaagaatcgtgttttgttggggtttttttcccgaaaaatattatttttaaaaactcttctgtgccctgtttaatctctcccttggatccaccttctgtgtgctcataaatcgtaaatctgtattcagacttctggactcgagacacgtagatccacctggtggttcttcagtcattttaagcccaaaactcaaaatctcccgaaatcaaaatgtttaaacttataatctccagggtgtgactcacgggggatgaggggagcaattctctccctccccgcataaagctggttctcctgtctgctcattgaacggttccactgcgcatcacagcatctacatgcctaaaccaacaccccagcattggcaacagatatcttcctctcccttggctgcttcaggacagggaagaaacatgcttgcccttttctgactctttagtaactctggccgaatctatcacattattttacatctctttacatcttactactcccccatcttggctgtgtgttccctactggcagtgatttttgtttattcatttttgtaaactgacacttagttcagtgtccaatataagctcaacaatagtttata

SEQ ID NO: 208623 - DNA, 339 bp, Homo sapiens
  misc_feature (5)..(5): n is a, c, g, or t
gaggntccccgtgagacgacctgatgtaaaggtggttcaacatacataaatctataaatatgataaatcaccttaacagaatgaaggacaaaaaccatatgataatctcaatagttgcagaaaaattattttacaaaatccaatcccctttcatgataaaaaatctcaacaaattaggtatagaaggaatgtatctcaatacctgaaaggacatatatgatggaccatagctaatatctcattcaatgagggaaagttgaaatttttcttttctgagattaggaacaagacaaggattcccactcttaaggtcgtctgacggcaaggctcgtctcacgg

SEQ ID NO: 208624 - DNA, 297 bp, Homo sapiens
gcgacagtgtgagactccgactcaaaaaaacaaaaacaaaaacaaaacaaaacaaaaaccttcttgattatctttagaaaatccacataaggataaaattaaactggtcaagtttcacatctactgtcaacaggcaaatcacagcacagatttttatgagccacttctagtagcaaggatttggattcaggctaatgagactaaatgggatttttagagagtaggttaaggttaaaaaacagaaaagggtaaaaaacacaaaattatacctacacttcatttataatcatgtaaaat

SEQ ID NO: 208625 - DNA, 617 bp, Homo sapiens
gtgttgtgggcacagaccaggaccagcgctgagagcttctagcaactctggaggccaaccctggaaatacatggccccaaaaagaaaccagagtttacgacataaacttactagattcctttaattcctgccctcatcatcatttgcctagattattgcagctacctcctaattgagcttctgcctctagcctcacccttttgtgatacatctctcagacttcagccaaagtggtctttttaagccatagtctgtttgtgtcactttcctgctttctgaccttcatttactacttgtaggattaagtcctttaatgtagcataaaaagaccagtaataacctccagtctcatatattgcctgtcttctccagtaattccaataacagtaaacatgttgttttcccctcattgcctttattcatgctctcccttggcccaccccacaccttccatgcctgtaaatctcctgttcatctttcagcatctaactcacattatcatctctacctggaggccatctcagaaacctcttcctctgtgccttccctcataccaaggacatatcaccattgtgcatatcacactatattaacatattcgtctgtttccttactca

SEQ ID NO: 208626 - DNA, 400 bp, Homo sapiens
agccatcaagggctgaatgcctctccagttgccagaggaggagtggcttgtagagcggatgttcccagtctggcagaatcttctgtcaagtgttccctgagttgggctgccagggggcaggtgttgaacagtgaggaagtcctctcacctgagcagcttctgatgcaagaggggtgtcgtgagtgcctggaatcctatgcctgtgggtggagcgtgaacttagcctcttccctgagggtaggcagcatgtcataaccacttctggctgcccatggctggtttggggcaatatgccaagatgtagttttgcctatttggtttgctttttcctttaaaatgtacaaaagttaataacatgtaatgggtttttaaaaaattataaaatatgagatacaatcag

SEQ ID NO: 208627 - DNA, 481 bp, Homo sapiens
agccaaagaaaacctaagaggctttgttggggaggaacaggggaccctgccggaccctgcaggtttccctttccctactggctgaaagggagggctgcacacatcagggaggagaaatagaggaagaagatgatgggcacaaaagcagaggggcaacaaagtacagatcacatcttgggggcacagggtacagttctcagaatagagaagaatgtccaggtcaaaggtttcctagaaaactcccttctctttaaaacagacacatgattttccttgggacatttttatatacaacttacaactgccagatcactcttggaaaatccgctgctcatcttggcagtggcagtggaaagaagccagtgtccttagacatatctctttgtgggccccagccccaacatgcaggtgtccatagcacaggacagaggactccatgcagccaaaaatcagtgcagttaccccctaagtcctccatcta

SEQ ID NO: 208628 - DNA, 585 bp, Homo sapiens
cggggagacttgagtgggtagcgatatgggcagtggcccgtgcggggtctacagcataccaggatatacctggaggctgggccctgcaccagcctcagcagcacagatgtgttacggcccaaagggctaggggacaagtgtggagaggcgagcatgtccactcagactcagggtcctgccctcagcacccctacttccctgccctcgtctactctcgatgcgcccacctgccctcccaatgctaaacaaccagaggaagcccatggccaccaaaaaggctttcctctccggctagatctccaggatcctgcttgtatgttacaaatcaaaagtttggcctaggctggacacagtggctcacgcctgtattccctctctttgggagacctgaggtcaggccaacatggtgaaaccccatctctatgaaaaataaaaattagctgggcatggtggcacacacttgtcgtcccagctactcaggaggctgagtcaggagaattgcttgaacctggaggcggaggttgcagtgagccgagattgcgccactgtgctccagcctgggcgacagagggagacgttgtctca

SEQ ID NO: 208629 - DNA, 768 bp, Homo sapiens
ggctggggtgtgagggcctctccatgaaggtcttgggtagtgggtacccagggtcctggggagtgtggggactatgttacggtcttctggacctttggctacatacccataaacttcaaccacatgtgggttttcttggtactaaagaattgattaggctaggtgtggtggctcatgcctgtaatctcagcactttgggaggccaaggtgggtggatcacctgaagtcagagtcaagaccagcctgaccaacatggtgaaaccctgtctctactaaaaatacaaaaattagccgggcatggtggtgcatgcctgtaattccagctactcaagagcctaaggcaggagaattgcttgaacctgggaggtggaggttgcaatgagccgagattgtgccactgccctccagcctgggtgacatctcggaaaaaaaaaaaaagaattgggagtgggtagcaattgctttgccaccttaaaaaaaagttagactgggtgcaatggctcacacttgtaatcccaatactttgggaggctgagatgggaagattgcttgagcctaagagcttgaggccagcctgggtaacatagtgacacctcctttctacaaaaaattttaaaaattagctggacatggtggtgcacatttgtggtcccagctactcaagaggctgaggtggaaggatctcttgatccctagaggtcaaggctacagtgagccatgattgtaccactgtacttcagcctgggtgacagagcgagatcttgtctc

SEQ ID NO: 208630 - DNA, 463 bp, Homo sapiens
agtccttaaccttggcaaaataaactttctaaattgattgagacctgtctcaagatattttggcttcataccaacaaccctatgatgaaggtactttctaaatcctattttataaatgaagggctgaggcacagagaggttaagtatgttgcctaggtcacagtgaaaaatgaatggaatgtccgggtgcggtcgctcacgcctgtaatcctggcattttgggaggccgaggcaggcagatcgcctgaggtcaggagttcaagaccagcctggccaacatggtgaaaccccatctctactaaaatacaaaaattagccaggtatgatggtaagtgcctgtgatcccagctacttgggaggctgagacagaatcacttgaactcaggagacagtggttgcagtaagccgagatcgcaccactgcactccagcctgggcagcggagtgagactctatcttaaaaa

SEQ ID NO: 208631 - DNA, 227 bp, Homo sapiens
tgtcagtgaacatttgaaaactggggaaccacaaaacccccccacctcagggctgttctcaggctcgcccaactcatgaagtccaagctgttgccccagaggcctcttgcagaccttatcaaagccagggtcccagccaggcacggtggctcatgcctgtaatcccagcactttgggaggccaaggcgagaggatcactgacaacggaacggcctcactgacaacgg

SEQ ID NO: 208632 - DNA, 454 bp, Homo sapiens
  misc_feature (16)..(16): n is a, c, g, or t
accgttcgtacgaganatcgctgtcctctccttgctcgagatccattgtgctctaaagggtgaatttaagtatgtgtgtctcttgcaaaccactcatcagaggcacccgatggtcatctgcctgcccgcagactccaggcaggtttgctggcagtgtagccgggtggggtcatggagatgctggcaggaatgacccccctgtggggggcgcggagggagcagtgggcacccagccagggctctgtcagtgggactggtctgaaaccatacctcataataaaagtcatataatttgtggcagcgctgaaaacctgctccaagtagtggtttcttgatggagttttggaaccttatctgcggctggtaaccattccttgagaacttgttggagaaaggcgagtgagcatcttaagaaggctgctggggaagctgagtgcaccagggcggggggcca

SEQ ID NO: 208633 - DNA, 204 bp, Homo sapiens
taacaagggagaaaacaacacacacacacacacacacacacacacacacacacacacactcacaagcatctgcataaggcaacactgaaaggacatataagaaaatacggaaagggagcaagactctacattagctaccttccaatagcattctgtttttactcacataatcaaattacccattccaatagtaataaattaaca

SEQ ID NO: 208634 - DNA, 243 bp, Homo sapiens
gagggctgagctaatctaaaaagaggaggacttgtcattatgaggagagaaggatcaggttcttggttatgtgctatggagtctatgcttggaagtgagtacgaagtgaattaaaggaatctgaaaatacataggaaatttgagtggctaggataggtttaggtgggtattcctcagcatgattagtgatggaacaaggaaacaaactgatggggagaatgacatgttatggtcactggcagg

SEQ ID NO: 208635 - DNA, 755 bp, Homo sapiens
tctccctagagagagagagagctgttttcttttctttttcttttcccattaaacctctgctcctaaactcctcatatgtgtctgtgtcctaaattttcttggtgcaagaggatgaaccccaggttcagggaatgcatgtggaggtttggtacatggcgatattgcttgttgctgaggctcagtgtaagaatgatcctgtcaccaaggatttgaaatttggaaaagcctataaagttttcagaaaattccagaaaaaaaattctgcacagaagcatttaactatatttaaacgtatgagatacagctgatggaaacataatatttgacttggaaaccattattgtaaaaactaatacattgtctttctttcctgcttcacatattcatcaattgcctacaatgcgaaagacattatcctaagtactcacatgaaaacaaaaacaaaatggagttgtagatgctggcaaggctgtggagaaaaaggaatgcttgcctactgttggtggaaatgtaaattgatttagcctctgtggaaagcagtttggagatttctgaaagaacttagtactatcattcaacccagaaagcccattattgggtatatattgaaaaaatcattctactaaaaagacacatgcatttgcatgttaatctcaacactattcatcatagcaaagacatggaatcaacataggtgcccatcaacagtggactggataaagaaattggtacatatacaccatggaatactatgt

SEQ ID NO: 208636 - DNA, 201 bp, Homo sapiens
tccgcctgccttgacctcccaaagcgctgggattacaggcatgagccactgtgcctggccagaaagccttctttattgagcttggtggcagcccaaaactgattctttaagggtgtcaggacttaacacctcctgtgacttagccgcacctcctctcctttgactttcattccacctccttccaggatcgcaaggtcccta

SEQ ID NO: 208637 - DNA, 462 bp, Homo sapiens
  misc_feature (165)..(165): n is a, c, g, or t
tgaggtatacggaaacataagacagtgacagatacagatagatgaggatgcagaagtcagattgtcgcacttcaggattgagaccggaagcttaaaggctgtcgcaaggaggaagaactgaagaagtcgggaactcagagtttgcccccccgtacccaatgtggnccacaccactgtcagtgacgatgtctctatgacgttcatcaccagcaaagagggactgaactgccgtgtggtaggaggtacctcctaccccacgaaagaccagcctgtgtaacatagggagaccctgtctctacaaaaaataaaaaactagcccggcgcgttggcacacgcctgaagtctcaactatttgggaggacgaggtgggaggactcatgggaggataaagagtggctaaggcatacactccttatgaggtagctactgctcttagcgctttacccgtgttaatttcattta

SEQ ID NO: 208638 - DNA, 394 bp, Homo sapiens
tatgcccacgagaggctgcaataaaagcaccaacttttacaaaagaggtaccactgcaaaagctgttccaactaaggactagagaccagcaagcaagcaagcaaaaaatcctagcctcctttcaacagggaagtaaaaaaacagcacacataccttcttcctagaaatgttcaatttgcttccaataacttctgccattttcagtttgcttgtatgctcagaaagcattgctgtgaaacagtctagagcctattaaaataaccaaggtaaatgctgactgatttttaaaataatatattaatcacagaacatcattttcctggccacaagagggagaaacacaaaatccagcaggaacatttctctaaaaatgaagggagtgcaaataaggtac

SEQ ID NO: 208639 - DNA, 702 bp, Homo sapiens
actaagtctaagccacagaaataacaaaaatggaaactcaaaagtatttaagcatttgttgtgctgggcagagagctagtctctgaggatacaatgacaaacagggttgtcttattctgttttgtattgctataacagaatatacctgagactggtaattcataaaagtttactgggctcatgattctgcaggctgggaagttcaggagcttagtgctccatctaggggcttatggtgaggaccaggtgctgggtcaaaacacagtggaaaagcagaaaagggagtgggcatgtacaaagagatcacatcgtgagagtggaagcaagagaattctaggaagccaaacttccttttataacaacctgcttttataacaatctactcttgcagtaactaatccagtcctgagaaaactcactcccacagaagagaattaaatctatttgtgagggatctgcccccatgacccaaacaccttccaccaggccctgcctcccaacactgccacctaggggatcaagttttaagatgagttttggaggggacaaatcaaatcgtagcagagatacagggagaccagagctcagaaagaggttctaatccaccaggggtgccaagggaccgaatccaaaacggaaggtgaaccgaattccacagcaggtaacccgcaagactctggactacgggggcaccgggggagc

SEQ ID NO: 208640 - DNA, 594 bp, Homo sapiens
tcagccggcccgagttgggcctggggcttttgctttgagcactggcagggtcagaccagagagccctgggcgtgaggtccagaagggatctcagaggtccctttacgcacaaggttagtgaggtccagagagaggctggggcatgcctgggggtgcctggaaggtaatggccaagcctggtttggggagcggctttggtggcctcagcccctacctgttcttagcatgagccgcagagttcactagtctatattttggatgggcttaaagtgtcatgcctgttgagatttattttataaaaagtaaactgggccaggcatggtggctcacgcctataatcccaacactttgggaggctgaggcaggtagatcacttgaggtcaggagtttgagaccagcctggccaacatggtgaaactcctgtctctactaaaaatacaaaagttagctggatgtggtggtacatgcctgtaatcccagctactcaggaggctgaggcacgagaatcgcttgaacccaggaggcggaggttgcagtgagctgagattgtgccactgcactccagcctgggtgacagaacgagagaccctgttg

SEQ ID NO: 208641 - DNA, 372 bp, Homo sapiens
gccacacaggagcttttagtccagaagaaaatcccagagcctcagggagtgacttaggattcaagagagatttttgcttttgctaatggttttcctttcctttctttctgccactcatccagggttttaagccagcagccaagacgttgcttactcataacccccctctctcttgctttatttaagtctatgttttttcgttcacttttccatgcggagagaaaagaagagtgtgttttatcacaatctgttcctagaaactcttttattgaggatttggttgtaaaagggccatgcattctgtaggaatagtaagcagagcggggaaggagggggttgggtttccaccaaagtctccacgtcagataaatc

SEQ ID NO: 208642 - DNA, 225 bp, Homo sapiens
ttgaagactgtggacagattaattcaactttataatgacctgtacattttgaacagttaatgtgtgctttctctttaatctataatcatttccatccaccttatatcttttcctccacattcttagtcctctgtgatggaattttgttttcttcctatgtaatattatctctgttggattctgtgatttgcctagaacaatgaattgggaatacttgctccagct

SEQ ID NO: 208643 - DNA, 594 bp, Homo sapiens
taaagctctttggggtaatggaaaaattaccttaataaccaggtatccaggtgacagctgctctagagattccactgttatgtctctttaaacctgtgatttactaacattccactattctatacaagaacctggtccctccccttttgggagcggggaagggacaccaaattaaacatacctaaaagacctgggaggatatatactgaaattttaataggacgtcattggggtggtaggattacagaaaaaaaaaaatcctctttattaacaaatttactgatataaatataaaaatacttttatagtaagaaattatgtgtacctcttttggaaatatttatatgcatcctataaaattgttgggaggaagtaaatgaaatgtgaagacaccaattccattaatcaattgctgctctatgcacttcaagaataatctgcttttaaaaggtggcagagaaaagacgcatgtctcaagttctgtacactgggttgtgattaaaaaaaaaaaacgatacaagtcttaggccctacatcacaaatgtactgcagaacagtttcaacggcttaagaaggtcaaccttaatacattca

SEQ ID NO: 208644 - DNA, 283 bp, Homo sapiens
ctcttacacttggctagtttttagcaagttcctgacattgtaaataaaaaaactgtataaataacttgaaacctaaagtattttctttagaaagagtttatattggctttgggaagtcaatttgagacaggagcaatcctagatcaccttaatccagtttgggggattgagatgagttaaagttgggcttcagttcctgaaaggaggccattctatttcaaattcattcacatttctaggctgtagccctttgggcttccaacctaaagtttacgtgaagtct

SEQ ID NO: 208645 - DNA, 529 bp, Homo sapiens
accctccaccccacgttactgttttaatgtgtttagtatgtgtatgtgttcttacatagtttattttggtatgtttggtactttatgtaaatattacatatgtcttatctgtgcgcttaatatattgcatctaactgctgaatagcagtgagatgtatgcatctaccacattttaccagtctgctcgccagaggtgcacatgttaattttctccaactctgtcaccacaaaaaaaatgcttcaacatcttcatgcatgtccccttatggagcaatgtaagagtttctttgggatatatagcttggaatggacttgatgggtcacaggaaatgtcagattgttcttctagatggctgcttccatcaatagtgcaccacagtttttgtattcccgtttctctgccaacatttcagagctttctgccttttccctatctaacaggcctaaggtgatactacattgtggttttaacttgtatttctctctgatttttagaatctctttatacattccttggctttgggtgcat

SEQ ID NO: 208646 - DNA, 391 bp, Homo sapiens
gcaagggatattgggaaacatcatattttagctgggcacattatcttcttgaaaataccgtacatgagaagaggagaataaatattgatattgataggcaactagtagtgtgtctcaatgagcagaactttgctgtgactatcttaaaagaaaggcttctagttagacaacctgaggtcaggagttcatgactagcctggccaatatggtgaaactcagcctctactaaaaatacaaaaattagccaggcgtggtggtgggtgtctgtaatctcagctacttgggaggctgagacaggagacttgcttggacccagaaggtggaggttgcaatgagccaagactgtgccattgcactccagcctgggcaacagagtgagactctgtctcaa

SEQ ID NO: 208647 - DNA, 655 bp, Homo sapiens
taaaaatctgatagacacggacttgttatttattccggaaatatctaacgaggcccaccaggttcaaggcactggggaaggaccagggtcgtgcatttgaaaagcttaccttagtggaatagactggctgaagcaaacaaacaaggtaatgacaggtgtagtatggctttgcaggaaacacacagagtgatgaaaaagattttgtagacgaagcctctggctggataggatggctaaaaaagacctctaggaggaagtgatagttgaggagcctcctgacaaaaaaggcacgaaatacacctaaccacgactttacatacagggactgcagattccagaaccccctgaataagcccactaattccatgttgagcacctgtctctaaagccttctaagggctgtttctgtgctgcccacttcccctgcaatttcagaaggcttgatcaccccttacagtttatgggggctggcactgtggcactaatgggggaggttcgagagacagggagaattatacccatcagctttgagagacaaattctttaccttttcactgtttctatgtcactatatttctcagagtcatgagtaaacattaaaactatgatttttacgttggcatgttgtgatctgaataaaatgattaatgacatc

SEQ ID NO: 208648 - DNA, 931 bp, Homo sapiens
ctctgttcaacactacaagtaattctgcatcaagagaaagctccaaatattctaacaaccattcagcatttccaatgatcttagatccacgcttggtgcgaaaactgaaaacgagagaaaggaaacgctgtggccaggtccatctgatactgtgaaatatttcttatcttgattttctcctggataagatcctggagcttggctggagccaagatggctgaataggaacagctccggtctacagctcccagcgtgagcgacgtagaagacgggtgatttctgcatttccatctgaggaacgcagctcctcaccagcaacggaacaaagctggatggagaatgactttgacgagttgagagaagaaggcttcagacgatcaaactactccgagctacagaaggaaattcaaaccaaaggcaaagaagttgaaaagtttgaaaaaaatttagacgaatgtataactagaataaccaatacagagaagtgcttaaaggagctgatggagctgaaagccaaggctcgagaactacgtgaagaatacagaagcctcaggagccaatgcgatcaactggaagaaagggtatcagtgatggaagatgaaatgaatgaaattgaacgtgagaaggggaacgttcaagaagaacacaccgcaatacacagaaaccgacacaaccgtctcccacgaaatcttggggacttatgttgacacacagaccaaatccaccgtttgactggtgtcctgcaagtgaccaggagcattggcacccagtggacaaccactctcgcggactatttccaggagaacttccccatctagaggcgggcactctccatctcggatcagaaccgccagatgcccccacaagcatccgacactactgcggcacaacttcactacgcaccgttcggccccacaagctccctagaggg

SEQ ID NO: 208649 - DNA, 262 bp, Homo sapiens
tatcctatctatgcatatcagttcatgcatcaatgtttaattcttaaaggattcccctaggtgtgcagagttatctatgagattatgtataattaagtcctaattttagcacttgctggccatgagaatttgtgtaaattatttaatcttcacaactgctgataagattagcattaatgttttatttaaaagataagagaactcaaactcatgattctttctaaaacgatttatatgaaaatctttaacagtcttttatgta

SEQ ID NO: 208650 - DNA, 387 bp, Homo sapiens
aggtttgggggtacatgtgcaggtttgttatataggtaaatttgtgtcactgggggttgttgtacagattattttgtcagtcaggtgctaaccctagtactcaatagttattttttctgctcttctccctgggaagaggaaaagatcttgaccatgtatttccaaaaagcagaaatagaataaatggctagaaatgcaagaaaggcagattttcgctcagtgtaagagaaaatgtggttattatttgttttgatgtattaggagataatgagtttcctatcactggaaatacacaaacgattcaatgtggatcccagcaggaggtgggggatttgactagtcatctgtgtttaaaaacagtgttaacatgctacatgcaaatatgac

SEQ ID NO: 208651 - DNA, 433 bp, Homo sapiens
tccattcttaggatgatgtgctgcatttctgcaatggcacccactggcgtgcaaaagaaaaactggattttccaggttaagcagaaacatggacgccatactaaactctgaacagacacattcatgcatcttcttgtccaccagctgcaggaactcaggggttttactacttcatccttttatgcccaacaccccatcagctccagaggcagcttggctgcatgccaatgtcagtgtagaattattctatcctcacgggttcatatcgtttgtcaagtcaccaaacactcagaaatattgatgagtcatctacctagatgtttttgttcatttgtaagactaacttgtacagagttttgagttttcttaagattttagagatataaataaaccatcaattaaggatttagaattcactaaaaataaaagcttt

SEQ ID NO: 208652 - DNA, 579 bp, Homo sapiens
tatggagactacttttccatggtcggtacttggtttggactgaggtctcatgtggatcaaatccctgtgtgtgtgcaaagctaggtctatcattattttctgatggatgaagtggaggccatgctgtgaatgtgtgcacgtgcaagtctttgacacaggcagttttctctaaaatgcacagcctgccttaccaacttaactccttccacacctcagaccagcccctgcaattgccctttgcatgttctcatctggcctcatgatcatctccttccacgtgggtctccctccttccatgtggccctgcatggcaggcagggcacatgctaacctgtcttctggtagtttggagtgagtggagagggccagtgtcctctggatgaaggacaactgctccattgtgcagtgtttttgttgttgtttgtttgtttttgagatggagtctagctctgttgcacaggctggagtgcagtggtgggatctcagctcactgcaacctctgcctcccgggttcaagcgattctcctgcctcagcctcccaagtagctgagattacaggcgcccgccactacatgcagc

SEQ ID NO: 208653 - DNA, 341 bp, Homo sapiens
ttctgtgtcatccacctggagtttgatggcctgccttcggtgacacatgaaagctggtcgagtggctctgagacctgaaaagaagcaaaaaattttgctctgaaacggaagagctgggaggaggaacaaagggcagtggcaatggaaagcaccacaaagccagtgctgctcagtctgatgagctgggagagtcttgaacaaggtcaagatgtgacctctgcatggtcagtatccacacacaaccctgcactgacgcaaaagaacaatatttccctccagatttgtctccgtgcaaaagggaattgtgggcagatgccgccacctgataattaaaataatat

SEQ ID NO: 208654 - DNA, 324 bp, Homo sapiens
  misc_feature (22)..(22): n is a, c, g, or t
gaccctgaggatccagacgacntgatcatgtgactcatttattggatgagtctgaaagaagataggagtcccctgatcccaagaaaaacagttataaataatagttatatgcatatttcttgcaagtcaacaatcccctggttcttatgactcttaaaattttacatttcctgggtattataagaaaaatcagatgacagaaggtttcatttctcttataagtagatccattagcatgccttctcttgataactaaacaccaattgatgtacaagcatttcatatcccagcccactctacaacctcttttctccccctcctcat

SEQ ID NO: 208655 - DNA, 419 bp, Homo sapiens
cacgctgccacacttttcagaaattaaatatgaagactatcaaattgggacctcagaatcaagaaggggagcagggaatagagctgaaatatgcctgggttcctttcacattccccccattatatttcgaagagaagcgtatggaagttaacaagcaaggaatacaggagaaatacttaaatgttgagttcactttgtgcatagatttaggtggttaaggttcagatttacttctgtttttctgtgtttgaataagcactaaggatctgactaaaataggctacattgccttctcattgggactttggaagcacttaataggggttgtattggaatttcagggagaaatagagggaaaaaaatcacagttctagtattaattttattgcctaatccataaggtgaaatgaagcttcagg

SEQ ID NO: 208656 - DNA, 561 bp, Homo sapiens
tgaacacaaagaaaaaatggattaccaggaactctctgaaattggggaggggctgggaccctggtctctttaggagaaattctaagaggccaactctgggagaggcaggttatggccagaagaagagagagcgtgggcaccaggtcagtggtgctttgttacagcaggggaggaactaatacaccactctccccatcagggccctcagctgcacttagaagatctggctaggatgaaatttatcatgcaaccagaaacctacagaatcagtctctgaattttattctcataggaggagagtcagccaacaacatcgacagccacaatttatttgatgccttcaggaaacatttcaaagccagatgtttgtttgaagtgtaggtcctgcttcaggtcccagcgttccttgtctcagccacgttccaccaggtggcagcaggtgctatgctggtcggcgtggggagtttcactgttgttccccctccctctcagcctgaacgctaattccacaaataccaaccatcctgagggtctgttatctgcaaccaactggttggtatc

SEQ ID NO: 208657 - DNA, 394 bp, Homo sapiens
tggttgggggaaagatgaacaagagatttattaagcgtgacaaaatgctgtgtcacgctctagtttataggccagaaaaaagctagagagaaagagaaagctgaaaaaataaatggaacagaagaggaggcacaacaataataagaacacaaagagaaaacaagagatcatgaggcagttgttctctttaaaagaaaggattatttttaattgttgtttttaagattttatcactgtgaatatggagaacagatgtaatttctttccacacatgcaaataaatatgccagttacacagttaaaacactcactaacgtaatagagtagatcaatatttaatgaatgcttaatctggggttactaggaacttgacgttttcactgagtatgaataa

SEQ ID NO: 208658 - DNA, 258 bp, Homo sapiens
ctaccttctgggagataaatgaagcatagcacactagttggtatgagcactcacctatttggccagaaattgtcataagtaatcctatatgtggcagggttatatttgctcttataacgacatcaaatacagaaatggcaataaacagcaagttcatgtttttggaagaaacagttagctctctcttgagttctggcgcagtcttggcagttttctttggtcttttttgtttgtttgttttttgagacggagtctcac

SEQ ID NO: 208659 - DNA, 444 bp, Homo sapiens
gggcccactgttagctgctagaattagctgcacaattatcccggtcacaccaaatggtcaccaagggtgatagagatcctagatgcaacttaatgaaccatattcagttttatgataacaaccatgtgtaagcagacacgcttgacctaactctgagatgggcatatgcttacttgcaacagaatctgctgggtcacttgatgtatttaaataaaagaaatgtgattaatggcaacaaaacatgtctttctcagaacagtgccttgtcaacagtaaccagctagcctgacctttcaatggctccctgaagggtgggtatatacactattcgttaattgtggcttatatttgtaccttggtataaagcaatatagctgtcaaaaatactgtatattgaatttttaaaaagttgttatcaattaaaaaattgttattgccataatt

SEQ ID NO: 208660 - DNA, 440 bp, Homo sapiens
tggaatgttagtaatcgggtcatgccgtggcatcatgattaatcaaactatcccctgtggttgattgtgaagaagtgcctgaagctagtaacttaagggaccaagtggcggctgcacttagccattatagtagtaatgatgatgtcagaagtgtggaatgggaggctattctgcctttagtggcattcttatggaaaaaaaaaatgacaagctcaagtctttaaacactcagctcaagtcatatctggcaaatctcaaattatttcacttctttttatctccacctctaccatcctactataagtcatattttctcaactgaagttttgcgacagcttcctgctctccctttcttacagtccatttcttagagggtgaccaagataccataaagccaacacctctgcctaaaacctccaatgacatcctactgcattaaa

SEQ ID NO: 208661 - DNA, 648 bp, Homo sapiens
ctaagattcataaaaattattatagctttagtcttgacagttgcctttttattttaaggaaattaaccccagaaaacacataaacacgtgcatatacatacatacacacacgcacattcaccacacagtttatgaaggaatacagagtgcccactggatcattcaacttcactgaatgaatatgcagaaattttaaaaaagtaattttgaaaaatttcaaatgatactgaaaaatttggtattttgttttaaaaatcttgactcatttatttataaagtgtgtatatagatagatacaagcagagaaatatatatcaatataaatgtgcagtaaatatgtatttatatatatttaccctttcagttatatatttacataaccgaaacatataaaattaacaaagaaggcagggcgcagtggctcatgccgataatcccagccctttgggaggctgaggcgggcggattatttgaggtaaggggtttgagaccagcctgaccaacatggtgaaaccctgtctctatcaaaactacaaaaattagcctggcatggtggcatgcgccttgtagttccagctgctctggaggtaattcctgtattttttgtacaaaaatttgaaatatatataatttcatattacttttgaa

SEQ ID NO: 208662 - DNA, 603 bp, Homo sapiens
ctaagattcataaaaattattatagctttagtcttgacagttgcctttttattttaaggaaattaaccccagaaaacacataaacacgtgcatatacatacatacacacacgcacattcaccacacagtttatgaaggaatacagagtgcccactggatcattcaacttcactgaatgaatatgcagaaattttaaaaaagtaattttgaaaaatttcaaatgatactgaaaaatttggtattttgttttaaaaatcttgactcatttatttataaagtgtgtatatagatagatacaagcagagaaatatatatcaatataaatgtgcagtaaatatgtatttatatatatttaccctttcagttatatatttacataaccgaaacatataaaattaacaaagaaggcagggcgcagtggctcatgccgataatcccagccctttgggaggctgaggcgggcggattatttgaggtaaggggtttgagaccagcctgaccaacatggtgaaaccctgtctctatcaaaactacaaaaattagcctggcatgtgtacaaatatttgatatatatataatctcatattacttgtgcactcgtgc

SEQ ID NO: 208663 - DNA, 248 bp, Homo sapiens
agcttaaaatttaatgtagtagtgtcattttcattgtcaagataaatttacaaagtacatgttaagtttagcatagtgcctgatctaatactcactaaattttctgtgtaaaataagattaattaaaccctgattattcctgctttttaattatttcctttaagaaaactgaattgtcttagagtatattttaagatattgaagatagctgaagcattaattttcaagaaataaaaacctggaagttg

SEQ ID NO: 208664 - DNA, 167 bp, Homo sapiens
ccaaactgaaagaagctaccgtttgaaatgtctgtgattacagatttacttagactcagcttccgatagcacttatttctagctcattacttcctccggaaagaaagggtcagctctgggtgatgggagtttaacccaatgaatttggtgtgatggatagatatttg

SEQ ID NO: 208665 - DNA, 580 bp, Homo sapiens
gagaattgcttgaacccaggaggcagaagttgcagtgagccgagatcacgccactgcactccagcctgggcgacagagcaagactctgtctcaaaacaaaacaaaacaaaacaaaaagtcataaaaattaagtttttagtcagacatggtggctcacgcctgtaattccagcactttgcaaggctgaggtgggtggattgcttgagctcaggagttcgagaccaacctgtgcaaaatggtgagaccccttccctacaaaaaatagaaaaattagtccggtgtggtggtggcacgtgctggtagtcccagctacttgggaggctgagggaggaggatcacttgagtccaggaggcggaggttgcagtgagccaagatcgtgccactgcactccagcctgggagtctccagagggagaccttgtctcaaagaaacaaacaaaaaagtttttaaatactaatttttctcgtacgttcttgagaacattcatctttttaacttcttcttagtgctcttggtgcccctgggtacttccagtttattttggttctaaacacccaaggcaaaccaaggtctcactgc

SEQ ID NO: 208666 - DNA, 576 bp, Homo sapiens
caaggagctcacctccactgtgaacttcagtacacatattactgctgtccataatattatattatgataaaagtagattagattaaaagtagacaactgtctggatgttgtctgtgttgtattaaaaaacataggctataattagaaattgagatacttttatcaaatcctgaaatttgagtctgtgtttataaagggaaaaagtgattatactttaaattctttgaaatcgtttgcagaaaaaattaaaatctagtgttttctaggatagatctaaagtatttggatgctagtagtattacattttgtaatactttggtttctttgcacaaactggagcttggaggtgagaagaagaaacaaaaataccattacttcaaactatgatcatttcttggaattttagaatctcattttatagtcttctttatttgactttaaaaaatatcagtcaattcagatattacaaagaagttcactactttcctgactcttaactagcacattggaaagtggtttcatatttatgtattttaattgtggcaaacttgtttttaacaagtattgagggaaaat

SEQ ID NO: 208667 - DNA, 417 bp, Homo sapiens
ctcagctatttttctgttattgatttctagttcaagtccattgtggtcagacaccagacattatgtaatttttatgtttaaaatgtgtttaaggtgattctgaaggcccaaaatacagtctattttgttgaatgtttcatgtgagcttgagaaaaatatgtattctgctgttgttggatgaagtagtcagtagatgtccattatatctatttgattgatggtatggttaattttagctatgcacttacagattttctgcctactggatctgtccatttctgttggagtgttgaagtcaattatgatactgtatgcatttatttctcctcatatttctatgggttttgcctcacatatttttatactctgttgtcaggcacatacacattaaatattgttatgtctcatcgaatgagt

SEQ ID NO: 208668 - DNA, 188 bp, Homo sapiens
ccttttcatataactgttggttatgaaagtataaaaagtaatttttatactttctttggagaaatgtctattcaggtcctttgcctatattttaatctggttattcatatttttgcttttgagttgtgtgtgttccttatatgttttagatattagccccttatcaaatatatggtttgcaaatatta

SEQ ID NO: 208669 - DNA, 554 bp, Homo sapiens
tttgtgtgactctaccatgcttgataaggattcaggtagacctgaaagcttctccccagccactggatttgttctctcatctcttcttcttgcccccaaatctgcattttctgatgctgaaaaagagaatgatcagagttgtttcatatttttttagctttattctcttctactgtgagtacagctctgttgagctgtacagtacagtactgctttgcttgcaaagcagtacagatgcctaggagaagtttcaggatcacaggagaccagcagttacctggctgtaagctctccttttgactgttccttatggagggaatatttgtactcccagttgttaccttcctgctgaaggacatgagatgtgtctgtttgttatgaagttttccccctacttcccgagttgttgcttatctttgttgggctgttctctgctcttggttgaggtactgggatgtagaaccaccctctattagcatattagttattggactctgggtgaggctggagataccgtcattcctagagggtagaagaggtagggctcacaggca

SEQ ID NO: 208670 - DNA, 405 bp, Homo sapiens
agtgctgggattacaggcgtgagccaccgcgcccagcgacaataaatattttcaaaacagcaaacacatcttcccttaggcttctctcctccaagctaaaaacattacccagtttctttactcattattcattcatgcatttaacatttattgaaaatctactatgtaataggcatgatactaggtgccggggttatgacacaatctttgctctaaagacatttaagaggagatgaggcctggcatggtggctcacgcctgtaatcccagcactctgggaggctgaagtgggtggataacttgaggtcaggaattcgagaccagcctggccaacatggtaaaaacccgtctctactaaaaatacaaaaattggccggttgtggtggcacatgcctgtaatcccag

SEQ ID NO: 208671 - DNA, 389 bp, Homo sapiens
cagatatttccttctcaaaagaaaagcacatgattttatagcatttttaaacgccagggcatctcatcagctcagtcttttcagtaatttaaaaaaaaaaaaacccagatagtggaaatcagggtagtcaatggaaaaaattcaataaagctgaatatctcggcaccacagagtggtgtcctttgaatgtttgtttatcattcaaatataataacaccaaaaagaaaaaagcatatgaagtgatggatatgttaattagcttgattatggtgatttcacagtgtatacacctactatcatatcaactagcataccttaaattatttttatttgtcaattatacctccataaaactggggggaaaagccactcttttaaaggcttaatag

SEQ ID NO: 208672 - DNA, 361 bp, Homo sapiens
ggttgcagtgagccgagatttcgccaacgcactccagcctgagcaacagagtgagaccctgtctcagaaaaacaaaaaaaaacccaaccccatgtgtgtggagggtggtgggtgagtcttcccttggatgcaaatgggggccctggcagcctccttggggctggtgtgaaggagacccccagcctcagaccctgggcacgccagcagcagcaactcagaataccacccggaagcaagccgctggccctgcagactctccaccttagaacagctgtgtctgtgacaaggacctcgctgtgtcccttactgccttgggggctaggagtggctggggtgtgtgctgagggcccccacagagcct

SEQ ID NO: 208673 - DNA, 867 bp, Homo sapiens
agtgctttaccgattcacatgacaactggtaaaacgaaaacaaacacctttccaggaattgtgaattcgagttccagaccctctgggattccgggagcgcagctgctatttatgttaacagtcattggtcccaggctggtgaggttagaatttccaagtataaaagtaatttagtttcgttttaaatacattttagggccaaagaaaagtggaacgatttaaagaaaaagatgaaatgaataatagggcaagttgggaggtggctgtcctgaggtttcatgggacaacattaattaacctcatgaagtgcctgcatggacaacgtgcccggtgtggttacaaacaaaccaatcagcacagatcctgggtggaaagcagggcgcagccacggaggcacagtaggggtgcagacttgaaggtttttaggaggtaagccccgagggcacgaagctccacggagagactgttgacccgcctgggagtgcaaggtggatgagagtgggacacctgccagttgtttgcatcagcagacactcagagtccatggaaaaaatgagcctagaggtttttaaaccacaacacaagcaaaaggcacctggtcccgttcctcttaagacagaagaaagaggcgtaaaaccagctccaggtgccacccttaagaaatgttacagtgccggatgggaagagtaaaccctgaacatctcttcttaatactttacagacttcaagtgtattttatggtgacaaagcatattgaagacaaatgaaactctacaaccctgaaaaccagcctgaattattttgagagacagacagtggctgcaaggagaagcgtcgggattttctgggctggccatctccagtgtc

SEQ ID NO: 208674 - DNA, 412 bp, Homo sapiens
ttaaaaatcgtgtttaaatatatttgataaatagtattcatttaatactctgctggaaggacagtatcttaatagtttatgaaatgggcagcaattaataaatacatttgtgttaaaaatgtcctattcggcagggcgcggtggctcacgcctgtaatcccagcactttgggaggccaaggtgggtggatcacgaggtcaggagatcgagaccatcctggctaacacggtgaaaccctgtctctactaaaaatacaaaaaattagccgggcgtggtggcgggcgcctgtatttccagctacttgggaggctgaggcaggagagtggtgggaactcgggaagcggagcttgcagtgagccgacatagcgccactgcagtctggcctgggcgaaagagcaagactgcgtctcaa

SEQ ID NO: 208675 - DNA, 449 bp, Homo sapiens
gggggctcaggattcaacaaagcattgttgaaagcagtcactaccacatcaaccgggcctcaacatgaaattatctgccatcgcaagaacttcagtatcataattctcacacatgagaaaattaggcctatggtgataaaccaattgctcaaagtggtaaagactatttactagctatttctgtaatatttattcccaccatcagtaaccagactttgaacctattctaagtagcaaggtactcatctaaaaaaactacattcccaaccaggcgcagtggctcacgcctgtaatctcagcactttggaaggccaaggcaggcagatcacgaggtcaggagatcaagatcaacctggctaacacggtgaaaccccgtctctaataaaaatacaaaaaaattagccaggcatggtggcctgtagtcccagctactcgggaggctgaggtgg

SEQ ID NO: 208676 - DNA, 220 bp, Homo sapiens
taatcccagctactcaggagactgaggcaggggaatcgcttgggcccagaagacggagatcacaccactgcactccagcttgggcaacagagtgggaccctgtctcaaaatgactagatcgcatacaagttggtgtaaatgctgagccaggtaagcaaacatcttgcttgccacaggggtttggagaagggagagagcatcaaggtgtcaacgaaaagag

SEQ ID NO: 208677 - DNA, 363 bp, Homo sapiens
ctgccaaaataagtgtaatcatgttgttcagcctaacaagaagggggtgctttgcatgcacaattccatgcaaatgaattcacatttccatttagctgtaatgggcacattctccccacagctgtgcttttcgttgtgacatggagatagaagctccactttcaaaattattggatttggaaatggagttagaatattgaatttggtgcctaaaataataactatctctttttaaaaacattattatatgctcaaaaccccttccctggactaagtcatttaattctcataaccctatgagataggtactgtgatcatcttcagaacagagttttggagcatagagagtgggtaagcatctgg

SEQ ID NO: 208678 - DNA, 356 bp, Homo sapiens
atacacagcatagagacagacttaaagaaataggaaacctccatataattaaggtgctctagtcactaatctccaaattggtcactacttctgaaatcccagctaatctggttaattattaaaaccatcattcaggtgtattgtgtaaactaaagaaacctggccttcagggcagagcctacattgtctcttggtgcaaaactgaatatgtagttggtctagacatccatacatcctcctcaaggtcatgccatttttaacacccttcattgtccccaacactgaaatgtatcttacaagagaatggaactcaggccctaaaagaaattagattgaacctaaaagaaaatggtcag

SEQ ID NO: 208679 - DNA, 601 bp, Homo sapiens
tgttgttagatgtgagatgggtatcttgaagatagcagatggttgggtcttgtctttttatccaccttgacactccatgtcttttaagagggacgtttagccatttatactcaggattagtattgatatgtgagattttgatcctgtcattatgttgttggttgttgtatagacttgactgtatagttgctttgtagtgtctgtgggctatgtgcttaagtgtatttttgtggtagtaggtgtcattcttctgattccatgtttagtactcccttaaggacctctttcttgtaaggctggtgtagttgaagcaaattccctcagtatttgcttgtctgagaaggattttatttctctttcacttatgaatgttgggctggtaggatatgaaattcttagttgtaatatcttttctttaaggttgcctaaaagaggcccccaatctcttctggtttgcaaggtttctgccaagaagtctgctgctagcctgatgggagttccttctgtacatgacctgacccttctctctagctgcctttaagattttttcttttgcgttgactttggtgaatttgatgacgatgtgccttggcgcaggcaa

SEQ ID NO: 208680 - DNA, 348 bp, Homo sapiens
aggctgaagactgaaatggtctatttgccctcaaataagacatctcatatcagcctctagatcagggtctcaaaaggacctttaaggctcattacacacggcgttctatggaaaggataataacgctgtgaaggagaaccctgatagagagaaggtcaggaaaatctgaaaggatttcaccattgaaggtgccactgttgtaacagaaaaaactgtgagagctatcaacccgaaacaataaattcctgctgcagaaaactctgtccagatgttgtgcatgacttcatgggatttgcaacagagccaaccaaggaaatcatgaaagagactgtggctatggcaaaaaaa

SEQ ID NO: 208681 - DNA, 432 bp, Homo sapiens
tcccacctgagactcaacagagggcggtatgagcacttgaccgcacctctgcccatatgctgagagcaggtcagtactgggacaccctggagttactaaactctaagctaagggtgatccacccagccctatcactccttcccagctccatctctccacatagttcaaggtcaggctcaaccatgtcagcccatggaggtctttggcaggagctggggctcctgtagtggggagggaacctggtacctcaattctggatctcaccttctcttccctgcagccttgtcccaacatttactggctttgggtccagtggcacagatgcagcatcagaaccctccctcccatcctcaaggctgtagatcatagcagtcttcaggggcccaagctctttccaggtcctgctttccaaaaatgagcctcaaatgcagc

SEQ ID NO: 208682 - DNA, 495 bp, Homo sapiens
atgtgatagcttatagtgtgatctcgaaaatagtgtcaatagaaaataaccaagtcttgtggaccagtaaaaagaagcggctaaaaagacattattgggataactggcataatcagaacataaactgcggattagctaatagcatagtgtcaatgttcaatttcctgaatgtgataactatactacagtttcttaagagaacagcctcattcttgggaatgcacactgaagtatttatgaatcaagaggcatgatttctgcaactttcacatggttaacaaaaaaaattatatagaaagaggatgataaaatagatgaggcaaaatgttaacactgggtgaatctgggtaaagggtatataggagttccttgcactattcttgtaagacttctgttaagtttaagatcatttccaagtgaaaatgaaaaggttgccttgggtgtccaaccaccaccccaatcaaagcttgtgtctccctgttcacccacctgaac

SEQ ID NO: 208683 - DNA, 552 bp, Homo sapiens
  misc_feature (522)..(522): n is a, c, g, or t
tataaacacccaccccccaactcttcaactcattatcagtgacttctatcagactcttgaatatgcacccttgggaaatggagtaagaaccatagcttaaatcgtttaaactcatatgggacaaaacgatgaaaatatgcaagagggaacaatcttacattggaaaagaaatcaagccaatgacccaatatatctttttattatttcttgggagaacctgtatgtttaattcatggaattcttcactgtttctatgttgaaatacacttatgtgaaaattgcactcctattaataaaataggactttaaaaagcccaaggattttagtatcgaaatgtttctgtgcaatatattaacattcattgactatgtgaatccccacctgtacttcgtgtaaattaccaaaggtgccctttcctctgtgcacatgacacgtgtgcccttgccggtgtaattggactcatgcttagggcttagtgaggctggtatattcaattactaccacctggcattccttacagngtagtcaacaccttcacatctgaatgtttg

SEQ ID NO: 208684 - DNA, 619 bp, Homo sapiens
cggactcctgcctgatgagtttggggacactgatgcccctgagtgaggctcaggatgggggagtgaaagaaggtgccagagcaacacagtttggttcagatggtaacagtggggtgtgccacattaagaaatttgaaatcaacccatcaattaaatagagaaagggaggaaaacaatgtacatttaatacctattaaatgaaaatacttatgaaatggaaataaagcacccgtgcctcctgctgatggtcaaaggtctccctgccagtgagtgatgggagcacaggattgtgacaggtcccaactgatgctaaagcttattttgacctcacctggttcctgagggccaatggaggctttgaagcaagggtgtgtcctgctcacagttttttgttttgttttcagccaaggagccaggagccaggaagaaaggaccagtgaggggagtgggagggtcagagaggcggggccatcccaagcccagaggcagcaccagctcctaaggcagtgagtagcttggggctctaaaggcagttctgatttgattcttcctgaactacccttggactttctagtcaaagtgtgctttggtcgtgctgtgcagatgtggccctggtgac

SEQ ID NO: 208685 - DNA, 561 bp, Homo sapiens
gcagcaatggggagcccttgcgctttggcagtccctgggcacatagagatcttggcctgagctgacctttgtccttgagatgtctatagggggagtcatgccacaccatgctcctgatcagggcaggtgtgagtggcagaaatctgttccatgccgggcgagactttgagcgtttgcagatagtaactcacacatgttcagggctctagggggcagatactaggagtgttcctgctgcagtgtaggaccttagccatgtggtccagcatggggttgtcatgaattccactgggactcaactgggatggggtgttttgtttgcacaggactcagccagtcttaaaatgcaaagttctgcatcctgggagccctctcagtcccagacaaacctaagtggccctgtggtgggctgagggtcaccctacctcttgggcagccctggtgggactggaggcaggtgtgtgttggggccaggtgggaggcaggtggcctggacctcccttgtgctcccgcctgctgaggctggctgtctggcgaggctggcgtgtgtggatgcagtgg

SEQ ID NO: 208686 - DNA, 245 bp, Homo sapiens
gccttctgtgtcagcctcggccagagattaggaggaggccctggggcatcagtgagccattgatgtcccaagcatcgggctcagtggccagaaacagtctctggagatagaaaggcctgtgaggattcagtggagataccagctagggcaggtaggaccaggtctcaggtccccagtatctgaggtgtgatggattatcaaagaatgcagagcccaagttttaggatcagagccaaaaatggggg

SEQ ID NO: 208687 - DNA, 641 bp, Homo sapiens
actgcactctagcctgggtgacagagcaagactccatctcaaaaaataagaagaaaagactgtatcccctttcagttctggaggctagaagtccaaacaggttgttggtggggcttctgcttcctctaaaagctttagggcaggggcccccagccccagagccacagaccattacttgtctgtggcctgtcaggaacaaggtcacacagcaggagataagtaacaggtgagcacttgaagtttcatctgtatttatggctgccccccatcgctcacatttctgccgtagctcctcctcctgtcataccagcagtggcattagattctcataggagcgtgaatcctattgtgaactgtgcatgcaagggatctaggttgcacactccttatgagaatataatgcctgatgatctgtcagtgtcttccataacccccatatgggactgtctagttgcaggaaaacaagctcagggctcctactgattctaccttatggtgagttgtataattatttcatcatgtattacgatgtaataataatagaaatacagtgcacagtaaatgtaattcacttcaatcatcccggaactatcccctaattcccaacccggatctgggaaacaattatctcacatgacacc

SEQ ID NO: 208688 - DNA, 864 bp, Homo sapiens
acaaggaaggaaggaaggaaggaaggaaggaaggaagaaaaatgtctaagatgacttgtttttagatttttgattttagaaagaccactttggctgaaagagggggaataaaataaatgggacagagagaagtcagaagtgtgggggctgttgtatgacccaagccagaaaggatggggtctgaagtcaggcagtgggattcaagaggaggggccgttaaatagcctcagtgtccagggaagagggtcttgtctgggctgaagatcaaggagcgaaacttccctacaagaaacgctcttgaatgtatcaatgagttttgggtttcacctgcctccttgccaggatcagttatctctgaggtattctcatctggaagcattatgacatggcccccagatggggatggcatgggagacaagcactcaaatcccactgtggggagatcatttaggtacagtccttttagaaagcaactgaaaataagtataaaaagccatagaaaggttgtcttctttgccaattatttgtatttctgaggaacttacttaaggaaagaatttgaggttagacaaataagttaactgtgacatttccttcacctatctagggtcccgggacgaatctcctggtccaggagatccatgacccggagggtgcgtgcgtagctgaatcaccatgatccgctgcaccgcagatctcataagagacctaaatcaccgggagccgacatcccaaagagtcagagcggcacacgcgagggaacgggaccaagagggacccccggcgacaagaccaccacaccagggcggacaaccacgagaacgagtaagggtaagccggtagaagaaggcagggcagggcgcg

SEQ ID NO: 208689 - DNA, 289 bp, Homo sapiens
caaagtcctggggaggacatcataaaatggagggtgtgtatgtgtgtgagtgtgtgtgacggggcttgggagggtttgactttcaacaacagaagaggcagctcttcagtagaaccacagggaaagtaagaaagaagggaagactgggaagtctgttagtggctttggagggtgtgaagggaatgccttcttcagaccttaaaatgccttctgtcatgaaaacattggcacaggaggggaaatactaaaagtgtcagaactggaataatgaaagaagtgctgaactgat

SEQ ID NO: 208690 - DNA, 323 bp, Homo sapiens
tactttttcagcaattatgatgaataaggtattgtaatatagccacaacagattttaatgtgaaaagttataaggaacacacttcaagaagaaggaaaatgatcccaggaggaatatctgagataaaggaggaaatggcaagcaaacaaacttataaacttgcttgtaaataaaaacaaatatcgttgaagagaagaaaagcaatgatgtctaaaattctatgttcttggaaagacgaaattaaaatattggacagaaaaaacccaacaagtcgtaactcaagagaaagaaataagaattaaaatacctaagattttatattt

SEQ ID NO: 208691 - DNA, 167 bp, Homo sapiens
atgaaataaggtgaaaaagaaaaaaaaaaagtcattgttatacaaacatcaaaaagcattataaaaatccatttctagcctgggcgtagtgacagaaacctgtaattctagcactttgtgaggctgagacaggcagattggttgagctcaggagttcaagaccagcc

SEQ ID NO: 208692 - DNA, 301 bp, Homo sapiens
ataacaaatattaatttgttccaacttcttttcctcattccttccgtcctccaattttgccacatctccaaagacctccaccctggatgtaaaactaggagctagagggaaggagttctctttgatgtagtgacatgtcatggttccttgaagttatggccatggtgggatgaaattaatctgtgaacccagagacagatgtcatggacattcaagccatcagacactgtaggcaagtgcctatgcacttttccaggaactataaaaaattttaagacctggaaaaaaattacaagctcta

SEQ ID NO: 208693 - DNA, 387 bp, Homo sapiens
agcaactactgccactatctaccagctacaaaactaataatcttgatgagtccctctcaccacacttatataatcaattaccaagtcatttccattcttcctaaaaagcatctttcaaattatgccattactcaaaaatcatgctcaaaatcattataattatagacaaactaaggcttagggggaaaaaagaaaaaaaacagcataaaaggaaaagcctttacaattgcctacaggtcctcctgttagtgttctgatgtcagtcatctcctccttctctccctcttgttcattctgttccagccatactcacctaagagcttttttcatgaacgtgccaggcacattactgccttagggcctttacactagctgttccttatgcct

SEQ ID NO: 208694 - DNA, 500 bp, Homo sapiens
tttcttgtccttcagagctggccccatctttgctaacggttgccctggacaaggggacaataatacaactcatggggggcttgtgaagattaaatgagaaaatgaatgtaaataatgataatggtagcaaacattaaagtattttcttgtgctaggcactgtgctaatgactatttacattgtctcacttaatccccaccaaaccacttgaggaaagcacaattaatacctgcattttacaagggagggaactacaggttggaaaagttaaatgacttgcccatgatgacacagcagggaaacacggggcctgtatttggatccaggtcatctgactctactgggctcttagcaaccctgtagttacaaaccctctaagggattcactaggtacctgcatttagtcaacaactaatgaatggcagctagtaagagattctgttcttttttttttaagatggagtctcactctgttgccaggctggagtgcaatggtgcaa

SEQ ID NO: 208695 - DNA, 242 bp, Homo sapiens
ttcatttcagttcaggtaatggggacttttcttctcctaacaaaatgggttttatactcatcaaaaaacacaaatgacataatagtaaactatccaaaaaatcaagtatcgggaaagggttagaaaagggtgaggatattctaataatcaaaacccaaatgaatacaaaggtaaattaaaaacatcattttggagaaaagagctttttaattattatttgttctgtttcttgtttgttagga

SEQ ID NO: 208696 - DNA, 186 bp, Homo sapiens
atagttactcaacattttttaatccacgagccttagtgaactaacagcataaagaaaaatccacaagtctgggcatggtggctcacgcctgtaatcccagcattttgggaggctgaggcaggtggatgacttgagcccaagagtttgagaccagcctgggtaacatggtgaaaccccatctttcca

SEQ ID NO: 208697 - DNA, 261 bp, Homo sapiens
gggccatgggaaaataaacaataataacacaattttggaaaattggatgagtgagaaaagacttagcagaactcccaaattaaagtactaaaccagcagcaggaaagccaagaagcaacttgtttgacactcaagagccttcaagtgtcaggaattggcagcatcagattcttctggaagtgtggtgaagaggagagactaaaatgagaatgatgcattgaaagtttatttaagaagcagtcagatcactagatcctttcc

SEQ ID NO: 208698 - DNA, 220 bp, Homo sapiens
gggtcaatgtgtatgattatttttagtgctaatgaatgcattcttttttttccagaaaattcaaagctgaaaatatttcattagaattgcagcttctgtagatcctcagtaaccgcattttagtcttataaaagctaatatactatagttgccagtttcaaaagctaatatactgaagttaatgggcaattccaaacccttttcctcagaggagccaatt

SEQ ID NO: 208699 - DNA, 279 bp, Homo sapiens
agttagtctacaacatcactgcaataacacaatgcttgctgaagtggtcactttcacatactgtttgcagagggcaatttgtcaagagtcaacacatttggaactttgcccaccttgtttgcctgtcattccactcaggattccagcttttagaaagaattgcatctgattgtaaaaacccaagttcaagaagtgaacttggtctataatgggaaatcattggggaaaacccataactgagtgtcaatgaaggattggtaaataaattatggtatatac

SEQ ID NO: 208700 - DNA, 104 bp, Homo sapiens
ctcaggccgtgcttatgccctgtgctcacatgtgtgagggggtctgcagtgcacgtgtgatggggtgtgtgtggcactctcagctgcccttcctgtcttctctc

SEQ ID NO: 208701 - DNA, 473 bp, Homo sapiens
cagcagaccagatattgtgctcctcgacccaaccagtaaatgttgtaaatgtttatctttggggagagaaggggaagggcccacccagcttctgttcttctttcccttggtaacttaccatctatgagttagtgagatggagacatcctaaccattaatccagggaaagggaggaatctaagccatcagcaagggagttagtgcttttcatcaaatttgagacacctgtgacatcacattttagcatctctgaaatgtgatcaattgcatgtcataatttaactggcaaaatatttttttgatgtggagcataaaataagggcacataaaagatttggtggtgctgtggtttgaacatgtcccccaaaagttcacgtgttggaaacgtaattgccaatgtaacggtattaagaggtggggtctttaagacgtgactgggtcatgagggtgtaactctcatgaatggattaatg

SEQ ID NO: 208702 - DNA, 370 bp, Homo sapiens
tttatagaatcccctaaaggtggaggtcatgtttgcatcagagggtggtacaaggggagggaggtacttagcctattcctcaccatcttcatctcccactgagatcacctcacatacaggtgcccttccactgtgcttagccagtgagggactaaagactcccccacagagtataaattgccatgtctatttcagagtgacagctattaatattattattgttatgactctgaaagcccactcatctttgagtctctggcaagaggtgaaagacaggtgttgggaggtggctcctggagcgtctgtagacagcatttgcctaaataatggaatccacgtgtaataatcatgcttgagataaagagcttcc

SEQ ID NO: 208703 - DNA, 436 bp, Homo sapiens
aggagaaggaaggaaggggaagactgagaggacactcgagaggtccaaagctgcactttgtctttcgtcttctgctttttcctttagttaacacattatttgtaagtaataatgtactgcattaagtaattaagtaatgaatgcatacagtcctcatatattgcatcggtacaaaagtaattgtgatttttgccattactttcaatggcaaaaagagcaattacttttgcaccaacctcatatatgtataaaagtattcaagcaaacagaaaaaagtatgacttctctctctgaaggtcattgctgttatcacattagcatttatccagatgcttttatttatttaaatgtatacatacacatacacacatagaaagaaaaatgtgcctttgtgttttatgcatattttatctaataaataatattattctgcatt

SEQ ID NO: 208704 - DNA, 335 bp, Homo sapiens
agttcttaagaatgtatagctagaagagagtggatgtcaaaaccactaagcccccaggaagatgttagtcagaagatatggtcaagactaatggaaagttagaaccaaggagtgcaggttctagggttctgcgtggctcagggtgaaccccacacttgactcagaacttctgtgtggcagaggaggaaggaagaatggtcaggtcatcatctgtccatccacttgtttattcatccatcttgttttgtattgctttttaaggtaaatataaaagtggctaaaatatctgtacagtggaaagaatcaagataaaataaagaccaatgtgttgaaga

SEQ ID NO: 208705 - DNA, 385 bp, Homo sapiens
tccctacccatatgcccagttatgggccctcttcttctttctagaggctggccaaaaactaagttttcaaagtacaaaatggatgctacagatttcgttgctttagaggaaatgtctgacggctcttgtatttaaacttaagtagctacactgggactcacagtttcatatcttgagttctagaccagagctatcaaccctaaagcaacggcaaggggttagaggtactcttcttgattcgaataataaaaaatgattttttttttgtagggacaaggtctcactgtgttgcccaagctggtctcaaacccctggccacacactgctgggatgacaggcaagagccaccacacctggtcattggaggtgctcttgctttgtgtgt

SEQ ID NO: 208706 - DNA, 725 bp, Homo sapiens
gacagagagttcagaggtcaggtcgtgacgagagaaacagcaggcaggcgcgcggggcaggtggcgcgggcgggggcgactcccttcagggagcgtagccggggtcacctgggcatctgagtccagggcaaagggggcagccatgccagggcccagtgcagaccagtggggctgggggccatgagtggagtcatggcagtgaggggtgagggggacaagcacggggctgaatttgtacccggccagccatctccgtctcccctcctcagctgtgctcacagacttgctcctcccacctctcggcacccccactccctggtctcccacttccccgcttctgccatggcttccttttcctcagccaaatccagcagactcagcggtgtgggcttttttttccttttttgagttgggggcccaggctggagtgcagtggcaccatcctagctcactgcagccctgacctcccgggctcaagggattcttttgtgtcagcctcccgagtagcagaaaccacaggcaccagcacagcaggcctgggtgcttttctccagccagcattacgctgaccctccctccctcgggggcttcggcttcctgccctaggccatgcggcctaggtgttggtctcccttcccacccaccccaaggggccccggaattctggctttctgccactcctcagactccttcctgggagacttcaccacttccagaattcaggc

SEQ ID NO: 208707 - DNA, 347 bp, Homo sapiens
ttacaggcgtgagccaccatgcccagcctaagtttccttttctaataccacttttgtgctcaaaagctgaagcacagagaagtaaatccctgctgttacacctagccatttggaccagctgttcttgtgacttactaatggacaagcaggagcactcccttggaaccaggggcttgaaaccaaagaggaagttgaagagaatcagcagataacaattctttactacatcacagtgaaatacactgccatagcccctagtgttatttgttgccatttcagcagtcctggggcctcagtaagtggcgcctacacagcccgtcagacaaccagcccaacaaacctgtcga

SEQ ID NO: 208708 - DNA, 417 bp, Homo sapiens
cacaaaagctttgggaagcctagctttgttgactataaatatggtacttcacatttccaaatagcttcatagtcagcatttcacaatatgctatgcggtcactcagtttttcacagttttgaaagtgagaaaactgacatagaggttagatgattagttttagttaattgggaatcccaaatcttatgtgccaactcagggatcttaaaaaaaattcaagtgcaaatgtcagaatataactatccatttgaccttcatgaagctgatcatgtactaaggcaacattttcatttccctggcaatcttggcaccttcaacatagtttaattgtttacaacctttagtgataaaattaaattggtgttctttgtgtatcctttacgtatttggtgaattttcatttatcctttcaaagtc

SEQ ID NO: 208709 - DNA, 759 bp, Homo sapiens
gtgatcatttaaaccaggggttttaatcttttggcttccctgggccacactggatgaagaagaattgccttgtgccacacataaaatacgctaacactaacgatagctgatgtgctaaaaacaaaacaaaacctcatagtgttttcagaaagcttacaaatttgtgttgggccacattcaaagccatcctgggccgcatgcagcccatgggctgcaggttggacaagcttgatttagacctttctgaatcccatgctacttaagctttgattattaaaaaaaaatttccattatacagatgtagaaaattaagattcataaatactaacgctgatctaagaccacatatttagtgacagactagaattagagttctgatctcagaacatctagttgtttctatagctcatttcagataaatgaactttaaatgcttcatataaaagtaagagcagtttttagcaaccaagtaataatatcagaataaattcttgcatactggtattctgtaataccacaggtgaaaataaaaagataaaagtattttgcaaatccttattgatgtactaaagtgaatttagggaatgagaatgaagcaagcagaagagatttgaaattactttggtaacgggatttattttagtaaactcttatggactgcctactgccactaatttggatttttttatgagaatcatgggctttgtttcctcatctttctcctgactcagaaacttgtataaccagttactaaactat

SEQ ID NO: 208710 - DNA, 1283 bp, Homo sapiens
catagaaagctacttgagtctgagcatggtggctcatgcctataaccccatactttgggagggtaagcaggagaattctttgagtccaggagttctagaccagtatgggccacatagtgacaccccatcattacaaagaatacaaaaatgaaccaggtgtggtgatgcatgcctctagtcccaactactctggaagctgactggggagaatctcttgagcccaagaggtcacagagcaagaccctgtctctgttaaaagaaaaacaagtaaataacagaaaagaaagttacttgagaatgagctgtggaggctgagaggaggaagaatgtgagtgtgtgtgtgtgtgtgcacgcacactcatggagaggggataaggaaaaccaagagagaaaaagacgtgaaagagaaaaatcaacccagggagaaggaaatgcaaggatcacagctgggcatgcagcaggcctagaaagcaaccagtccaggatagaataagaaggaaagggctctgtagggaaaggggactcgatagaacattgcatataattcacagtttgagaaaaactgaggaaatcatgaaggcaaacagtacaagagggggaaaaaacaaaggcaattagaaacatcaggaaaaactaaagccgtgcagcaaaacatgtgcaaccatattgtacaactcagctcaacagtaagcaagatttaaagcgtcaccaaaatgtaaacacttggttaacttttaacttttagaacaaaacagaacatttacatatgagaactaaatctacttgttaccagtcagtataattaatgttccatggtaaaggtgggaggtgaaacactgaaggaaggagggggaggattaatatggccattttgtaaagtgaagagtcaagaaatactggctacagttaagggcataagaaataaagttaaataaactcacgtttagttctcacaacaaccatcctacgtaggcactgttatcatcttaatagttctgaggggaaaactaaagcttggagaagttaagtaattcacctggagcccctagctagtgacagccagaagccaaactcaagtgcccaatctccagagcatgcactctcactctatttcatctgctagcataagaatattatgtaaagaaaatgatttactccctaaagaaaagctggctaggcacactggttcacatctgtaatcccagcactttaggaagctgaggtgggtggatcacctgaggttgggagttcgagagcagcctgaccaacatggagcaactctg

SEQ ID NO: 208711 - DNA, 240 bp, Homo sapiens
caggagaatggcatgaaccagggaggtggagcttgcagtgagccaagattgtgccactgcactctggcctgggcaacagagtgagactccgtctcaaaaaataaaaaaaaaaagttaagagcttgaagttgagctttgtgcatttccactgtatgctaagctctttcctgcctcagagccttatatgtgctattaccccacctagaaaactctgcacattacatccccatgcctgtccgt

SEQ ID NO: 208712 - DNA, 341 bp, Homo sapiens
tccccagaggacaccctaataaatctctaagtgtcaatttccaaatttcttattaaaaaacacttttatataaaaagacacttgggctaacatatgatacttactaataacttgtgaatagggtcacctgggaataatgatgtttgcaattacttaagaataacctaatatcatgtttaaacatgtgtgggtaatgctgcaatgcagtatctagctccctttacaggattgaaggaactctttttcaagctgctgggaatggagtcatagtttttagccccctttttatataaagaaaactgcctcacccaaggccatgccacattctgtgggcagtgtgc

SEQ ID NO: 208713 - DNA, 387 bp, Homo sapiens
cattgtgactacccatctgctataaaagcatctacatgcttcttttcaagttctgtactcaccttgtcagacaggtaagcagaccacagatctgcaggaatctgtagactactttcagtagcctgattcacaagagcttatttttttacatttttacacttatctttctggagctggtcattaatgacctctttcatatcctctatcatttcctcaatgcatttttacaactcaaggcaaaactgttaattccattaagcaaaatacccctaaatcccttaagtgatattataccaggtttgcttaaagaagcaatctaatggtgtcatcacttacaatgtgatctgattctatcacaggatcaacaataatgatggcttaactttt

SEQ ID NO: 208714 - DNA, 505 bp, Homo sapiens
  misc_feature (498)..(498): n is a, c, g, or t
tggtgagtgtagctctgtgagttggaggctctgtgcatgcagtggagccagcagagcccacacagactggcgagcccgtggacttcagacatgtatgtggaccagctgatttgcttcagggaaaggggccctgggtactttggttcttcatgtgtttggatcactgattgagatgaagacaaggtgctattaattcaggagaggtagagagaggctgcaggccagggtagtgtgagatcctaaaggactgagaatgtcccactgtggctctcccatgcccttgtcccgggaattgttccttatgctaatagagtgtggattgattttcttccacaacagccaggtaagggtgtgcagggtttacacagcacaaggacacctggccacggggccaaatggggatggaatcccaaccaccctccacgtcctaagctatatgcttggatggggttacccagacagcaaaaaaaaaggggggggggccccaaaccctttttnggggggg

SEQ ID NO: 208715 - DNA, 370 bp, Homo sapiens
tgtgtgtgtgtgcgtgtgtgtgcgctgtacgttaatatggagagatgggcttgggccagtgggaaatagagagacccgcaagcacagagtgacagggtttgatagtaagcagcaggccagcgttgctgcttttattcctcggtaaatccttgcacaatgccatatgctcttgcattccgtagctgctgcatagggtgtgatttagttaatgcccgctctgcaaacaggaaacggtgctcactgctgtgtatgcttttcatggagataaagtgtcaggagcaagaccccaaacctgcgaaatcactaatgcaaccgccccccatgccccaaaaggtgggagtgggggataaaaagagtaggaaagtggtgt

SEQ ID NO: 208716 - DNA, 817 bp, Homo sapiens
gaagcctgtctgggaggaaggacaacactagtcaggcgtcaggagttctgtggagccctctgtttataggatgccagtcctggcatgtggctgtggtctaggttaggggaagagaaaaatccctgaattgctctcccttcttggttcagagccctccttcccaggatttagcccgtaaccaagacaagtcacagatagacgatgacaagtcaagacaactcatagatagacggtgagaggggcacagtggtgtattttaccccgtgactttctcaccccttctctttccttcaactttgtctcaaattgcagaactgggtactcctggggaaaagcctcctgagtgagccatcggggagctgtgcccagctaaatgggcatttctgaatggtttcctccagcagggaatgaggcccctcattctgcttctttctactgtgggcacccagtgtctcctgaaatgtgaacagcaacagagcagctgctcaccctcgtaggcaggaccccacctcacctccatcagcctgggaggttctagtggatagtcactcaccaagaagagcaccagacgcaacgctctggccacctggagccctctctgaccaggactgcttttcctctcccgggccctaccaggcctattagtggaacacacccggcctcttcttggggttggttttgcactgagaatttccggtggaacacagatgaggttggagcctttaggttagtgaagcctttggatatttttggcagtatggttctatcagcattgtagaaagaagacctagcttaaaaattgcctgaaatctgagga

SEQ ID NO: 208717 - DNA, 435 bp, Homo sapiens
acagatttttgggcaagatttacttccctgaatgagtccattaccacaaagataaataaggtgtcaccaagtactgatttcatcagcaatccagataataagactatttctcctttctttgaacccatagacacaaaactttctcatatgcctgttccacctggactcaacagtagcaaacaattactaaacaaaaccaaaggatacaatagcagaaaccacacatctgcaaatgaagatgaggtatctgtgacttcaaagacttggctggtttctgtggccctttgcacctctgtcatctttctcggctgttgtatagtcatcctggcatctggatgctgtggaaagcagcagggccagtataaaccaggacagagaaaatcaggatccttgcaaattaaaaaccgtaaccatatgaaggagaactcttcatag

SEQ ID NO: 208718 - DNA, 214 bp, Homo sapiens
taaataatttgaatagttcaattcttattcaactctgtgtttattttggctataagtttacagtatttatttgcagtaattagttgactatcctgaaaatgctagctaaccactgattacaaagggtttattcaatatagatagcagtttgtatgtttagggttcaaacatatggcaaaaatagaaaaaattcagatgtaatagctaataaata

SEQ ID NO: 208719 - DNA, 369 bp, Homo sapiens
aacagggaaaggcatggtgtgaagggctttctgggtttgtggttccctggcacacatctggtataagatgctgctagggaaagtagactgtgggtccatggattataagtgatgatgatttttggaagtgttttagcttttgagttggcagagacttacccaaagtttggtttggcatttccagcttttcacagacacagctagctttggtttggaaggagcttgagagtcttttgagtctagccaagttttggggccagaatcctcccatgagtggccttttggtagccatactgtgattcttcccatcccagaggacagcattggtggaagatagcgggaaggtggtggctgtggggcctgagcagc

SEQ ID NO: 208720 - DNA, 549 bp, Homo sapiens
ggccacctgccaggatcaagaaggatcctgtgaaaggtaaactgtaaacattccttttatgagcaacatgcttggtgccctgtgagggcagggttattgtttgtagacactttccagaaagagatgcctcaagaccacattagaaagaaattacaacacaggaagagagagggcaagttctctggagtctctttttataaggatgctaatcccattgcaagggccccatcttcatgacctcctttaaccctaattatctcccaaaagccctgtctccaaaaccatcacagtggaagttggggcttcaagatatgaacttaggaggggacacaaacattctgtccatagcagtaggtgatgtttaactctattccaaactgctatagttttccaaggtggttgtatcactgtacacccccaagagcagtgtataagagttctgaccgctcatatactcaccagcacttgctagtggcatctttttcattttagcctgactatatagtagtatctcattgtagttttaatttgcatttcccggaagacaga

SEQ ID NO: 208721 - DNA, 399 bp, Homo sapiens
gagaatatggagaagttgcagatttcatatttggaatttgagagaccttctggtctaattctaatttctaaagtgtgaagtgaggttattagctgaagtatgggagggtatagaattttaaggcaatagaagaaattaacaaatgtagtctcttaaaagaaatgtgttcatatgtatatgtccaggttaacacataggaaaatgcatacaaagtgtgcatcaacaagctacaaatagtgataatctagggataagaaagcagaatggagtataaagtaatttttaaaaatattcattttaagttgtttcctttatctctgctaattataattatgagacgttccatgtactaaacaacatgattggcaagacaagttttttgtttgtctgttttatccc

SEQ ID NO: 208722 - DNA, 501 bp, Homo sapiens
agatgaattaaaaattaaaatgggtaaaaaattgggtaaaaggtgatcaaaactctgacaaaccagaatactttaaaacttacaagttgtaaaaccaccctatgtagccataaattgctgactttacaaaaagtgacttacagagagtagaactgtggttattagagactaggaagggtaagggggagaggaggatagagagaggttgggtaaaggatacagaattacagctggataggaggaattagtcctggtgttctgtagcactatagcatgaatatggttaatatagatttatttattgcatattttcagaaagctagaagagaagattttgaatgttcacaacacaaataaatgataaataaattttgaggtgatggatgtgctaattaccctgatttgatcattccacattgtatcgaaataccactctatatcccataaatatgtacaattattacatgtcaactaacaataaagggaaaagaaagtgactta

SEQ ID NO: 208723 - DNA, 703 bp, Homo sapiens
caagagtgagggatggcagtggggcgggcagagtgaaatctttaaggaagttgggagttaattagattggagagaatgggaaatttctagcaaggaaagaaacagctagaaatagcggtaaaagagaaaggcaattagttctgaagggctctaacctagagtatatgtggtggaggcaattgaagagttgattcacagagacccttgtatgctgagttaagtgtaacagatgatgtaatgtaatagatcatcactgaaagggtgtaagccagagagtgacatgatcacatttatgttttaagtagaccctgtggctacagcatgcagattagaggagggttaagcctgagaaccagctgggtgcagtggcttaggcccgtagtctcagcatttgggaggctgaggcgggagaatcacttgaggtcaggagtttgagaccagcctgggcaacacagtgagaccccacctctaccaaaaaaaaaaaaaaacacaaaaacacaaaaaagcaatttcaggcaccaggaaatgaaggcctgaattagggtggtgatagagaaaggttaggagggaacacaggagagccatttagaagagtgatgctcaacagaaataaaatgggtcaggagccatattagaaaagtaaagagaaataggggaaattaatttaaataatatattttagttaaccaaaaatattcaaaat

SEQ ID NO: 208724 - DNA, 216 bp, Homo sapiens
gggacggggcatggaggacgggaagccggcagggaccatcagaggacagctccaggcagaggaagccccccaggagggatgagcagaggcctagtctgagacctaagcaggtgtcgactgcccctttagttttcttgctcacaatacagaatgtatgtgttgcttttcaatagtgttttaagcttgtttaatattatacggccaaaggaggaaaat

SEQ ID NO: 208725 - DNA, 426 bp, Homo sapiens
gcatcttttcctaatgaggatgtgcgtaaatgtgaatgtaaactgtgcatctgcaaggaagaatctgggagagcaaatggaaaggttggcctggctcgaatatggagaaccctgaatgccatgccaggaggatttgagcaggagggcagagtggtcaggtttctgccttctaggtgtccttctactgtggagaaaatcagctggagcaagagacactgcaggggagagattgtgagagggcaggtggagccgtcctggtgagaggggatgacacctgaattagggagaggggaataaaggatgaggtggggccgggcacggtggctcacacctgtaatcccagcactttgggaggccgaggcaggtggatcacgaggtcaggagatcgagaccatcctggctaacatggtgaaaccccgtccctac

SEQ ID NO: 208726 - DNA, 328 bp, Homo sapiens
gcatcccccctacgctctcacaataatgacattatccagtcatgagagcagagccctcatggcttaatcacctcttcatgatccctcttaatactgtcacaatggcgattaaatttcaacctgagttttagagagggcattgaaaccacggtaaacatataccgacaacctacctttatatgaacatgattgatatgaagagtaataggttatacattttagccggcagctccataactctacctattaattctctgaaaactcttgagtgaacaccattttatcaactgattgtacttgtttgctaattaaacccaggatattctat

SEQ ID NO: 208727 - DNA, 177 bp, Homo sapiens
ctgttacttctctctttgagcggaaaatgaggagggattgctatctcgtttcagtttttgtctttttggccggcaggagacttaaattgtccatgaagagactgagttcaagttggatttaaaggagcagtggaggaagagttgctaagaaagtcatcatttctggccaggcacgat

SEQ ID NO: 208728 - DNA, 291 bp, Homo sapiens
ctttgagcaggtgaagtgtcaccacacttcgcctggctgttggatcactcatgcagcgcacattttctgccagtgggattttgaaggaaacatccgtgagggaccaatagactggccccagcccaccgcatagggtggcaggcacttggtaaaccagtcacagttgagagtctggtcccccgccttactcttccggaccataccctggagagacagagcataagattgatatcagggccttacgtcctcacttcctctggttcgtgacttcttttgctcccaagagaattg

SEQ ID NO: 208729 - DNA, 297 bp, Homo sapiens
tctgcctgatctccacctagtgtcattgtgggatcgtggccacacatgggccttccagggctgtgctgttggtgaccagtggtgcttgtaaccctgaagtgttggcatggcctcagctgactgggctttccctcatgcccagggcttaaacttgaactctgcctgctctgttagcagtttttctctacatttcttttaaaatagactttcacttcttccttcccatcccccccaatacaactgccctggcatcctggctttttccattcttgacaaatgatctgtccactgtaactg

SEQ ID NO: 208730 - DNA, 330 bp, Homo sapiens
cttgagcccagaacgtagaggaggttgcagtgagctgagatcgcgccattgcgctccagcctgggtgacacagtgagacccttgttgtttttcgatagctgtttcataatttgccaacagttgctgtatagtattccgttgtgggaatacaccacaattttttttattcattttgcattgataggcttttggggtaatttgcagcttagagctattataaatagtgctgttgtgaatatttttatatatttcttttgctcaacttagatgtttcttttggttgtgttcttaagagtttacttgctatgtcataggttggtcaactttagt

SEQ ID NO: 208731 - DNA, 626 bp, Homo sapiens
ggctaggataggattatagaaaactgggtgattgtcaacagggatgaaccatacacacccctcaagatccacttttacacactgcttcttgagatctcaaggtttcaggaacatgaaaaaatagtttgtcacaaagaaaagctttgggaaggggattaaagcagagcttattataaatttctgcctcattttacatctctgcaaggcgggaatgatctcttgatccttgacttttgttgcttttgattaaagaagagaaattgaaggagtaatagtttactctttcaatttggggaaagaggtcttttttatcaactttgggctttagttaagtaatcatggaacgttcttgtacaaattatatttaaaaccaagccaaacaagagcacacttgcaagagagctaaatgtatgatcatcttgtgctgtatgtattagcctgggaggttttccaaaggaatgatcatccctagcattctctttggcatttctatgtagtgtcatcatcttctgtgatatgccacacaagaaggaagaccagtggttgatttctgggattaaacttttaaaaaaactctttaggatctggccccaacccagtatcctctttcctgcttttcccctcta

SEQ ID NO: 208732 - DNA, 419 bp, Homo sapiens
aaactattaggtgttcctgtctcagggaaagagtctggctattttttgtaattagcagtgcaaacatttcttaaggttgctgcttttcacatctccacgaaagtgctgcagcgaggaactgcagtagccaaaacagattaatgtagatgaaattagagagatttgttgatagtaacattaatggccaaattaaaggcaagtgagaactgatgatactagcaatttttaaataatatacagtaaaccctatcagttttggctaagatgagtgaagcaagctgctctaatttaagtaagtatctgagttataagattgaatgactaaaagtgacaattcctttagaacctatagctgggcagtagacaattacggctttattagtaatggttattagtgataatctatgcttgaatataat

SEQ ID NO: 208733 - DNA, 252 bp, Homo sapiens
atagaaggggccctcaaaagtaaagtgcctaagaccgggataattcacaatgtgcctctgattgccccacttcacagcggggatacctccaaccgggggtccaggttgggatccgaaggagcgacaccgcgccctgggcacggggcacctctgggacttctggaggcgagaaaagaaggcgcgaaacctccgcgggccgcgcgtgccatctgccgggcacctgcgggactgcggccggcgggaggggagggg

SEQ ID NO: 208734 - DNA, 547 bp, Homo sapiens
taaagtgctaattaactgttgctgcattcctgtatttgagcctctctaattatgccaattattttgctacccaataattattattgaggcagatccatatttattggtatgaaaagatctttgtgatatatatacacagtaaaatatatacatatatttagtaaaaatccaagttttaaaataagatgtatgctaagcctaatttaaaatatatatattcatgcctagattgatttagaagtaatattcgtgcagataacactgtgcatgggtgtatccctgcctgctcccctaaaataggtattgattcttttaaagtcttttgagggataataaaagagactatatttttcttttaattggttaataatctttgcttatttatgagttccaaagacacagatatttcatctattattgtatatttttatggaaagaagaaacatttaggacagaaactcgttatgatttcaaggtcaaacatgtatttcctaattgagatttggtttaaagttttaattcatagaataaaatgactgattattgg

SEQ ID NO: 208735 - DNA, 405 bp, Homo sapiens
ccaatctatttatgtgaggaatagatacataaaaccttactggtatttagtaggaaatcttttattgttaatattttatttacaatcttacttgatatttatcattgagttaaattgcacataccattcaggtatggttaaaaactcatttctgcttcaggcagtcagacttttctgttgcaaatctcaacttttggctataaaaacaaggtatcaaaataaacaggaagttacttctatgtgttcaaatatagcacaactactacttgaaactcaaagccttttctccttaattataatatcttcagactgcttttctctatatagattctcaaaaaaaaaaaggtttctggaattggttcatccgtaattttcctttccatgattttccggtgtttggtttaa

SEQ ID NO: 208736 - DNA, 229 bp, Homo sapiens
tatttagtaggaaatcttttattgttaatattttatttacaatcttacttgatatttatcattgagttaaattgcacataccattcaggtatggttaaaaactcatttctgcttcaggttgaaatattctcaattgttttgactaaagtatactgtcctatatgctgtgtttacatccatgatggtatatttaacatgcaaggggtacaaaataaaaatccaaatattg

SEQ ID NO: 208737 - DNA, 349 bp, Homo sapiens
taagaaatcacagtggaggaatgaaaatgttctacagctgagtcatggtgacagccacacaatttggttaaaaaaaaaaaaaactatgaattgtacacttgaaaagatgaatcataccttttgcacgagcacaaactattccccatccctcaccaaagataactttttgcgtgtaaatttataggagagttgtcaaaaaataaactatggtggtatctaaagaaggtttccaccataaaaaagggggtctgaggggatcaatttggtcacaataaattcaagtgtgtctgagtacgctttgaaggtcactaaactgctagaacacatcaacctaagaaagtaagatctc

SEQ ID NO: 208738 - DNA, 254 bp, Homo sapiens
tagtgaaaactgacaactgaacaacactgattatgaaacaaagattttggaccgcccaccctgaataatgaagagttatgtcaagcaaaattgatatgaaacgatgtgtagtgatttcaagttgaccccccttccactgttgataagtactcggtcacttcgatagttttatttctatttttttcttaagaaggcttattctaaaggtcctcttttcactatcattgtaaaaaataaaataataattttaatta

SEQ ID NO: 208739 - DNA, 748 bp, Homo sapiens
ctcttcccaattattggtaatgtctgaagacacttttggttgtcctaacaggatgtaggagagttctggcacccagtgggtaaaatctagggatgctgctgagtattctgcagtgtaccagaaaggccctttacaacaaagaataatgtagccccaaatgctaatgttgagattgagaaaccctgctgtaaaatctaggtaagatggaacttactaaaagtaatttagtaattccctgaaataatctgagatcctgccctaagtcttatagttttatagaagaggtaagatacaagaataaatgtttgtagcagggcagaggtgccttgtaaggacagaaacggtaatatagttcatatgaggtagaaatctcagtgggtgacaggttaagacctcatgagcagttagtgttgaaactgtgtgataaattctgaatgggcttactttcaggttgaaggaatttattttccagaggaatcactctttcatgtaatttactacagggtaagagtttagaaacattactgctagcaaagaaaaaattacctcccttctaaccccttgacatttttaaatcaaaggaccatttgatcctaactaaaagatgctttgagttttatgcaaatgcacctttatcagtatacgtcagaaaaatgtttaccaatagatctctctccctttttttaaaaagtgaccttgaggggtaaaggtcattcctttgacagaaattgttgtgactgatcttgtg

SEQ ID NO: 208740 - DNA, 650 bp, Homo sapiens
ttagtgacatcatcatgcaacagcactccagcctgggtgacagacctagactcttgtctcaaaaaaagaaaaaaaagttcttctttcttcaataataagctaaccttagcttgctgtaacttttttactttataaacttacaagttttaaaacctttttgactcttgtattcacacttagcttaaaacacaaacacgtagtacaactgttcaaaaatattgtttctattcttaatttataagctttttattattaaaaattttttaaacttgcttttactttttaaacttttttgttaaaaatgaagacataagcacacacattagcctaggcctacacagtatcaagatcatcattatcactattttccacctccacatcatatcccactgaaaggtcttcaggggcagtaacatgcatggagctgtcatctcctgtgataacagtgccttcttctggatacctcctaaaggacctctctgaaggtattttacagttaatgtttttttctttttaataagcagaaggaatgcactctataattaacaataaaaagtatagtacatgcataaactgataaagtcatataatactattatgtattatgtactatatataattatatgtgctatacttttatataactggca

SEQ ID NO: 208741 - DNA, 195 bp, Homo sapiens
tgatggaaaacaaagcagtagcaattggaaagtccaaacaagagaataagtagggggatgaaaaagaagcaataaattataacttcaaagaagccatctacctaacagggaaaacttggcttcactttatcagattcatcattgcttcaaagagttgatgagaaaagctagactaatgaatctactgcttccctg

SEQ ID NO: 208742 - DNA, 651 bp, Homo sapiens
gagtggatgaccatgctatgtgatcacaactgtgaacggctaagcaaagtgaactgagtttagtattgtaatttcaaaagaaccttaaagtttgtaatatttgacatatttaatggtatgcagaatcctatttcactgtacattatcaggcattcatggcaagcaatttacaaaaacaatcagtattttgtacagaattagcttagagcttagcttagggaaaacaaggagggaggagaatgcaacagcttacaaagcaatggagacactcccatgtctacaaatgggggcaggggaagggaagccctcccacattctctagggtggcaactgaagccctccccacaggtatactagttaagggtcacgtgtcacagtgggcttgggacaggacagtttccttccctctgaaataagatccataacccctcagtgaaaggaaagctagagctagagaggtgtacaaccaaaagcttaaagcttgttttcctgaccccttgaatccctaaatgcagagaaacgttcctccctctttttccctccatttcttccaacataagctgctgagttcacgtaataatgtgggaactgtataaagatccatggccaatttctagtctagtccagggcaggaaatgttagaaccgactg

SEQ ID NO: 208743 - DNA, 764 bp, Homo sapiens
ggtagaagcaattacaaaaggaaaggagtggagattaggaagggagaggtaaagagcaggaaggctcccatgaaagctgagcctgcagatcaaaattcaaaagtacttgaagaaaaactaatcccaagaaaggcaatcagtcactcaagagaaaatgaaagtaatgaactacctagataatactataaaattagtatgttaggatcctcagtgctcaatgacatggaagggtaaaatgtcagagcaggcaaacataagaaccagtgcatagagtcaaccagtaagaaattctgggggtgaaaatactgtgtaacacctgaggtgattttggtttcaagtaattgaaaacccaacactggcttaaaccataaggacacttacttttagcttaataatagtggagataggaggttcaagggttcattcaatggttcattgtttacaggcaccagatcctgtttgtgtttctgttccatcatcttcagctttgctttgctgtgtctattacctcatagtcacaagatggctgccacagctcagatgttataccctcataacatcccaagcaggatagtaagagcagttcttagccttttatcagagagaaaaaaaaatctcagaatcttccattaagcactccatacacacacactgttagtctcattgtattaaacaaaggctcatcctaaggccaattacttagcttagatccttaattaatgctttataggtaggagggggggcccatttcctggagcatgtgg

SEQ ID NO: 208744 - DNA, 564 bp, Homo sapiens
caaagagaaagaatgtgagtgccacatgactggttaagtatggattctcaaactagggctttaaatatccttcgtgattttttttggcatgaaaacttgtaagaccactggtgggctctgtacaaagtcggctaccccttcattctatatcttcctctgcccactttcctcccagctattaaaaatgaatgtaggctgggcacagcatctcaagcctgtaatctcagcactttgggaggccaaagcagaaggaaagcttgagcccaggagtttgagaccagcctgggtaacaaagtgagaccctgtttctatttttttctaaacaccaaaaataatgactgtaaggcagtatgtagccaaacaacttggcaaagtttgttatctttcctccaaaattctctcactctccaaccttccctctttcttgatagctcatccatagccttgagctcagcattacctctgaactaggaagctcttctccagctgacattaggatctttgcatttgtccctaatgaaatcaaaatatagggccattcgatattatcctcttttcctcctg

SEQ ID NO: 208745 - DNA, 513 bp, Homo sapiens
ttttttgtggtatctttgtctgattttgatatcagggtaatgctggccttttagaatgagtttggaaatgttctctcacatttagttctttggaagagtttgaggaggattggcttggtgatagttgagagtagaataagcactcgtttcaagtttggtattgttgcactgatgctccacttgactcgctgcatattacaactgtaattattaattacttcagtgctgttaatcatagggtagtacaagctagattaaatggcaaacaaatgtacaaaacattttattactattgggttctttatacattaatgttttaagacacaggcaaaaaggaaaacatcgagagtttactgaaaagcaaaagttttgtagtgtgtcttgaatttagtaaacaagtgtccactctcctgcatcttaaacaagcactttgtttttgttttatttttttgagatggagtctcactctgcactccagcctgggtgacagagcaacaagactccatctcaaaa

SEQ ID NO: 208746 - DNA, 632 bp, Homo sapiens
gaggggagagtcataaagtaatgttagtaataatcgttaccatttacggagtaattcacatgggtcaggcacaatatgaggtgctaaacctttgttaactctaatcttccaacagccctgtgcataggcatcatgagctcccattttgcagatgagaaaactgaggctcagggaagtcaaaattttgccaggttacatagcaagtcagtgatcagtctacactgtcccatgctgccctagagctatagcaagctggaaacccagagggttctggctctcctccttcttcgcactcaggcacgctggctaccagatgagtttacattctcttttttcccctcttcaccagcttttggatgattaataaatttcaaagcaaatcatgcagggatcagcacagacttctcatttctatcaacagtgtcttctccaagaaacagtggagaatggtcttcagggaggcagccacctggactggaggaataaagggaaagtctattaccgagaagaacgtgcacttggccccatggggatgggctgcctctgacctcagcgtcctttttcatctctaatttctgtgattctgggattcaacataaacctcattcctcatgcagcgccccgagtggcag

SEQ ID NO: 208747 - DNA, 350 bp, Homo sapiens
tggaggctgaggtgggaggattgcttgagcctgggaggctgcagtgagccatgattatgccgctgcacttcagcctgggcaacagggtgagaccctgtctcacacaaaaaaaaacaaaaacaaaacattcatgtgcaggtgtttatgtggacataagtgtttgagtaaatatcaaggaattgggtcatatggtaagagtatatttacttttgtaagaatctgccaaactgttttccaaagtggctgtaccattttgcattcccaccagcagtgaaggagagttcctgttgcttcacatccttgacatcacaactggtgttgtcagtgttttgtcttgtggccgttctaat

SEQ ID NO: 208748 - DNA, 421 bp, Homo sapiens
cagatgtcagaaatcatttctgttttttcttctcaatatcagcatccaactggctgaccagcaatgtgtccccaaggaacagacgctggagttgggtgaagacaatctgcatgtcctaaggggttagctttgtaaatgaagggtaggaccagcttcctctcagccccagggcatccatctgctcccttaagaggctccacctccatcactgaggctgtcctctgggaggaaaggaacaacgtgctaatgttcactaaacatgccttgagatgggtcacccccagacaattatgaaacccaggcacagaaaaagactggagggtggctgaggacacatgaccttgtaaaatttccaaagcagaacctcaaaccaaagacattccgataaggtgtctgtgcctggggaagataaaagaagaga

SEQ ID NO: 208749 - DNA, 372 bp, Homo sapiens
gaacatgaccttcgaggagacactgacgtgactccttacagagcaaacgatttgcatgtaagtgaaatgcatgtaagtgaatgtgaaattggagcagtggcgggaagaaagattgtccaagccctggaataagacaggaatgtgaagaaacagcagaggaggaggaaggattgcagtcatgacccccacttcatgccatactcctcaagcatttgcttacatccagttatgtgagggaggtttgcggggcttggaagttgtataattgtatctgtgtagttggtctggtgggttttgcaacttgccctttgctgcactgggagggccatttttgtcccctccagcatcacctgatgttgcagcatagcccgc

SEQ ID NO: 208750 - DNA, 712 bp, Homo sapiens
atccgaagtccggaatcagggtgtcagcgggacggcttccttctgctggagctagagtgggaatctgtccgggcctttcttccagtttctggcattgcccacagtccttggggttccttggctcctagaagccatctctccgatcactgaacttcatcgctgtgatcgctgcctctgccatcatgtgaccttctctgtgtgtcttcacgcggccttctacggaggacaccagtctttggatggggacccaccttaacccagcatgacctcatctggtcataattacatctcaaagacccactttccaaaggaggtcatgtgctgagtctgtggtggacctgaagtctcgggagcaatgccaacccagcatgatgcctccccatgcttcgaggcgccctctgtgcaatggggatggcagcagtgatgcctcctccccggccgctggtgaaatgagaaaacaccggcaaagactccagagcatagcctggctccccgcaacagccaagccaggtggcctgttccagctggcatctctccagctgcagatgagatccccggggtcccttctgcctccttccctccaccccagagcagcccactcttgaaaacctgatgcttcctttagactttcagggcatatggctccagtcagagtccacctctggttttgttttgcctgttggtaaaccctggataaatggtcacatggaac

SEQ ID NO: 208751 - DNA, 216 bp, Homo sapiens
agcaagtggattcacaatgcaaccaagtcctagtccttacctttcctggttccattctccaacagaggaatttcaaggatacagaatctatgacatactttgaagacaaaggcattttaaactctaattaactcataatttgccttgagctgcttttttttgagacgaagtctcactcttgtccccaggctggagtgtgatggcgcagtcttggct

SEQ ID NO: 208752 - DNA, 411 bp, Homo sapiens
tcgactctagacgactcccttaagctacctgcacccggcctagattaatatttcttaaagtgtgatcagaacctcttcaggtacttgttaaaattcagattcctggacccaccctagacctactggatccaaatctctgcagacatggcctggacatcttcattataacaagcttccacatagattattttgtcagtggccatgtcttgctttgcttctgtggaaactgctctccatcttctggagtggaatgtcccccattgctatccacatggtcctcgcctccctgatactgtagtctcagatggcacctcctgaactgggccgagctcaatcactttcccagaccctgcccacctcgctggagctcagtggtcccatggtgggcaaaggagccaagtttgggcaaca

SEQ ID NO: 208753 - DNA, 282 bp, Homo sapiens
ctgaactagagcaatatgtcacacttttgaaagagtcttgtaaacagtttcttccctatgtagagacatctctgaagtttcttgtatggcttgtagtaagcaaaggtaattaacaaggattatacttttttcatttcctggaggggctggggaggataataccaatctgtgtgcaaactaaggatctggaagaactacactatttctcccttcctgtctccctctctggttttctgatcgatttgtctgtctcctctttatcctcttccttacacttgttct

SEQ ID NO: 208754 - DNA, 491 bp, Homo sapiens
ttaaatgtccataatggtccaaaaggaaacttttttggttagttaatttggttagttagtaagtaaaagaatgtgttgcgctctgtctgatttcatatttccaatagtggttttcaaaagatgaaaaattttaattagttgattgcactaataagatccgatttgttaacattttggttcataggaacagaatgaagaaccaattaaccaagtacagggtaaaactcagcagtaggactaaaatgtccattttcttaaggaagaaaagaagcagacactcaacaaccattttctgagtctacatggggaatccatataaatacacaagtttttattgtagtgtgaaagaatcaatgcctatcaatttacgttacttaatgaaggtaaattccaaacccagcatttcattttatttggtgtctttcttttatgttgctataaaggaatacctgaggctggataatttataaagaaaagagtttttatttggc

SEQ ID NO: 208755 - DNA, 757 bp, Homo sapiens
ataccaaccccgtacacccaccgaaggggatgtcccactttttccagcgctgggagcaaaaagataacagtgagcgaggttgaaaaaaacagggtcttgcttcgttgcccagcctggtctcaaactcttggcttcaagcaatcctcctgcctcagcctcccaaagtaagaaccatcaggaatggtggctcatgtctgtaatcccagcactttggaggaccgaggcaagaggattgcttgagcccaggagtgcaagaccagccttggcaacatagcaagaccttttctctacaaataatataaataattagcctgatgtggtggtgtgcacctttggtcctggctacctaggaggctgaggctggagaatcacttgaatccagaaggcggaggttgcagtgagccaagatcatgccactgcactccagcctggctgacagaatgagaccccatctccaaaaaaaatacaaaaataaaacacctgacagtgaaaagagcaatttgaagaaaaacaaaatttatcttcaatgtgaaaagcaatttataaaaatccgaatacttgccaggagcaacttgacaaaaaagacaaaggtggtagaagaaatgtaaccagcccacaattccaatgttgataacagatgagctccctttcaaggtgactgacatttacacaagtacacagagcaagaagaaggtctgagtgaactgccaagcattttaacttctcctgagaccaagtacatcaacagttctcttgg

SEQ ID NO: 208756 - DNA, 424 bp, Homo sapiens
aactgtgacttctaatttggtctcttagcatgccttcagcctctaggccctggggcccatttaaggtcatttaggcagaggccacatctgtggtatctgaattatctggctaagcatcctgtactcattgggtatttgccaaccatatgctagatcagggtctgtcagaatgccctcattttggaaaactatttaaatggcaagaaaaattagatcttagaaagaaaagcatgggtatagagctcaaggaattggcacagctgggtatcattagcaataatcaaaccttatccagtataaaaagcaacagaaagtgatgatgtgggagcagtgtgtatttgtatgtgtatgtaagtttatgtatgtatttgcgtatgtttgtatacatgtatatatctgcataataaatgtatataaaattttt

SEQ ID NO: 208757 - DNA, 485 bp, Homo sapiens
catccaccttgtcaaatgggctctcatccttttcaaagtggagccatgccatgtagagcagacactgcaagcttgatgggaatgaggcatatctggctcaaaagcatgtttatttgtgtgtttttaaaagtgtaaatattgaaccaacattttaaaatcaggaaattatacttaaaaagcattgatttctggcttccgttttaaaaatcaaaattgcgctttaaagttagcgcaattaaaaaatcatatcactatgatttttaaaaatcaaaagatgtgattataaaagttttttacaattttaaaataaataaataagatgtgactaactatgaactcacattgccacatgacaacagctagagctgaacagagactgcccccttgagatcctggatgaattctcgaactcaccacagtactcaccacttcccctcatctcctaaggctttaattgaaagtcagttactaaatctatagagaaa

SEQ ID NO: 208758 - DNA, 257 bp, Homo sapiens
ttcaggttctcttatatgtggatcctctagatctccctgctgtcttcatcttgttttttacctgcctccctttcttaattgtccaaaatctagagttgactcttaaagaatgcaggggttagtggctggcttccatctcaaggcagttgaaaaattgtgtataaccttttactccccccagatctaactattaatagcctattgttgagtggaagccttaccaataacataggcagtcagttaacatgtatcttgta

SEQ ID NO: 208759 - DNA, 372 bp, Homo sapiens
cagggattttgtctgttttgttgattgctgtagccctggcatcttgggcagtgccagcacctgttagcattaaatacatatttactgaatgaatgagtggcttcatgcttaaaagcaagaagagagaccttcatagagaagtaggaaaatgaattgttgcacaaataaagggccatgtaatgagagagagagagcaagagaaagagcaaacaattaaggagcagcagtggcttcctgcaggggagaccaatgccttctgtcctcagcggaaacagcttggcattcttccaattgatgaatggcatggaccaggagcactagttatcttcagcttctgagcatccgaataaataaacatacaaatgcataaca

SEQ ID NO: 208760 - DNA, 611 bp, Homo sapiens
agctaactccaagagactttcagtaaagaaaggctgaacaccccaaaatcattcagcatatttacaatatgtaaattatcacaaagcaaaacctttatacaaaccatgaaatacagcccaatagagtaaaaagccctaggatagaaagtagtgaaagactcattaacagtagcgttgacacatggcttcaattgcaactgtaacaattgcatgactgatctgttagtcaactgtggcacgtgttcccagtcaggggttctgctaattgaaagttagaatcataagacatttaaagattgtgcaggaacagcattattcgtacttggtactagaaagcagtaaaccgattctgacttggttaaatttaaaaatctctttcagttgtaatacacaagaacttcactgttaggccgtacgcggtggctcacgcctgtaatcccagcactttgggaggccgaggcgggaggatcgattgggcccaggagttcgacgtcggtgagccatgatcgtgtcactgcactccagactgggcgacagagcgaaaccatacctcattcgtacattcattcattcataattaataaaataagtacaacgcacttctacataat

SEQ ID NO: 208761 - DNA, 358 bp, Homo sapiens
ccaggaacgggaaacgttccaggaacgcctgctactgagatcccccacatcttggactggagagagaaaggctacgtgactcctgtgaaggatcagaaatttacaagctgatgctaaacacacatgtgataggatcagggctcaggctcaggtctgagcctcaatctgacactctctgtggagtgtcaggaaataacagataaatagcatcgaatttgaaggtttgccgagaagtgagagaaaaaactccctttgcctgcctcctaggcttcaaagctgtctgggccaagacgtcaatttagctgcatcatgggtcaatgaggcctttgcgaattaggcaaataaatcaagttactag

SEQ ID NO: 208762 - DNA, 238 bp, Homo sapiens
acaccccaggtaattgttttgtatttttagtagagatggggtttcgccatgttggccaggctggtctcaaactcctaacctcaggtgatccgcccacctcagcctctcagagtgttgggattacaggcgtgagcctccactgtgtctttttatggcttgaaagcttttttctttgtatcgtcgaataatatttcattatctgaacgtgccacagtttatttgtctattaatctactgg

SEQ ID NO: 208763 - DNA, 469 bp, Homo sapiens
  misc_feature (368)..(368): n is a, c, g, or t
  misc_feature (391)..(391): n is a, c, g, or t
  misc_feature (412)..(412): n is a, c, g, or t
  misc_feature (415)..(415): n is a, c, g, or t
  misc_feature (417)..(417): n is a, c, g, or t
  misc_feature (419)..(419): n is a, c, g, or t
  misc_feature (438)..(438): n is a, c, g, or t
  misc_feature (454)..(454): n is a, c, g, or t
ccatcatttttcctccctttaaatatgatgtgcctgggtgtggattttttggcatttataccgcttggtgttcttggagtgtctttgatctgtgatttgttgtctgtcattaattttagaaatttctccatgattatttcaaatatttctttcattcccttcctgctttcttcctctcatattttgataaggtataggttatatctttgattctgccctgcagctcgttgatgtcaccattgttgtttcttgttccttttctctttgaattccattttggtaagttctattgacatcatcaagttcattgactctttccttggctgtgtgccttctcctgaagaacctggatggaattcactacaganctgacagctggttccactttttnccactttttttctcttcttcnttntngnccttgggggaggaggccancttcttcctggggcantggctggaactgtgg

SEQ ID NO: 208764 - DNA, 564 bp, Homo sapiens
tgcctcctgggttcaagcgattctcctgcctcgcttcctgagtagctgggattctatcatgcctggctaatgttttgtatttttagtagagacggagtttctccatgttgtccaggctggtcttgaacttctgagcttaggtgatccacccacctcacccttccaaagtactaggattacagtcatgagccacagctcctggcctgaatgttttctttattgtatgttctgactcctgtttgagcttttactgctttgctcaggattttcacaacgtattggatatagtatgcataccctttgttttgtgtttaagagaaatgtctgtggtgttttattactatggtgtttttttgtgtttaagagaaatatctgtggtatattattatggaatttcttgttagtttgaagtgatctttatcagctaaaggaatgatttttatgttcttaatttttatttttatcagtgcttaattttaatttttatcagtgaatgagtgttgaaacatttagtgtcttttcaatttctgttaagaaatgagttaatttttgtttacccctttt

SEQ ID NO: 208765 - DNA, 436 bp, Homo sapiens
aacctaggtcttagtcccatttctgttcctgatgtgctgtgaataaacgcatctcatttcaatgtttgtatgagagaaacattctcaagactatgagtcagacaatgtctgcaaagcacacagttagctaagttttaggcaaagagctgatcaatcacatttctttttctttttttgagacagggtctcactgtgtcacccaggatagcgtgcagtggctggatcacagctcactgcagccttgaccttcccaggctcaggtgatcctcctgtctcagcctccaagtagctgggactacaggcatacaccaccacgcccagctaattttttttttttttttgagatggagtttcactcttgttgcccaggctggagtacaatggtacgatctcggctcactgcaacctctgcctcctgggttcaagcgattctcct

SEQ ID NO: 208766 - DNA, 462 bp, Homo sapiens
gaagagcttccatttttctttttcctctccagctatacttttagaaacttccttaaaggatgtttggtagaataaatctaagttctcttcctttttcctttcccactgctggacagcaatctgtccaatccacagtcacataagaatattcctttaaggccgatgcctgcttagccagttaaatccaaagacagtgtttgtaggaaagggccaggttaaatggtatttttaaggctaatttgggattgaccttattatcattggataatcagttaaggaaacaaaaaagtatggatttagcagtagatagaaatgagaaaattggccaaggccatcataaagacttagaatgcttatgctaaactatgtaacagtagtgtatgtattgtctgatatagttctcagttataggatctttgttctggggcacacaggaaggtagtgaaagctagtatgggtagt

SEQ ID NO: 208767 - DNA, 404 bp, Homo sapiens
gagccagatggggagaatacctaaagagaagaacatctgaagtgagtgaagaggaggatgaatttatcacagttgaaataggaaaagacattctaaactgggagacaggaccgattatggactttatttttccccttgccacatttcaaaaagagctagaggtaattcctaaagatatgagtatagaataaaagtaaattagatggaaaagcatctaaagatgctggataaaatacatggttaaccttgagagggaagcaaagaaattcctggagagcagaaacaagaaagaaatatacattcacaaaggtgagtaacattatagacagttttccctggagttactggccaatcctcggtggacaaaagcctaggttttaatgggctacttgctgagatgacag

SEQ ID NO: 208768 - DNA, 463 bp, Homo sapiens
ttaatttagagggtaaatacgtcaccagatttattttgtagtggtacctaccttttgtcttacactgaggtagtggttggaattttagaaacattcccatttaagtcaggaacaagaaaaatatctcctttatcactgttcatgttgtactgactgccccagctgatgcattaagagataaaaataagttataagcattagaaacaatggctgggtgcagtggctcatgcctgtaatcccaacactttgggaggccgaggcgggcagatcacctgacctcaagtcatccgcccacctgggcctcccaaagtgctgggattacaggtgtgagtcaccgtgcctggcttctttttttttttttccccagacagagtcttgctcttgtcaacccagctgggatgtagtgagctgaggtggtgcccctgcccttcaacctgggcaacaagagcaaaattttgtttca

SEQ ID NO: 208769 - DNA, 393 bp, Homo sapiens
ccaccaaagtaataaagcttcattaagcaaccccaaggaaatggaaatctatgaattgcctaagaattttaaaatcatattaaataggatcaaagagcttcaaaatagcagagatctaaaactaataaaaaaatgcataaacaaaatgagaaatataataaagacattgacatcataaaaggaaagaattcttgtgctgagaagatttgtagtcaaatttggaacactctagtactgtaatggaggtgtgtaaatctcgttaactttagtgtaaagcttgtaaaatattctgaatacaattatggaagtgagaaggtcaacagagtactttaataacatatttcatcatacagcgaaaggaagcaatgaacttgagtttagatcatacagtta

SEQ ID NO: 208770 - DNA, 549 bp, Homo sapiens
ctgggagacaagcctagggtaagagacagatttagttttcaccacatgtcattttgttggggcagacagcctctaaaatggcccccatttccccgcctctgatattcacacccttgcttggcccctccccttgagtatgggcaagagctataactcacttctgaccaacagaacacaggaaaggtgatggaatgtcacttccatgcttaggttacataagatagcaacttctgtcttgatagcagcccctctcgtttgatgctttatgaagcaagctgccatactggagaggcccatgtgcaaggagttgagggccaacaaccagcaagggactgaggcccttgatgaattgaattctgataacaactacatgagcttgaaagcagatcctatctcagttgagccttcagatgagaccccatcctggttgacaccttgattgcagccttgtgaatcagaagattcactgttaagcagttaaactgtgtccagatttctgacccactgaaactatgagatcatatatgtgtgtggttttaagctgccaaa

SEQ ID NO: 208771 - DNA, 438 bp, Homo sapiens
ctaaaattccaaccacaggtgttgaaagtagcccagtattgaggtatgggaacccgtgcagtcctcaggctctgagaaggaatgatgcaaaaccgaagacaatatgccatttgtgcagacatttagagagaacctaaaggtattacatgtgacactatatatatacatagatgtgtgcatacattgtatacatacatatatttttaaaacagtataagcaggagtctattttccaaagctttgaaaacaaaaactagtagaaattatgcaatttcttcaaatacaacatgccagaatttcaaatctggtacatctaaaatttcaaataccatatactaaaccctatttgggtccagaaaagcaacttctggctctcctagtaccaaattgtgactgcctgagtgagccgtaattaacagaaatcagctttctcaggtt

SEQ ID NO: 208772 - DNA, 620 bp, Homo sapiens
cttcctaggtaagaaatacatcagcaactggcaatgttgactgccagtcttcctattcctgccactcaggatagttctcatctatcaagcactggccctgtgcccgactgtacctgtgaagtagacataagtgcccacatttgacagaagagcccaccaatactcagaagggttaaggaatttgcccagaggcaaagccaggtctgtgagatgacaatgtcctaactatcacttgattaaagttatggggaaggccatccatttaatgaaaaagccaagacccccgaggaacaaacacaagaaaagcaaatagagaaaattggggatcagaatgaaagcggtggaaatagaagtgacctccacggtgccctctatcatcggagtagcagtgagagtggccaggggctggctctcgctgtggaaaactctggacagaagaaaaggacttggcagactgtgggtgcaaacaaccccaaccccaccagaccctgaatttcatgctttgggaatattcattctcggccgatgccaaagaaccaacatgtttctgtagatgtgcataaaacaaattgggacttcttgagaggtttttgcaggtctttggaattatgacaaggagt

SEQ ID NO: 208773 - DNA, 395 bp, Homo sapiens
tgtagctcagaagctgagggtttgcccctttcatagcagtggtccagagtcttcttctgtcatccggctggagtgcagtggcgtaatttcagttcactggaatctccacctcttggttcaagcaattctcatgcctcagcctccggagaaactgggattacaggtgtgcaccaccatgtcttgttaatatggctacttcttaatttccttccagctcataaaatttctgtgttcacatagttagattggttagatactaattctacctttgaaaaataataatcattttataaagaaatagaaatttgctcatttgagcatttaaaggattttcaaattgagaaactgtgtaggtagagttttgatataataaagtcaaagcagaaagatttcct

SEQ ID NO: 208774 - DNA, 535 bp, Homo sapiens
ataaaaggaataattttttaaatgctagggtagaataaaggattcaaagaagaattaaaggaagagagaggaaaagagaaagagaaggaatcataaatgttctgagatattaattgaagataaactacttcttgtagctttccattcatctttagatagagggcaccagaataagaaatgcttaacagtttccccgtgtttaatttttcacagaacatatttaaggggactacactaggtactataaggaatacaaggaataaaagaaacaggcaactgcttggctttttgactacaagacctgaaaaccattttgactacatacctgaaaagttaagtgacgctgcaagcagtatgtgattaagggctaaaccaaaaaagtaaaggaaagtgtaggtgtgctagtttctcattttacaatgtaaagttctgtaaatactgcctaatattaaagggtcaatgagcaaggccagaccaagggtctaggtcaggttcatgaatgaatggaatgatgattcatgcttgattcagaaaa

SEQ ID NO: 208775 - DNA, 513 bp, Homo sapiens
ctggggcagagaaccttgaaacttatcttctctcagcactagttttggggaagccatagagttgtgataatgtgggatgtacctgtacctgcctgttactgtgtgctactacacctgaattgggagctgtgagttggcatggaagccttgggtctgtggaactagatctgtataaaagatgggcaggaaatgggagttgcagcttctctgtgtgaaggtgacctatgtgccccttggctcttgctgcaccctgtgtgagtgaggaggcaaaagaagcagtgtactgaggtagctgctgggccctggatgaggtaaagatgctgaacctgccatatctcctcttctgtgttcttctgtaagggctaagtacatggagtaatacttagattggttcctgagcccgagtgctgtaacagctgctgggtcaatgtggtattctcaatccagtctctgggtttgttttttattttttgttgggggcaggcagtgcagcttaaataacagacatttatt

SEQ ID NO: 208776 - DNA, 382 bp, Homo sapiens
taataggagccagtccccacagcaggaggtaagcagtgggaaagcaattgaagctttatctgtatttatagccgctccccattggttgcattactgcctgagctccacctcctgtcagatcagtggtggcattagattctcaaaggagcatgaaccccattgtgaactgtgcatatgaaggatctaggttgtacactctttctgaggatctaatgcctgatgatctgtcactgtctcccaccactgccaccccctgcctaccttcatggaaaaagtttcttcatgaaactggtccctgtgccaaaaagattgggactgctgttctaatcagataaatagcatattcattagtatattcattcaacacaaaaatactacagat

SEQ ID NO: 208777 - DNA, 609 bp, Homo sapiens
gcccatagaagacatgactgaaaataaaattttcccctacttcgaagtgggcattttgttcctctccgtgttcagcagaataggggcttttcagcagtgccgaggatcttggaattggttaagttgtgtgctggcagttggtgggcaggatatctgcagtgaaggacgtcaagtatgcaagggttttattgttaaaatgtttttcatttggctacagaacatccactatgtgataaaactggcaaaagggaaacaagagtgcatggttagctcaggatactttatggagtatttaatagagataaatgtaatcttggacggatataccagtaaatagcttacatgatggaacaaaattctttacaaatcactgtgctaaaattggttttcaattctccatcatttctgactgccagaggttctgtgtatgagtgtggcaggaatatgcttgcaaagcagatccgaatccacgctgcgcgtggtgtgctgcttctgcgtttctgatgtcaactaaaactcagatggctaatatgataaaccttaattagcttaatacaataagctgttttattatttagtccttcattcttgtcttttgagagtcagtga

SEQ ID NO: 208778 - DNA, 513 bp, Homo sapiens
gggcccttaagcagactttgaaattatggagagctttcctgtttttaaaagcctctcaaactttcccttacttgctctccattcaattcaggggttaaaaaaatgttctactactgtctctggggtttcctctgaggttgctgatgccccttctttttaattgcatttttatttttctaacacctacctcttacacagaaatgatgccccttctgcatgttttgatgccggcacaggtgtaagcaatgagaactatgccatacctgcctccttgccaacagttgataaccacagacaggaagacactgatttcagggatgagaagaaacaggtgtcttagaaacacggtactctccactcatcctctggaatccttctataaccttcagtccctgtattctctgggtccacacatgccttcaagagctatgtcagcctccttgaggcttgagggggaaaaagtcactctgcttttctcttctctcattaaaaacaacaaaaactagacttcca

SEQ ID NO: 208779 - DNA, 492 bp, Homo sapiens
taaactccaccctgaagctaaattttctcttctgcaaaatggggataattacattatccttgtggtcttactttatggattcaattcatcattcaacaatgattcacagggctgggcgtggtggctcatgcctgtaatcccagcactttgcgaggctgaggcaggaggatcgcttggacccgggagctggaggttgcagtgagctgagatcacgccactgcactccagtttggatgatagagtgagatcctatctttaaaaaaaaaaaaaaaaaggttaactgaagatggggaaggggtgccctaggagtggggcacaacccagcaaacactccaaggtgggagggagcgcggtggggattaagacaggccacttctgtggccaaacactgtggaagctggggaggaccctgacctggctcaggtgttcacaggccccctctggctgtgtgtggggaacaggtggtggaggacagggaaggaggctttgcca

SEQ ID NO: 208780 - DNA, 227 bp, Homo sapiens
cttggataagcggatgagggctgattacgaaaaattaatcgtcattgaatttagtattactaaactcatagcatttgtccagatttgtaaacactattgattctaatgtgaaagatggaaaagcagtcccagaattggcttagcacagagactctaaatgatagtaaaacaacatattcaactttaattcctgtcttattgttaatgggaagttagttatggttcta

SEQ ID NO: 208781 - DNA, 660 bp, Homo sapiens
ttgttgtgtttatttgttcttagtcaaggtgtctaatctactatgctgtttccttatgcacagatggaaacttatcatgcataggagactctgaaggaaataatttttgtttaaactttgccttagaaacttcaagggaattcagaacaggatttctttaatgatctggctgtattatattaccgattaccaagctgaaaaatgcttggcagaacttttggcttctgaggttttggatgtcttccaggtaatctgcctcggaattttgaaatacaaataaatgagttccagttcaaattttaaaaaatctgagctgctaggcctttgtttaccttccatctgaacattttggtacagatataccaaccaagcagaaagaagataatcagtcgacatttctgaggttattagtggccttggtttaaaagaacaaaatgagagtaaatggtttaaaacttcatcatgtttcttcctagtaactggcttctggtgttggcatttattttccaggatgttttctcccagtttttatttgggagaggaggacgagggtgttctttgctgctttgtttctcccagagggaagattctgaatgttcctttgttaaacgttacacacgtagcttttgttttactttcttgtctggtagccaagtattt

SEQ ID NO: 208782 - DNA, 287 bp, Homo sapiens
atggacaatttattctgtgctaaatggtcccgaatagttttaaactacttaataccttttataattctctttccttctttgattttagttatcagttcctgctgctagtgcagctacagcgggcagcctctcccacttctaattttgtttctaattttctatgaggaaaaacaaacttgtcagtttgcctgcatctcctactaacctactgccatgcattggctagataaaagtgttaacgatagaatggcagggaatcactactctgtgcctatgatcttaaaact

SEQ ID NO: 208783 - DNA, 485 bp, Homo sapiens
acttccaggtcaggtcctcaaaaagggaaacaacttacttactgcatcctaccattttccttactcatgggctttgagtcacctccaccctgtagcagatggcacaccctggtgcagctgcaggccccaagacaaaagggtgtccctggatgaaatggaacaaaaacacctactcacccagaaccacctgcccactttcaggctgctaagtgagaaagaaatatgctttatcttgtttgagctactgcatatttggagtatttttgtgacagcaacttagccagtattgtaaagaaacagcattgtatctgtcttaagagaacgacaccctagtggcaccaacgctactcctccattcctccccaggactacaaggagataaagcccacactgcaaaccccatcaggcctgagaattatactcagacctgaggctgggcaaggggaataggcaactgagcaattggtatcatttcccattttaaa

SEQ ID NO: 208784 - DNA, 558 bp, Homo sapiens
ccagtcctttcaccagggtaattatgatgttcataaatgagattgttcatgtacaatttctacaccagtagccaatttctttaaatggaaaggaacagattatatatacctatgtctccaactagagctgaacatgattagtgagagaaaatgcaggcataacgccaatgccttcatactggattaccatgcacctgatggactcccccagggacacacagggagaagcatgtcttttgggcttggatatcgcctgcaacgttgtgacaggctgttaacacaggtctccaccacagcctctcccaatgcgtcctccatctgacacaccataaggctttttaaagcacgctcaaacagtgagatgccctttcattcaacttggtagacatctattgagcaccttctgttaccatgtaccaggcattgatgggagcccagttctgacccaaggctaggttttccagctcagcatgtccctggctcccaagcggatgaccgagttctccggtgttcccctgtcctttcgcgtccccacgcctgtgctcactccgcccctcc

SEQ ID NO: 208785 - DNA, 644 bp, Homo sapiens
gagccaattaaacctcttttctttatcaattacccagtcccaagaacttctttatagccgtgcaagaatggactaatacaggtgtctagaggataaccaagtcaaaaagtgaatggagaacacaatgtgaatatccgaagagcaacaaactttctagctcaagacttagatataggaggcagtatcaagtataggaaaggttacctcaaaatgacatctagagtaaaatgggctaaggaccagggatgaactacaaaaaacacagatatttaagaccacacagaggaagaaaaattctgtagagaatgagtggctacaaagatcagtgataaacaaggaaagagtagtgttactgaaagacagggtaaaggaattttaaagaccaactggctgcttttccagtgcatataaatgtttgtttatacaatactgtattctattaagagtgcaaaagcattatatctaaaaacacaatgcacataccttaatttaaaaataccttactgctggccgggcgtggtggctcacgcctgtaatcccagcactttgggaggccgagatgggtggatcacaaggtcaggagatcgagaccatcctggctaacacggtgaaactccatccctactaaaaaatacaaaaaatta

SEQ ID NO: 208786 - DNA, 269 bp, Homo sapiens
aaaattatttttaaatcttttgagttgtgtgtgtgttggtggagagtttgtggcagagattgacgataactcatccgtacacttagtgaatcatgactatgactttgatcatcctactttagaatgtagaggagataaacccaaggttgtgctgcttgtttcagaagctgaactaccaggaaaatagaatttatccatcttggtctttactatgtgcccagaatagtgcctgtcatgtaataggtgcttaataaatattcagtgactta

SEQ ID NO: 208787 - DNA, 526 bp, Homo sapiens
agccaatataagagaagcaacaaattataagaccttatcaattgatttttgaatggtgactatgggagtaacccccaaatcttgagtgtctacatggaccctgaaggagctggtattctgattttcagtttaaagatgtagccaagatcaaagttgctaaagcccaactcctttattaaaaccaatgctttctctaaggtccatatctctatcactgttgtctaccaccaggttggaaacctcagggtcactatacaccttcctctgccttaaagccaattcatcagtaagttcttacagttctgcttccttcatattttttctcacatctgtgtttccattccaatttcactgcaatcacctactgctttttatctagctgattgtttactaactggctctccaacctctttcactcctctagtcctgtttctttgcattcactaaatctaagatgactacattagcctgacactcaaggtcagttccgtatctcttctaactttactcatgtgtcctgtatatt

SEQ ID NO: 208788 - DNA, 890 bp, Homo sapiens
cttacggctttgggactaataaaaatctgccttgcgggtaaagatgggctgtgagttagccactactcagaaacctgggcctgtaccttgtctgcaccatcagggggccttgaaaataccatccaattaaggtgtatcaaatccatatctataggctttgagggtatttgggacacataggtagagaagacgtctctaaatgttgtccagagaatccacttggttaagtgactcctgagtatcctgctggcacataagttcattttaaaaagccaatatgagtgctttatatgtaccatgaacttagcattcagtatctctaaatctctcaccatgactccccacaaaacatgaaacccttttgacacagatgcacaaaaagactcggaagggttaactgcttgagttcacctagcttctcatggcagagcaggacccaactctacaatgaagcttgccatgcatcagaaccactcaccttcacctcaagcaaacatttcctctttctcacaccccatgggtgtccttgactaactgccacctgtaactgcactcatcttttgagatctttttccaaagaaagatggttctggtaaacacagcaagcagctacagccaacagcagccatgtaagtgacaccagcaatccccactattactaatacttggatgtcttctagtcagcaccaacatatttgttggcctttacacaaacgaaaccccatttcctccaagctaaataacatcatagtatagtaggcatcaaggatgatgtgcttgtttctggagcttcctacccacaaaccccatgttaagaaaacctcttttccactttactattaaagagtcaaataaaaatgatgcttattgctatccagcacttgacataa

SEQ ID NO: 208789 - DNA, 540 bp, Homo sapiens
tgggcgatttaaatatgcttgtgttcacatctattttaattattgtggtgtcataagtcttcgtctctggtagtgtaaatcagacaactttgttcattagaagtgtcaattttccactaaagaacctgttaagattattgggcttatactgaatctaaagatgagttcagggaactgtcccatccgtgaatattatgtaggtctgctttaattttttttgagacagtctcgctctatcgcccaggctggagtgcagtggcatgatctcagctcactgcaacttccacctcccggattcaagcaattctcctgccttcagcctcccaaatagctaggatcacaggtgagtgccaccgcaccggctaattttttgtatttttactagagacggggcttcgccatgttggccaggctggtcgtgaactcctgacctcaactgatccgcccaccttggtcaggtctgctttaatttctcacattagtgttttacagtttacattagaggtgttacatacacatctttcattgaatttattcctg

SEQ ID NO: 208790 - DNA, 370 bp, Homo sapiens
acaccataatgacaaatcttcttatttccagagacaagaaataaaggtcaaatttaattaatttacactgccaactcccaacgtcagtgacctttggtttgacacctcagtatgtcatgtgcctatttgccagtgctattcatcctgaaatcagacaccattctcaactgcactgtgaaggagctgttgcttatttatatccttcattgaattccttttccataattgtttggaacatcaagcttattgatgagcaacggaagctggaggtaacaagactggtgtttggagatagggattgtggccaaccagcaggacactggcaagtatcatgacagctgttgagactgcaaggtgttgaatcatcaga

SEQ ID NO: 208791 - DNA, 545 bp, Homo sapiens
ggagacacagttaagctaatataagccatagaagtttagagaataaatgctgtaaaacagaataaatcattttcccctttcagataaagagcaggctttcgcaaaaaaatcttttgtctctctctaaactgaatgactaagttctttcatgctaaagcttgcaactaagtttgtctaagaccccctagtcaacatacaataacaagcagtttctaaccagggtgtaaggtatttgatacctaaagcattctcatgactacaatgagtaaccaaactccacagcttgagaaattgttagacagaacccgcagatccctttctttgagaacatgagcctgtgaaattatctatctttgatctaatttggctttctcctcccttccgagttcactgaacatcacacaaaaatgattgcctggccactacaatgctaaatctggggcactaggaaactgttctagggacgctgaatagaagagctcccagggtaccttctattgttcactgcagagcagccaccttgatgaattgttttaagatatcgt

SEQ ID NO: 208792 - DNA, 747 bp, Homo sapiens
atacgtgtgctttcacgcctggctagttttttgattttttgtagaaatgcgggttctcactatattgcccaggctggttttgaaatcctggtctcaagtggtctttcctcccaaagtgctgggggctacagtcatgcgctaccacacctggctggtcttcttaaacttaataagacttgttatgtgtcctaacagaatgcaccaagttcaaacaagaatattatgtaatctgttcctttttactgtagagtcctgtacatatttttaatgtgtagttggtctatgatatgatttggatgtttgtacccttcaaatctcatgttgaaatgggattcccaatgtaggatgtggatccttgtgtggtgtgtttaggtcatgggagcaaatctcttgtaaatgacttcgcaccatccccgtggtgatcaatgagttctcattctgttaattcacatgagagctgcgtgtttaaagaacctggcactttcttttcatgcttgctccctctctccccatgcaatatgtctggtttctctttgccttcaccatgattgtaagcttacttagaccctcaccagatgcagatgttggcaccacacttattgtacattgtgcataactatgaagaaaacaaatcttttttctttaccagtctacgtacttttgcctttaatgatcttcacttataggccccacgtgggcccaacgaggaactcaccgtccggctatagggggtcgcggccttgtgcg

SEQ ID NO: 208793 - DNA, 670 bp, Homo sapiens
atacgtgtgctttcacgcctggctagttttttgattttttgtagaaatgcgggttctcactatattgcccaggctggttttgaaatcctggtctcaagtggtctttcctcccaaagtgctgggggctacagtcatgcgctaccacacctggctggtcttcttaaacttaataagacttgttatgtgtcctaacagaatgcaccaagttcaaacaagaatattatgtaatctgttcctttttactgtagagtcctgtacatatttttaatgtgtagttggtctatgatatgatttggatgtttgtacccttcaaatctcatgttgaaatgggattcccaatgtaggatgtggatccttgtgtggtgtgtttaggtcatgggagcaaatctcttgtaaatgacttcgcaccatccccgtggtgatcaatgagttctcattctgttaattcacatgagagctgcgtgtttaaagaacctggcactttcttttcatgcttgctccctctctccccatgcaatatgtctggtttctctttgccttcaccatgattgtaagcttacttagaccctcaccagatgcagatgttggcaccacacttaggggtaagggctcccggagggttaagggctcccggagggttaagggctcccggagggttaagcgctcccgg

SEQ ID NO: 208794 - DNA, 529 bp, Homo sapiens
atgccattgcactccagcctggtccacaagagtgaaactccgtctcaaaaaaaaaacaaacaaaaaaaacaactattgatttagtcaacaacttagatgaatcccctggaaattatgctaagggaaaaaaagacaatcccaaaaggctgcatactgtatgactcatgtttatctaacatttgtgaaatgacaaaacttcaggaaaaaaagtttagtaactgacaaaggctagagatggaggggctaggccaggcatggtggctcctgcctgtaatcccagccatttgggaggccaaggcaggcggattgcttgagctcacgagttcaagacgagcttgagcaacatggtaaaaccccatctctacaaaaacatacaaaaattagtggggcatggtggcaagtgcctgtagtcgcagctaatcaggaggctgaggtgggaggatcgcttaagcctgggacacagagggtgcagtgagctgagatgcaactactgcactccagcctgggcggcagagcaagacgctgtcac

SEQ ID NO: 208795 - DNA, 765 bp, Homo sapiens
ttgtctgtggaaagctgctacccccaggagacaagcatctgggagagcatctccacagaaaaagaaaagtaaagtgggagttgaagtcattcaggctacttgagacaacaatttttaaaagctcctattttccctcagttaccaggagattttcggtcaaagtgttcaaagaaaataggtggataattacctccattatttcacttggctttctatggatagacatcgtcaaagatattggcgagttcctcttgtcctactaatcttgatgggtattttgttgattcacttccaaactctgaagtaaatgtactgcttattataacgaaaaacaacctttaagatgccctctgtcctctacctctaggcagagtgagcagcagcttgtacagtgaaatttaaggtccttcttcccacactaataatgtcagatcgtcccaccaccaatacaggggaggaaaaaccctgagttccatttccaactctgccatgacttgctctgtgacccgaggcgagtcatcatccctgtcggtgactcagctggctacccataaaacgagaaagtcagtctgagtggtttccctaactgggttcctcatcaaaatcaccagtgatactgttaataatatgcagataattcaagtcctcatctcggacttactgaatcagactctgaggattaggagccacactgcatctgttttaacggctactggtatcatggtcagcaggtggatagtaacaatctgggcctctggcggggcc

SEQ ID NO: 208796 - DNA, 123 bp, Homo sapiens
ggtgactttaggtgtcagtgatttctactattgaattattacaaacatatatttttgttatgaaatacactatttaaatcaaatacttaaaaaatacttgccattaatttgattgtagttctg

SEQ ID NO: 208797 - DNA, 169 bp, Homo sapiens
actccagcctgggtgacagagtgagactctgtctcaaaaaaaagaaagaaagaaagaaaatcatttttaaatcacatttctttaaataactttataatgagaccttgacaaaagtgattttctaagtaaagccagtgtctttctgaagacaaactataatggagaatag

SEQ ID NO: 208798 - DNA, 193 bp, Homo sapiens
acttttaggttcaggagtgcatgtgcaggtttatgtaggtaaactcatgccacaggagtttggtgttcagtttattttgtcacccaggtaaaaagtatagtacctgataggtagctttttgatcctctccctcctctcactctccaccctgaagtagactccagtgtctgttgttcccttctgtcgtcttctc

SEQ ID NO: 208799 - DNA, 395 bp, Homo sapiens
aaaacagatttgattctagaaatcagaattctcacactaataggcttccatttaagaaggctctcatagctgacaacagactaccaaatgggttagatttttcaattttataccttagtccataagtgctaatttctcagtggaacagtcagataatatactactagagattactgaaacctctagtcacagctctgaattattaatttaaaaggttatgcaccagtgctaatataaattatctttaaaaactatctatatgggtaacattttaataagctttaaaacatgatttttctctctcaacgttgaaagcaaaatataatatagaattggctctgagtgagctatggatttattgtattttttccaaaagatttgcaccaccgttcctt

SEQ ID NO: 208800 - DNA, 618 bp, Homo sapiens
gtgagacacttgctatgcaagggcacattcaatttctaaagaactggaacaccaactgcaacttcttatatccttgtgctttagactggaatccacaatacgtaccagatataaagaaataaaatagcatgccaaagttaataaaatattttgagtgaaaaaaattgttgtatttatttgagacaggttcttgctctgtttcccaggctggagtgaagaggtgcaaacacggctcgctgcaacctcaacctcccgggcccaggtgatcctcccacctcagtctcccaagtagctgaggtgggaggactgcttgagcccaggaggcggaggttgcagtgagccaacattgcaccactgaactccggtctgagtgacagagcgagtccctgtcttaaatttaaaaagaaaaaaaaaagagcctttcctctaagatctggaacaagacaaagatgcccattttcatcacttttattcaatatagtactggaagtcctagccccagcaattaggcaagaggaaaaaacaaaggcaaacagtttggaaaggaaaaatctaaatctaatcatccttgtttgtaggcaacgtgatattatatttagaaacaccaaaagactccac

SEQ ID NO: 208801 - DNA, 418 bp, Homo sapiens
tcaaagtgccttttgccacattcagtaacatattcacaggtttcagggatgtgaatgtgggcatcttgagggggctgttatctgcctaatcacacatcatacaaggcagacagaggtctgcagggctttagaaaccaccagtgaggccaggtgcggtggctcacgcctgtaatacctgcactttggaaggctgaggcaggtggatcacttgaggtcagaagttcaagaccagcctggccaacatggcaaaaccctgtctctactaaaaatacaaaaaattagctggtgatggtggtgcgcacctgtaatcccagctactcaggaggctgaggcccgaacccaggaggcggaggttgcaatgagtcgagatcatgccagtgtactccagcctgggtgacagagcgagactctgactcaa

SEQ ID NO: 208802 - DNA, 137 bp, Homo sapiens
tccttgtcacctaaaagcttcctgagaacagaaatcacctgggttcagatctgctaggccgacgcgtgcccaacaccccacacacacccatcaaattagatggacgaggtgccagctacactttcaaagctagtgat

SEQ ID NO: 208803 - DNA, 525 bp, Homo sapiens
agcatatagggaaacgttaaggattataggcaccggagaggtaacccggcttgaggggttggttaaagggaaaggcgagacttagggcgagaccgagcggggctaattgaggcgacccggggaggggcgggaccgcggactggatttcgacttccaaattcccacgaggtataggagtctgagggttgcacaggaccttatgcattgtttgactcctccagagcctttagagaaacttctatcaggcccgcctgctaggcactagtcggggagataatgtagccagggagatgtggcggacagaaagggcagagaggctctctgaggagcggatggaggatcgtgggccgctttactgagaaggaagagaccctgcgagaaggagtagtgtcgacttggtcccgtcagccggaccccacctggacggctggggccacttgtggtcgccgggaggtgtcacctctaactcttcgtgtcaggagtttttctacctctccggagttctttggctctcaggaacctagc

SEQ ID NO: 208804 - DNA, 523 bp, Homo sapiens
tattcattttagaaggatgagggctaaggtttttatactcttaaaatgtatccttggctgtcggctaccacttacagatgagtaaaatatatgccacagtgagttgggaaatacgtttcttctcttatgctaatgatatgtttttaatatctgcaaccaggaacaatgaaaagaagaaactaagagagaaacggcatgtgtatttaactaccagaaaggactctttacaaactggatcaaaatgaaaactaccctccctagaagaagaactccattttgaaactgatttggtatcctgggattttatgttactgctgagttgtactggccagaataccaggaggctatggcgatcacaaccacacttcctactggatttccctacagttgaagtgaacagctggtgaggcccatcttgaaacatttcctaacccaaaatattcatttagaagggatccagcgcctggtagatactcaataaccgtaactattgttactaatttttccatatttagaaattccc

SEQ ID NO: 208805 - DNA, 356 bp, Homo sapiens
gcgggcaccgagtcggggccgcgacgggaacacccaggagggccggggcggctgagtccagagcgcgcagaggtcgggcggggacgactctccccatcggcccctgactgcgaagcccgggaccagccccgggcgggagccgccgtccgcccgctcacccaggagcttcccagtccagcaccccaaacggccaggagtaacaaggaaagttcgcaggcaggcgcagagcgcctgggtacctctaagcaaacccccaccctagttgcagccgggtcccaaagttaagatcccgcctctttactccttagggctaagttttccaccatcaaaacaagtctttgcttccagtttacaga

SEQ ID NO: 208806 - DNA, 177 bp, Homo sapiens
aaaaaaacgaagggccagtgcagagatctagagaggaaaagaacttgtcttgctggagaagcagtcaaggtagccaaggagagtactgagaagagtacgttggagtgagtaggtagggactctatggagtagggccttaaaggcgatgattaggccaggcgcggtggctcacacctg

SEQ ID NO: 208807 - DNA, 312 bp, Homo sapiens
ttacaacaaagcccaagacaagatggtccctcaatgcaaataaagtctacagactttcaagtactgagacagaatgcaagtattagcaaggggacttgaaactggtagtcttcctagttactaatgtcttagtaagtcatgtgttctctctggacatagaaattcatctatcctgtcagtttaggtggcttggtgggttactgcaatctgtcttagggttagctggttgtattttcagctatagtcttggtggtatctagtacttcagtagcataaatacttcagcagcataagcataaggcttctgggaag

SEQ ID NO: 208808 - DNA, 395 bp, Homo sapiens
acctgtgtgcatgctgcgtgttccctgcttgatctatgggcagcctctcctgggatgaaaacagtagctctgggtcatggctctgcagggagagaagacctggttaagacttgggctttggcaggctgtggtgactcatgcttgtaatcccagaactttaggttccaaggtgggaggattgcttgagcccaggagttcaagaccagcctagacaacatggagagaccccatctctgcaaaaaaatacaaaaatagccagatatggtggcacatgcttatagtcccagctactagggaggctgaggtgggtggatcacttgagcctgggaggttgaggctacggtgagctgtgattgcgctgctgcactccagcctgggcgactgagattccatca

SEQ ID NO: 208809 - DNA, 480 bp, Homo sapiens
agctggtatagtaatagtaatacctggcaaaattgtgtttaaatcaaaatatattagtaaggaaagggagaaactgcaaaatgataaaatctaccaagaagatatacaatgtaattgtcaataagaagtaaagccaagacttggagctaggtttgtgtctactggttcaatgttcctaccaacaaaaacctctaaagaacacagacctataaaaacctctacttgaagcccactgtgcaagtactggtaaatttcttgcccaaaatgaaaataataattataacctgcaccatagggctattgtaaaaaataccttaggattgagacacactgcagctatcatataaacgttaaataaaaataatgcttcctgtatccttactagggttgggcaaatccagatgtatattatacttttcacatatttcaaaatattttcaaatgttttggtttgggttcaacaaaaacctcaagtacaaa

SEQ ID NO: 208810 - DNA, 978 bp, Homo sapiens
cagagtgccagaggagggtggctgtacaagcacattttaattggcaaagcagagtcgctgcccagcaaggaagagtatgcaggggtttattctgctgctcttctatttcccctttaaggcatatatctcttacccctgcacccaccaactttagtcactcctagcacacagctggcggccgcccacccgcacccgcacctgcacccgcacctcagagagcttgctgatccctgagccgtgcactgaagcttccaagcagctctacctaaaggcaagcactgcctgctttttacaacatatacaatgggctaacctgatgcacagaaaaaccctgggtcacatgacaaccaacaaactcattgctcaggatggctctccgccacgtttctcaggcactgtgcttggctctgctggccaactgagtgagctggagcattttctcttgggtgtgcatacccctccacctgtccaactttaaaacacagaatcaacagggatgttacactaaaggggaccctagaaaccatataaacggtggaaaattgaggcctggactgacccataacaaatgagacatcacataatggcaaatgaaccatgaccagaaaacaaatctctttagtacacagtttagcgcttctgcttatacaggttgaacagccctaacccaaaaatccaaatcccaaactttttgagcgaagacatgaggctccaacgagcatatcagactttcggattaggaatggtcaaccagtaagttctgcaaatattcaaaatctgaaaagaatccaaagaagtctcaaatccaaaatgcttctggtcccaagcatttcggataagaaacctgtagtttaatcatcagtcaaaatttaagaatagagttgattttgggccgggcacggtggctcatgcctgtaatcccagcactttgggaggccaaggtgggtggagatcaggagatcaagaccatctggccga

SEQ ID NO: 208811 - DNA, 1355 bp, Homo sapiens
taaggacagatacacctcttaataaagcggtcaataagacagtctcttctaatcagctctgctggtcccggcctatttgagaagcagtcaaggtaaatggtgcccagtcttctgaccgaataggcgcacaggcaacgccatcctttcccccaacactgtactctccagtgctctcagccaacttaaccactgctgcgtgttactcccttggttcccaggacccatgacctcattctttccacctactctaagaattaatcatgattttctggggagaggggaatgaaagaaagttttaaaaaaaaaaaaaaaagtcttggaggtaaatatttctgagactctaaaatagctgtgaggctgggtgtggtggctcatgcctgtaatcccaggactttggaagggcaaggcaggcagatcacttgaggccaagagtttgagaccaggctggccaacatggtgaaaccccatctctactaaaaatacaaaaattacccaggcgtggtggcgggagcctgtaggtccagttacttgggaggctgaggcaggagaatcgcttgaatctggtaggcggatgctgggattacaggcgttagccaccatgcccggctctcatctttattttctgtgatttctgcatattagttgcgcagtctaaaatgctgacataacccacaaacactgttgtcctttccccaattcagaaagttgaagatttgaaacatttacatttgaaagttgattcttcccccatgagacacatctaagttaataactagcaggacttatgttcatttattctcattctctaccttcttttaccttaaattcatagcatttgtgagcatattttaaaacaaatattaatgaaaaaacaatagaatctcagtttcattcaggcgacgattttgcttttaagtttgcacaagacagcttatttattattaaggtagacaaaatcaattttgctttttaaacattttcataagagcctcctatccttttttcttgtgtccttacaaatatctgaatctcttcatgggtgttttagtttaatttgtacatttgtctgtcagtagctgggaaaattaaatattgtttcagccacaaaccatgccattctaaaattgagaatgctaaaatgtttcctttttggtacattttatcttctaaggcccatgtggcaagtgagaatgcagaactatgatcgaatttattttttcttttgaagtgttttagaaacattttggcatattttgagttttattgttttaaaaatagttaacagaccacgattcttattctgaactgttttaaatgaactgtggatttagatgcttcgaaactaaaatatgaga

SEQ ID NO: 208812 - DNA, 477 bp, Homo sapiens
gaagggccactgatagcatctgccacaacttcacatctcatccatctaaccattaggtttatctggttacctaatagtgatgataagaaataaacgtcataagatcaatcaacccaccaatgactcaacactatatcagggtctatggaaaaagaaaacaaaaattgttcactttctgtagaagatccatctgtccccttcctcctctctaacagggtcccgcttttgctcacaggatctgttctcctcctccgagcatggtgctcatcaaccaataatggtgactccattctacttgcaaatgcttagcttgggaatgggcatgaaatatgagggttaggtattgggggacactaaaagtctgccttgctgataaaaaaagacatagaacaagagacagggagggaagggagcgggaaggagttctgagagtgacactatcacctagactctgtctataattctcagtggctgaga

SEQ ID NO: 208813 - DNA, 374 bp, Homo sapiens
gaggaggatggaagaaccataactgcaagatgctaagaacctggtgaaggaagcagaaacacttgggaaagaactctaatacctgtgaagtgccaagatacgggcatagtcagaatgttgtgggcatataaagaagagagaaaataatacttatttccaactggagagattgggacactagcttagaaggagatagagtttaagttgggctatatataggatgacctaccatcccagttttaaaacttaaagtcctgcatctcaggacactcctcagttggctgagtgagtgataaaggacagttgtaacttcaagtttatctcaagggtgagacacagtgaagaaagtctcaatggcaatgggctgggagtgg

SEQ ID NO: 208814 - DNA, 248 bp, Homo sapiens
cagtgaaataagtcaagaaaacgaaataaaaggaatccagactagaaaagaagtaaaactaacttaattctcagatgacttgattatttacatagaatatcctataaaatcttaaggaaaaaaaaaagctacttgaatgaatatgagagttcaggaagtttccagaatacagatgaatatctaaaaattaacggggcaggaaatgtaaccacaacatgatactactagatgcctgttagaatgtcttt

SEQ ID NO: 208815 - DNA, 152 bp, Homo sapiens
gtgttcttgctgttgctaacagagagctaaatgttctgctttgaatgggatgtgtttgtttttattggtaggagtggcagaaggatgaatgaaggaattcatgttttttaactgtgtttctttaagtgacatgtctgccttctgggtagagg

SEQ ID NO: 208816 - DNA, 346 bp, Homo sapiens
cacttaggctggaatgcagtggcatggctcacggcagcctccgcctcctgagtttaagcaaattctcctgcctcagtctgccgagtagctgggattacaggtgtgcaccgccacgcttggctaatttttgtatttttagtagagatggggtttcaccatgttggccagactgtctcgaaatcctgacctcaggtgatccacccaccttggcctccaaaagtgctgggattaaaggtgtgagccaccacgcccggcctatacttaacttttttggaaactgccaaaatgttttccaaaatggctataccataccattttgcatttccactactaatgtatgacagtt

SEQ ID NO: 208817 - DNA, 387 bp, Homo sapiens
tccaacccatcccccactatcctctagggaccaccatttttattctctgcttctatgagtttgacttttagattccacatacaagtgagatcatgcagtatttgcccttctgtgcctggcttatttagcttaacataatattctttaggttcatctgtgttttcacaaatgataggatttccttatttttaaaagccaaataatattccattcatccaatatatattacatcttttaatccattcatttgttgatggacactttggttgattccatatcttggctattataaataatgctgcagtgaacatgggagttgcatatatctcttcaacatactgattttatttcccttgaatatatacctgcaagtggagttgttggacc

SEQ ID NO: 208818 - DNA, 501 bp, Homo sapiens
ggattacataaagatactaagtctacaactcactgacatccttgaaagagagggagagaaagcaagcaacctggaaaacatatttgagaatatcatccatgaaaatttccccaaactctctagataggaataaaattaaaattcaggaaatgctgagaaccactgtgagacagtatacaagatgaccatccctcaagacacacagtcatcagattctccaagtatagtatagtttgaagttgggtagtatgatacctccagcttaagttctttctacttatcattgctttggctatttttcatgtctccaaggtcgacataaaataaaaaaagaaagaaacagaaaaggcagctagagagaaggggtaaggccacttacaaagggaatcacatcagggtaacagtgaacctttcagcagaaatcctacaaggcagaagagattgggggcctatattcagcattcttttttttttttttttgagacagagtcaccaggctgg

SEQ ID NO: 208819 - DNA, 242 bp, Homo sapiens
tgagccatcacaccgggccaattagttatttttaaaacatttactttactgattcattttcaaaatcgagaacactatgaatccaaatataaattaagtaataatgagtctatctctagaatttatcttttctttttcctccctctccctcttgtactctacacatgctgcagatgtgtcttttctctatctgcactcctaccactgcctgaaggcagctcttactacctcttgcttgaatg

SEQ ID NO: 208820 - DNA, 373 bp, Homo sapiens
tataccacattttatttatctgtttatcaggccaggcatggtggctcacatctgtaatcccagcactttgggaggctgaggcaggaggattacttgagcctaggagttcaaaaccagcctgggcaacacagggagacctcgtgtctacaaataataaaagattagctgggcatggtggcacatgcctgtagtctcagctactcaggaggctgaggtgggaaggatggcttgagccttggagatggaggctgcagtaagccactgcactccagcctgggcaacagagcaaaagcctgtctccaaataatgaatgaatgaatgaatgaatgaatgaatgaatgataaataaatatttgttaatcagttgatggat

SEQ ID NO: 208821 - DNA, 142 bp, Homo sapiens
ccaaataaatatttctatttaaaaaatactgcactccctagtatcatataataaaaagcaagataggaaaagcgtccttagaatttaaaggtgttagaattcaattagatataacgtatctcctgacctcgtgatccgcccg

SEQ ID NO: 208822 - DNA, 404 bp, Homo sapiens
ctcagtggctcatgcctataatcccaacacttacgaaggccgaggcaggaggactgcttgagcccaggaattcaagactggcctaggcaacattgcaagacactgtctctacaaaaactttaaaaattagccaggtgtggtggcaaacacctgcagtcctaactactcaggaggctaaggcagaaggatcccttgagcacaggagtttaaggttgcagtaagctatgatctgagagacagagcacaactctgtctctctctaaaaaaaaaaaaaatttggacaggtgtggtggctcacgcctgtaatcccagcactttgggaggccaaggtgggtggatcacctgaggttaggagttcaagaccagcctggtcaacatggtgaaaccccatctctactaaaaaa

SEQ ID NO: 208823 - DNA, 366 bp, Homo sapiens
agtctttttacttgctttgagtttttgatgtatgcgatgtgtatgcagtagtggtaatccatagcataatattcttgacatttaagcaccctcaaaaaaaataataaaaacctgtagatttatggatcctgttcaaaaaatggaagaggataaggatcacccttttccccctcgccttttacattttgcttttatgggggaaattatttaacaaacaaggagagcaaacctcaggatcagaggatgtaccccattcccgctacccttaggtctatctatggaattgaaaagaaactattgagactcaaagatactgtcagatccaagaatctgatttcaccaccaaattaaaataactacagcatt

SEQ ID NO: 208824 - DNA, 163 bp, Homo sapiens
aaagaaatacagtggaaaactcccctatgttttactaatatactgatatatgtgtgattaatagaaacatcaaaataaaaataattcaaagtaatcagtattaaaattaatatttgattaacatttaataggcaattttttaagctaggtttccaaattaaag

SEQ ID NO: 208825 - DNA, 214 bp, Homo sapiens
aaaatgattagttcttccttaaaaaaattttatgtagaaaacaaattaatgatggaccttctgcccaaagcagctttgaccaggagatctgagattgatgctgggactgctgctgagatccagaggatcaacaagctcatagcagcttcctcagcaccatgagatctggattgttaaacatttaggagttaaaccatgtgtccatatgggggtc

SEQ ID NO: 208826 - DNA, 140 bp, Homo sapiens
gtacatgagatgattttaggtgatttacagatgtttcttgagcttctcttgctggtcactgcttggcacagtccagaagacaatctgttttccccgatgcctgcttctgttgggctgtccactcctgccccacccattca

SEQ ID NO: 208827 - DNA, 411 bp, Homo sapiens
tttgcaatcttaagagagagattttctttgtaaaaggtggctgtgaaatttccaaatgtagcttatgtttgcagccaaaagtaaggcccttgtgtttttagtgaggtgaccttgatttgctgtagctctgtaaaatctcatctccattctgagcgtggatgtgtgttggacagttattgcttactaactggtgctagtctagttgaagcattcccgtgataaatgctagggaaggcagcagaagcctcacaacctagtgctaaccagagagcagtcaatggcctccgtgatccctgccccatgccctggggacctgataaaggacattcttttcttttcttcaagatccttttaaagtttgattctctggattatctaataatttactattttgggttgtggcaactttgc

SEQ ID NO: 208828 - DNA, 737 bp, Homo sapiens
attggcgggcgggcgcgctgagggcagcgccggggacgcggcctcagcaggggcgccccgccacggggagcagcccaggcgctcgccccaggacgttgtccggcgggctgggctgggacccctctgcctccagggcgcgtcgggagcagcagggatcggtgccgcgccgtgagggtgcgcagaggctgccctcgggcccgctacccacagaccctccgcggggcagcgtctccgggccggccgcgccctggtccgccgaccgcagacgacttgtgacacggacggcgcgtcctgctgaccccagccggcgccgagggcttggaatctcgagcgggaaaagactaccatggctgcaggagtcttgcctcagaatgaacaaccatattctaccttggtgaataacagcgagtgtgttgcaaacatgaaagtttacttctacaatttcggatggaaggattatggtgtagcgtctcttactactatcctagatatggtgaaggtgatgacatttgccttacaggaaggaaaagtagctatccattgtcatgcagggcttggtcgaacaggtgttttaatagcctgttacttagtttttgcaacgagaatgactgctgaccaagcaattatatttgtgcgggcaaagcgacccaattccatacaaaccagaggacagctcctctgtgtaagggaatttactcagtttctaactcctctccgcaatatattctcttgctgtg

SEQ ID NO: 208829 - DNA, 990 bp, Homo sapiens
ctctcagtgaaagttcctcactgagtgagtggggctgactcttcctgcctccggctcttgcctcccagtgccatgcaggtgcaggatgcaaccaggcggccctcagccgtgcgcttcctcagctcctttctccagggccgccggcactccacctcagacccagtactgcggctgcagcaggcccggcggggctctggcttgggctccggctctgccacgaagctgctgtcctcgtcctctctccaggtgatggtggctgtttcctcagtcagccatgcagagggaaacccaactttccccgaaagaaaaagaaatttagaacgtccaacaccaaagtacacaaaagtaggggagcgtttacggcatgtcattcctggacacatggcatgttccatggcgtgtggcggtagagcttgcaagtatgagaacccagcccgctggagtgagcaggagcaagccattaagggggtttactcatcctgggtcactgataatatactggccatggcccgccatcctctgagctcctggagaagtaccacatcattgatcagttcctcagccatggcataaaaacaataatcaacctccagcgccctggtgagcatgctagctgtgggaaccctctggaacaagaaagtggcttcacataccttcctgaggctttcatggaggctggcatttacttctacaatttcggatggaaggattatggtgtagcgtctcttactactatcctagatatggtgaaggtgatgacatttgccttacaggaaggaaaagtagctatccattgtcatgcagggcttggtcgaacaggtgttttaatagcctgttacttagtttttgcaacgagaatgactgctgaccaagcaattatatttgtgcgggcaaagcgacccaattccatacaaaccagaggacagctcctctgtgtaagggaatttactcagtttctaactcctctccgcaatatattctcttgctgtg

SEQ ID NO: 208830 - DNA, 1108 bp, Homo sapiens
attggcgggcgggcgcgctgagggcagcgccggggacgcggcctcagcaggggcgccccgccacggggagcagcccaggcgctcgccccaggacgttgtccggcgggctgggctgggacccctctgcctccagggcgcgtcgggagcagcagggatcggtgccgcgccgtgagggtgcgcagaggctgccctcgggcccgctacccacagaccctccgcggggcagcgtctccgggccggccgcgccctggtccgccgaccgcagacgacttgtgacacggacggcgcgtcctgctgaccccagccggcgccgagggcttggaatctcgagcgggaaaagactaccatggctgcaggagtcttgcctcagaatgaacaaccatattctaccttggtgaataacagcgagtgtgttgcaaacatgaaaggaaatttagaacgtccaacaccaaagtacacaaaagtaggggagcgtttacggcatgtcattcctggacacatggcatgttccatggcgtgtggcggtagagcttgcaagtatgagaacccagcccgctggagtgagcaggagcaagccattaagggggtttactcatcctgggtcactgataatatactggccatggcccgccatcctctgagctcctggagaagtaccacatcattgatcagttcctcagccatggcataaaaacaataatcaacctccagcgccctggtgagcatgctagctgtgggaaccctctggaacaagaaagtggcttcacataccttcctgaggctttcatggaggctggcatttacttctacaatttcggatggaaggattatggtgtagcgtctcttactactatcctagatatggtgaaggtgatgacatttgccttacaggaaggaaaagtagctatccattgtcatgcagggcttggtcgaacaggtgttttaatagcctgttacttagtttttgcaacgagaatgactgctgaccaagcaattatatttgtgcgggcaaagcgacccaattccatacaaaccagaggacagctcctctgtgtaagggaatttactcagtttctaactcctctccgcaatatattctcttgctgtg

SEQ ID NO: 208831 - DNA, 462 bp, Homo sapiens
taaaaaataaaaaataaataaaaaaaataaaaaactcaaaagaacatcctcagaaaaattcaagagaatacagcatctatgaaatcagtgctggtattatttccagaaaaacagaatattaaaaattgaaggaaataaatcaaaaaataataatagaaaaacttccctggggccaggcatggtggctaatccctgtaatcccagcactttggaaggctgaggcaggcagatcatgaggtcaggagttcgagaccagcctgaccagcatggtgaaaccccatttctactaaaaatacaaaaaaaattagtgggcatggtagggcgtgcctgtagtcccagctactcggaaggctgaggcaggagaattgcttgaactcggcaggtggaggctgcagtgagccgaggtcacgccactgcactccagcctggacaacagagccaggctccatctcgacaaaaaaa

SEQ ID NO: 208832 - DNA, 685 bp, Homo sapiens
tacaccccatggtccttgagcacacatgtcctgggccctggcatgcactcccccaggcgtcatgtatacacacagtccacacgtttgcaaacgggcagacacacctccctcttgcacatccgtgcacacccagcccatatcttcctgcccctgcgtgtgcacacagtcccagttagtttacaccgtgcacacctctccatacatacaggttcccagctgtgcgaccactcacccacacgtatgcatttattttttaacacacacatgcataccatttagtaggaccccatgtacaagcatctgagtgctttacaaattcaaatgtatttaatccccctatcaacactaggaggtagtttctgttattagcgccattttacaaatgaggaaactgaggtgtagagcagttagatcggtgtagagaagctagatcgtgtgctcaaggcttcagtccaggctcttggccctgacacgatgctgtttgcctgttgaagatgtgtgtgcatgcatgcaccattcacactgtgaacgtgtcccagcatggccacaccccctcaccgtatacacatatggccatgagcactcaatctcaaggtcatggatgcacatgcctcacacctatgcatggaaggacactcggcacacatacttgtctctgcacacacacaccacttgcacacccatg

SEQ ID NO: 208833 - DNA, 458 bp, Homo sapiens
aaaaaatgtgaccattaaaaatggctagaatagcttaataatataatatcatatttattctatgatttccagtggaatgaactgttatggtctccctgattgattataattttaataaacttggttgtgtgtggctaggaacaagttcattccaagttcattttttccctgatgtagataaaattccatcagctaagttctgctactgtgccccatctccagacttctagctaaatgaagtactacagggctctgattcttgctcaaactcactactgctaaactgaaatgcttgaggtattcaaaactgttattttctgcgtcaatttgatatatgtgcagcatttcttttttaaaaggacatgttctgaatgtttagagtgtgtagataaccactcccaccccccaacacactcacgtaacagaagaaactttggatacttttattgtgtaaactt

SEQ ID NO: 208834 - DNA, 507 bp, Homo sapiens
ccatggatagtgaattggggtcataacaacgtccttatcatacttaacaattttttaaattgtaatacaaaatgtgatgatataaagagctgttctatatatttaaatgactatttaaatatatgtatttcttttccaatttgtgattaagatcaatagaggtagtagtgatatatttccctctcataagtttcacactgcttatctctgaaaacttcaaagttgtcaggtgaggagtgcctatttatctaatttctattccagtatgttttcactttagatttgtcacataaaatggagactgcgcaatgacatgcaaagtaatctgtttatgtgtctaaataaaatatgtgaagtatttacatggtttgtgtgaaagtccaagtaggaaatatgcagaaggatttttagcttagctgtatatttttgtcaggaaattatcatcatgtgaatgtttatgttggagctaacaagcatcactctcattaaaaacaaaacaaaagcaga

SEQ ID NO: 208835 - DNA, 450 bp, Homo sapiens
ggtcaaagaatccactaaatttcaagaaagattaattctgaggttgataagtcttgagtatcaatttctggccacaaaggaaaatgccagatttcaaaaggcagaaataatcacttttttctcatccataatagttctcaaatttaggaattaccaacagtaataataggagcaaaaaaattagtcccagtaataaggaatttttaaaactttcatgtttcatggattgaagtagaaaccttaaaaattatagaatatctagaaaaaatattacaaaaacaagcatatcaaaactgaaatggcagggcaaaacttacattctgagagaagtttatagccttaagtaactgtatagctgagtcagaaaaaaatgaaataagcattcacctactccccaaattagaagataataacacatacaaaagcagaaattaatgaattaggaaagag

SEQ ID NO: 208836 - DNA, 329 bp, Homo sapiens
tggtgaaaccccatctctactaaaaatacaaaaattagccaggcatggtggcgggcgcctgtaatcacagctacttgggaggctgaagcaggagaatcgcttcaacctgggaggtgggagttgcagtgagccactgcatttcaggctggacgacagagcaaaactccatctcagggaaaaaaaaaacactttgggaggccaaggtgagaggatcacttgaggtcagaagttcgagaccagctggccaatatggtgaaaccgcgtgtctactaaaaatacaaaaattagccaggcatggtggcacacgcctgtaattccagctgctcagg

SEQ ID NO: 208837 - DNA, 140 bp, Homo sapiens
ctgttgaatcttatcttgcccagaaaccctgcccaaatgccatcttagccagaagccctaaccaaatgagacaagatgaaaggtcttgcttaccggcactttcgttttaaactcatttcgatagtatttaatgccaatgt

SEQ ID NO: 208838 - DNA, 468 bp, Homo sapiens
agaagcaagattgcagacatttctgcagcattatgtacagaaagcctgccatgttcattagctgattttaaaatcattagtaggcatttaaagcagtgacttacttaccttattgtagtttgagaataatacaaccaaacttcactaagactttaaaattcaccctagtgaattttaaactgccctccccattaatttgccttaaattacagtgttgctttttgccaaggacctttcagagaaatgggccatttcatctacaggttggagaaaagtttaattctggggttaaagcgtaaatgaaagagagtgtgctgaagaacagtaaggcttaaaaacccaagttatgtgtaaattgttctcaactcaagagaatatttgtccacctacatttttaattcctctttttaaaagtcctctctgctcttcaacgatgctctgctctgtgtcactcaaggacactggtgg

SEQ ID NO: 208839 - DNA, 216 bp, Homo sapiens
cttggcttcccaaagtgttgggattacaggcatgagccaccatacccagcctacgggtctatttctattgattgttgttttctccctcttgattatgggtcacatttgcctgcttctttgcatgtctcatgatgtattatcattattttttatttttttgagccaagatcatgcccctgcactctagcctgagtgacagagtgagactctgtccca

SEQ ID NO: 208840 - DNA, 280 bp, Homo sapiens
acatttctgtacagcaatgaaagaaaattttttaaaaaaatcttgtcaatgtctgtgtaagcatgaccacatcattgcccttcttaccctgcatccagcatttcaattaagattatcatggtatgcccaagcgtatactctgtgttttttcctagacatttctaatccagaaatttctgcttccactgcttccacatcagataggcctgaaattagactctgtgagggatgaaggcatcgattactagggtagatgcagtggctgccccctctctccagg

SEQ ID NO: 208841 - DNA, 392 bp, Homo sapiens
ataaataaatttaagaggcagagagagattttagtgacaattagagcgaagtgtgttttgtaatgatggaactgcttttgaaccctggttacatttttaaaaggtcaggccaggcagcacagacacaatccccagtgttgctgatgtctgtgagtgatcactttggtgacagtgaggcatcaacaatcagtttggcaatagcaacattatttattctatatcttctttttccttcaaagtgttttttctacattatgaaaaacaatgggagggaaggccagtgtgactattaataagacttgcactaagcattttgcatcttgtcaagcagaccatatttttagtgcatctactttttgataaatacattacatggcctggaccaaaacctt

SEQ ID NO: 208842 - DNA, 526 bp, Homo sapiens
tatcctactgtgcactgtgaactgttctactgtgtactgtcctactgggtaccgtgaactgtcttactgtgaactgtcctattgtgtactgtcctactgtgtactgtgaactgtcttactgtgaactgtcctactgtgtactgtaaactgccctactgtgtactgtcctactgtgcactgtgaactgttctactgtgtactgtcctactgggtaccgtgaactgtcttactgtgaactgtcctactgtgtactctgaactgtcctaaactgttctactgtgtactgtcctactgtcctaccagtgtcatggaaactgtcctattgattgctgtgctgctgtgatggctggaagattggcattaactgaaatcatcatggcctgaaaggccgttgagactttagggatatttactgctatgccacatgtccctaacccctgtgcagttcttgttaatgcgttttctttctgttttcctaccatctctgctttctcctgacacttgcatccagaggtaccgagctcca

SEQ ID NO: 208843 - DNA, 451 bp, Homo sapiens
agcatggctagggagacctcaggaaacacaatcatggccgaaggtgaaggggaagcaaggcactttcttcagaaggcggcaggaaggagaagtgatgagtgaaagaagaagagccgcttaaaaagtcatcagatctcgtgagagctcactatcaagaacagcatgggggaaaccatgcccatgattcaattacctccacctggtctctcccttgacacgtggggattatggggatgacaattcaagatgagatttgggtagggacacaaagcctaaccttatcaattggactagcttgaactgatctctgtagaagacatgtctattagaaagaaatttcaaattaagtggaaggcagggcagcaccctttaataagacagaccaaggtgggagaataagggtgagagctctgaaagaggtgtcagcataagcaattgtatgctcccacct

SEQ ID NO: 208844 - DNA, 530 bp, Homo sapiens
tagagaaggctgaagagagagcagaaaagaggaaagatggaataaagtctacagaagcagtggcaaaggatagatgtatgtattctcagaaggaaagatggatggattgacttataaaagaaatggaggaaggaaaaacagctaaatgggacagagaagcaaagatagaagacagaagcaagggcatgtgggacagcaaaacgaagactaacggaatataaaagcaagaatggataaagacagatggaaaatcgtaagagggtcaaaaagaaggaaataagaacgatgtcagtgaaatgatagaataggaagtcctggactttcctttcatccacagacacactgattcaacagcaatacacagatcaattccctttgtgagaaacaaactagttgagaagctcctgcacattgggagaatgtgaaactagccacactgaaactagcaggagacaccctctcatcaaaatctccactcttggcacagagccatatgattgagacaaaactctcagctcctaggttttccc

SEQ ID NO: 208845 - DNA, 704 bp, Homo sapiens
ggtctcaagctcttggctttaagtgattctcctgcatcgttctcccagagtgctgggattacaggtgtgagccaccgggctggccctgcttcgtttctgtagatgagagggatggtttcatggacttctcttcatggtgcagcctaattgttactctttggacttcttccagctttcatatatccttaataaccaatatgtaataatcagaactgtgcagagtggtacagatgtggacggtctagatcacgtgtagagcaggatgatgttttgcttagcttctagcaccctttatgatgctatgaagagtttcttagacttgggagctgcagaaagctgttagatcagcttgataatctgtagaccatcagagccatttcattcctaatttctgacctgtagctgatagcttaggacccatcatctttaaataatagtttgaattattttaaccacactagggctagatctaatctgtagttttctgccctcttgcctggccctttgagaacttctgaagttcatctcagtttgccgtttcccttactgagacagcttggagtcagcagacctgtagacactgctatatcatccccttgtcagacaattttatagaaatgttaagcaagattggcctagagatcagccctaggaagcctgcactgcttagaattctccatagagagaaatgtccgtttttcagg

SEQ ID NO: 208846 - DNA, 457 bp, Homo sapiens
agtgtctccactgcagctttctactggccaaatttgtgaggacccacctgtaacaaggggcaactggctatctttagtcatcagcatcaaatccatcttcagcccgaaagacagaaataatttaatcctagacttggatagattcggtgagttttttctttcatgctctatgtaagaaaaacccacaaagaaagcagccaaaaatgacttttacccctgagttgagatcacctagattttattcatcagtgaaagctccgagaaacgacaaagccttgtgaaaatacacacagttgtccctcagtatccactggggattagttccaagatccctgcagataccaaaattcagggatgctctaagtcccttatataaaatggcacagtatttgcacataacttttacatcatctctagattacttataacacctaataaaatgtaaatgctatgtaaa

SEQ ID NO: 208847 - DNA, 389 bp, Homo sapiens
tcattacacagataaggaaataggaacacccttctccccctcttaccactgagtgactttccactaacgtgagccaaacttgggttttaaccaacccactctcagcaaatgaacagcgccctaaagttaaagaatctctcctctgtgttccctgtaatagatgcacctaaccgacaggtaaatattcacaggctgctctacaactaataaaatgatatattcagtctattaaaacaagttaaaacatgacagtggaaataaattttagcaaaactatttctaaactattttaaactgccaaaccactagcttcctttaatttgggctttcccatgttaatgtacaacattcctagtggtggaaaagcttcagagaaagaacaagacaca

SEQ ID NO: 208848 - DNA, 381 bp, Homo sapiens
tccttggcactcttttgttattaaaacttaaaacttctctgttggtttaaatgttgaccattattattataacagaaaaacagttttacccactggttaaaggaaaaaaaaatcaatctcaaactatgacgtccgagttatactcctggctactatttatctttgaatcagccatctaaccaacatttaattggcttgcttcctcagagatatttattcttaacttgtttagtctgccagtaaatgaccaccaaatcgtcagttttgtttttattacagtctttgctggtttgcttatttgtgcatcactttatttaaaaagagtttagggcaactaatttattttttgtaaaaataaattttgaaataaaatgtggcaaa

SEQ ID NO: 208849 - DNA, 102 bp, Homo sapiens
gttatggacttaataaatcacattgaaatggaacagaagttcatttattgctaccggaacagaaagactagaatgttgtttatctgcctggcccttggttca

SEQ ID NO: 208850 - DNA, 622 bp, Homo sapiens
tgctagacatttctttttcaaggtactccttttggcaaacccacttgagttccattcttcagataaagagccaagatgcactgaaattacatgaccttctcagagactcccacccaaagagaggcacagctgggctgaactcccatctccctctgatgggcgagcccagctccttccccctgcagggaccccttagagcagggcctcctcaccatcactgagcaaacctgcataagtggcagtgaacaaaactgacacctgaatcatgcacctcaactacaacacccacatttgaaaggaaaccttccttgccccccttggaggaagtgagctcagttttgggagaggctggggtgtgtatcaagcaccactctcagtaaagctacagtggtagccatggtaggagtgatttttaatatttcacatacaaaaaaaaacctgctttaagaattgagaaccaggaaaaattgttcttccacgtgaatggctgtgcttccttctctcggggactgtgggtggcttacccatggactcctttgaactggaagccagtgtcatccctgtaaacatgttagtctcctgtgagactgttttcacaaccttttaaaattatgatttttat

SEQ ID NO: 208851 - DNA, 445 bp, Homo sapiens
taggatgcttatgacatcactaggtgataagaaattttatctccatcataacctcctgggaccaccaatgtatatgtggtccttcattggctgaacattatatagcacataattttatatatatataaaatgtatatacatattatatttaatatacaatattatatgttatatacatatatatgcctctgtgtgtgtgtgtgtgtgtgtgtgtgtgagtgtgtgtgtgtgtgtgtgtgtgtgtgtatgctcagcccatagaagcatctcccaactggctcatatgtctttttgacatgtccccatcattgagcatttttcttactctctaacacaggagacttaagtgtttggtatttgataatactatttttaccaagtgataattttaaataacattactgttatttatttgttagttgtaaaataagtacttgtgcagaaa

SEQ ID NO: 208852 - DNA, 514 bp, Homo sapiens
tctaaaaatctaattctgttggccaagtccagcataactttctcagtctttgtctacaagcacattgttacaacctcggggcctatcatatccctaatgcaatgtctttcttaatttgaaaattagtatgactatttcaatggaaacaaatcccaattgggagatttttaaaattacttatatgtgtatgtatagcattctcagtgttgactagatgtgcttatcagcagtgccagaattttatgaaacatttttgcagccatttttcatcaaagcatagaagctttccctacattctgctcactttattttaatagttaccttcttcaattcagttgcatcatcagtgtttatttaccactaaaagatattgaaaattcctaaagtttgaagttctatcttttgtaaattaaatgtgtgcttcaccatatttgcaaaccatgagttacttcaaagaaggactatttgtagaagttttcattctgtgaaatttcagaatatggagtaccagttc

SEQ ID NO: 208853 - DNA, 834 bp, Homo sapiens
tcatcttgggcctgtgttatctgagcacattcatttcctttcttattgaagctattctgaggcaagttttctactacttctaaaaaaaaaaaaaacaaaaaaaacagttactcatgatcctgaggtaggaaaaggcttaagacaatagatttgagaacagaaaggactgttctatgctcaagggccagaatgctaaagttttacaagacgtcttttcagaaacaatgctatctggctgtctagaactgcaaactcctcccaaccaatcccctggctctgaggaagtatttactcctcagagtgaattaccaaggaatggctttgtgtgtctgtgtattctgaagaagctgtaactacagaactagaaagaccatggctgagcctcactccaccaacagaaataaatgctgaaccagcaatggcagcatacacatacattactgtggtgtgtcaggctgctgggagaacaatgttcttccttctagtggacaaagactacactgaactgcaggaagcacaacccctttggtaatcagattttcatgtttctcttctgtgaaaatagtaaccaggaccaattctaagaatgagtaactacctagagattctcaggctactataaagagaggaatctgaaaaataaaagaaattctcatgaaaatgtggcaggcagagccaagggtaatctatgtgaattaataaagaagtataaccttcccttttcatcttgccttcccttttgtctccagtattcaggaatcagcatagtggctgaggtagctaaggacacagggcagtgagaaagggttgggggtgtgcacaggcccagggcaa

SEQ ID NO: 208854 - DNA, 351 bp, Homo sapiens
ccacaattgaatccaaacaagatagtatctgtaggtgggaattatttctatccctgaaatgaaatgtcagatttaataataatgtgtatgctgtgttccatgtcatttaatataaatcctgtctttctctattttatttttcacaaatcagccaacatgatattttgaaaatgaaaactgtattatgccactcctctttttaaaacttctcagtgcactcagaatgaggcccaaggctctcactatcaccactactgccccatctgcacctcagtcttcactcatgtcattttcccttttcccgctacacctgggacacacaggtttcctttcagctcctagaactcttga

SEQ ID NO: 208855 - DNA, 120 bp, Homo sapiens
aactgccatgttatggaaaggaccacagagctggaaatgctaagtggactctaggtgctgagaacagctcctagctgccactcagcaagaaagcaggtattttagcccagcgacagcaag

SEQ ID NO: 208856 - DNA, 593 bp, Homo sapiens
tctgtgaggtgggtaggaagtgttcctctcttacagatatggggacagtattggataagttagactgatatgcccaaggtcacccagctagtgagtgacagacagggatatgacctagctttgcagactcaggagcttctgttcagtccagtctactttgcactgctgtgatggctaagtcctaggcagtgatctctttgaaggcaaagactgcctaactcacctctgcttcctcagtgcctagcacaggccctggtacagaataggccctactggggctgaaggatggaaggagagagagagggagagaataagggggaaaagaaggaaggagaggagagagaatgagatggaggagagaagaaaaaagagggagtaaaagaaaaggaagaaaagaggcagggagagaaaaggaagagaaggcaggtggtctgctttagctgtttctacatatcacctcgaatgaaacaagaaagaagtctgtgttgatgttgtcactgtttattgttattttactaatgtactacctataacattctgctttccacctccacttttttttaagtgcttggaatagtcatgtcctggtagga

SEQ ID NO: 208857 - DNA, 427 bp, Homo sapiens
gctcaagcaagcctcccctctcagcctcctgagcagctagtactacaggcattcaccgctacacacaactaatttttaagtattttgtaaagacagggtcttgctatgttgcccaggctggtctcggactcctaggctcaagcattcctcctgccccagcctcccaaatatattttttgcttgttaattttatagggtaaactattggttattgaatacttattttatagcctgctatgtttgtgactctcttttagttattaaagtctgcttgtcttagttgatattttaacttcaattgtatcctaagcaaacagtggtcattttctctgtctgtcctggtaattgaagctcttatttcttttacttgctttgtttggtaggctagcatttttttactggtgttacatattaattgtgatgggag

SEQ ID NO: 208858 - DNA, 348 bp, Homo sapiens
ctgcctgattccctagtttggcttcatgtctgccctcactctgatcttaggacctactcagcctcacacagtagtcttgttatatccctgagtttctcagcagcaggtactgttgacatcttgagccagtcaatacaaaaaatgcaaaaaatagtcaggtgtggtggtgcgcacccgcagtcccagctactcaggaggctgaggtgggaggaacggttgagctcaggtgttgaggctgcagtgagtcgtgctcccaccactgcacaccagcctgggtgacagagtgagaccctgtctcaaaaaagaaaaaaaaattaataagcccagaaaggaaagctgtttgtcata

SEQ ID NO: 208859 - DNA, 411 bp, Homo sapiens
agttttgacccatatggatatcttaaatattcctattattgcaagtttatattaaaaggaggttaaattgtgaactcacaaactcatagcatcatagcaccatctcaatcaaaagtattatcttctgtgaactacaacagttttcacttctttcgcaagtgtggagtgacgtttgcctgaggctgtatgacctgtgatatcatgacaaattgaaggccaaagcagatgcgaatccagctgttttctattaagtcaaatgccaaggagatttacaaagatgtaaaacaatgcgcctcttctcaataacctttggttttgaaaattgttatttttcataaaaaatgttgcttccattaacctgtaataggtttactaccattattttaaataaaatacacatttcaaatggct

SEQ ID NO: 208860 - DNA, 898 bp, Homo sapiens
tccccgaggctacacagccaaagccggggggctggcctagccaaaaggggcgggcgagcacggcccgcgggcggcgttcgctggagctggtggaccgggcggctgaccgaggggcggacgcgcggcggggcagaccgctggggactgcgggcggcgctgtgtccgtcgccatgacagatcagacctattgtgaccgcctggtgcaggacacgcctttcctgacaggccatgggcgcttgagtgagcagcaggtggacaggatcatcctccagctgaaccgttactacccacagatccttaccaacaaggaggcggaaaagttccggaaccccaaggcatccttgcgtgtgcggctctgtgacctcctgagccacctgcagcggagcggtgagcgggactgccaggagttctaccgagccctgtatatccatgcccagcccctgcacagccgcctgcccagccgccacgctctgcagaactcagattgcacagagctagactcgggcagccagagcggcgagctgagtaacaggggacccatgagcttcctggctggcctgggccttgctgtgggactggccctgctcctgtactgctatccgccagaccccaagggcctgccagggacccggcgcgtcctcggtttctcgcctgtcatcatcgacagacatgtcagccgctacctgctggccttcctggcagatgacctaggggggctctgacagaccctggacccagggcctcacctgccactcaaccaaagagtcctcgagccggcccgccaaggggactgctgcttctttttctaaatgcatatttttcattatttataatttgtgtaaaaaacacaccttcaccttacaaggtgctgaccatattaaatgttcaagttctctca

SEQ ID NO: 208861 - DNA, 838 bp, Homo sapiens
tccccgaggctacacagccaaagccggggggctggcctagccaaaaggggcgggcgagcacggcccgcgggcggcgttcgctggagctggtggaccgggcggctgaccgaggggcggacgcgcggcggggcagaccgctggggactgcgggcggcgctgtgtccgtcgccatgacagatcagacctattgtgaccgcctggtgcaggacacgcctttcctgacaggccatgggcgcttgagtgagcagcaggtggacaggatcatcctccagctgaaccgttactacccacagatccttaccaacaaggaggcggaaaagttccggaaccccaaggcatccttgcgtgtgcggctctgtgacctcctgagccacctgcagcggagcggtgagcgggactgccaggagttctaccgagccctgtatatccatgcccagcccctgcacagccgcctgcccagccgccacgctctgcgacccatgagcttcctggctggcctgggccttgctgtgggactggccctgctcctgtactgctatccgccagaccccaagggcctgccagggacccggcgcgtcctcggtttctcgcctgtcatcatcgacagacatgtcagccgctacctgctggccttcctggcagatgacctaggggggctctgacagaccctggacccagggcctcacctgccactcaaccaaagagtcctcgagccggcccgccaaggggactgctgcttctttttctaaatgcatatttttcattatttataatttgtgtaaaaaacacaccttcaccttacaaggtgctgaccatattaaatgttcaagttctctca

SEQ ID NO: 208862 - DNA, 874 bp, Homo sapiens
tccccgaggctacacagccaaagccggggggctggcctagccaaaaggggcgggcgagcacggcccgcgggcggcgttcgctggagctggtggaccgggcggggggcagaccgctggggactgcgggcggcgctgtgtccgtcgccatgacagatcagacctattgtgaccgcctggtgcaggacacgcctttcctgacaggccatgggcgcttgagtgagcagcaggtggacaggatcatcctccagctgaaccgttactacccacagatccttaccaacaaggaggcggaaaagttccggaaccccaaggcatccttgcgtgtgcggctctgtgacctcctgagccacctgcagcggagcggtgagcgggactgccaggagttctaccgagccctgtatatccatgcccagcccctgcacagccgcctgcccagccgccacgctctgcagaactcagattgcacagagctagactcgggcagccagagcggcgagctgagtaacaggggacccatgagcttcctggctggcctgggccttgctgtgggactggccctgctcctgtactgctatccgccagaccccaagggcctgccagggacccggcgcgtcctcggtttctcgcctgtcatcatcgacagacatgtcagccgctacctgctggccttcctggcagatgacctaggggggctctgacagaccctggacccagggcctcacctgccactcaaccaaagagtcctcgagccggcccgccaaggggactgctgcttctttttctaaatgcatatttttcattatttataatttgtgtaaaaaacacaccttcaccttacaaggtgctgaccatattaaatgttcaagttctctca

SEQ ID NO: 208863 - DNA, 303 bp, Homo sapiens
attaaagaagggagtatgtgttgtcaggggttgaaatgatgtgaggtataacatagcgtctattcaagatactgggaagtactattgaccaggatgggggcttcgacatgggcttagggagtcataagtggagtccgtaaagaggtatctttactataaaagctattgtgtaagctagtcatattaagttgttggctgctgcttctttttctaaatgcatatttttcattatttataatttgtgtaaaaaacacaccttcaccttacaaggtgctgaccatattaaatgttcaagttctctca

SEQ ID NO: 208864 - DNA, 999 bp, Homo sapiens
tccccgaggctacacagccaaagccggggggctggcctagccaaaaggggcgggcgagcacggcccgcgggcggcgttcgctggagctggtggaccgggcggctgaccgaggggcggacgcgcggcggggcagaccgctggggactgcgggcggcgctgtgtccgtcgccatgacagatcagacctattgtgaccgcctggtgcaggacacgcctttcctgacaggccatgggcgcttgagtgagcagcaggtggacaggatcatcctccagctgaaccgttactacccacagatccttaccaacaaggaggcggaaaagttccggaaccccaaggcatccttgcgtgtgcggctctgtgacctcctgagccacctgcagcggagcggtgagcgggactgccaggagttctaccgagccctgtatatccatgcccagcccctgcacagccgcctgcccagccgccacgctctgcagaactcagattgcacagagctagactcgggcagccagagcggcgagctgagtaacaggggacccatgagcttcctggctggcctgggccttgctgtgggactggccctgctcctgtactgctatccgccagaccccaagggcctgccagggacccggcgcgtcctcggtttctcgcctgtcatcatcgacagacatgtcagccgctacctgctggccttcctggcagatgacctaggggggctctgacagaccctggacccagggcctcacctgccactcaaccaaagagtcctcgagccggcccgccaaggggactgctgcttctttttctaaatgcatatttttcattatttataatttgtgtaaaaaacacaccttcaccttacaaggtgctgaccatattaaatgttcaagttctctcaaaaaaaaaaaacccgggctcttttcggggggaaaaggtttgaaggccaggcctacgtccggcctttggtcaggggactgcggcccaagggatatcgacgaa

SEQ ID NO: 208865 - DNA, 861 bp, Homo sapiens
tccccgaggctacacagccaaagccggggggctggcctagccaaaaggggcgggcgagcacggcccgcgggcggcgttcgctggagctggtggaccgggcggctgaccgaggggcggacgcgcggcggggcagaccgctggggactgcgggcggcgctgtgtccgtcgccatgacagatcagacctattgtgaccgcctggtgcaggacacgcctttcctgacaggccatgggcgcttgagtgagcagcaggtggacaggatcatcctccagctgaaccgttactacccacagatccttaccaacaaggaggcggaaaaggtgacctcctgagccacctgcagcggagcggtgagcgggactgccaggagttctaccgagccctgtatatccatgcccagcccctgcacagccgcctgcccagccgccacgctctgcagaactcagattgcacagagctagactcgggcagccagagcggcgagctgagtaacaggggacccatgagcttcctggctggcctgggccttgctgtgggactggccctgctcctgtactgctatccgccagaccccaagggcctgccagggacccggcgcgtcctcggtttctcgcctgtcatcatcgacagacatgtcagccgctacctgctggccttcctggcagatgacctaggggggctctgacagaccctggacccagggcctcacctgccactcaaccaaagagtcctcgagccggcccgccaaggggactgctgcttctttttctaaatgcatatttttcattatttataatttgtgtaaaaaacacaccttcaccttacaaggtgctgaccatattaaatgttcaagttctctca

SEQ ID NO: 208866 - DNA, 1000 bp, Homo sapiens
tccccgaggctacacagccaaagccggggggctggcctagccaaaaggggcgggcgagcacggcccgcgggcggcgttcgctggagctggtggaccgggcggctgaccgaggggcggacgcgcggcggggcagaccgctggggactgcgggcggcgctgtgtccgtcgccatgacagatcagacctattgtgaccgcctggtgcaggacacgcctttcctgacaggccatgggcgcttgagtgagcagcaggtggacaggatcatcctccagctgaaccgttactacccacagatccttaccaacaaggaggcggaaaaggtgccacgtgcagggctatcctgagggttggggcatctcctggaacaatgaggttggcccacaacagaacaggagtcaacacgggccctgctactggctcagttccggaaccccaaggcatccttgcgtgtgcggctctgtgacctcctgagccacctgcagcggagcggtgagcgggactgccaggagttctaccgagccctgtatatccatgcccagcccctgcacagccgcctgcccagccgccacgctctgcagaactcagattgcacagagctagactcgggcagccagagcggcgagctgagtaacaggggacccatgagcttcctggctggcctgggccttgctgtgggactggccctgctcctgtactgctatccgccagaccccaagggcctgccagggacccggcgcgtcctcggtttctcgcctgtcatcatcgacagacatgtcagccgctacctgctggccttcctggcagatgacctaggggggctctgacagaccctggacccagggcctcacctgccactcaaccaaagagtcctcgagccggcccgccaaggggactgctgcttctttttctaaatgcatatttttcattatttataatttgtgtaaaaaacacaccttcaccttacaaggtgctgaccatattaaatgttcaagttctctca

SEQ ID NO: 208867 - DNA, 2055 bp, Homo sapiens
tccccgaggctacacagccaaagccggggggctggcctagccaaaaggggcgggcgagcacggcccgcgggcggcgttcgctggagctggtggaccgggcggctgaccgaggggcggacgcgcggcggggcagaccgctggggactgcgggcggcgctgtgtccgtcgccatgacagatcagacctattgtgaccgcctggtgcaggacacgcctttcctgacaggccatgggcgcttgagtgagcagcaggtggacaggatcatcctccagctgaaccgttactacccacagatccttaccaacaaggaggcggaaaagttccggaaccccaaggcatccttgcgtgtgcggctctgtgacctcctgagccacctgcagcggagcggtgagcgggactgccaggagttctaccgagccctgtatatccatgcccagcccctgcacagccgcctgcccagccgccacgctctgcgtaagttccacatcaccaaccatgcatgcttggtgctggcccggggagggcaccccagcctgccgttgatggcatggatgtcctccatgaccacccaagtctgctgcagcccaggcctggcatcccctctcgcctcagcccctccccagaggccaccctctggccccgaggggagagtgtggcaggcacaggcagtgcagatgttggtctctgtctcccactttctcccccttcctccgtctctctctcatggcagttttcacacagcatggggcatcttatacgtccactcttgcccttccttttctaacctcattccacggggatcccttcatgtctgtgtggacagcaaccttgttcccacagctgcatggcgctcctaggcggtcccagctggaattacccaaccccatgacggaccctttcattgcagcgatctgcacacgtgtgggtgtttccataggacattgtcaggcacggatggctggtccgaagcacgtgcatttcagttttgaggctcctgtcctcaggcagtgtggactcaggccctgggagtcatgtggatgccagtagcctgggcccacagagctgctgggatgtggggggcatatcaagttgaagatggcaactctgatctgacgcctctgtgctcagggcccctggaggaggggctactgccccttggcccttagacaacaggacagagaccagagggactgggcggcttgtcccaggctactgggctgtggtctctgaccccctggaggcctccccacgcctcacagaacacagtgcagacggtgggcggggagagctcgaggggaggcccagccctgcaggtgggactggctctccctccccagccacgagtatgccacagggggctttcaaaaccaggcagggccaagccttggccccactggaggtagagcaccttctgtggctcccgggtgcctttaggcccgtccaggagttggagcagaggagaagacccagactgtgcatagttccctgaggagggctagcctcaggtgccacagcctggttcggcctggcggccccaggacgcagcagcaaccttgggcttcctgcggggtgactaccttgccctccggccctgcccgttgactaactatgctctgtggttttgtttccagagaactcagattgcacagagctagactcgggcagccagagcggcgagctgagtaacaggggacccatgagcttcctggctggcctgggccttgctgtgggactggccctgctcctgtactgctatccgccagaccccaagggcctgccagggacccggcgcgtcctcggtttctcgcctgtcatcatcgacagacatgtcagccgctacctgctggccttcctggcagatgacctaggggggctctgacagaccctggacccagggcctcacctgccactcaaccaaagagtcctcgagccggcccgccaaggggactgctgcttctttttctaaatgcatatttttcattatttataatttgtgtaaaaaacacaccttcaccttacaaggtgctgaccatattaaatgttcaagttctctca

SEQ ID NO: 208868 - DNA, 887 bp, Homo sapiens
tgctgggattacaggcatgagccaccgcaccttgccagccccatgctttctttgtgaccactcccagcctgtttcccaacctcccaccccacagggagtatgaggagtagcagtgatgcctgtgacagaggcaatgccaggcactatgtggtgtgggtaaggggcaggttgtcacaggagctgccatccagcaggtgtcctgacacccaacagggaagctgaggctgggggcctgaccttggtgccctgccctgacccacagccagcccccctggcctgatcttccctggcacccccttgtaccctcagttccggaaccccaaggcatccttgcgtgtgcggctctgtgacctcctgagccacctgcagcggagcggtgagcgggactgccaggagttctaccgagccctgtatatccatgcccagcccctgcacagccgcctgcccagccgccacgctctgcagaactcagattgcacagagctagactcgggcagccagagcggcgagctgagtaacaggggacccatgagcttcctggctggcctgggccttgctgtgggactggccctgctcctgtactgctatccgccagaccccaagggcctgccagggacccggcgcgtcctcggtttctcgcctgtcatcatcgacagacatgtcagccgctacctgctggccttcctggcagatgacctaggggggctctgacagaccctggacccagggcctcacctgccactcaaccaaagagtcctcgagccggcccgccaaggggactgctgcttctttttctaaatgcatatttttcattatttataatttgtgtaaaaaacacaccttcaccttacaaggtgctgaccatattaaatgttcaagttctctca

SEQ ID NO: 208869 - DNA, 762 bp, Homo sapiens
atgagagagttagccacaccctgccgaccctacccacatctgtggctctggcgcccccactgagccacctgttccttgacaggtgccacgtgcagggctatcctgagggttggggcatctcctggaacaatgaggttggcccacaacagaacaggagtcaacacgggccctgctactggctcagttccggaaccccaaggcatccttgcgtgtgcggctctgtgacctcctgagccacctgcagcggagcggtgagcgggactgccaggagttctaccgagccctgtatatccatgcccagcccctgcacagccgcctgcccagccgccacgctctgcagaactcagattgcacagagctagactcgggcagccagagcggcgagctgagtaacaggggacccatgagcttcctggctggcctgggccttgctgtgggactggccctgctcctgtactgctatccgccagaccccaagggcctgccagggacccggcgcgtcctcggtttctcgcctgtcatcatcgacagacatgtcagccgctacctgctggccttcctggcagatgacctaggggggctctgacagaccctggacccagggcctcacctgccactcaaccaaagagtcctcgagccggcccgccaaggggactgctgcttctttttctaaatgcatatttttcattatttataatttgtgtaaaaaacacaccttcaccttacaaggtgctgaccatattaaatgttcaagttctctca

SEQ ID NO: 208870 - DNA, 2333 bp, Homo sapiens
tccccgaggctacacagccaaagccggggggctggcctagccaaaaggggcgggcgagcacggcccgcgggcggcgttcgctggagctggtggaccgggcggctgaccgaggggcggacgcgcggcggggcagaccgctggggactgcgggcggcgctgtgtccgtcgccatgacagatcagacctattgtgaccgcctggtgcaggacacgcctttcctgacaggccatgggcgcttgagtgagcagcaggtggacaggatcatcctccagctgaaccgttactacccacagatccttaccaacaaggaggcggaaaagttccggaaccccaaggcatccttgcgtgtgcggctctgtgacctcctgagccacctgcagcggagcggtgagcgggactgccaggagttctaccgagccctgtatatccatgcccagcccctgcacagccgcctgcccagccgccacgctctgcgtaagttccacatcaccaaccatgcatgcttggtgctggcccggggagggcaccccagcctgccgttgatggcatggatgtcctccatgaccacccaagtctgctgcagcccaggcctggcatcccctctcgcctcagcccctccccagaggccaccctctggccccgaggggagagtgtggcaggcacaggcagtgcagatgttggtctctgtctcccactttctcccccttcctccgtctctctctcatggcagttttcacacagcatggggcatcttatacgtccactcttgcccttccttttctaacctcattccacggggatcccttcatgtctgtgtggacagcaaccttgttcccacagctgcatggcgctcctaggcggtcccagctggaattacccaaccccatgacggaccctttcattgcagcgatctgcacacgtgtgggtgtttccataggacattgtcaggcacggatggctggtccgaagcacgtgcatttcagttttgaggctcctgtcctcaggcagtgtggactcaggccctgggagtcatgtggatgccagtagcctgggcccacagagctgctgggatgtggggggcatatcaagttgaagatggcaactctgatctgacgcctctgtgctcagggcccctggaggaggggctactgccccttggcccttagacaacaggacagagaccagagggactgggcggcttgtcccaggctactgggctgtggtctctgaccccctggaggcctccccacgcctcacagaacacagtgcagacggtgggcggggagagctcgaggggaggcccagccctgcaggtgggactggctctccctccccagccacgagtatgccacagggggctttcaaaaccaggcagggccaagccttggccccactggaggtagagcaccttctgtggctcccgggtgcctttaggcccgtccaggagttggagcagaggagaagacccagactgtgcatagttccctgaggagggctagcctcaggtgccacagcctggttcggcctggcggccccaggacgcagcagcaaccttgggcttcctgcggggtgactaccttgccctccggccctgcccgttgactaactatgctctgtggttttgtttccagagaactcagattgcacagagctagactcgggcagccagagcggcgagctgagtaacaggggtaacacctccctgctgcccctccctctctctccctctctctccctctctctttaccctccccagggctccatctccgcctcaggggcttctccaccccaagtctggctccattcctggccttctgttggtgacagacccccccctaaggtgctcgtttgggggctcttcaggcagcacctcagcctggcacccccactcccctgcgcagcccccaggcctcaggaccccacccctctgaggcccaggggagccctgttcacgctggtttctccccaggacccatgagcttcctggctggcctgggccttgctgtgggactggccctgctcctgtactgctatccgccagaccccaagggcctgccagggacccggcgcgtcctcggtttctcgcctgtcatcatcgacagacatgtcagccgctacctgctggccttcctggcagatgacctaggggggctctgacagaccctggacccagggcctcacctgccactcaaccaaagagtcctcgagccggcccgccaaggggactgctgcttctttttctaaatgcatatttttcattatttataatttgtgtaaaaaacacaccttcaccttacaaggtgctgaccatattaaatgttcaagttctctca

SEQ ID NO: 208871 - DNA, 508 bp, Homo sapiens
ctggcgcccccactgagccacctgttccttgacaggtgccacgtgcagggctatcctgagggttggggcatctcctggaacaatgaggttggcccacaacagaacaggagtcaacacgggccctgctactggctcaggtgcttcttccgttttgaaggtggtacagtaattttaaaagttaggagctcaaatccaaatctcttattattgcaattgaagtctaatgcatgttcacttttaaaaagtttagaaagtttaagacgtttatacaagaaaaagcacatattccttcctcacagacaccacagctcctgccacccatctgcctgccattttcacactgccatggtttaactccagttccctgtggccatgtagaatgatatgctgccaccaggtggcagcaccaggccacagactccaggtcctggaggtcaaggcccagtggcctgtccactgaccttgagaaccacacatttctctgtcatacacatcaaaagagccaata

SEQ ID NO: 208872 - DNA, 689 bp, Homo sapiens
cgagcacggcccgcgggcggcgttcgctggagctggtggaccgggcggctgaccgaggggcggacgcgcggcggggcagaccgctggggactgcgggcggcgctgtgtccgtcgccatgacaggtgggcacggggtcggctgggcggcagggatgcgggcgccctggatgggtggcccggcccgggggtccggctgccttgcgagtcgcctgcaggccgcgcctgggcagcgggggccgagtgaccttggcccgtcagctgtcggtggtgcgcgagtgcacccccgcgaagtggtgggtgtcccggggcttctacccggcggggccgtgccagccgaggcggtgccgggcatgatgggtggtggccaggtgcggggcccgaagagggcgggggctacaaggcagctccagggtggggctgcacagccgcggtctgggctcagccactgccaatgtgtgtgtgtcccgtggtggggaatttggtctgaaagagtaggaggtggtagaaatgacaccggagagaattcacagcggtcctgctgtgattctggccacggaaacaacgctccatccttacaaccaccccagcgaggtcgcgggacaggcgatgcgttcctcggcggcatgtgattcctgtgggactcttggagtctcccagactccttcggtggtccacgacgctcttgcccc

SEQ ID NO: 208873 - DNA, 340 bp, Homo sapiens
taataagcagccttagccaaaggaatgaaagatcaaatagaaatgtaggctcaatgtggtggctcacacctgctatcccagcactttgggaggctgatactggaggattgcttgagaccaggagtttgagaccagcctggctaacttagcaagaccctgtctctacaaaaaaaacttttaaaaattagctgggcatggtggctcaaacccatagtctcagctactcaggaggctgaggcaagaggatcacttgagcccagaagtttgaggctgcattgagctataatacgatcatgctaccacattccaatctggacaacagagtgagaccctgtctaaa

SEQ ID NO: 208874 - DNA, 377 bp, Homo sapiens
catccccatcctgagtggtctattctctagaatcaagatgaccacactccagcaggcatttcaaattgtggcttggactcacgcacaggccccctcctggttcccaggtgttctatgattttcgttggcatcgatggaaaggtcacctgtgccccccttcctccggaacatgcctggacaccattgtttgtttcgccatcgccccgtatgccctctgtgacacacattcacagcatctgctcttgaatacaccagtgccacgtgtggtcacactggctctactttggatttgcccctttccctgtttgcacgtgtcctgcacttttaccagaaggtggtaaaagtaagagaagaataaaattttggacatgtaaaat

SEQ ID NO: 208875 - DNA, 875 bp, Homo sapiens
ctagtagaggcctgggtgttggctgaagctcttcttcagcaaaatggcgacttcctggttcgcgcctctgggtcccgtgggggcaacccgtgatctcctgccgctggcggggctcagccctccatttgaggtgttccgtgtggccctgcgtccccggccaggccgacccacagccctctttcaactggaggatgagcaattccccagcataccggctctggttcacagttatatgacaggcaggcgcccactgtcccaggccacaggggctgtggtctccaggcctgtgacttggcaggggcctctgcgacgcagctttagcgaggacaccctgatggatggcccagctcggatagagcctctcagggcaaggaagtggagcaacagtcagcctgcagatttggcacatatggggcggtcaagagaagaccccgctgggatggaatcggcccctggaaccccaagtcctgcataccctccgtggcctgttcctggagcaccatcctgggagcaccgcccttcacctgctattggtagactgccaggccacaggcctcctgggagtgaccagagatcagcggggcaacatgggagtctcatctggcctggagctgctcactcttccccatggacaccacttgaggttggaactgctggagagacccttgccctccacctctgcaggcatcagacactggcgctggccggggcgctggcggtgctgggctgctcggggccgctggaggagcgcgcagccgcactgaggggactggtagagctggcgctggcgctgcggccaggggcggcgggggacctgcccgggctggctgcagtcatgggcgccctgctcatgccccaggttcgtggggagcagg

SEQ ID NO: 208876 - DNA, 165 bp, Homo sapiens
tggtgcacacggagcgatatgagagcatctttaaaacatgattatttgtaaaagtttacaaatacacagaatgaaattaatcacatgagaccattgacgttcatgcccggaaacagcaatgggcactctccaagaacacgtcccaataaaaagatcgtcattaca

SEQ ID NO: 208877 - DNA, 1104 bp, Homo sapiens
agcgggcttcgggaatggcgggggaggcgcgcgggagtggccgcggggagcttcggcttcaaggccctgggcgtccgcgcgcggatgcgggtctggggcgggttggggctgggccgggtcgtgaagatgccgtgggccgcggagctgcgcggattctgggctgtggggcgggcacggcctttccggaggcgccgctcctgggcgtcctttcaggcgggcgtggaggcgccagcctcgggcgcgtttagcctcgacctcgggccagcccgcttgccgcgccgtggccctaaggagcggctgccctgctggaccgcatccaccagcagcctggctctgccgctatcgaaggaggcttttaaagcgctggggttacagtccacagatcctggtccctacaaataagcctgctcatgtgagataagaaaggagttcctggaaccaggaattcattctcagtgtagaagacctagctgagacctcactccacagttttggggcagaagcagaagagacgcacagtagaaccgatctcagccttgctgatcatctcgtacagcagcagaaaatgaccatgttacaggagtcattctcatttgacgatttatctgtggacttcacccaaaaggagtggcagctactggatccctctcagaagaatttatacaaggatgtgatgttggagaactatagcagcctagtgtcactggggtatgaagttatgaaaccagatgtcatcttcaaattggagcaaggagaagagccgtgggtaggagatggagaaattccaagttcagattctccagaagtctggaaagtagatggtaacatgatgtggcaccaggataaccaagacaagcttaaaattataaaaagaggtcatgaatgtgatgcatttggaaaaaatttcaatctgaacatgaactttgttcctttaaggaaatcaaacagtgaaggtgacttagatggattgattttaaaacatcatttagatttgcttattccaaaaggagattatggaaaagcagaatcagatgactttaatgtgtttgataatttttttctccattccaagcctgaggatactgatacctggttaaaatacta

SEQ ID NO: 208878 - DNA, 628 bp, Homo sapiens
gacatatgtttggtcatacatctaataacaaatctttgatcaggagcataattccaattagagcagtggttcttgacagcggcagtgttccatcctaggtattttatacatgtatcagaattttattttatcatctcaatgactagtaaaaggcaaggttgctgggtgccctgtgatgcatgtgacaatctttctcaaaaggaatcctcctgcttctcctaaaatatttgaatgacccactggattttgatgtaggttagagactgtttataatcatcggagcctagattttattttacttaaatcgcagagtactgtttttgctattttaatatgctgtaagtttccccagaaaacaacttgtataaattgacaaaacttattttgttcagaatttttccaggagatgctcaatatttcagaaaacgacctatctaaagacaatagtgtttgtggcatttaagatagaaataaagtacaaaccgtcagtctgcatgcaaactgtagttactgtattctcacgattctaattatgggtgcaggcacccaggactttgctatgttttcaaatatagtttttttctattgctatatatggaaattcttataattttattctgaattaata

SEQ ID NO: 208879 - DNA, 257 bp, Homo sapiens
ccgcctcccaagtagctgggattataggcatgcactaccatgcctggctactttttaaaatgtttgtaaagatcgagtttctcagtgttgaccaggctggtctccaactcctgggatcaagcagtcttccctccttggcctcccaaaagtactgtgattacaggtgtaagccactatacccagccaaattctctttatttttagaaatttggagagagatgtacagatacattatgattcactccaaactacaaacc

SEQ ID NO: 208880 - DNA, 584 bp, Homo sapiens
caggtggagagtgtttatgtgtttggaggctatcagtcaccaactcaagaaatgtaaagatctaaattatgatagatgaaaatgtgaaaatgtgatgtggtaaactaaccacccccacaaccatgttcccccttcctgcccatgcaaatcaaggacctggcttttaaaaatggtgaagggaaatgttcttatcacccattcctgtcagagatgatgcagctcattgctgatgctgagatccaacgtccagtgcctgagtacccctggattctgagcactaggggctggactgtggagaccatcagttcataacatcctgtccctgctccctgctgtagatgactgagaccaggtaacaaagacacttaacttcataaattaaaaatgtgtaaattataaaatacatttttaattatagaatgaattgatgttcagcaaagaaaagttgaatgtaataaaactctcatttatttccattatttgctttcatcatcaaaggaaaaaaagcatctctctgaagttaaatggcatttcattttgattaattgtagaaagaagattggaaaaatctcccatgaccaagg

SEQ ID NO: 208881 - DNA, 286 bp, Homo sapiens
cctccatcagccagcggatgtcatgataattatttctggtgtgagtatcagagaatcacatcttaaggtggggtttttttgggagttgctgatgagtgaatgccagaaataataatctgacattaagcctttgtgaatctgaccaaatgaatgtcgaagaagagaatttatggtgaagtcagattgcatgctatttcatgaatgcatttcttttagaatgtaaatgacagaaaaattattcattatacctataatcaaactacaagtttaatagataatgaaaatg

SEQ ID NO: 208882 - DNA, 446 bp, Homo sapiens
agtccctgctacttgggaggctgaggtgagagagtgacttgagctacggaggtcgaggctgcaatgagccgtattcacaccactgtaccccagcctgagacagagaccctgacaaaaaaaaaaaaaaaaaaatgagaccgggcaaagctcccacagaaaggctaagttggagtcctggctagatggcctttgttctagaaacccttgctttgctggctggggactatctggcatgctcccttgccacaggaggagcagccgttggcatctttggtgctgacctcagccagcttgtattttaggaaccaggccccatgaggcagaggccttatccttgagcccttgggtctcacagaatcgccggtgcccaggagctatggttggcccagtttctcttgcattttagccttttgggctctcttcctttgagagtccatccttgacat

SEQ ID NO: 208883 - DNA, 340 bp, Homo sapiens
ctgtaaagatatttctgtggtatttaaaataattaatttattattatttcccatttatggaaagttccgttgtgtaattttccatttaatggatgaaccataatgatctaaactaattctatactgttgcatattttggctacttccttttttttctgttttgaggcgaacagttagtaatctcataattaattcgagaagtgcaattatctggctgggtgcagtggctcacacttgtaatcccagtactttgggagactgaggcgggcagatcacttgaggtcaggagttcgagaccagcctggccaacatggtaaaacttcgtctctactaaaaatac

SEQ ID NO: 208884 - DNA, 521 bp, Homo sapiens
agccaagaaggacattctgagtatcggggccagctaggacaaatgcaggattgcacagaagccgtgtggccagtgcagttactgagggagagaagatggtagatgagttccaagaaataacggaggggctggctcatggagagtctggaaggtcacggagagattttgccttactcttagttggaagcctgtggaggagcctttctcattggggctcacctgagccctggaaggcagaagtgactagagtgattatttgttcagttctcccagggatgggaggcacctcatcctgggagagcagctccttagttgcatacactggctgcctgagagcattagggcctcaggctctggaaccctgcttgagagaggctgcgaagtgttcagagcaggacagtgccaggtgctggctgatacttcacagagcatcgctgtggcggctgcagaggacagacaggcccaggcattggagcctgaggccagtcacacagcattgcaggcttggggtggttgaatgg

SEQ ID NO: 208885 - DNA, 447 bp, Homo sapiens
cccccactatagcattgggcaagaaaagccattcagagctgcttcaattatgaaaaagtaaaatataaaacccttctagcctgggtaaacagatacaagtaactttagaacttcaaaatcttcttttcacagatattgtactttgaacaaagttatcaactcccttaggtctgatattctaaactacatttttaatgcattaaaaaaatacccagatgggtttaaatatgaaatagctttctaaaaatgaaaatgatttagtttcaggaagctacatctaaaataaatggtatgagccaggccaaaagaactttcataaccaccttgccccaataaagcccttatcgtggcaggcatagatgatgtttgcattttgcgtattagaatgtaacagctctcttccctaatctgaccaatgtcactataaatgtgtgtgtgtgtgtgtgt

SEQ ID NO: 208886 - DNA, 394 bp, Homo sapiens
taacacaatacattatcaacatctataaattatttgaactagaaataatacaatatattattctcaagggcatatggatattacacatgataaacaatgttaagccataaaacaagtctctacagatttaaaaagataaaaaatcatagaaagcatgttctccaaagacagaataaaatctgagagaacaaagaaatatagaaaattaaaatacgtgaaaatcaacatcctcctaaatagccaatgggtcaatgaaaaaaatcacaggggaaattagaaaataccttgagattaatgaaaaggaaaacataacccaagaaaacttaagggtgtagtaaaacggtgagaaggtaatttatacctataagcacctacatttaatgtaagagataaa

SEQ ID NO: 208887 - DNA, 211 bp, Homo sapiens
ccttataatttttttcagtagaatctgaatggacatcttgtaatctcgtcttcatgcctgagatgatttttttttgtctttttcctccatttctttctggcatgtcataatctttaattttacattttccagcattttgtttgagatttttcaaatttctggtattaggttttctttcatttctttaaatgcttgtgcaattatatttagt

SEQ ID NO: 208888 - DNA, 538 bp, Homo sapiens
tcaatacagaacttaggagccactttataaaggttttattttatcatagatgtgatgattggggccatgccaagagttttgtccttttctgttttttttaaaacacatatacgtgtgtgtacatgtatgtgtgttatattgatgtgaacaaagatttctattactgcttttaaccaatttttcttcttatatactcaaagtgagattaacacacaatggctcatggcactaattttaaaaaagtaataccaacttggtgataaggaaaggaaagtgggataaaaaaaagattcaataaggcaagtaattaaatgatatcgcttttttttgcatttaaattctaaaataagtagacatatatgactgtgtataattacagtgttatgcctaaaacaaagatgatatgaaaatatgcacaagtttcaactgatggcaaagttaatctgaactgcaagtatacatttcatcaagagcaatcacaatacatagacatacacacatatcctcaaactgcaaatctatgtgaacgttaactata

SEQ ID NO: 208889 - DNA, 310 bp, Homo sapiens
aattgagattataaaaaggctgctgagcacatcagtattttgagaaaatgccatatgttttaaaaacacgtttttaaaagtcgatgttgaaaaaggcacaccaccaagctgcgaaaacatcaccaatggcagaagacggcagactactcaatgagaattgaattactcatcaattcaagaaatttgacactgagctgcaggaattttaccatcctaatagttccaacaacttccagaaaatacaagagatagagggaaagaggatagtgagaatgagagaatcagtgaagacatatgtagcgattgggca

SEQ ID NO: 208890 - DNA, 391 bp, Homo sapiens
aagaggactttgctctgttcagtcattcatgggtccatgcttctcctatatagccagccctctgtctcctaaggcctggagtcctccatgggcctccaatctgtggctgacagaggatgttgacttgagacccatctttgattcattatggagcttccacaggctgttgaaatcctctaagtcaaaagtcctcaaactggggacacatgcctaaggaatacaggagcatgggtatttaagaaacttaatttccagaatcttcatgtatattttttcttaaaactgatttacctgagagcacccctggttcttctttcccacctctctttacacaaatgcctttctctacctttaaaaagaaaaagaaaaagaaatggctttcatttcagat

SEQ ID NO: 208891 - DNA, 545 bp, Homo sapiens
tcttctcccctgacaggttttctttcttttctattttttttttaattgagttcactcttgttgcccaggttggagtgcaatggtgccatctcggctcatgcaactgccgcctcccgggttcaagcgattctccctcctcactgtaattttatgaaatccagtcagagcaaagtttatatgtcaagaccagagtttcatagcccctataagcctttttctggccacttcccagcactgtggaaacacagcctggattttggttttatatatactcctcccacataaacaagttttctttcttttctattttttttttaattgagtttcactcttgttgcccaggttggagtgcaatggtgccatctcggctcattgcaactgccgcctcccgggttcaagcgattctcctgcctcagcctgaaaccgggaggtggaagttgcggtgagtcgagatcacaccatggcactccagccggggcaacaagagcaagactccgtctcaaaaaaaaaaacaactataggagagcttgagctggcatttactt

SEQ ID NO: 208892 - DNA, 423 bp, Homo sapiens
tgggaatgtcctgttaggccactggctagtctccattcataaaggtaatacacagatgaccccaagtccagccagcccatgtctgagtgcacgctggttctaaattccttggccatacacagtgcaaccatggcaagttgtaactccatgctctgaatgccaaagtgtaggaaccctgtcacatccacagcctctgttctacggctgtccccatggcaggggctaggcagggtgagggctccagtgacacagcatacttccaggtgaaggtgcacaagagtgcacaggagggtctcccggcagagcccggagcaggtgctcagcgagggggtgggagtcgcatgtggttgctgggcttgcaggctgccctcacacggccctggatgccgcttggccactggcacatggagcagtttactgtcg

SEQ ID NO: 208893 - DNA, 102 bp, Homo sapiens
caacccaacccatgcatacaaaaagtcagggtttgtgatttaatttagaaatagaggcaagattagaaaatggaattgtgtggagacttggagatcatgtag

SEQ ID NO: 208894 - DNA, 366 bp, Homo sapiens
acgggggacgaaaggtaaggagtgcaattcccaattttaaaagtaaaaattggaatgcattagtttggtgacttgtagcccacaaagaatttaagatttagtccttccaaactgcaggaaaaatacaagaacagctaacaacaggtataccatagttgttgttgtttttttttgaagcataatttttctctctccagtccccatgtttattaaaaaaacaaatcattataggactgatttgtttgcaaaataaactttagtcttattatatacttggcctgattatttgcataaagtgcaacacaagtaattattttttacataggcttctagaattggctttgatagaactctgttccataagga

SEQ ID NO: 208895 - DNA, 185 bp, Homo sapiens
tcacaccagccagagagctccactatatttcctgcttatatccttttaatcaactcctcatgtaccaagcacccaatagtgaagagtcacaggtaacccagttctgttaacattatagtttccttagtttcctttattttccccaaatttgctctgtcccttattatccaattctgcattcacct

SEQ ID NO: 208896 - DNA, 532 bp, Homo sapiens
gtgattgctgcttggtttccttggccttaacttgccagtgattacttagcatgggtcagccaggcctcctgctgaactcccaggagcagagcatgtttgtaccctccagattcctataagacgccctgtccaggtgtcccccagcgtctctaccctgtatgtccctagcacagctgctcgtcctcccctggaacctccgcctcatctcacacaggcttgtcatgatgggtctccaccatccactcggggttaagtgggcagggagtcttccaattgctccctttcccctactccttaaaaccaagaccccttcaaacttgtctcctaagggtctcaggaagcacatcctgcccaccttgcctttccagcctcatctgctgccccctcatttgcactctgctttggccatagtggctttctttcccttatgatgggtggctcatgcctataatcccagtgctttgggagtccaaagcgggaagattgcttgaggccaggaatttgagaccagctgtgcaacacagcaagacct

SEQ ID NO: 208897 - DNA, 350 bp, Homo sapiens
tcatggcggaagataaaggggagctgaaatgtataacgattacttggcaagaaaggaagaaagggggaaggaggaggtgctaggctcttttcaagaaccagttcttgagggaagtaagagcgagaactcactcacttcttggagtggcacaaagccattcatgagggatctgcccccaccagccaaacaccttccacaggccccacctccaacagtgagatcaaattccaacatgagactttgtggagcccaacaaactatatccaaaccatagcatgcatttttctggggagagggtctatcactttcatcaggatctcaaaatagttttggacactgttaattcaagg

SEQ ID NO: 208898 - DNA, 487 bp, Homo sapiens
cagaatgggcttaccaggaaggaatgagtggcacatgctacatcatgggtgaacctcaaaatcttgagatacgggaaggaagccagacacaagagatcacatattgtgtgattccttttccatgaaagatactgaaaaagcaaagaggcagaaagtagttgcttgaggctggggtgggcatagggaggcactgtgagtgccatgagggatcttagtgggggcataaaaatgtcttgaaacttatttttggtaatgactgcatcactcagtaaagttactaaaattcattgaattggatacctgaaatggatgagttttatgagacgtaaaatatgtatcaatgcaaatatgcctcaatatcttcatatttaagtgtacttttttgttacaaaaaagaatggggctcacagtagacatgggaacttacaagttttaaattgtagtacggttataagggaattgggaagtcttcgtcatgggagacgta

SEQ ID NO: 208899 - DNA, 443 bp, Homo sapiens
cagcattaggcagtattaaataaaatttggagataaaagctaatcagtgtgtataacaattactgatatcaaaatcaaggaataagaatcaaatagcacttcttactgttcatggacttcaaaagatttatatgaatttggtactattaaaacttcctctaaatttaaatatgaaacagatgggaataatacagttacatgagaaatattagtcatttctcagtgcttatgagctgggtccctttggtggacagtatttgtgcaaatgttttagtaactacatgactctgctctgttgtgagccatagttatcatatttttatttattctaaccagttaaattactatttactgaacacccactgcctcttgtactgaagtcattaaattctttgatacattttaaaaaagaaatagttgctttttctctgtttactaacttt

SEQ ID NO: 208900 - DNA, 376 bp, Homo sapiens
gtttatctccctctgtctccccgtggtagtaaacggagttccctgcagccagtcagaggcccacctgaggagggagtgcagcctctgccagtgttcttccctgtcaggagccagttaatggtcacccccaggcctcaggccatcaccatcgtgggtagttcctcatcctttctggacctggggtccctgggccacatggcacttgcatgtgctcacacacttgtatacacacatgcactcacacacacaggcaattcctcacaaacactctgactcaacaaagcgagttttaaagtggagttaacttcagagagaggtgaagatgatatcccaacattagaaggttttcctgtggatagatcaggcaccgtcttcc

SEQ ID NO: 208901 - DNA, 370 bp, Homo sapiens
aaggccactgacatggacgaggggcgtggctagggtggtgagagctgtcacagagaaaacagcctctcctaaacccagtcgcccaaccttccaaaccggcaggactcaaggcacttgcacgttttctccatctgggccagcggttttcaacccctcagctagagatgtctgctgattggacaatgtgatgagtgcttgtgatgcgccaggcactgtggtaagggctgcaggtattatacaaccagtgctctctgctctcagggaatatacagtctggtggagcaactcaggtgtaaatcaaataattacacatcaaagtacagcaaaaacagtgataagccctgggactgtatctgggcagagaggtggg

SEQ ID NO: 208902 - DNA, 417 bp, Homo sapiens
ttaggagcaactcaaaatttaaacaatgctttcactgtcttctccaagatgaaggtgtttgatactgttttcccaactgtggctatatatcctatttaaaagtatgacttatctacagtgcaaatgagagcaacttttacgtactggatgaaatattctgtgctggggttttgcaaataatccatgagttccctgatagcttctagctttaactcttatacagcattgtcttgggaagatgaaaggtcaaagggttggaagaatagagaacctgaaaatcattgagatattgagccctgtgtttcacaaaatagtgctaagaagctttatactatgttgccttaaagagaagaagccaatctatctctgaatttcttcctggagacagcttcgtaagttggtactttttgaaggacg

SEQ ID NO: 208903 - DNA, 389 bp, Homo sapiens
catatgtttctactgagagcatttcatggagaaaagctgcattagggaaacaagtaaatacagaccccaatgaagcaaaagtgcatttgttgtaaagttaaaagctaaaggtggaaaagagacaaagcatctacgtaatttacaccctaaacctgctgcatagagtaaccacttttaaaaatctctacttcttccaaaattcaaataatttaagcacttccctctaagggcaagcattaaggaagcagtaagaagaaacaacagtaaaggacaagggaaaaaaagaagaaaggaaaaagtcatcgtccttgtgctaggtatttgcatggaaaagatgacagacaaagctctctctcttaaaattaatgaaccatctcctcagatactta

SEQ ID NO: 208904 - DNA, 280 bp, Homo sapiens
ctccacccactacatgccagtagctccctacagttgcggcaaacaaaaatgtctcccggtgttgccaaatgtcatgtgagggacaaaatgccctcagttgagaaccactgtttaacattttcatgttttacgataggcagccgggcgtggtgtctcacgcctgtaatcccagcactttgggaggccgaggtagatggataatttgaggtcaggagtttgagaccagcctgaccaacatggtgaaacccagtctctactaaaaatacaaaaaaattagctg

SEQ ID NO: 208905 - DNA, 417 bp, Homo sapiens
aagaatgcacatactttagttattgatcattaaacagaaatatctaaaaggaaacaagaaggaatcggagactagtaccaggaaaagctattttaatactggaaaatgaaatgatacggctattttctaaaatttaaactgtaaaacaagacaaatcaaggtaaataacattttagaaaataaaagaatcattgatattaattgtggttttggtttcaaaggacttatctctgtttcacagtaatcaacttaaattttcatgttttacgataggcagccgggcgtggtgtctcacgcctgtaatcccagcactttgggaggccgaggtagatggataatttgaggtcaggagtttgagaccagcctgaccaacatggtgaaacccagtctctactaaaaatacaaaaaaattagctg

SEQ ID NO: 208906 - DNA, 910 bp, Homo sapiens
atctagtggaggtctcgtctgaaggtgaatgacagattggactcaagcccttttcagaaaccccttcaggatggttagaaggtccacaatcttcattcatgattctggaacccccaaagcattctggccataatacctgaactggcctgaactcaatgcaggcagaacccaactgggataccagtgcctttagccttcacttgtccctcctcacggagccctgcggatgttccactgcaggatagtcatatgctggacggcagactgaggcccaggccctgctggcgtccaatatggacgtatctcggatcagcgagagctgctcaggaaccacaccacggtaggtgcatgctgagcacctgctgggacagcccccggtgtgacactgtccacagcagctggaagcggtgactgtcggtgagttacagtggaggattccagggtcgggtttggctatggaattaattaagcaaagcacagataaacccattctctacttaaaaaactaaaatattacagattccatcaatggatgaatggataacaaaatgtggtccatttgtacaatggaatatgatttggccttcaacagaagggatctgacacctgctacagcatgggagaacctagaggacaccgtactctgtgcaataagccagctgccgagggaggaacaccttgacattccactcacgtcaggcactagaggagtcaaattcatagcaagtagagtgggggctgccaggacctgggatagaggaaggtgaaaaaattctagaaatggatggtggagatggctgcacaacatcgcgttgtggatgtggtcactgagttgtacaatttaaaatggttacagtggaaaattttatgttacgtgtattttaccacaattaaaagaaaatattacaga

SEQ ID NO: 208907 - DNA, 515 bp, Homo sapiens
ggaacagctccggtctacagctcccagcgtgagcgacgcagaagacgggtgatttctgcatttccatctgagatatactaaggagcttttgcaagtcaatgtgcaaaaagacactacaatgagtggagaatcaacagtgctctcagaactttgctctcagaaaacttaagttaccaggcactaagtggctactcaaaatgtggtttgtggaccagaagcatcacatctcctgggaactaggtaggcctaatggaatcaagagggccctttagagtggaagagggaatttgaagaaagaaccagagacatgtcagcatgagaaggactcagcctaatcttgctgcctttgaagttggaggaaggggcctatgaagctggaaaaggtgaggaaacagattttcccccggggcctccaggaagaaatgcacctgctggcaccttgatcttagccaagtaacctctacgtcagacttctgacctataaaactgtaaaataataaatgtgtgttgtttta

SEQ ID NO: 208908 - DNA, 317 bp, Homo sapiens
cagtgagccaagatcacgccattgcactcctgtttgggcgacaagagcaaaactcaactccatctcaaaaaaaaaaaaaaaaggaaaaggaaaaggcctactgccggacctggcacagcctggtcattcattacagaacaatagtcactccccatgaaccctctccgtgcagaggggatcgtcatggaaagtgctagaaacaggcagttgagttgaggagtgagggtgcaggggcttatctctgagcctgtttctccatttggaagttgggtgtaattgcctacaggaaatgttcactcatttaacaaataggtact

SEQ ID NO: 208909 - DNA, 449 bp, Homo sapiens
cccgttgcatccttaccatagtactgagcacacagcactggatttgtccctctccactagagcatgagtttgaggggagggactgggtcttctatcttatctttatatcccaagcaccccgctgggtgccaggtacattttaggggctcaagaaattcttgttgaatttgataaatttagaatagtccattgccagtggtgattccaatagagtcactgatgaatattaaacactgattgataaatttgtgattgataacagaacagtcaacctgaaggcaggggatattaatgaaatagactggttccaaaaaccattattatgatcatgactgttgttattctttttattcttctgagttttaggggatgaaacacaatatgagtatggccctgtcaatgcgattgatctggggcagagtgcttcctccgagttgagcccaggtgct

SEQ ID NO: 208910 - DNA, 288 bp, Homo sapiens
acctgcttgaaagctattaaaatattcctcccttttccaactacacttctgtgtgaggccagattttcattacgtactttagccaaaatgacaaagaacaagattgaatgcagaggcagatacaaatccagatgttttctattactaaagagacattaatgatactaaagagatttgggaaatgtaaaacaatgccactgttctcacagaagtattctttgttttggaaaatatagttactttccattaaaaattatattgttagttttaaataaacatattaaagat

SEQ ID NO: 208911 - DNA, 300 bp, Homo sapiens
gcttagttcaggcatacgctgacctgaatgggcatttaccctcagatgggtacacacctgtcaatatgtggactcttctgtcagacagacacagcttcactcatgtggattcttccctcaaacacaaatgtccccacatggactatttcctcagactgccacatatgtccttacatttacactttcctcagaaaacagacatttcctcatgtggactcttgtctcagataagcaaacatgtctcaatgtgaatgaagtcttcactcagataagtatacatatttcaacattgactgtttc

SEQ ID NO: 208912 - DNA, 253 bp, Homo sapiens
tcatgcaacccgcccaggtagtgattggatcttaggatctggctaaagagaggggaagtagtccagtacgtctcaaacttgggccaagggctacaggccagcttgccagtaaagtgctttgcattggagctttggacacaagttcaactgaaaataaagggttcatttcctttctaattgtctcttacgtgtgtatctccctcacacactcccagggtagaaaagtgactggcaagatagactaagcctttct

SEQ ID NO: 208913 - DNA, 557 bp, Homo sapiens
actacacatgctgcttacattgtatttctacaggatagcaccattctagatagtataataagccctgcttattgaatacgctcagtagaaagaaaccctggaatcctttcatttcaaacgatctcctgtcggccagccaactttcttcatttgcaggtgagattcttcatctgtaatgtagacaaaataaacccccctcacagactggtaaggactgagaacacaaagaaagcattttaagcgttcagcaacactaaatgtgttctcagtaaatgtcacttccctttctgtgggtgcattcagtagctggtttagtcatcttggggttagtcatggaacgtctggattccaaccctctttgttcctttttctccactctaatcacttccacagaattcaccataacttagagggcaggggtctgtggtgaactttctaagcaaaagctaccccttccccacagctgaattttttactcctaccacttgtcgaccatatccttcccacctcttctctgctggtgcattcattaataaattattaaaattaatctcaaa

SEQ ID NO: 208914 - DNA, 215 bp, Homo sapiens
aaaatttatattttggggatgtcaaagttgtccaaaaatggttttattgggcagtgaagaatgtagagtagatatattgcatcctaatcttagaagaaatggttggtttaatcctgtttgaatctaagaactttacagtttatattcaaaacactccatattatgtagtatgtagcagacattaaaaataaaatgttacttgaagtataacccca

SEQ ID NO: 208915 - DNA, 201 bp, Homo sapiens
cagtactttttattcagaaggtttctgcataaaggtgatagtcttttgacttaatatattattgtctcctgccttgtgtttctggaatgaatgaaggtcattatttagaggataatctgggttgtatttgtgtcgtcagattgaattttcattgcacatgctacttaatgtctttaccaaataataacaaagggaaagaaa

SEQ ID NO: 208916 - DNA, 530 bp, Homo sapiens
ctgcaaatgaaacccggggtttagtcctcatctctgacctgaaggcttgaatgttgagatctctttctgaccctgagagctccttcgtgttcttccagtaaatgtcccaagccctttctcaaaagtcctgtttttcttgctgatgaatagtaaattgatatgcatctattatttttatttacctattggtagttgcttagtatttttaggagcaaatatgatttacaaaaaaacatgagttctgatacaatttcttttaggatttgaataggaaaagtagttgttgttttcttctttttttttttttttttttttttttgagatgaggtctcactctgttgcccaggctggagtgcaactccagctcactgtagccttgaactcctgggctcaagtgatcctcctgcctcagccttccgagtagctagaactacaggcatgtgccactatgcctggctaatcttttattttttatttttgagatacaggatctccctatgttgcctgggctggtctttaactcctgggct

SEQ ID NO: 208917 - DNA, 819 bp, Homo sapiens
ccgatagtagatgggactacaggcgtctgccaccacgcccggctaattttttgtatttttagtagagacggggttttgctgtgttagccaggatggtctcgatctcctgacctcgtgattcgccggtctcggcctcctaaagtgctcagattgcaggtgtgagccaccgtgcccagcctaattttttgtatttttagtagagacgggttttcaccatgttagccaggatggtctcaatctcttgacctcgtgatctgcccgcctcagcctcccaaggtgctgggattacagatgtgggccaccatgcccagccctatggccctgatcttaatgaagtgttccccactgagtaagttgccagcattagggctgaagtatacagagtagcatgttcagaaaggagccatcagtttctgttttctggagtgtttttaccaagaatggaccaagactccttagataaacaatagcactagtgtccatacttactgacccaaacaccatttgccagtttataaaataataaattccagaaatattactgcctcaacattatgaaaatcagatttcctaaaaaagtacttagcagtgttgaaatatctagacactattcacgggtacttaatgaacaaggcacgtgctcagtagattgattgccgtcagacacacagtttttctcatttgggaaagttagttattcccacatcagccaaatacagcacagcatacagtggtcagtagatcatcagcttactcctggtctcctgttgtgaaacgctctcagatgaattgttcttgtgccatgacacaccaacgtgg

SEQ ID NO: 208918 - DNA, 113 bp, Homo sapiens
atggaacgagacacaaaggagtacatggagcgtggttccatttacgctgagtaaacaaaaccaaacttagggccaggctcggtggctcacacctgtaatcccctcactttggg

SEQ ID NO: 208919 - DNA, 262 bp, Homo sapiens
agactcaaagaatataaaagcccctaaatcaggaacgtatggttgccataacaacttggctacatttccatgaattttatggcagaaaaatgcctaacatgtctgatttacaactgcaaaaggaaccacggtgttcatttcctgaatattggtcatggcaaactttttgttttagttatttggatttgataggtatgttctctaattggctgtttcttgttacatgccttatgtaattaaagcaaaaattaatctttaaata

SEQ ID NO: 208920 - DNA, 329 bp, Homo sapiens
tcaacaaggaaaaatgaggggtcgctttaactagcctaaggtaagtcagcagaatggtacctttttcttgcttctctcagcaagtaagacaggtgtctccagtacctttaaagataacttttgagagaagcacttctaggccaaactttcagagaactgaaacagtggatatccaccatctgctagcttgtcacaggaagcaaagttttactactgccccagggaaggggccctcctactccaacaccctatcctgtataacaggtttggcatgcccttggcaacagggccctctgaaaattcaggaagcaggaccctgaggatggctc

SEQ ID NO: 208921 - DNA, 641 bp, Homo sapiens
ttccttagcagaacatcacctcttcattttaagatcaccatacctaagcagcaacgctatgggaaaggaatcatagcccatgccaccccacaatgccagataaaccaagtgaaattcaagtttcagtcttccaaccgagtttggaaaaaagaccggactaccattattgggaagttctgcactgcccttttgcctgtcaatgacagagaaaagatggtctgcttacctgaaccagtgaacttacaagcaagtgtgactgtttcctgtgacctgaagatagcctgtgtgtagtttaacctgggcaggacacatctccctgcattttttttttttttttgagagagaggtgtgatgagggatgtgtgtgtgcagcttattgtagaccattactactaaggagaaaagcaaagctctttcttattttcctcataatcagctaccctggaggggagggagaactcattttacagaacttggtttcctttgccgatcttatgtacatacccattttagctttcccatgcatacttaactgcacttgctttatctccttgggcattcgtacttaggattcaatagaaacatgtacagggtaaacaattttttaaaaataaaacttcatggagtatctgaaaaaaaaa

SEQ ID NO: 208922 - DNA, 112 bp, Homo sapiens
gaggtcaaaatcagcaacaagttctacaatccagtgctgatatcagatacaagcttcaaggacgaatttctttttgaaggcttattccagtttcatgaggctagcatggggt

SEQ ID NO: 208923 - DNA, 351 bp, Homo sapiens
tcaaagaaatccagggacttgtggaaggagagaaaccaatggagaggattccttcagaaaggagcaagggggatcaacagggctgactgttgcggaagatgagttcactgaagactgaaaaatgcctatggttaaacttaacatagaggtctctggtgatcttggtgaagtgagatttggtggaataacatgcccagaagccagctggagtggaatgaggaatgagtaggaggtgaggaaatggagcagtgagtgtggataactattctctctttgcagatcacagtgtggtgagggtgaaagaacatttaaataaaaacagagacctcagttctgacctgcaaggtcagt

SEQ ID NO: 208924 - DNA, 313 bp, Homo sapiens
tcatattgtcttctgtgttatctcagtgataaagctcattttgacagtgtttgagattacccatgttaaatcatcatggcttagtggttaagatctaggctttgtaattagacatactgaagttgctgtctcctccctgtcaatgaacagagtttgacaatggaacattagatatctttctagacccagctttcccaactttatggtaaggacaacttcatagaactattatcagtggtagagacaggttttgagcccatgttctctggttctaagactcattctattgatggatatgttagaggttcaaggt

SEQ ID NO: 208925 - DNA, 543 bp, Homo sapiens
ccagcaaggacactcagtcctttcactgcaagcaatcaaattctgccaacaacctgcatgtgcaaggaactggatccctcaagcttcttgcaaggaacatagcccttgcaaacaccttgattttagccctgttgagacccatatcagatgtctgacccaccaaactgtaaaataacaaatatatgtaaaaacaataaatttttgtcattaaagccactgtggtaacttgttaaggcagcattaggaaactaaagcaggtaatagggaattaaaggacagaaatatttttggactttaattgaactattggcaattccatatttactgtaacaccttaatacagtattttatgttgaaaactgcttcttaatttttttttttcttttctttgggtcagggtctcactctgttgcccaggcttgaatgcagtggcacgatctcggatctctgcagccttgacatcctaggcttaggtgatcctcccaacctcagcctcccaagtagctaggaccacaggtgtgcaccaccacgcccagatagttt

SEQ ID NO: 208926 - DNA, 281 bp, Homo sapiens
tgatgtccccttcacaagaacaagctctcctcaaagaaagcctttaaataactgggcgtttctgtccaggtagtacctatgataactgaaggaaccaatgcaggttagttttcctcagtgtctgggtatggtaagcagaataacagctcccagagatgtccacatactggtatctgtgaatgtattacattacagagcagaaggtaattaagctcacaggtggaattaagtttgccaactagctaatctttttttttttttttgagatggagtttcgctct

SEQ ID NO: 208927 - DNA, 452 bp, Homo sapiens
caacggggatgagttgcatgaacattacgtgaagcactactcagcaggtaaaaggaaaggagccatcaagacacacaacaacggggatgaattgcaagaacattatgctgagccactctcaaaaagatacaagcggccgggcgcggtggctcacgcctgtaatcccaggactctgggaggccagagcgggtggatcacaaggtcgggagttcgagaccagcgtggccaatgtggtgaaaccctgtctctactaaagatacaaaaaattagccgggcatagtggcacatgcctgtaatcccagttagtcaggaggctgaggcaggagaatcgcttgaacccaggaggtggaggttgcagtgagccgagatcgcaccacggcacttccagcctgggcgactgggtgagagtccatctcaaaaacaaacaacaacagaaaaaaacagctgggcat

SEQ ID NO: 208928 - DNA, 309 bp, Homo sapiens
tgcaagaagagctaatttagagtgggagctctgcaaggctctctgggttgcagagaccttagtaaagactaaaagttagctaaagaaagatcttccctagtagagaagcagcatgctcagaggcctgcataggataggaaggacctgaaaggcagtctgcgcagctggaggaggtgggtgaggtcagggagctctggggccttgtagccttgctttgggattgggctttgctccctaatgcagtggaaacccgttaggagttgtctgttggttggccgggcacggtggctcacgcctatgatctcagca

SEQ ID NO: 208929 - DNA, 507 bp, Homo sapiens
aatgccatatcacaggagctgtgttcttcactgcttattactaaagtataagttgactgctgaagccggcagggggccaggaaaaggaaattcaccatttgggggctctggggagtgaggggcaggaagccaagcagacacatgctgttgaatttcaggatcccaagtggactcttgggattttggaaaacttcagatgggccaaatgtggactggtcctagaacattcccgggcaaattaagccgatggaggggataaagccctacccaagcctgagctcaggtccatttacatccagaggctgtgggggatctgaccaggctgatggcaccctctgcatggacagcacccggctctgagcaaagaaccacagaccctgctggaggccacctgggacttctggtttgaaaccagagggcagaagtttaaataaacagctgataccacaggtgagacccagctgccaatttccagaagtcaccattagagcgcgcggcgcggccggg

SEQ ID NO: 208930 - DNA, 552 bp, Homo sapiens
gctttttttttgataaatagaccacttattttcattttatgtactgtcagtttttaaattgtaaatatgtcatttacgtattctttatcatttaacatttttcattcacatactgtcaagcaacctcagttttcaaaagtttaatgtgcaaattattgtgaaagtgaataaatttgtgagtaattcctacagggtgaaataactatgatttaagaaagaaaatttcctagctgtctaaaataggtataattttaagtaaaaccaggttattgaacatgatgctttctacttgagacaaaatgagagaagagagcaagtgtgatcagattaggcattcatgtttgtgtcgactgtgccagcacagaattacatgtaaattagatgttaagagccaaactggccgtttagaatgtcccaaagggaagacactcctcttgctaccaggctggctgaggatctgaaagggtggcttcaggaggttgatagaagtggacaacaaccaagaaaacgtggatatagaaaggccaagaaggaaaaaccagaatgtaagat

SEQ ID NO: 208931 - DNA, 159 bp, Homo sapiens
cctgcccttgccttccactcaccccgtcactctccttctcattactgtgtccaggctcaaagcagcagctctctgggaaggcccccgttctccagtttctcccacttttgcatccattccacatgcaccatcgttcatgttcccatcacctggagagac

SEQ ID NO: 208932 - DNA, 570 bp, Homo sapiens
gtggttgggaaactcatttactgggtccaccaaaggaaacccaattctgccatgtttttgcaaatactacacgtccctttgctctcaatagcaaaagtgatgttatagttttttttacttttgtcagaatcaaggcttcggccacctgtgcaatattttcccatggaatgcagcagtaaatccaagtaggtatatccgtgctcagagagaattctccatagttctgactcctgaaaaacaagtctcattagctctcatctagtttgatgactaaaagtgcacagcagttataccccagtggaagtgatttttctcacctagctgctctctaactcttacggctatctagttgtctgagctgctggtttgttttacttattctccaactgaactcattccaaaccaagaaaaaggaccaaatgaaattttcagttattatcatacttgctccttgaataagaatgctagagtctggaggcagaagaagactaagttaaaaaaaaaacagcctgaaggaattctggagtgagttttgtaagtctaattgtcaaagaagataaatggtctcag

SEQ ID NO: 208933 - DNA, 396 bp, Homo sapiens
ggcctctggttgaatcttgggattatttaagaaaaaaaaaacctggggaatttaactttctccttcatgttttctgtgttcaattcatatttgaaagcaaagacagagttcatatttttgcatttaggacccactgtgcaatatgtaaaatttgcttttaatagtcttttgccacattttcagtcattaccattctccagactcacgctcagtgcttctctggctgttgtaaagatttcccatgctgacatgacagcataacaaacagttgcagcccagaataaagccctggaacccaggtatgtgcagagaaggagagaacccctggggacgcagtgtccattctaaatctggtgtttcaacccctgatgaatctttcttttccagaggaacaaa

SEQ ID NO: 208934 - DNA, 357 bp, Homo sapiens
aaaaaaaaaaaaaaaaaaacagaatcaaaatggccccaaacttctcagcagcaatgatggacactgcttagaagtctatactgataaatcaagcatgagggtagaaaaaggacaatttcaggcttacgaagtctcaaaaaattactttccataaattactggaggacatgcttcaacaaaaagtgagcataagccaggaaatagaaactctgggaatacagaaaacaggggctacacaaagatgagagaagggactccttaggttgatgacaaagagaaattgatggacaatagctgtgtagcctccatccagattggagtgagtctgggggaagagggggagttctgaggcaaaaa

SEQ ID NO: 208935 - DNA, 430 bp, Homo sapiens
cagttgtaaaatgtcagactgtcacttacaatataaaaaaccaaaaatgatggtatttgtaaaaatgttatcacctcataaaaacaaattgtaaagacatgaaagtgatcttgctatgctggtctttcagaagtgagttagtacagctactttaaataccagttgtgtagattcccacacttttctaccaatggagaggtttacacaagcataatttaagttacaattacactaattaacatctcatttgcataaattgttgaagtcaaaacaacaaagaattgtctaagaagcttaatcctatttgtccaaaatagaaagattttttttttaaaaaaaaaactatgctctaaaaattggcagcttaagtatgtctttagtatgttgagctgtgtccttttaaaaataaatgttttcaattttcttaata

SEQ ID NO: 208936 - DNA, 487 bp, Homo sapiens
tcaggctcaagagatcctctcgcctcagcttcctgagtagctgggactacaggtgcatgccaccacacctggctctattttttatttttggaagagatggggtttcaccatgttgcctaggctggtctccaacttctgggctcaggtgatcttcctgcctcagcctcccaaaatgctaggattataggcatgggccactgtgcccggccaatcataaaggttttgataaaggcaagcagagactaaggtatcattgggagggggagggggcaaccaagagaaagggagagagggagaaagacaaagcagtgtaaggtttgacagaaactacttcacagttttgcaatgcaccagttatatttacacactagttctgcacaccagacaaattactctctttaagcactgtagttatgcttgccctaccccaaaactagactgaacacttctttgaataatactatagggtcagcagagggtgaatgga

SEQ ID NO: 208937 - DNA, 219 bp, Homo sapiens
atggatcacaaatgcatagaaccaacctgctctgttgtgtctttccagcatgctcagctgcaactctcatttacctctctacctattgcattcaaccttgtgtcccaccattccaccaaagaagcccttattaaagttgatctgggccaggcgtggtggctcatgcctgtaatcccaacactttgggtgggcgaggcagaaggattgcttgagcctagg

SEQ ID NO: 208938 - DNA, 156 bp, Homo sapiens
aagtgaattgattgcaaacatgctgttgatataaccatagaatactggatatccatgggagagcttataaatgctactggacatttgtacacaactgtgtgtatatgtgtctgtgtgtgtgtctgtgtgtgtgtgtgatgaggagtggggggagaa

SEQ ID NO: 208939 - DNA, 490 bp, Homo sapiens
ctctttagagtcactgccctagagctatacttgctttgaccaaatttcttcagtcacatctctcaccttggaaaccaagaaaaatgttaacactgaaattcccgagagtttaaaacaaacataaggctttctgtaattgaagcaaaaacacattgtacatttgtctaggatttattcaccattttaatcaggcactaaaagtctaagtttgagaaagtttgtctgtcttgacctggagttaaaactgggttgacctgaaaaaggaactgttttgttcctttttcaaagcacggtgtggagagagctattgcctggttagaagcagctgtgagatctttggtaaatggggaaggagaggtcctaaggaacaagcaggaaaatggtcccttatggtttttcaagtcatttggtatgaaatacccttgaccttatttatacgttgtgaatgaatggttctgaacttgaaatatgtattcgtgaggaaggaaaa

SEQ ID NO: 208940 - DNA, 837 bp, Homo sapiens
gggtagacaccatctaatcagctaccagcaaggctagaataaaacaggcaggagaagatggaagagcagacttgctgagacttctggccttcatctttctcctgtgctaggtgcttcctgccctcgaacatcagactccaagttcttcagctttcaaaatcttggacttatattggtaatttgccagagacccttgggcctttggccacagactgaaggctgcactgttggcttccctattcttgaggttttgggactcgcactgatccaccactggcttccttggctcctcaacttgcagccggcctatcatgggacttacctagtgatcatatactcaatctctaggaaacccaattgacaagtttctggcaattcaacaccatgtagtatcgcacgtcagaaatcggaatgctgtgacctctgagataattcacccaccggagtcagactgctgaagaacactggatgggtggaaaaggaacatctcaaccaggagagaaggaactgagtcaagaaagggctgcatctggtgaatatgtccctcccagtgatggaacccagggctgctgcagccaagagtctataacagtggagacgccttgagcaaagccccagagcccttgagctgcctgttcccctcctctgacatgatgggtaatctgatggaagcgctgagaggcactgcctagaattaagccctatgtgtaaacgaagcaaggaagaaagaacatgtgctatcaaatatgattcatgattcaaatatattttaatatcttattcttttcacactctgagaaactattctgataatgtgattgttttgtaaaggagtgt

SEQ ID NO: 208941 - DNA, 317 bp, Homo sapiens
atgtgtcataaagatcagtgctctctcagcctccatccatggcagacatgcctaatggattacaatactccttcccgctaaaccagtactccacaacccagtgccactaatcaatagaaactgctgtgcaagtttaaacttatttcaatccctaacctaaaccattccaataagcagtagtagtgtgtttccaacaaatgtgacactttttgttccattttagtcaaaacttgttaaactaaggatatgaaatatgaactcctatcaattagattactgatgactaatgtcagtgcttgggttttaatgaccaaact

SEQ ID NO: 208942 - DNA, 353 bp, Homo sapiens
cagaaagggatactgctgtttcttagcaggttgctcaataggagaggccctgaccctctccagaagtaagctcacccaaccacccagccaccctttcccatttgcagaggcatttaggaaactccccagctgaatctacagaggcacaaattttaagtaatttgactgactttaaaaatctgaaaattggaaaatagtttgccagtttcttacgaacacttaaccatatgacccctaaggcccacaaggtgtcttgtacatacatgtgtgttgcagtattattattaatagccccaaactggacacagcccaaatgttcaccaacaggtggatcataaaaacaaattatagtt

SEQ ID NO: 208943 - DNA, 742 bp, Homo sapiens
  misc_feature (529)..(529): n is a, c, g, or t
  misc_feature (608)..(608): n is a, c, g, or t
tctctaaaaaaaaataataataaatttaaataatttaaaataatatacataaactttttaagcggtcatctgatcttctgatgtaactcattttgcgtaattaataatcatgtccagtaagtagccagtgctccttttaaaatctgtcagactctgtcactcctctgttcataaacctacaatggtttcctagcacacttagaataaaatccaaagtcctaattttcaacatttacaaggccctacatgatctgacccttccctccctcttccaacttactctccgcattcttctctcttaccacactccagcccacactgcgattctgagcacatcaagaaagcccctacctcagggctgttgcatctattattcattcattcctttgagatgctgagtttggtgagagatttctagtgaaagaagagggcccataaatatagactgcatgtgtgtgcgtgcgtgtgtgtgtgtgtgtgtgtgtataatcttttcaaaattgaaacttattttgggtatgtttttctnttattgcttctgtagaacctactgggttggtgacatttacaagacagagtcttgaagattttccagaatgggaaaggtnacaacaataataaaaataatcctagaccccctagaaatagaaggactcttgcaccatgagaggattctattttatagcacctagaaaagatggttttacaacctctatttatcctagtgccagggaatttcttc

SEQ ID NO: 208944 - DNA, 514 bp, Homo sapiens
tctaattgccaattttactgaatataaaatgtatttactttctcttcctcgtggcttccctgggaataatactcaaaaagccagtgaaaacacttcagtacagaggaggcttccaggtaggtcctttctgggccttttctcaaggaattttattgcaaaagcatccgaatgtcctcattatagggtgaggtgacctcttcgggttccctgaattactgatccatggacagctttaaagcaagcaataaaatacgtacagtcatccttccatacctgtgagggattgattctaggacctcccacagatatcaaaatctgtggatgcccaagttcctcatataaaattgcatagtatttgcatataacctatgcacatctcttgtatactttaatctctagattacttacaataattactatagtgtaagtggtgtataaatagttgctatactgcattgtttagagaataacaataagggggaaaagtctgtacatacttagtacagacacaatt

SEQ ID NO: 208945 - DNA, 590 bp, Homo sapiens
ctttcattcaactcttcaggggtcaaagatttctaccctgttggaagaagccactgttgaagtgtgaaaggctactctgctttctgcgtccatttaacctttggcctgccctaaagagccagccaagtgtcaatcagggctgattgggcacctgtgcctggaaacaagacagagaaatttagctcttccaggtcatcaaaccatctccagatggcaaagaacttctgaagttatgaacctaacttgcttgtgatgcaaattagtgacctagggtgagatgcttcattaatgcttactcctgtgagcctccaaggtgtcagaagttggactgcttactctcacattttttttttgctgtgtaatgtgcattaaaataatttatattcatagagatggtccaataaattgcatatggctagttaataagctgctaaagcagagaagaaaattagatttcatttagaagaaaacaatatttggctttccccatggaaatatgtgaaaaagctttagaaaattctgttaacattgaggtctcagaagagactgtgattaaaaataataaaaagaaaaaaatatgaatttctatc

SEQ ID NO: 208946 - DNA, 500 bp, Homo sapiens
gagggcattatgattttaaacggatttgtgctttatgttgtacactagggttttttttaacccatttattggaatattagtatgtctagatttttttattagaaagaaactgaaaaacttttctgctttccctgttttgtatgtgttcattcatttttccagtgtttaaccaagatggactatattacctttcaaaacaatgcaaaatttgagcctgaagcaaagctcctcttattgccctctctttgtcgtcattggtcctcccataaaagtgtttattttgacttttgatacttaatttttcaggtgttactaaaataatctttacagtcttgtttatgtctgccaaatgacagtaaagcaaaaaaatcaattaattcataattttttaatgaaagatttctgtgtacaaattcagaagcatatagtatattttacaaaggttgaaatcatttaagtaaaattatttgtctggccgttctaaattccatatttttaaa

SEQ ID NO: 208947 - DNA, 360 bp, Homo sapiens
tttttatgttccatcaaatctcctctgctgtaattctggcccatttattctgatattaagtgaagatgagcccaagttttccatctgcagttaactattttatgcatcattttgtaacattgagcttctgatccactcaaacatgaactagtcggtacttaaaattgagccctttaaaagctgggcatgttgatgcacgcctgtaatcccagcattttgggaggctgaggcaggcggatcgcttgagctcaaacatcctaacacctgtagaacaacacagatgtctgctgccacatgcagtgatttcaaaagttcaagaccagcctgggcaacatggtaaaaccctgtttttaaaaaaaa

SEQ ID NO: 208948 - DNA, 450 bp, Homo sapiens
gcttaacatttttattaagttcaatttcctgtttttggtgtcatctaaaaactggttaaactaaggtcatgaagattttctgttttccttgaaaagtttagtattttagttattacatttaggtctatgattattttgagttaatttttgtatatggtatgaagtaaggatttaaattcatattctgtatgtgaatatccgattgtctaattactatttttattttatttttactttttgtggagatgaggtcttactatgttgcccaggctggtctcaaattcctggcctcaagcaatcctcctgccttggcctcccaaggtgctgggattacaggtgtgagccactatgtccaacctcagcaccattcttgaaaggcaatcctttcctcagtgaattgccttggtgttctttaatcaacaataaattgacaatacctgtaagagttta

SEQ ID NO: 208949 - DNA, 359 bp, Homo sapiens
ttatgttatatatataaattatgtaaataagttattttataccaaaaaagtacgtattttccagtgcaacttaattaattggtattctgatttatacatcaatctaagatgactttgttaatatgagtccacaagaggctatctagatacgtgggttaaattgagtttctacacctgctaagctgagagccaaactgtggtgcttggagacgcattaaaggcacaatcactcttggcagtgcttctgggtgctcagcaggcatctcaccctaagaactctaggccattctgattcatttcagtagtagggagcaagttttttttttttttttttgagatggagtctcactctgttgcca

SEQ ID NO: 208950 - DNA, 632 bp, Homo sapiens
tagaggcgagaggactggcttctccttcactctgtaaatctttggaagacatttctgcctggggctttgtcaccctgaccataggtcagagaaacgtattgtttcatattaaataggtgagttaggaaacaaagtgttgggaaggtaatctacagctctacaggtccctctgttcagagtggggtagtgttatccagagcaaatctatgggatcagacacactgaagactaaagcaaaacaccaaacccactcattcccaagggcatccaattctcacatgccatggaaaaaggatgattcagaacaggactgccaagtagggcaattacatacgcatttaaggcgctagtttctggagctgatgaaagtgttcatcccagaagccgtaagtctcctaagggattgggtggtgtttgcaaagtcacattacttttatggcatcttaggctgaatgactcatgtatcaggcacgatgacttctccgacagggctgccaaacaaccttgtctaggcaaatggcaatgtagaaatacagagaactgatggagccaaatggcaatggagggaaggtgggaccaccaagaccattcctccaagccaaacttatgccaccaggtcagtggtcatctgt

SEQ ID NO: 208951 - DNA, 314 bp, Homo sapiens
actgtggggccccgccgaggtgaccggccagaaaggagtgcagaactccggccagggcgggctcagagcctgcacccacgcctcctgcctgggccgccctgtgaatgggggagaagggcttcctgtgcctcagaaactggaggccaagaagcacatgatggacgggtgggccgaatgaggccaagctctgccttctacagcctttccaggacttttttcttggaaaatgtggagcttgattggatgcctttgtagtggagcttccatcaagttagagctgcttgtgtggcagtgtccatccgggagtcagtaga

SEQ ID NO: 208952 - DNA, 291 bp, Homo sapiens
atcacctgtgcggcgagcacactcaacgataaatgatcacttaaaaaatctggaagccagtctcagtattattcttatttaattcagggaaagagacacaaataggtcccaataatctcccaaagatttttttttctcaagaatagatcatttactcccataaacgagagattcctgaatgcttttttgtctaagcacacacttaaaatatttgctctgtacctcttctcccaagaacagagtctaagcagaattgatatggaaatatcttaatccagctattagtccaga

SEQ ID NO: 208953 - DNA, 643 bp, Homo sapiens
ctttattttattcttggttttcattttattctggtctcagggccatacatttattttagtttaattaattattattttgacaacattactcgggtgatatctatataatggtagataaccaatcagttagcttaattaatctaaactatttgaattcagggaaatattagtcaaatctgctgtttgactaaatacaattcaaagcaatatatttgtgactgggaatatagaacacaaggaaacaaatgcgtagcccatctgcagtatgcattcttccattttacaaccactaaccattgaggctgatacaattttcaagcaagaagcattgcttcccaaaggtaaaataatcagaaatatttctatagtaaattgaatttttaattggcaatactgcttatttttttctagcaaagacaatttatttcagtaaccttaaataggaaaagtactcaaaaattaaagttgattttttggctttttgtagtctctctagaggtcttctagaaaattaccactgttggattttaatctgcttccattaaccaatcttacagagatgataaatggattaatactgaccaactataaattgactgcaaataataagccacataaaagctgaagtaggaaaactactcca

SEQ ID NO: 208954 - DNA, 481 bp, Homo sapiens
ggccaatatagggacaccctgtgtctattaaaaatacaaaaattttctgggtgtggtggtaggcgcctgtaatcccagctgttagggaggctgaggaaggagaatcactgcaggaggtggaggttgcagtaaattgagattgggccactgcactccagcctgggtgacagagtgagtctccatctcaaaaaactaaataaataaaataaaaatattttcaatctgcggttggttgaatacatgcaaatactgaaaccgaacctgcagatatggaggaatggctttacccattttgtgtatgtaccatagtttattcagctgtgcttggacatttaggtaatttctaataattacaggttataaataatcttcgatgaataaccttgtgcatatatatttttaaatagttggagctgtgtcttcacggtaaatttctagaaatgggattcctgggtaaaagagtgaatatatatgtagtttt

SEQ ID NO: 208955 - DNA, 799 bp, Homo sapiens
tgttgtctaagctggtatcgaactcttgggcttaagtgatcgttccacctcagccttccaaaatgcaaggtttacaggcatgagccactgcacccagaaagaaaatttattattgatacataacactatgtaacctacagaccttatttaaatcttaaaattatcccaataatatatttattgtttttctgctctagagtccaaagattacacattgcatttagactcctttaatctgagttgctacctctgtttttaatgaccttgatatttttgagattattttgtagaatgtctcttaatttggatttgcctgaggtttccttacaattggatttaaattacacatttttttcccatgaggactctgtaagtggtgtgcagcacgtgaggaaacgaggtatgtttgtacctttataggtgatgttaacttggaacacttgattggggagggcggtgctgggtttttccactgcgaaattactatttttttctttgtaattaataattacaaaggcaactcctggggagacactttctgactctaaatagcttgtttttcagtaaattttcctccactagtttaagcattctgtaagtctggtctaaatcagtaattgctctgatggtgcgaaagtgtgatatattcaactttcatcattcctccaacacttgttagattgttgttctactctaaggaagtttcccttctgtcctgtttgcccatcatgtatttttaaataaattggagcacatctttactctgacacaatacagtgttccaagctcatcttgtacc

SEQ ID NO: 208956 - DNA, 1191 bp, Homo sapiens
ctggatgacaaaacaagactctgtctaaaaaatatataaataaataaaagaaagaaaattcatagtagagagaaaccttacaaatgtgtagaatgtggcaaaactcgttttaactaatgctcacatcttattgcatagaaaagcatttatacctgaaaaaaggtatacaaatttaaaaaatgtggaaaagccattaaaatctgttcacatcttaacaacagagagttgatacttaataagagcattgtaagtgcaattactgtcaaacaatcttgtagaaaatatcatcctttaaagtgaatgagactagtctgaggaaaaacattacaaatgtaaagagggttatagtgcatttacttgtatcacagatcttgttgtacacattttatactagaggaaaaccctgaagcagttgcaccaactttgttcaacatcagaaatttatattggagaaaaatccagcaagtgtaataaatttggaaaaacttttttttccccaaaaactatacctcaggaaacaatggagagtttatattaacatatatttttgcatatggccatatgtataaaaatatttaattcaaaattgaatttaaaaagtctacataaatatcatacatagatatgtatgatattgaatacatgtattaaatacatagaatatgatatttaatacatagaaaagtctacatgaatatcagaatttacagtagaaacaactaagacacaaacacttgagacattacactaaagtgctgagtatagaaaataaaactaaagttgttaaattatttgtatataacttttaaaagagtggaagatattttgcaaagttatattcaaagtgtactttttatttatttttttgagatggagtctcactttgttgcctacgttggagttcagtggcacaatttcagcttgctgccaacttcgacctttgggttcagggtacgagctcgaaaatcctcctgagtagctgggaatacaggcatacaccagcatgtctggtattattggatttaggcaagatgggattcccccctttgcccgggggtcccaaactttcctcaagtgtttgcccctggccccaatggggatgggctagcctggccccccagtgtttaatttttttttctccgcaggtttataagaaaaagggcggccacacggaagggatgggcaacacgg

SEQ ID NO: 208957 - DNA, 305 bp, Homo sapiens
tttgggagcaaatgcatataatcaaactcccagatcctcagaatagaattttataaatgtatttcttcatgtcaaattcaagtactataaatgaaaatagtaagagagataataaatgtagcatggaaaatagactaacaaatttaccaatttgtagaaatgtgtaacccaggacccagtttcatttcatataatattcaaaaagcaggatccggaactatagtgagctctttaaacatatggcaatcaataagacttgaatgatggtattatctcagtaggagactctaaggctctaatgtaaa

SEQ ID NO: 208958 - DNA, 705 bp, Homo sapiens
  misc_feature (612)..(612): n is a, c, g, or t
  misc_feature (652)..(652): n is a, c, g, or t
ggattcatggggggagcccatctggagcttgtcaggggagcgagcgcggggacctggactgggctgagcatggagtgaggaggacgagagcagagagacccccgggagcttcatcaggcctggcagctgactgcatgtggggtgaaaaaaggaagccacaggacagcgcacaagggtatggtgtggagatggaggtggagatggcacagcaggccacacagagaagaaacctacagggaggtagctgggtttgaggtgcttgaggggcagatgggtggtctgatgggcaggtagacagaagggtctgcagccggggaggagactgagatacatgagaccatccagggagaggggacccagggggaagagcaaaggaccggatcctgggaactggacagttgtgatttggccaagacagaaaagcctgtgaaagagaccaaaaaaacccaagtgcagtgtgaggagaggcccgcagagaagagtcttggaagctgaggggaggtgacctcagcagcacagtggacagcggtgccagtgacttgggaaggtcagaaaacagaagatggaaagtgggtttggaaaccagggagacctggggagagcaggttgggnattgtttgattgggggggggtaccccgagccttcgaaaanttccgtaaatcatggggtcattaaggcttggttttccccttggtgttgaaaaa

SEQ ID NO: 208959 - DNA, 514 bp, Homo sapiens
gcgcctggccagtaccctactttttaatacattcgaatcggcagtggagtagcaacttgtgagaatccgacatatacttttccaatgtcattaatgttttgagccgttgatggatgctcacacactttcagatgatactttctcaggtctggttctagcagagtataagaaacatgccatagagaagagacaatttctaagtatatttcaggtactgagctatgtaaaaaatggctgtaggaagttaatttaggactggcaacgcaggctttttcatattattgaatgaatgaaattgaaatatatatatgaagagttttgatggtaacaatttaaaactgaaaccggaaacattttaagtggtatgtatttaataaacattcttcattttttaatttcccataacagcatttaaaactgttttaacaaaagaagtcttaaaacatattatatattggggggaaattgctctttcgggaatttctgcaagtggaagcactttgaggatggtttt

SEQ ID NO: 208960 - DNA, 381 bp, Homo sapiens
tgcctgtgtcgctatcaacgtaggtctctactttttttgttcccccccaatggctttaatctcattttaatgaggtctccagagggagaaaagataaacttgtgtattatcaatcttgtttccctaatctgcttcctaaagatcctagaattttgctatagttgacaccacggatcccctttcaggcccaagacagtggagactgtgctagacaaggaccagatgcccatggtgaagctgctgctctgctcagcaagctgggaagcacccaacgtggcacacaaggaatgctggggaaatctggcccaagagctctcctaaaggtttactcaggcactagtgtaggctcacctttaggtctggaccatccggaaacggtgg

SEQ ID NO: 208961 - DNA, 314 bp, Homo sapiens
cagggtttggtaagcagcgggtaatgaactccttcccaggctaaggcaggattgttggcaattcccagaaaaggtgctcttgtcatctctggggctgtcatttgctatccaccatacttgtcttgttagacaagagcagctaggcctcaggatctatgcactggagctgaatgccaatgctacaggttagctagagagcagctacttctgacagcaaacactggagtgagagccaaaagtttgttaccaatttgtaactccctttggttacatgcaaggaaataacagtttttatcttccctgacttttgagtt

SEQ ID NO: 208962 - DNA, 342 bp, Homo sapiens
aagccattattctgcctcctataccgtgtaccataaaggaactttcctaggtttcctgtctgtcctcaacctttccagtaagcattcggtagaagcccaaggggaaaagctggcaattacagaccactcctgtgtctggggctcccaggtattctaaactgtcacattaaactacactcaacctttgtaagaatttgttaaaatttcagccattttcttgttacctactgaaatgccagagaactcttctggagttctgccacagatgaaataaattcatgtctcctatttggaaaggcttgtaatttttttttttttttttgatatggagtctcgctctgt

SEQ ID NO: 208963 - DNA, 412 bp, Homo sapiens
atagacgtggggctttgggtgttatcaatcagatgaattcttggggactgtggatatagcttgccacagtatcttatcagttaattgcattcttggatgtgctgggagtcagcttgcacaagttaagtccttgaggaaggggctgccagtgaaagagccaagatggagtctgtctggctctcttagctaagggagagtctaaaaacagagttagtaaaaaccagtttgggcattacaagtgtcccaattcagtcaggctttcttctttcgttccataaagtaccaaatgcctaccatgtgccagtcccagtgctaggctctgaaaataccgcatgaccgaggtagacctggttacttcctgtctggagagtacagggtagcaagggaatcagacattaaacacaagcatgca

SEQ ID NO: 208964 - DNA, 638 bp, Homo sapiens
caactttgtttcatgaagtgaagaatgtatagaacacaaactattttttataaccaccttcattggcaaaataattgctgaaaaattcctacagattccagcaagcatttgttaataataatttgttgctttgtgttgatgtataatctggctttcactgatattttagtaaggactctgcacaggataagtatggatagctagctagaagctattctcactcttctcttcagcatggtgacttgaatttccatggtatagtttcaacattgtcatttggtttcctcattatctttggcttttccaagagcatgctacctatattataaactgaaccttattttatgttctatagctccatagcttgtttctgcttcattcaacctgatttcatgctaaacatgaaagtagctataaaattcctactttaaagtgttaattgaaagattatgaagaaaagaacagggttttagtaaagactatatttaactgatggtaaagactatcatgaccaaatttatttggcaaatgtttgccactaatgttgacaggtaatgtaaatggctcatactataataatctgctttctttttttgtcttcttccaggttctggatgaagccttccaccattttaaag

SEQ ID NO: 208965 - DNA, 84 bp, Homo sapiens
aaaatcattgtagtgacacactccaaagtggtttactgtctttggaatgcacagttttgcccaatattattcagcaagaaggat

SEQ ID NO: 208966 - DNA, 453 bp, Homo sapiens
taaaatgttcttgtctcttcaactgtcatccccaaatcagcacgagcatgtctggtgctcacatttcccccatctttggttgagtgtgtgtttttgtgtgtctgttattgtttccctccccacccccctttaatcagaagaacactatcagagactccaacacattcagctgggtctgaactgactgtacccattaggaattcttaaagtgcagatcgactctccaaaatgactttttacagatgcaaaactgacttcatgggttgcctcacccccactccatctcccgacgtgtatggtttttcatcgctgttccaatttaaatttctcagtctaccactcaaaagagatgatttttttctaatatccatcctgcaaactccatctgggatcccccaaacaagctgtgttcttctgtttctctcacaggcaggaattataaaaagtctgcaa

SEQ ID NO: 208967 - DNA, 876 bp, Homo sapiens
ttgctagtacgaggctgcggttaatcggccgaggcagtgtttcagttcgaggagagcagcggccaacagaaccaagtggcagtggacgcaccctcagagcatggggtctattctttccagttcaacaagtaacagtgggattcccctccccatctttactgaatagaaatgaattcttggagatactcatgctcccagattccagagggttaaccaggaatggagaccatccgtcggccctgctaaggactaacacttagccatcgtttttcacaggcctgggcctggaaaaagaaatctctacgttcctgccctttactattgctgatggagcctgggggaaccatcactttttttgtgtgctacattcaaggagatcaaaaaaacttttcttcttttgcaaagaaagctttttgtttttaactgcaacgtacttttcccctaccttgaagagacatggtggtcgcagcttctcatctatatgaaaaagttttcgatgtattggaattatttgggaatgcttttaaaacaatttgtaattatttctttacaaaccaaaacagaacagaaaggtgtggtgctggaacatcgatgaaggagccctacttactgagcttagttatggacttttttgatgcatgtgtgtatgtgttttaaaaagtatgcaggctctaaaaatgttattttgtaaagctctcagctcatgcaccccatctcctcttcacccatattatgccttctttctcttgtccagattcttctttttctcttttctaaacagctgagcctgcctactttgcccttttacagcttttaattttatggatttttaaaaatgaaatttcatgtggaatttggggttggggggcaggctgg

SEQ ID NO: 208968 - DNA, 338 bp, Homo sapiens
attattttgataaatatacagtggaagaattaccctacctgtctgtcacctttcttgtagctgagtagtacctagagacaagtggagctaggaggaggccatgagggtgattttaagttgaaaggtgactaccttatataaactattaaaatgcatatgttgcctgatttcaatgataatatttggctgtttgagtttagggaaaaaaaatcttatgtgactgtatttttattaatatgagaaatgttcttgattatatgcacataatacatctctatacatgcagatatccttagttaacacttgaagaaaattggttttgattgaccatacattct

SEQ ID NO: 208969 - DNA, 379 bp, Homo sapiens
ggaaaagagctcctaaattgaacattgatttcaaactacagtaaaaactggctagaatgctaactttgcctccaagataaatcatagtgtagagttacttctaaatcttacttattaacccaaatcaacataatgacaacatctatcacttctggaataggacaagtttctattagatccttacaagcttccactgttccctgactaattagttaaaacttcatcaagaccaaattacaaggaaaaaaacttacggtttccaaatacttctaagaaatcaccagctcttccctctggaacaacacactcagtgatgacccaatagttcaggatgcatcacattaggccaagatccactgttagaccaatcatgatgccg

SEQ ID NO: 208970 - DNA, 387 bp, Homo sapiens
ccaacgctgctcacatttttgatagggaagtacgggtatagctttcttgagctttcaggcggttctgacgtccagaaaaggtagcaatttacttatcttagcccttgccatcattttataggtgagaaaactaaggctagataggtaaagtgactttactaaggtcatggaaaaactagtggcaacttttgtaaacctggagtcaagagaatctcttgaagctggcaggcagaggttgcagtgagccaagatggcaccactgtactccagcctgggtgacagagtgagaccccgtctcaaaacataaataaccaacgctgctcacagtgtaaccatcacacgaatagacctgtgcttttgttatcttattcaaaaactccttgcctg

SEQ ID NO: 208971 - DNA, 805 bp, Homo sapiens
atgtagaagatgggtgatttctgcatttccaactgaggtacctggttcatctcactgggactggttggacagtgggtgcagcccatggaaggtgagctgaagcaaggtggggcgtcacctcacccaggaagcacaaggggtcaggggatttacctttcccagccaagggaagccatgacagactgtaactggagaaacggtacactcctgaccaaatactgcacttttcccacagtcttagcaactggcagaccaggtaataccctcccgtgcctggctcagtgggttccatgccaacggagccttgctcactgctagcgcaacagtctaagatcgacctgcgacgctgcagcttgatgcagggagaggcatccaacattgctgaggcttgagtagctcacagtgtaagcaaagaggcccggaagcacaagttgggcagagctcatcgctgctcagcagggcctactgcctctatagattccacctctggaggcagggcatggcagaaaaaaacgcagcagacagcttttgcagacttaaacgtccctgtctgatggctctaaagagagcaatggttctctcagcatggcattcgagctccaagaacagacagactgcctccccaagcaggtccctgacccccatgtagctggactgggaaacacctccccatcaggggctgagagatacctcaaacacgtgggtgcccctctgggacgaagcttccagaggaaggatcaggcagcaatatttgctattctgcagcctttgctggtgatacccaggcaaacagattctggagtgg

SEQ ID NO: 208972 - DNA, 234 bp, Homo sapiens
ccttctgctgagaggactagtgccaagtgtggcagacaaattctgtgggatctgtgtacatgaaggtgttatttcttttgcctttaaaaaaaaattattttgaagtggaaaggactgcaattttatggactgctgtaagataacttgttttacactttgcatgtatgtgtgatggggaaataattccaatggctagctctgtgcaagctgaaggagtcaactttctacatgcgg

SEQ ID NO: 208973 - DNA, 385 bp, Homo sapiens
accttcctcaaagtagaatagcaaacttttaagttcccaaggtgtttacctacttagccacacataccatgggcccacttctcagtggctttgatatacctagcatggtctaaagaagtgtcagactaactcatcttacaaaaggaaccgcttaataataaaagagctgtgcaagtagcttgtttcatcttaattagcccaagatgatgcttctgaagtgctgtgctttcttatctatccttcctgctgcaagggaagaagactttgacatctttaacaactcagcctcaggaaccagaatcaggagtagcagatcttgcattggcattgtcaaagaagctgtaaaaatgggtgcctaaaataaatttgcctttgtattggaata

SEQ ID NO: 208974 - DNA, 352 bp, Homo sapiens
aaagaggaggaaacaggatgagacaagaggaaacagaatgagacagaaggaggcaggatgagagaggaggaaacaggatgagacaagaggaaagaggatgagacaggaggaggtaggatgagagaggaggaaacaggatgagacaagaggaaacatgaatcagggctttgatttccacctcttatcatttgcaagccgaggagccttgagccaagttatgtaaagagaaagtgaaagaggataaaaaagaataaaaaagggacctttctaggggaagggtacaagaagggacaatggcatttctagcaggtttttgttttgttttgagacagggtctcgctctgtctccagg

SEQ ID NO: 208975 - DNA, 553 bp, Homo sapiens
ggacagcttaaaggatagaaacaagatggagtaggttaggtctgatttctttcaccatcataatttcctcagttaaaattttgtaaaggtggtttcaatggagcctcactctgttgcccaggttggagcgtactggttccatctcagcttactgcaacctctacctcctgggttcaagcgattcttgtgtctcagcctcccaagtaggtaggattacaggcatctgccaccacactgggctaatttttttgtggatttttagtagagatggggtttcaccatgttggccaggctgatctcaaacttctgacctcaagtgatccacctgccttggcctcccaaaatgctgggattacaggtgtgaaccaccacgcccagccatgaatctttagattactcaagtaaatgtaaaattataagtgtggtaaatgacaggagatgtatagtagaggaatctcatctgtctagggataaagggctcccctgtggaagtgatatttaagggaagattaaaggattaagaacaattaatttgggaagggatggtgtctta

SEQ ID NO: 208976 - DNA, 108 bp, Homo sapiens
catcattgagggtaatgaaggaagagaaaggctgaaaagaaattaggactggggtagagagagaaccttgtgagtagagactgaaaatgccattacgttaatcttaaa

SEQ ID NO: 208977 - DNA, 640 bp, Homo sapiens
ctctgggtacagggtgatgaaagtgatcgcgatgacgtcatgtaactctgggattgctcagaaccactgagttgcaggcgttgggtgaatgggaggaggaccttccttctgccaaggtcacatgggggtggtggtgaccccacaccaaccctgctgaggacagctaaagcaatctggccaaaacagccacacttcttcctaaaagcctcaagagctgatgggacgaagttgcgtcccatcagcttgtttatatgggcatgtttgccacttggcttcctggccaagagactcacctcttatttgggaagcagctggatctttccaaactgactgttgcctgatgagctggcaggggagagaggcactgggaggcagtggcttagcaaagcttcctgactcctttcaccccttaactcccacctgctactttgtggcagcaaagagaggaatctgcctttcaaacaaccccacagctggggagatggaagacttaggggctatggatcagagtcctgcagtactgccatgctttgtgcagtgatctgcagagtgacatatgcaaatgttcatgtagtcaatacctggcatgccttagtgaagcatgagtttcttacgggctgactgatgggagcaagatgcg

SEQ ID NO: 208978 - DNA, 323 bp, Homo sapiens
aaaaaaaaaagaaaatatacaaaagttttcaaggaactgcacctacagtaagcaccatgtgtagattatgtcacagggaaattaccaaaccttaaggagcagatagtcttagtgctagttgagttgtagttcaacaatacccagcagaactttctgcaatggtggaaatattttgtatctgttctattcagcatgatcctcaccagccacatacagcaagtgagtaagcacttgaactggctactgtgactaaggaattgaattttaaattgtatttaattgtaacttaaaaggccttgtattagtccgttctcctgctgcta

SEQ ID NO: 208979 - DNA, 120 bp, Homo sapiens
ggcatgtgagagacagaaacagcctgtaacttctagaatttaccttgtttagggaacattcagccctccatttcatttaatgagaatctgcattcatgattcatttaattccagaaatca

SEQ ID NO: 208980 - DNA, 396 bp, Homo sapiens
atgacgttggaaagaagcaggagcccaatcgcaaagggctttgaaggacatgtcaaggaaattacccatgttatccttagtgtgatgagaggtcagtggagagtttaagtagaagaaagtactagactgattacttttgcctacctggaaaaaatactcacttgctccacctttgctcatcatctttctctccatctccccacattcacggccgacgttcatgagcgggcctgtacccaccacaccatttcctcaccaccagcctccaggcactgggtaatacgttcctccctgcctttcttcttcccttcctttcatagaaattaaacttttactctctaagatggtatatttggatttggcatatttgagtttaccaaaacaaaaaaaaaaatt

SEQ ID NO: 208981 - DNA, 252 bp, Homo sapiens
cctcaaagaaaattgaaaacaatttcactttttttttccttttatgaagcatgtgtgtgtcatttgttgtaagaaggatatggccctgacatcttcatactcgattgttctctgtgaagttattttatttattcacttattgaactcatttattgaacaccatttgtatgccaggtgctttgttccagatctgaggatatagagatggagacctggtttctgctttcacagcctggcgacataatggatagc

SEQ ID NO: 208982 - DNA, 311 bp, Homo sapiens
  misc_feature (273)..(273): n is a, c, g, or t
  misc_feature (276)..(276): n is a, c, g, or t
agtgaataagagtgtgaacaattctgtagaaaatatataaatcacctttcatattatgactcttcattcttaatgctgttaatagcgatgctattatgtgcttatatggccaatgggcttttgtcatgtgaatgcagaaaacctaggtatacaggttttgagttgactgttgagctgtgggcagtttaacaatatcttatttttgagtagttttttttttttttttttagacggagttttgctcttgttgcccaggctggagtgcaaaactcngtntaaaaaaaaagatttgcggccgcaggctgatccct

SEQ ID NO: 208983 - DNA, 504 bp, Homo sapiens
caggtcacccccaaatccaaaattagtgcaattaaacaccatcaagttactgcacttatttcttgcaatatggaaaaacttgttttccagctaaagcaaagtggataaatattccaacaagatgttcaattggtggcaagaattatgactttataagggcccatgcgtggttgaatataaacaggaagtctcctgaggcagtgagttggcatgcaagtaatcttgtcccatgagtccagacagaatgtcccgtgtgtatgcatgtggcaggagacgtacagtgtgctcagagaggaacgtgaaggcagagcagagtgtgcacacatacacacacacatacacacacacaaacacacacagaagacaggatagagattctcctcagcagttactccagggagaaatgttctagcaaagaaaagattatttttatttatgtattatttttgtttgtttttcttgcatgcacacgtgtgtgtgtgtgtgtgtgtgtgtgtgtgtgtg

SEQ ID NO: 208984 - DNA, 728 bp, Homo sapiens
aaaaaacaaagttaagtaggaaatgagtcctacaaataagaacttagcagcttttttgaaacatagaccaaacatgagtctgaaaaataagtttgatgaggtgagtgttttattgggaggaagaaagccaaattcttcttgagattccatcctttgtatagcttgagagggtcacataggctatagagtgatcaacagcataccattcttttatccaagaataagatggagtaaatgtgtttagtttgaaaaaattcactttcagcctgtctttgccctctttaatgtttttgccctctttaatgtctttgccatctttcacgggacattaaccagcaaacaccccaaatgaagtaagtccttttcatgaacttttcaccatctgagaactcacacagggaagaaacctcagaaatatgatcacgtgaggaaagacttctggcctaactcagtcttatcttgagaggattcatactggaaaagttcttacattgagtattacatctaagagcttctgaaaccatgagaatataattgctgtgggaaaggttttatgcatagctcccttattcagcatcacagaagttgtactagagattacctgagaacatagggctgggaagccttcgggtgtcccagaactcactggcaaggatccctctctgaacacagcattttgggaaccccttcagtaggagtcctcattgttttcagcatcagaggactca

SEQ ID NO: 208985 - DNA, 490 bp, Homo sapiens
gcgcccagcctaacccttctaatttttagaagttggtaattggttcagattataaaatgaaatgttttatacaaaacaccttgcagactgtgtacagtgtgagggcaggcagtttgcagctctagtcaggggcttaggctctgccactgttacatacaacacggcaataacagagtcggggaacaggagaaggaggggggtcccaggaccaagtggggcactggaaccaaagctccatcaaggttactgccaaggtctttcttggcagctgggctgtcttgtaagacttctgggtggagaaaatgagaagacaaaagaaagggaaagacagctgcccatccatggagggagaagttcaggaggcctttcagaattctatagtcttaattccaggactgaagctgcctgcctgtgggacaggagctggtgctagggagatgatgtgagagagtgatggcaggcattagtgctaactgcaaagtggctggta

SEQ ID NO: 208986 - DNA, 207 bp, Homo sapiens
agctatcgtagacactaactggaaatgtctccatcaatttatgttaagtgagagattctgccttcctttcaaccacccctatggcacggtgctcacagcagaaaggaggcaaatggagggtcttcatatctcttaagatagatctatggatcccataagaccagacacgggggtctacacaagatttgaatctctgccatccacatt

SEQ ID NO: 208987 - DNA, 701 bp, Homo sapiens
gccaagtgctgccggggagaacctgctgaaggtgctggacgtggctgtcctgcgagaaggccacgcgtgggagctgaactgagcagggggtgctgggtcaggttagtgctggccattgggtggacgcgggcccatcgtgggcttgtgagccactgtgggcttaaaaagtgcagagttggggggatccagagtgaggggctggagcacaatttcatgtgaggggtcattctgggacagtggcaccacaagcagacccgggtggccgctggtaagggcctgtgtgtgtggttgcctacgctctttccatctcttgtcggcttctcacagcctccacagaagacagggatagttacagggaggacagggaaagtccgaagtgtgcaggcgccctgcatccccgcagccaagttctgggcggacactgccctgagccaggacggtgaggtgggacgccttccccacccagctgccagatcacccctcctggagggtggggtggggccctgacaccttgttctttgtccctgccccaaactttggggcctgaatagaggaaggcagtgacattaacttcttcctggccatggatacaggtccctgaggacaccgtgtgtggggacagcaaagccttcctaatcccccagccggccaggcaccttcacacctaaatggaaacctgcatgctggtttccatgaagaaa

SEQ ID NO: 208988 - DNA, 233 bp, Homo sapiens
ctccttcctccccttcccattagcagttccctcctttcccatcctccagggtctcccaaaccagccactcccttcccatgatctatgacctcatcctttctaagccccaacttccaagcctccccaaaattgccaatagagacaaccaactcagctaagaccttgaagggccttgcccctggacaccctgttctcttggcccagctttaaaaagtgtacagtatgtcgggtgt

SEQ ID NO: 208989 - DNA, 534 bp, Homo sapiens
ttaaaaatgttcatacttcaaaggacactgtcaggaaagtgaaggataaaagataaccctcaaaatgagggaaaatatttgtaaaacatgtatcttatgaggatcagcagaatatatctagaatatataaagaactcttacaacttaataataaaaagacaactaatccagtataaaaatggtaaagaatttggataggcaagaaaatacacaaatggccagtaagaacatgaatagatgcttaacgttggccaggcatggtgtctcacgcccgaaatcccagcactttgggaggttgaggcaggaggattgtttgaggtcaggcattcaaaaccaacctgggcaacatagtgagaactctgtctctacaaaaaaattctaaaaatcaaccggacctgtagtcccagctattggggaggctgaagcaggaaggatcacttgagcctagagttcagtgctgtgatgatctaagattgtgccactgtactccagcctgggcaacagagtgagaccccaattcgtattaaaaaaaaa

SEQ ID NO: 208990 - DNA, 716 bp, Homo sapiens
gggtttgtgtcctggctctaccactttctagctgggagacctcgcacaagttcttaactcctttgtgtttcacattttcatctgaaaaattggggtaataatagctcattcagtcttcattaaaagcttaagaggtaggttttttaattattgttccaggctttgcttgagctgagagggccagcgagagtcaaggtataggagcaattgagcagagagagtgtatcagtcagtttttgctgtgtaacaaaaccatgaaatggcataagagcattcattcagatttcataggtctgtgggtcacatgtggtggttctggcttagtctttgagttgagttggccctgactggagggtcacaggctgcctgaagcatgtttttctcataatggaggtcagaagctccccgaaggacacaaagctcttatgattatggttctgaactggcatcttgacacttcttcccacattccattggctaaagcgtgtcacaacatccagtgggtgaaaaaatacactcccacttcgagagacgaggacgagggatagagacccttgtggctcccatacccagccttctgccagtccgtttgtacttgttctccagcaagaagctcaacagacatttctcaattggtcataaatctggtacctaggaatggtgctgacctcttgcaggcctccagggaggtcctgagagtcccatgagagtcgact

SEQ ID NO: 208991 - DNA, 937 bp, Homo sapiens
tctcgatggtgttctttgaagcacaaaaagttttaattttggtaaagtctgattcattttttaaattttgttgcttattttttcatgtcgtatttaagaaacaactgtctaagttcacaaagacttactcctatgtgttcttctaagaggattcagttagctcttacatttacattattttaatctataatcttggaacgaatggaatttaatgttaacactatttactttcttactccctccttctattacgcaggaaacaaatggcagtttgattctaagtgtattcactaatacaaggctggggactgccccatgagggatgagcatgagggccatgagagatactgctaggagcccactttgaaacaggagttggtgacagaagcaagccccagccactggcctcacttagagctggaggaacaagattttatccagtcctaagaggaagtatgggagaaacacaaagatgctgccaacacaccagtacaggctcaccgagaggggctatctattctataatacttaagtatatttccccaaccttcaggtggatatggttttcatatgctcctacagtaagtgactgcacattgtatgatgctatgaaattaatacctgttattttataaatgttgacactactaggtgacagcaaaatagtgactatgttattagcttgtatgcacttctgagcaattgttaaccttttaagcctttgaacctatcagaattcgcaagggcgcgaaagactggtatcattggacttaataaactaagggttccagggtgaacccagagaaatatcccagtatcctatcaccatacaaacggctttacacaccgtggttaaagcagacagggtcgcgggggccctgtaacgtgggtaggcccctggcggcaatatacacatatcgtcagcgcgcagaggagg

SEQ ID NO: 208992 - DNA, 313 bp, Homo sapiens
ccatttttatgatggaaagaacatcctaatgtttgattcatacttcaatcaatacacagtagctttgctttttcctctatgcattttcagaaggtggggggaaaaaaaccaaacaaacaacaaagaggtttagtgaaaccctgtctctactaaaaatacaaaaatcagacgggtgtggtggcaggcgcctgtagtcccagctactcgggaggctgaggtaggagaatcacttgaacccgggaggcggaggttgcagtgagccgagattatgcctctgcactccagcctggcgacagagcgagactccgtctca

SEQ ID NO: 208993 - DNA, 914 bp, Homo sapiens
tattttttagttctgtctgttgtgaggcacatcctgcatggggcacttctagtcaaataggcaatgataaggacctaattaaaatgtgataagtgtatactattactttaaaagcctttacagtcagtacttcagtttacaaggcactttcacagcatctcgtttgatcctcacagtcacaacatgtggtagacaaggcaggtgatttttatccccattttacagataaggaaacaggctgcgggtggggagtgaggggaggtaaagatagttagttgcctaaggtcacacagccagtaagtaatagagctgggactggaacccaggtttccttactctcatctattgctcctccatattcctcactcaaccatgaaaacattacttgaaaggactgatgaggttaaccagagacctaactgatattgtaactttctattttaaggaagaattgtgtctgtatttgagttctttggagcctccagtctgcctgtgtgttagaccagcacagcagtgctgtgtgatgcagcctgacctgtggcaggaaagtagtgcttctgtttggaagtcatgttcttttgcagccacacaggatccaaatatcagtactattcctgtagtcaatctggggtcacattataggtgccttatttccctaagggtaactgatctgaatatctgcaaataggatgaatctatttttcagaagttccatctttcatttttctttttttttttgagacagagtctcattctgtcgcccatgctggagtgcagtggcgcgatctcggctcgctgcaacctctgcctcccaggttgaagcaattctcatgcctcagccacccgagtagctgggattacaggcatgcgccatcatgcccagctaatttatgtatttttagtagagttggagt

SEQ ID NO: 208994 - DNA, 205 bp, Homo sapiens
ttcttattctaaatcactgggtattactccctaaggctccaagggcactcctgaaaatataaaatatagagtcaatccaatttagcttttagcaagaaattttgctgttatacatgcactcgtaatggtgggaaaatcaattatgaacatcttagcacagagcgggaaggtgggtttttaaggttgtttttgtatgctgtgatag

SEQ ID NO: 208995 - DNA, 227 bp, Homo sapiens
agggtataatcttaatttgtttctcacagaaataaacatggatatgtttttaatcaggtctctatgaaaataatttaaaaaatttaaagttattttacctgctacataataaatggattgtttattccacaggtatttagtacctcctctgctgtgcagtgagttgttttactagctgaaaatatttgaaggagataatggtatcattagataagtgatggattttg

SEQ ID NO: 208996 - DNA, 235 bp, Homo sapiens
agagcctatacttgccattctaattaaatagcaagtataataaatgataatagtagctatgacagagtgtgacagagtatatcggaggggtttctaatatagttgaggtagtctgggaaagtgacacttaagctaagcaagaggaagggagttctaacagccggcagctaagcctggaacctctgacagagatgagcgctcctccctgaaatactttctttggcttctgtaagat

SEQ ID NO: 208997 - DNA, 772 bp, Homo sapiens
taaaaccacaacagtaatgttttcttaaaacattgaattgagtcccgcttaacaactttgataatagcatgagatcagaaagtccttcctgaaaattccaagaatgaaagccgtgtgcatgagtttttgcgggagaatatttgcaacatttctgtgaagttcttgatagctagacttcctggtacaacatttaattgtagtccttagtaaacttttgtaataatttatgttgatttttcaataatactttcaagttttcaattttactaactcagtggaatactactgttggtatctattggtcacttacaaaaaaaaaaaaaacagtccgttgaatgcattttctttcttttttttcttttttttgttttgttttgttttattttttgtttttggagacggaatctcgctctgtcgcccaagctggagtgcagtggtgcaatctcggctcactgcaacctccgcctcctggattcaatcgattctcctgcctcagcctcctgtgtagctgggactacaggtgcccgccaccacgccaggctaattttttatattttagtagagacagggtttcaccgtgttgcccaggctggtctcaaactcctgaactcagacaatctgcccacctcggcctcccaaagtgctaggattacaggtgtgagccaccacacctggcctgtagaatgcatttcaatgtgcataacgctaatgaaaagacttgcagttttggttcagttaatggcccattgtgaggactctttaggtctgtata

SEQ ID NO: 208998 - DNA, 250 bp, Homo sapiens
agtgcgattttgagaagcattcaggaaacatttatttactgcgtgctttaaaggcagagtagaaagagcaagtactagcctgtgaactgagccgttgggcttagctttgaactacctcactgtgtgactgggtaagtccctttgcccatagttgtgtcctttgtgaccttctggagggagttggggtggatgatctcttagttccacatccataattctacaatattataattctgacataatggggaga

SEQ ID NO: 208999 - DNA, 461 bp, Homo sapiens
cttggcaattagaccagttgaatatgattttttttctttttccaaaataatagtcatgcaatagtttatgagtgttattatctggcatcatgctaacagttagtgcaattcttcctggaaggaagacctatagagattaaacaatgtttaggccccagtaagttaaattattccctttccgacagacaccctatatggagaaggcaaattaaaaaggaagtaaggtagctattagttgatatccaattttcttcaaatcttctaaagtgtgttttcatattttctggagatgtgtgggaaaattgagctctgactcagatccaactcaaagcctgtgcaagcatgagaggctaagtagtttcctgcgaagctctgcactaccaacctctgtttaatttgttttcttatgttatatctcagagtacaatattattatgatttggcagaaaaccttgatctgt

SEQ ID NO: 209000 - DNA, 516 bp, Homo sapiens
gtaccctaaaacttaacgtataattaaaaaaaaaaaaaagaagaaatagcatttcagttgttttccgtgttcctgggatagctgtattttacctgggagtgctcgtaaagaaattcgtatttaataatagtgtttcctttaaaaactaggtgattaatttagtgtccaacagtaaaggaataattaagtaaattatatacatccactcattgttgcatatgggaattaagagatgtttctgaagagtttaaacagaaaaatgtttatactaaacattaagtgaggaaaaacatcaaacatcatacaatgtgatccagttatgtcaaataatatacatagataacaaatcagaaagaaatacaaaaatgttgacggtattatctatgggtgatttttttttctccctccgcttgctgtatttttttttttacaatgaacataacagttttatacgtattataaaatgttattaaaatacacatgcacaaataacttattttattgcaaataatgcct

SEQ ID NO: 209001 - DNA, 546 bp, Homo sapiens
gcgcccagctgcaagttattgtttaaggtcaaatggcaagttggtgacagctggatctaaaaagcatttcttccttccacattgcatagtagaaataacttagactttggaattggttggacccgagtttgaataccagcattgccatttataaatgtgaccttgaatgagttacttattctctccgaacactagtttcttgagcaacaaaagaggaatgatattgtaaggcatttatgtagaatggatatactcattcagtcatttctcatgttcagctgatttcttgtaatgaacagaattcacggggtccgtgggtggcaaagagtatttggataaaattaagtcattaagctgggtgtggtggttcatgtctgtaatcccagtactttgggaggatgaggtgggaggatcacttgaggccaggatttctaggcagcctgggcaacatagtgagaccctctttctgcaaaatgttttaaaaaattagctgggcatggtggtatgcatttgtagttttagctactcaggggactgaggggaaaa

SEQ ID NO: 209002 - DNA, 803 bp, Homo sapiens
aattattatactgggattacaggtgtgagctagactgcctgacctaaaattttgttttttacaaagtaataaatactcaaaatttatcactccctaattatttaactacatttttactattatctgtgccattgaggttatttatgtctatttgtattaatggtaggaatgctaaaaatggcatgcaactatgcatttctttctaactctactttcggtaacttcgtgttgaaacttaaatttgataatggtgggagtatttacatgagggaaattggcaagcagcacagcttgatttattgttttgttgattatctaaatcaggattcagtaaaagagggcatgcttgctatgtgttgttataaataaagtttccctggaacacagccatgtccatttacttatgtactgtttgtgactagttttatgctaccatggcagagtagttttaacagagatgttagacccacaaagcctaaaatattcactgtttggcccattatagaaaatgtttctatacccttcatctagactttaaaaagtgatgagtaaatgttaaaaatgcaaattaaacttaaaagcatgtttttttagtagctattacattgtgattagcacacaaaactgaggaaatacttttttcaatattggaaaactgttatctgattcagtaatcacagtattgactattatgtttgaacttaagtgtgctgaaccaaaaaaaggttttaatttaatgaatataatctgtatgatggtggaagatagcttaatagtagatcacatgtcagacttaatgacaa

SEQ ID NO: 209003 - DNA, 1405 bp, Homo sapiens
gacatatctctgcatcagtcacctaggaaatgtgactccgtttttgcctgcactctgtccacaggaaacattgtgacttatcactaggcccaggtactagttgatgtgtctctggtaactgggccttgaccacagagaggattgttacctattgctgggctcagcccccatgtggtgtgactgtactgtctgtgtcctgctttcaggagaaggctgtaacatattcctggttgagtattcaggtgatgtgacactcctgtttggtccctgccttcagaaaagattgtgatgtactcctggccaaaaacccaggtgatgtgactcttatctctccctattcacaggtaagattgtaaaatgccttggtctagctcacaggtgtgatgatgttgatcctttttttttttttattttatttattttttttatttttggagatggagttgctctgtcgcccaggctggagtgcagtggtgtgatctcagctcactgcaacctccacctcctgggttctagggattctcctgcctcagcctcccaagtagctgggattacaggtgcacaccaccaatcccggctaatttttgtattttccgtagagacatggtttcagcatgttggccaggctggtctcgagctccgtacttcaagtgatctgcctgcctcagcctcgcaaagttctgggattacaggcatgagccaccgtgcccggccacaagtgtggtggtgactctcatacctcaaaccagccaataggagagatcctgtttcttatagctaggcttaaaatcatgagtatggtcatgggtcttcttgtacgaaggtcctagagaaataccactttcttttatactatataaatctcttactgtacagagattgccattccagcgttcagaacacaggtgagattgtgtttctcatatgcataccccagcaaacattaaaattgtcatcttcacacatggacagggtccactggtaagtcctgaatctcacacatggaaaaaatccacagttgaaattgtgactgtcatatatgaacatccggccagagttgaaatcatgagtcatttctaaattcagtttataggcaagtgagaatttttctatctgaacctgagagaataaaaggtggttttgaattagacaaaatagagctaaaagttcaaacaaatggtggaaggattgtaaaaatcttgcaaagaattccatgtgtggttatattgactaaattcaaaaaggtactacatggtttttctgtaaataaaaaattgaaataaaagcacaacaaggtactcgtaatgcactaatctgctttttagcaaactttgttaacggttatgacagattgttgcttctttaaaattttggagtcattgtaacaaaataaataatttaggat

SEQ ID NO: 209004 - DNA, 667 bp, Homo sapiens
atagctggcgcgtggtctagtgctggcgtgtggtcttgtgctggcttaaaatcatgagtatggtcatgggtcttcttgtacgaaggtcctagagaaataccactttcttttatactatataaatctcttactgtacagagattgccattccagcgttcagaacacaggtgagattgtgtttctcatatgcataccccagcaaacattaaaattgtcatcttcacacatggacagggtccactggtaagtcctgaatctcacacatggaaaaaatccacagttgaaattgtgactgtcatatatgaacatccggccagagttgaaatcatgagtcatttctaaattcagtttataggcaagtgagaatttttctatctgaacctgagagaataaaaggtggttttgaattagacaaaatagagctaaaagttcaaacaaatggtggaaggattgtaaaaatcttgcaaagaattccatgtgtggttatattgactaaattcaaaaaggtactacatggtttttctgtaaataaaaaattgaaataaaagcacaacaaggtactcgtaatgcactaatctgctttttagcaaactttgttaacggttatgacagattgttgcttctttaaaattttggagtcattgtaacaaaataaataatttaggat

SEQ ID NO: 209005 - DNA, 559 bp, Homo sapiens
atcaaagttagaagaccactgatcaatgtcatctccattatttcttctacagttggtgattggttgattgcagtgacctgcattgtgtcctccatgctacaggcaagcagtgctgggaaaggaagcattaggctggaggtagatttcccattaagccaatgaggcttaagtatcactgcccctcacttgctgggcattccaaagcccactacctaatcgtgtattcacaatttaatggttttttttcttaacaggggatcctaagttgtacaagcctcaggtcccatgagccctggattctccctagtgttagccccaatgcttcttaatgtgcagacaccactgcagacctgtcctaagtgacctgaaaacacagtcttagaacatatcagccatttggagtggggtgggagttgctttgcaagctcaacctaatcaaatgatggcaaaaccaatattatattattcctgcgaatgaggaacagatataaggtgtcagttattactcatttttcatctccaccaaaactttttatcagagtagcatatcttagaggct

SEQ ID NO: 209006 - DNA, 426 bp, Homo sapiens
cttttgagggtgagggggtcccttcgaccagtttgcctcatcttcaattaattctgataatgaatgtttttctgaaaaatagttcacctcatccatattttcacatttaacagcacaaaggtgcatgtgatattctctgttttcatctccaaatcttacaattgttttatttttaatgttacacatatatgttttctcttatgtccttatcataagtgccaaaaagttccaatatttaagtgacatttttcaaaggatcagctcatacttctttttataaagcacactgatttggtcttgctttgttttgtggggctgaggagttgcttggtcgttttgctcacgtgtctttagaataggctggacctaccctggaaagtctccaacgcagccaacatcagaaacaaagacacacagactccaccg

SEQ ID NO: 209007 - DNA, 176 bp, Homo sapiens
aaccagatagtgatgatgcttatacaaccttgtgaatggactaaaggccactgaattgtccactttagaaaggttaaaatggcaaattttaggttatgtgtctttcaccacaactcttaaaatctaggaacataaataaatagatggactgggaaaccacccagtagctcctcagc

SEQ ID NO: 209008 - DNA, 204 bp, Homo sapiens
cagaagaagtcaacggactgggccagatttcctccaatctacgacagaatctatgagtagcacgttactctgtgattcttaggaaacatcttctcttgtcctatagttcttaatcagcagacctgtgaccactgggagaggtctgtgattactgagcaaagttgaccacagaaagaatatccatattctcagaacctcatcatg

SEQ ID NO: 209009 - DNA, 286 bp, Homo sapiens
tatgtgtttttaatttatataaatgtgtttctgttatatatcaattacattttaggaatctttcccctatttccaactccctactgccataaaaaatacagtaataaacatcttcatcatgttgcctaatgaatctgtatggaggtttttgtaaaggaaagagatttttctgatgaaatgagattgctgagtcatacagcttacgtatgactctacactgtctaggttctctccagaatggctgtacccgtttatacttccagtatccacgtgtgaagctgcctgt

SEQ ID NO: 209010 - DNA, 365 bp, Homo sapiens
taaaaaaaccgcaattatctgcaaagcacaataaaacgaggtatacctatacatgcaacaaacacaaaaccggtaaactcaaaattcaggatgggcaaggaaatgaagtagggaaaggaacacacacaggaagcagaggtgactgaactggtcaggccaagtctcctcaagttgagtgacacaaatcagaatcactcaaaattgaaaggctaaccaaaacactgcaccgtcaatcacctacagcaccttcagtgaagtaagagcgctgcagggtgggtaggagcaattccctctgctgtgcttgaccctcatcagtaacaagcagagctaactctgacaggtggatggagtgcttctgctaccca

SEQ ID NO: 209011 - DNA, 785 bp, Homo sapiens
cccagaaaaggcctctcgtctaaaggctccatatttcagggcccaacacagtgcctggaatataaaaagtacccaacaaatatttatcatatgactgagtgaaaaaatgcagtgagtgaaagtgtcatttagcttccaccatcctctctataattctttctttcacgtcctctgggaaaagcctcaagaccacatgagactgaatttctaggctgtttttgcacttgaagtacctgccacataaactttccagacatcaaggagcaggtgatgctgtatgtttgaattctaagcattcgtttaattcataagtccccaaggagtaaagccaattgaatagtaagccatgttttcttttatcttgaaccttgaacccatgcactctggccctaaatctagagcgctttcccaggctttctcacaagctgtctccttcccactctgctgcttgtgcattttgggctcacttgatgtgattttattagttatcaatccatcttgatcatccccttttttccagtgcttgtttcccatccctccaatccgtagcagctttaaatctgttgctcccatattatatccacatatcagaaatacttttggctgcaagcaacatagttcatgattaccaatggttgaagttggggaatcagcaaacactgctcactggtcaaatcctgccctactgttgtgtattaggtgtctggaccccttaccctgttcctatgccaaaggtttgaccaggcaggttagggtgccgaacaggtgccacatttgtggccttg

SEQ ID NO: 209012 - DNA, 773 bp, Homo sapiens
agtgctatgtcctgtaatgtgatggagcgataagttatcatcaaggagaaaaaggccggggcctggagcgggacagttctaagggtgctgtttgaattggtcagggaaggtctctttagcaaatgatggtgaagcagaggagatggaacagaggcaagggaccctcattctgtcatcagagggaagagaattctaggcagaaggaacagccagtgcaaaggcccagaggcacgagcaagcttgtgttggaggaacagtgaggatggctgctgctccataaggaatctctgcggctttaatccaacttcaagtttggggtgaacttgaagtttaaagaggaaagaaagatgagaaagtaggggaagaactggtttctcctcctggctgtgccggtctggtctcccttgtgtgtggaagaggtcccaaggcagggtaaagtcgagattcagctctggcacactcttcctgtcttcatctcatgcccagtaagaagccctgattcaagccaccagcccaagcccaggcctctgtcccgacataataataattttagctaatgtttatcaagcacttactatatgccaggcactaccctaagtgctttacatactataactcattttcatctcacctgagccctatgaggaaatagtccaccattctcatccccattttacagacaaggaaactgaagcacagagaagtcaagtaactggctcaaagtcacacagctatttagtgacagagctgggcttcggacccaacacaccaag

SEQ ID NO: 209013 - DNA, 441 bp, Homo sapiens
aatgccctaaccattcatccatgttctatatagttcatgtcaacctgattcccttttattatgagatttgtcctctcagtgcctgatccctcagggaaccaattgaattcttttatttctaaataattgaggagacaatcttacattttccaatggtctattgatagccactgcttcaacttggaaacctgagcacatggcttggaagagatggtgaataccaaaatgatgtctgttttaacaattccttgcattacaatgtagcaaatagcaactatttattgctcacttgctatcagtcaggcaatgtaataaatagttctgtgatagcagtccagcgaggtaaggattattcttgttaactggatcatttgacccaacttactcttacggaaagtcaattttggtaattttgcatccagaaaaagataatacacactc

SEQ ID NO: 209014 - DNA, 503 bp, Homo sapiens
gatctggaaatcatcagtgggaagggttgcctttgcccaaggctaaagatgacatgtccctgcacactttcagccccaggttttcctaccttgtggggaggtgagaggtcagggtgagtgctgggtttgaggctcagctgtgctgtgtgaagattgagaggagcccacctgatcacatggacagaacgcacaggctcctgggtggccctgcggctccagtgacatagcacatggtcgggcatacaacagtgcccaggaaaggttagctggtggtgtttccagggtatcgtgctgagcttctgagatgagaatgtcctgtgaaagcctctgtctggaggtttcattggaagtaaagtttacatacaattaagggcctaaaattgtattttcatttaccttaacccagattcccagcaagctagagagctgccctcaccccaaagagttcctcatgccccgtcctggataggcctgtcagggccaggcagtgggcgcttgtccct

SEQ ID NO: 209015 - DNA, 372 bp, Homo sapiens
aatcaggtatagtggtgttccagctactcaggaggctgagtgaggtaggaggatcactcgagcccaggaggttgaggctacagtgagctgcgatcacatgactgaactacagcctgggtgacagagcaagaccctgtcccaaattaaaataaataaataaaaatttaaaaagagtgagtaagctccagcacctgcctgtttctgtattgctcacaagctaagaatggtttttacattttaaatagtttttaaaaaatcaaacaaataatcatattttgtgacatataacaattatatgacaatcaaattgtagtgtccacaaataaagctttattggaacacagccacacccaacctcttaggtattgccta

SEQ ID NO: 209016 - DNA, 288 bp, Homo sapiens
ttgagagaagtgttatttaataaaagattgctgaaaggacatttagttcatctcctctctgtattctgagctgtttctgtttcaagttagatctgtgaatgctactttcttaggaaatgcagtgtatgttctcaatttcatcaaggataaataatggaaaataaatcatataaaaactaattgctgtgtttgaaaaactgtcagggtgtcaggggcactgccatgatgtcattgaatttcccccagaaaagcttaccatgagaaatgtcctagaatctgtgtcagaaa

SEQ ID NO: 209017 - DNA, 201 bp, Homo sapiens
gcagtgggtggaaaatggtctgtcacctcagatcatctgttttccaaacccttactcttcccattacaagaagcaaggccaccaaagaatctataattccatatttacagacaacaccaacttcagtccatccttgcaaagttgtgttttagagtcagcttgctgaggaggaattgaccacatgattccggtctgtgcagg

SEQ ID NO: 209018 - DNA, 147 bp, Homo sapiens
tacacaaatccagggtgtccatttccagtttgaactgcctggaaaaatcaggtttgagtgattctaggatgtgattttatgcacctgcatagttcttcctcaaatataagtcatgtctatatttcaaaatacctgtgggtcttggca

SEQ ID NO: 209019 - DNA, 544 bp, Homo sapiens
ccattttaaagaatcaattgagaagcttaagtaagcattgtatttacttttttttacaaacagtttcaatatacaatgcataaaccatacaagatgctttctgataagtagaattactttgtgaaggcctcaacattttttaaaaatttttctacagagattcttttgttggattttagaaagttatgcatgtgcctctttgtaatatgtgcctctttgtaataattcttcattacactgattgattaattctacataacatggttgacagcatcagtttaacactttaactgcttaaaaaataacacatagaacattttcattatttattagtaacattcaactttgaaaactctatattcttttctccccctcaagtatagtcaaacgtttcaccatcttgtgatgtgtgaactttataaatctttatgtaatattgaatatttggctattaaagctctaaaaacttcttcacttaatttctaatattataattgaccctgcaaggacagccaatagtttgtattatttttagaattaacat

SEQ ID NO: 209020 - DNA, 449 bp, Homo sapiens
agccatttcttcttcatcccctgacacgtaaaattccactgtttcatcttcaatttctgctttgttcttagtattcacctgaagcactaatttctcaacctcaggagtaaatctgatgaatgaaattccttccatagaaatgatcttcacataacaagagatgctgctcttctgttatgaaattctttacttattaagctctggcaaatctgagtaccagtgctcttaactaattttattttcttcctcttctagtcatatcttagtttctgagtccagtcttctttgcatgaacttcatgtacagcaggttcttggagaacttggtcttgtgctcaggtgccatgctggcttcagcttgtgctgtgttctggccacctgctgtttcttagttaagagactagaatgagaaagttacatgtaaggatgtcaggggagtattattgaagg

SEQ ID NO: 209021 - DNA, 633 bp, Homo sapiens
gaaatttgccctgttcctacaacgtatgtgtggttttagatatttttaaaatcttaatttctttaactcaagaaacagctttgaaccaggtattctctgcagtgccagcaatgaagctttgttttatttttgtttttgtagaaacggggttcactatattgaccaagctggtctcaaactcctggcctcaagtaatctgcccaccttggcctcccaaagtgctgggattgcaggcgtgagccactgtgtgtgggcagcaatgaagctttaaatgttgcatttgattcaaatgtatttgtgtgatattttaacatttttattttatacttaccatccttttataaatcactcctgcgtgtttttggttgctgaaagtagggagctctacaggtttacttactagttcttatgtatattttaatttacctcattagctcacaatttctttggggaaaagtttatgcctattaatgtgtattctgaaaagttacattctctgttaaagagttacttccttgcaatattgaagatgatttattgcacctttaaatttctactctttggctccatgtacttgtctttgagaagctgagaaactgtagatttggttaagaactaaagttctctttccaa

SEQ ID NO: 209022 - DNA, 343 bp, Homo sapiens
gaaatttgccctgttcctacaacgtatgtgtggttttagatatttttaaaatcttaatttctttaactcaagaaacagctttgaaccaggtattctcgacaatgacaacgaagtagcgctctgttaaccttataggtttgcaggcgtgattcataaaaggatggtaagtattatataacaatgttcctatatcacacagatacatttgaattcaaatgcaacatgtgatgcttcattgcgcccacacacattggctacgcctgcaatcccagcactctatgggaggccaaggtgggcagatactatgaggccaggagtttgagaccagcttgtatataggaaa

SEQ ID NO: 209023 - DNA, 451 bp, Homo sapiens
tttttagctggaggtagaataatcaggaaccatgtttgcacagtgatccttaaacacaatgtggacccccccaccccaccaggcaaaggttgcattttggtgaggatgacagagcccccagcctctgctccgcctgaggtgaagtggggaatcgcttttgtcccttccctgatgaatgggtgtaaagtgttcactgaacctggaaacacctccttttgtgtccggtgctctcctaacacaggccgttaaacttggggcaatcgctcatggtgggggattgaatggggccattgtgggggggaggggtgcacactgaagccattgtgggcatagagatgccattgttttctcagtattaagaaaaggagtaggactctagggacctccaggcatcagtgtggccgaccactgcactgactgcttttctaggtttgcattatccctgaggaac

SEQ ID NO: 209024 - DNA, 668 bp, Homo sapiens
ccaaaaaagtataactgctatattaacagaaaagagaaaatggaattatattaaatgatcagttaaaaccaaagaagacaaaaaaagaaagaaaaaagaaatagcaatggcaattttatcaatggtctaaatacatgaattttttaaaaagggccaggctcagtggcttgtgcctgtaattccagcactttgggaggccaagttggggagactgcttgagcccaggagttcaagaccagcctgggcaacgtgacaaaactgcatctctataaaaagtacaaaaagccggtgtggtggtgcgtgcatgtagtcccagctactctggaggctgaggcagaggcaggaagatcacctgaccccaggaggtcgagcctgcagtgagttgtgattgtgccactgaactccagcctgggtgacagagagaccctgactctaataataataataattttgggttaaaagtaaaggaatggagaaagatgcatcatgctaacactaatcaaaagaaggctggaggctgggcatggtggcccagcactttgggaggtcgaggcgggaggatcacttaaggccaggagtttgagactagcctgggcaatataatgagacccccatcttttgaagtaagtgtttattcagatgatcaatcaagcaggaattgggtggcc

SEQ ID NO: 209025 - DNA, 612 bp, Homo sapiens
tgagaagtagcaaggccaagaacaggcatctaggttacacatctctatcttcgagtgcatttttctaaaacaaagggcttggacccacaaaccatcacctggaattgcatgtgtgactgaaagggaggaaactgcaaagaaaaagaaaatccttgggaaagacaattctgtggggagaatgtggtgggaaaatcaactgtgctccagtaccagttagtgaaaatgacagactgagctttaaatctttacctggcatttatagactcttctaactgtggcaagtttttttttttttttttttttttgagacagtctcgctctgtcgcccaggctggagtgcagtggcacaatcttggctcactgcaacctccacctcccgggttcaagcaattccctgcctcagcctcccgagtagctgggattacaggcacccaccaccatgcccagctactttttgtatttttagtagacacgggatttcactatcttgaccaggctggtcttgaactcctgacctagtgatccacctgccttggcctcccaaagtgctgggattacaggtgtgagccaccgtgcctggcctgtggcaagttttaaaactgaaatttgttc

SEQ ID NO: 209026 - DNA, 305 bp, Homo sapiens
gttaattttattaaatctcacccattgagtatgtctttttatacttcgtgtcatgtaatgggaagtaaacataaagttctgctctataccaaaatatgatggttctctcagggaaaagcactttggcaattgttcgagttctaagttgcaccagcctcccctttttcatggaatgtcattttagattgaaagaatgacagacaaactatgttttcagactgggattttgggagacattttcttgaaaattagtgaatgaggctgtctttgaaataaaataactgatagtgtttgttgccacttta

SEQ ID NO: 209027 - DNA, 794 bp, Homo sapiens
tggatatttcatttgtttgaagccctttggcaggttccatgccaaagcctatcccaagctggagaactgaaggaccctactgggttagaaaattgagtcttggaaaaactgacccagcagtctaaccatggagggatgttgcggaaacaatggaccctccactccaaaacatcatgagataacacacaacgataaacaagacacctaaatacggaaacgtgtttacaaaataacataaggagaaaagagaatgaaaacaccagatatgcactatgatctcagtggcaaggcacagagatatatatgcctgatgcacaaacatcaggactgtaatcacacatagacagttatgttagggtggtgggattatgggcactttgactttattttcaaattccgtatatgttgctattttaagaaaaattacacaattataagatgaaacactcaaataagtatatctgaaacaggtctataaatgtcagggggctggagtctgcatggctgtccgtggctttgcaccaaactgcacacgtatgcttagctgaccacagaccctcgttctcctgggcataaagtttgggggaattttcattcactcacgtctacccgccccccaggggaaatacaaacctggcatatggttgtctttcctgccaccactgttctcaagtttccccattccgtggtgacctcaacatcaccgtaaccagaaacctgatgggctgagctgggctgatggtaggggtcgggggagagccttaccttcagggccccctccccacactggcgac

SEQ ID NO: 209028 - DNA, 412 bp, Homo sapiens
tccataaaatacccaaccagcatttttccaaactgtcaaggtcatgaaggacaaggaaagtctaaaaccagtcacaggccagaggaggctgcggagccatgatgcctaaatataacgtggcatcctgaaggcatccggaaggagcagaaagggcattaagtaacaactaccaaaatcagcatcaagtgtggtcagaatcaagaatggcatttggtcaatggtaacatactgatgttgccttggttgtgacaaatgtggcaaagtaatgtaaaatgttaatggaaaaaaccaagtgaggggcatacagaaattctccgtattatctttgcaacttttctgttgagtcaatctacaattattccaaaataaaaaattttatttaaaaaataacccccttgggtacggtggctca

SEQ ID NO: 209029 - DNA, 222 bp, Homo sapiens
tatgacattgtagataatgaactagctctagccttagtttcatttaaagaaaagaaaaagacaagactctatcttcatcactggcaagaaacttggaaatcctttcccattagttgttaggttcccaggcccctactcaccatctcttccgacccagcagggtcctgcaccaccaccaacacagcacagggtttagacgaagaaactagcaggcccactccc

SEQ ID NO: 209030 - DNA, 374 bp, Homo sapiens
attttttttagagatagagtctcactgttacccacgcttgagtgcactggcatgatcatagctcactgctgccacaaactccttggtaacacaatcctagctcactgcagccacaaatcctggcctcaagcgatcctcccacctcagtcttacaagtatctgggattacagacatgtgccaccatacccagctcttatatagaatctttatatactatattatttattttagggaatattcttaagtttttaaactgcatatttgatttaacaagttttttttgtttgaaacgggagtttccctcttgttgcagtgagcggagatggcaccattgcatactccagcctgggcaacaagagcgaagctccatctc

SEQ ID NO: 209031 - DNA, 625 bp, Homo sapiens
agggctaaaaagaaatgaactgtcaagccatgaaaagacatgatgggaccttaaatgcttattagtaagtgaaagaaaccgatctgaaaaggctacacattgcaattccaactctgtaacactgtggaaaagcaaaactgaggagaccccaaaaagatcagtgactgccgaggactgggaggagcaggtggagcccaggggccttgcaggacggtgaaaccgccccgtacgatgccgaggactggaaggagcaggtggagcccagaggacttgcaggacagtgaaaccgccccgtacgatgccaaggactgggaggagcaggtggagcccagaggacttgcaggacggtgaaaccgccccgtacgatgccgaggactgggaggagcaggtggagcccagaggacttgcaggacggtgaaactgccctgtatgatgccgaggactgggaggagcaggtggagcccagaggatttgcacgacggtgaaactgccctgtacgatgctgtcatggtgggcgcatctcattctgcgtttgcttcaactcacaggatgtacgagagtgaaccgcaatgtaaactgcagaccggggtggcaacgtgtgtcagcgtaggtttattgattataa

SEQ ID NO: 209032 - DNA, 121 bp, Homo sapiens
ttagaagcaaatgtaactgtcccattaatcctctcattggccattaaatgttggaatttttccttagtatcaatagcttcaattagaagcaaatgtaactgtcccattaatcctctcattg

SEQ ID NO: 209033 - DNA, 290 bp, Homo sapiens
tttaatatattgttttggagctatgaaactggtttacagaggtagcagattggaaaaacagtataaaagtgtgcttccactgaactagaaaaataccagcctagctagggtattttaatgtgaatttatctgagacacgtcataaaagctaggctagttccaaattgcctacaaacattgaacaagtcagttatgtgacttttggcaagcaaggcttcttgtcctagagattgagttgtggctttgttttgttttgttttgtttttaatctgtcagtctgtagggaaggg

SEQ ID NO: 209034 - DNA, 141 bp, Homo sapiens
aactttctccagttctgttttcctttatgtagaagcaatataatgacttttgtccatcttctattaaatagagtcacttagacaagaaccgtctccctgaccatgaaaaatgggagggaggggattaaattctatttgtag

SEQ ID NO: 209035 - DNA, 375 bp, Homo sapiens
actttgcagtttcctttttgtatcctggagtcattctgttgttaatgttcaggtctgaaacattttcataggccctgacaagctcatagattctattctgggctttgtgcctgtaagtgcttaacaggaaagttaccctgacctagttaatcaaacaacaggcatttactgagcacctaatatctataaagtgctgtgctggagtcttcatcagattcattcattaggcagccatctaccatgtccaggcactgagtgtggtacatggctgctgggaatgaagataaagtcccctcaattcctgcctttgaggggtctgccttagccaaccaagggatggcccgaagtagagcaaattcaagaaactgtggagtt

SEQ ID NO: 209036 - DNA, 375 bp, Homo sapiens
agcttatggagtattttgcaggagcagcattcaacactgcatagattagttgtaagtgtctcaattacatttacatatcagtgtgtttggtggggaaagaagatgaaaaataaaacatttgaatataaaattaaaataaataaaatatgacatttatttatgatagatgtcataatttgatcatattcataggaaaaacattaatgaaaaatttaaatgcagaaaaatatatacacacattatacaaattaacaataacattactaccacagttacttattgaagtaatatgctgtctttaatatgtttcattataccatgttctctcagagttaacactctcatcctataaataaaagatatattctcaaattc

SEQ ID NO: 209037 - DNA, 183 bp, Homo sapiens
aatgatggaacaagcttgatttccagatgtgttgtacattttccctctagtgggaatgactggtatattttctcactcgttttcattgccctgtgcatattataaaatacttttataatcttctcacgctaatacttttattcttaggcaaaacacctatcttctaaagtgttcagacattta

SEQ ID NO: 209038 - DNA, 667 bp, Homo sapiens
ctttcaagataagtggacacaataccactgaatctgtaaacttctgatttgtatgtcattcttctctgtgagccagcgttgtcactggtttaaaaaaaataaaagctttggctgggtgcagtggctcacacctgtaatcccagcaccttgggagaccaaggcaggcggatcacctgaggtcaggagttcaagaccagcctggccaacatggcaaaacctcatctctactaaaaaatacaaaaactatctgggtgtggtggcaggtgcctgtaatcccagccttgggaggctgaggcgggagaattgcttgaacctgggaggtggaggttttgcagtgagccgagattgagccgctgcactccagcctgggcaacagagtgagactccatctcgaaaaaaaataaataaaataaaagcctcagcatgttgtcctctggcctgcgaacttgctgaagtattattccttgttgtatcccccaggctatgttgctgtctagcctgtgaataaggcaaattccatattatggaggtagtgggctgtgtgaaaagagcacagattttttatatgatgagttacacgacttaaggctaagtacctaatttgtaagtcctcatctgtaaaataagaataatatctagttcaaagagatgcgagaattataaattc

SEQ ID NO: 209039 - DNA, 488 bp, Homo sapiens
aaccttgactctcttctcatctctgtcatcgttcattctctaggtgactgttttagtcacatggccttgttaggagtcagaagcagatacccccaaatgtggtgcttttaaacgctgaactgaagaagcctcgaggtctctctggcatctccctactcctgacatctctcctcaaacctttatctgcctaagatctagacatgccaaaaggaacaattgtttcttcttcccctctctgtaagtccaagagtgtaatcacacctgaacagaaccttttccaaggaaatgtacaagttcatctctgttccctgagccactcattctccctagtaatcccctcaacagaatcgctcttccctcccctcccataacctgctccaccaggaaggtgtgtaagcttctgaatgctcttgaggggtgggcagtctctcggtggttctccccatgtatatacattaaataaatttgtttgccttttctccaattaa

SEQ ID NO: 209040 - DNA, 668 bp, Homo sapiens
aagttagaccttcaactttatctgagttttggtgacaaattaagaagagctcttattgtgcagtttctgaggttcttcaaaagagtgactttctctgtttccccagaaagactacaatgtgtggtgtgtgtgtgtgtaggtgcatgtgcacatatgtgggtgggtgtgaatgtgcctatatgtgtgtgtggatggagtacgtatacatgctgtgagtgtgtgtgtggatgcggattgtgagtgtgggtgggagattgtatgtgagtgcatgtgagtgtgtgtgtggatggagtagatatacatgcatgtgagtgtgtgtgtggatgtggatgtgtgtgggtgggagtttgtgtgtgagtgcatgtgagtgagtgtgtgtggtgagtgtatggaatgggttagctcatgcacagagcatttcttagcctacttaacagcttaggagccacctcttccaggaagccttccttaacctgtctttcgtcctgcccctcgggacccaggtgacactgggcatgcagttgctctattgctgcaggtttgcccccgactcatctcatctccaaacacagacacatgcaagaatgtgaccctcccttcccaatacaacactaggacattttattctctttgtattcctgatatctggcacacggtaggtcatcaat

SEQ ID NO: 209041 - DNA, 672 bp, Homo sapiens
ggtcatttcaagctcttctgtgtcgagctaaggagctgctctgtgcccggcttacagaactggaaggggtagccaccttccgcctgatggaggctggagaacggatggaacctggatccctggagcctgggacactacctcgctgcggttggtggtggccacagaccagtaggagggcggctggcagcgggagcttcttctgccgggctggaggattaggagaaggaagagggaacgccacatgctggaggctggagcctgtgccaccgtggctcacctcgctgtggttggtggcagctcgccttgctgtggttggtggtgacgtcggagactgcagctcggccacagtggtagaaatgtgttgggcttttgctgtgttgggcacttgctcccatctgctttcttctctagaatccactgccctagaatgagtaatttttcttagaagcagagttggaaccactgaggaagcacaggtgagccctccccagcacacactcgctagtccccaacagaagaactgttgctgcatccattgagatggactgagagcttgggatggaaatcccagtacacgatctacccctaccaacccctggctgccctgcctctccctggaagcatgctgttctggtctctcctgagacttcccatcgcagaagtctccactgg

SEQ ID NO: 209042 - DNA, 359 bp, Homo sapiens
atgcaatgtcacgtggaaaactgactctcaaatagttcaagaaggaagttctttggactatacttgcaacttttctgtaggcttaatactgtttcacaattttaaaatgtaaaataatagtaccaggtagtagttttttattaagacagattgtgctttttgaaagcattggtggaaagatttctcaaaatcatgcgcgaaagagtttataatgaaattgtgtaatatttgtttcaaaagaaagtgtgggccctgagaagcattttctgtagtttacacagtatttctgccaatttgggatactttcagtgtccctggaattctcatcatctgaatttcttactctttttccctttaaa

SEQ ID NO: 209043 - DNA, 799 bp, Homo sapiens
ctgcatctcccaaaactgtccaccgtagtccatggcatgcaatagcaaaagttacttaaactagcatcttgtgaataactgggatgaaatgccttcaaaagcaagtctttggaagaccaaatggctgctgaaatgctctactaaggcgagaattgtgaccaaggattttaagatggattagttgcttctgacggtgctgaagttcttattaaaagcttccattgtagctttaaaatatatatgtatttataactagtatacaaaactatatttatatattaatgttaattatattaatatataacctattatagctatgggactaagataattgaaagtcagacccaaattttaatcctgtgggtgcagaattacaatgttcgtagaaatcacaggtgccccaggtttcttacaggaaagtcagagcgttaaatgggaagaaatgggatcctgaaatatggaatggaaacatttggttcaccttggagaaatatgagaatctggaatgcctaaatcctcctgcactccagaaaaaataaaaaaagaagtttaagggcctgttttctatctaacttattggagaagaatgggaatgtgatcttttttaaaaaatccatctctgcctatgggcggtgctgaaacggtgcctgtgggagacaacacaaacctcgaggccagggctaaggcagcatccccagacatgggacccacgcgaacagcagcaataagccccaggaacaaatgggccgggcccacaagggtagccgccgggcaacggcgggaacaagaccctccccgg

SEQ ID NO: 209044 - DNA, 349 bp, Homo sapiens
gcggttcctcaaaaaactttacatgacaagtttcacttattctcaccttcaatcaaaagttaaaattcaaaaaaagaaacaaaaaattgtggctctcggccaggtgcagtggctcccatctataatcccagcactataggaggccaaggcccgcagatcacctgaggtcgggagttcaagaccagcctgaccaacatggagaaacgccatgtctactaaaaatacaaaaattagccaggcgtggtggcacatgcctgtaatcccagctactcgggaggctgaggcaggagaatagcttgaacccggaaggcagaggttgtggtaagctgagatcggaccattgcactcc

SEQ ID NO: 209045 - DNA, 273 bp, Homo sapiens
cacaggtgggagagacttgccttgtctcaggttgagactctggactttggacttttgaattaactcattccagcattaattcaccaacgctgctcacacttgtttcaggcagtatagcatatcacttaacaacacaggctgtggagccaaatgttgggtttgattcctggttctaccacttatgaggttccagtaagtcttaatttcctcaactgtataatacagataataatatctattacataatgtcctaactcacattgcaagaactta

SEQ ID NO: 209046 - DNA, 483 bp, Homo sapiens
gagatggaatcttactctgtcaccgaggctagagtgcagtggcacaatctgggctcactgcaacctctgcctccctggttcaagtgattctcctgcctcagcctcccgagaagctgggattacaggtgctcgccaccatgtccacctaatttttgtatttttagtagggacagggtttctccacgttggccaggctgatcacgaactctcctcaagcgatccgcccagctcggcctcctcccaaagtgctgggattacaggcatgagccaccatacccagcctgcatcctaatttatgattcctattttgtgcctggtgaacagtccccatatttaacaataatacctacacataaaacaatccactgttacaatttatatagtcacaaagcattaagtatcttctgtagaccatagtttttaaccataattttctgcatcaaatccacagccagaatccccaagatcaaaaaaatttgcaca

SEQ ID NO: 209047 - DNA, 378 bp, Homo sapiens
ccagccaaagatcaggaccactggagccactaggtctcctggcaggtgactaggctcttgtcacataggagggagggaccgtgactcctggcatgagtgaatcttcagcctctaaagccaagaactctgtcagacctcaggttgtggggagtcttccgtggaagctggagcacacggcagcttcctttgggctctggactagatcaggagaacgtgggctttgccttttaactccccatctgcctgctttacagcacacttagatcttaacatggatcaccgatgcttagaagcttcttccagggctttaaaaatctggctattgccaaatgagttgcaaaattttcacaaaacgcattaaaaaaaccccaaacctca

SEQ ID NO: 209048 - DNA, 337 bp, Homo sapiens
gtttgtagtttaagctctttcttgattcttatatgaaataaaatggaagaactagagcaggcttattcagagaatcaactgtcttcacttgtgatcacttgcataatggcaaaagtacttgatttgttatacaaatttactttgaaatttcttagcagcgaagacagagtcttaagttttcttgatgtctaaacctgataaatttggaaactcttagtcttaatcattttatctgttgtaatacaataaagtttacattttgcaactcattgaatagaaaaagttaggctttgttactacattttaaaaatgagcatgttaaagactttacttacca

SEQ ID NO: 209049 - DNA, 514 bp, Homo sapiens
cgtatgaatataccacaatttatgtatctgttcacctgatgatggacatttgagttgtttccagtttggggctattataaataacactactatgaatactcttgtgcatatctttggcagagatatacactcatttttaatacccaagagtggaattgatgagtcagagggtataagtgtcctctcctagcacttccctacacatgctgtgttcctactttaagtatcataaaaacaagtttccattgactttcttgctttattcagtcctacccgctctgctacagaaacgaagtttgagagctaggaaattgacacattcaaggttatagactgggacttccctgatttcccatcattttccccaaataattgctagtgactcagtaacaacatccactctttaagtaacttaggttaattgttaatgagtacagctagattcaaaacagttcagatttttgaagcacttaacctttttcttgcctattttaccttgcatcgtttcaaacac

SEQ ID NO: 209050 - DNA, 610 bp, Homo sapiens
agaaactatacagcctctggaggctgtggacagcatctacaatcaatggttggcctccagctgatagccagcaaaaagctaggaccctcagtcatacgaccaccaggatataaattctgccagcaatctatataagcctggaagcagattcttccccaattaaacctctagatgagaatgcagccaagacaacagcttgaccacagccttgtaagaccctgagcaaaggacccagtaagtaatgctgtatctgaactcctgagccacagctaagtttatggtaatttgttacacagcaacagaaaatgaatatatccagtgtgaagtattcatctggatccattgaaggggataaacatacctagagaagccaagccttatgatcacccacagtctctcttgactctatacaatggggagtcagtctcaatagggtcgggggttcatgagttaattagactttggctagagcaaatggcacattagaagataagagtaaaaagacagtctggagaaaataaactggtactctgtactttctgctcaattgttctgaaagcctaaaaaaatggtctacgaaaaaaattaaaataaaaacagttggcggccg

SEQ ID NO: 209051 - DNA, 389 bp, Homo sapiens
cagtgaggagatagtgcagggagaggcgcgggacagtatctgtgggccatcgtgtgccaaggagggcctgaaacaccggcatgagcacccaactgtgcagaggagatacagcgagacagcaggagggggctgggggtaggctgagcttcctgtgttcacagggagggcccatgcaccccaaatcagcctttcaaccaggctgtaacgtgcacagtggaatatgaaagctgacaaccgagccggtggtcttgcagtggctcgggggagggaagcacgcactggcccaggtccccgtgggggctgggggactgtgggccggaagcgcaggcactgcactcccaccagcagaagggttctcacagaggtgggtcggccattctgaaactaca

SEQ ID NO: 209052 - DNA, 202 bp, Homo sapiens
gcggcccagccttaagatcacttacatgccacaggctacactgggatgtttaaggtctttcatttgaaatgataaaattccatcctgagatgggacaccggggaccatatatttcatcctccttcattttatttttttattattaattgataaaaatattacaggaaatgtggaaaataggattttttaaaacccacctata

SEQ ID NO: 209053 - DNA, 828 bp, Homo sapiens
gtgagctatgatcacaccactgcactctggcctgggtgacagagcaagaccctgtctctgaaacacaaaaagaaagaaatggtagcaaaacaaagtattgaactatgaaaaatagaaaacctgagcagaccaataacaagtaacaagattgaatcagtactaaaagtctcccagcaaagaaaagctcaggacttgatggattcactgctgaattctaccaaacatttaaagaaaaactaataccaattcttatcaaactattcaaaaaaattgaagtagagggagttgatccaaattcattctaaaaggctaacattaccctgataccaaaaccaaagacacaacaaaaagcaaaaaggccagtgtcacaaattaacatacatgcaaaaatcttttaacaaaatactagcaaactaaattcaacagcacatctaaaagttcattcgtagtgatcaagtgggattcatccttgagatgcaagaatggttccacatatacaattcaataaatttgacacataacattaacagaatgaaggccaaaaaccatctgatcatctcaatagatgaagaaaaatcatttgacaaaattcaatgtttctttattataaaaaccctaaacaaatcaggtataaaaagaatgtatctcaacacaataaggaccagaaatgacatacccacagctaacatcgtactgaatggggaaaaattgaaacctttctctctaaaaatctggaacaaggcaaggatgcccactttcaccacttctatttgacatggtactgaaatcctagccagagcaattagagaagagaaagaaatacagggc

SEQ ID NO: 209054 - DNA, 235 bp, Homo sapiens
gagccagaagtaaaaagagaagacgcggaggagaccaggcaggggagctccaaaaaccaagaggtagagcccaaactgcagccgaggatcttgtgaactccaccccaatctgagttccctgagttactcctcatagtcagagtttactcaaaggcagatatggctgtactcacttccactatggtcccaagggaatggttgttcttaccagctagaagaaacttgtattagtttg

SEQ ID NO: 209055 - DNA, 336 bp, Homo sapiens
tttttttgtatttttagtagagagggagtttcaccatgttggccaggctggtctcgaactccttacctcaggtgatccacctcggcctcccaaagtgctgggattacaggtgtgagccaccatgcctggctggaattctgtgtcattctggatacttatcatgacttcaagcatccaggactctgtcctgggtatcctgagcctgagggtgtatgtgtgtccagctggcttggaggttgtctacaggcaggttgaacttggcctctgagtccatggcagcctcacatgggaaataccaccaaggagcctcatcctgtgcttttaggagatagtttc

SEQ ID NO: 209056 - DNA, 398 bp, Homo sapiens
agtgaaagctgagagtggaggagaggaggtcaaagaacaagaaggccagggtatcagaagggttatctatgtggatattgaattcgtgctcagaacctgaagaccttttctgttattttctaatgtcctttgttgctgttggactatctgataaggtttaggtttatttcttcgtcagagttttatatctgttctttcatgctttctgtttcttaatccatagtgctctttaaaatttctttggtattatctttcattccttctattgcatttctaattttaggaattatatttctattttctgagagttctttcttctgactaattttttatggcattattttctagaaaaaaattctaggttttgataattgcttgctttgttataataatataat

SEQ ID NO: 209057 - DNA, 364 bp, Homo sapiens
aaaaacagtacatggactcatttccatcagctagagatgagtctatttgcccatgctaatatttcagttctcaacttaatagcttaagatgttcccattatcaacatcacttacctacccacagcacttttaaattagccttgggaaaaatgagtaaacagaagcacagtttatcattctgccaagtgcagctacccctgaagaaggcagctttggatagcaaaacagacaactagattgaaaaacagaagtgtcagccttgacacatgctactaatttgctgcttcgtaagggtcatttgctgtgttgcccaagagtgagggagaaaacagttcaaaggtcaaggacaaatggcatttagatg

SEQ ID NO: 209058 - DNA, 566 bp, Homo sapiens
ttcatccaaaaaaatgaacaaatcaaataactttgaaaataaatgctttcactatttattactaacaaaattgaacagtataatccagaaaaattgagcaaaaataatttataaatctcaagattaaaaccaaatatggctttatgattgtattagtccattttcacactgctataaagatactacccaagactgggtaatttacaaacaaagaaggtttaattgactcacaattctgcagggctggggaggcctcaggaaacttacaatcatggtggaatggaaagcaggcaccgtctttacaaggtgtcaggagagagggagagcaggggaaaccaccacttataaaaccataagatctcgtgggaacacactcactctcatgagaatagcatggagaaagccgcccccatgatccaatcacctcccatcaggtccctccgttgacatgtgggcattatgattctgattacaattggagatgagatttgggtggggacacagccaaaccatattggtcaattaagcgataaatactataaaaattataaatagtggtcaaactg

SEQ ID NO: 209059 - DNA, 444 bp, Homo sapiens
tgagtacattctgattcaactctcctggtgtttcctttcatatacaaaggtagcactggttgtgtattatttaacttcgtctttttctatgaagtcttcgaagaactcatcctcagaattaaaacagcaagcagcaaaaaggaaactttagttacagccgaaacccactttgacttgagaataaaattaggatacttctgtaaaggacttggatttctgttcttattaggtcacagcaaaaatggtattttaaaaggctactaggagtagatgaatgatctcaatgagaaggaaaagctgacagtatatcagagagaactagaatatagcaggtttgccatttggcatggagagaaatcgagaatgtggacttgagccttgttgacttgagccatggctcttccacctaagtgactttaggtacattgttttctatatctgagt

SEQ ID NO: 209060 - DNA, 609 bp, Homo sapiens
gttgggcttgtcagagaatggcttggaccaatccagcttgaggagtagttgggtttgtcaggacttatattcagcgcactcctggacggcggcaggacagctctagagaaccgccccaccacctgtctctaaggtgcattgaagctcgttttctggctctttgcctgctgtgtttgagtgatgagactcttttccttggtgagttctcagatcctctctgggatatttgggttctgaggaacacctgctgggagacccatcccactacaagtgacacctacaaataaaaattagatgagaaactgatctgtacagtagcttgtgggttttttcctttttcctaaagctttttggtggcatgagcgacttagcattcctgagctactataacctggtaccagataggttaaatttaaatcaaagtgctgggattataggcgtgagccactacgcctggccttcctgaggaatgatattatgagaaaaacttgggactgtaatgtccccccacaaactaagaaggtgctgagagaccagaggatggctcagactagggaccaacccagtttgaggagtagttgggtttgtcagaagatggcttggaacaga

SEQ ID NO: 209061 - DNA, 396 bp, Homo sapiens
cccgttgagaaaaactgaataatgataaactcataatataatggcagcagaaaagaaaggctaggtttagtaactttttcaattaacttacaactgtaaaccagtggacacacctagcttcttcactattagaagccctaataaatctggctacagtttctaaatccaagccttcaagacaatcaaggatttctaaaacttcctatctataataggaaactgacagacaacccaatttcttcctctattttctcctgtggacatgattcaatctctcctaataattaacaacagaaactgcatcatttggtcctccaaaaaccccccactgccacttatccaaggcacaagagcaggcagcagtgttccggaagcagctggcgtcaccacaccaga

SEQ ID NO: 209062 - DNA, 411 bp, Homo sapiens
aaaagtttcagggaaaatgtgaaattttaaaaactattttgtcagtgatttgaggggtagaggaaatgtagcttgcaccaggactacagcaatgctttagagaaagttaataatgctctgagcaaaaagtgaaggcttagcctgcttcatgaagaaagtgacactaactggagccctatgaacggtcaagaggctttaacctatcctattccatctatgtttattaaaatccaacattttgtaaatgtagtagttataaacaaaatgcatggcaatttgattttcagggttctccacagatatatgtcaaattgacaattggaggattgtatcttactaaatctaaatcaccctcttacattgcaaagccaaaccaatctttctttggctcttgttccttttacacttaaa

SEQ ID NO: 209063 - DNA, 727 bp, Homo sapiens
gagcaggagggatgggaacagtgggtgtgtgtaatattacaccctacttgactagagctcctatttaaaccctggaaaagtagcctctgccaaatagacttccactttccctaccttttattttgagtgcctttaatatagtgctataggaagagaatatatatgtgtgcgtatacatatgcacacacacacacacacacacacacacacatacattccatatgttatatgtatggtgtttatatgaatgtacatacataatgtatgtgtataaatcctatagctttggaatatcagattgtaagaattctagactcttgcaattctagggctttacaatcttggaatcctagatttcaagattctgttggtatttgatgaagtaacggtgcctggggtgtggccctgcgttcagagccttttcctacagatgagagaattggggatcaggaaaggtcaaggtcacacagagagtatgtaacagagacagaacttgaaccctcatctcccaactccacatctggagctctgagtcagtggttcttaaccctgtatacacatgcacattagaatcgtttggaggggaaaaataatgcccaagcacagcccagagatgatcatttaattgatcagggctgggaaccaagcagcaatagttttaaaactcccaggtgtttgtaatgtgcatccagaattaagaacctctctacccagtgctgataatctg

SEQ ID NO: 209064 - DNA, 383 bp, Homo sapiens
ttgaatttcaacctttttttcccacacgagacagctagaaacagtaaagggaaataacttttggctctcccttcccccaccctgtggtaaaaagaatgaactgaccactgagatagcccgcagttagtggacagaaacccaggtagttcacaccgtgacctgagaaatggagagacgacagttactcaactacacacatacgacacctaaggaaatattgaagatttggtggtggttgtagatgacgggcccgtggttttttgttgttgttgttgttttgtctgtgccttgtagataatcatttttacctcagtcgtttgattttgaaaactccgaagggttcattatacagctgtaagtgacatttacttctacatggtttt

SEQ ID NO: 209065 - DNA, 1101 bp, Homo sapiens
ttgactgctcttccttttacctctctcctgttggctgttaggatgctctgctgtcccggatcactacctcttctgatgcttccagtttttaaactgctttcactttttcttccccttttgtaactgtggatgtcccacaaggccaagtccttggtgctctggttttaccctctatttcagctaattttgcttattctcatctttggtcattgctaagtccctatctgttcaccagggcttccccctcccctgagttctaagctacagatctgcttgtgacacgttccacttgatgccctgctgttccatcaaatttcctcccctttaatcctcccaaatgccattacagatatcattattcttagatggagtcttgctccgttgcccaggctggagtatagtggtgtgatctcggctcactgcaaccttcacctcctgtgttcaagtgattctcctgcttcagcctcctgagtagctgggattacaggcatgcaccaccacaccagagtaatttttgtattttttgtggagatggggtttcaccatgttggccaggctggtctcaaactcctgaccttcaagtgatcctcccacctcagcctcccaaagtgctgtgattacagaagtgagccaccatgcccagcctgttatagatatcatctttcccttagtttctaaggctcagaatcatacccttccttgattcctcatattttctccagagtcagttaattatacatcctatccatcctctttcctgtcatttcctctttttgccattgcacggctcacacacctgctatggtcccttgttatttcttcttttggaccattttggtattcttccagagaagcaggacagttaaatgtggcaatatttggactcatttgtgttcaaaatttgtgatatggattcttcccacatcccctgccccaataacaaaacttaccttataaatattcacagctttctttgctgccctctctctgacaccaaggaggaagaattctctgatgaatgagcaaagtttaaagactttgtgtttatgtgttctgggtaatggatttactttagaagagcaagaaactgttcaaaagaaa

SEQ ID NO: 209066 - DNA, 821 bp, Homo sapiens
ttgactgctcttccttttacctctctcctgttggctgttaggatgctctgctgtcccggatcactacctcttctgatgcttccagtttttaaactgctttcactttttcttccccttttgtaactgtggatgtcccacaaggccaagtccttggtgctctggttttaccctctatttcagctaattttgcttattctcatctttggtcattgctaagtccctatctgttcaccagggcttccccctcccctgagttctaagctacagatctgcttgtgacacgttccacttgatgccctgctgttccatcaaatttcctcccctttaatcctcccaaatgccattacagatatcattattcttagatggagtcttgctccgttgcccaggctggagtatagtggtgtgatctcggctcactgcaaccttcacctcctgtgttcaagtgattctcctgcttcagcctcctgagtagctgggattacaggcatgcaccaccacaccagagtaatttttgtattttttgtggagatggggtttcaccatgttggccaggctggtctcaaactcctgaccttcaagtgatcctcccacctcagcctcccaaagtgctgtgattacagaagtgagccaccatgcccagcctgttatagatatcatctttcccttagtttctaaggctcagaatcatacccttccttgattcctcatattttctccagagtcagttaattatacatcctatccatcctctttcctgtcatttcctctttttgccattgctggctgatgagttcgtggatcctcaagagtcagctctc

SEQ ID NO: 209067 - DNA, 934 bp, Homo sapiens
  misc_feature (31)..(31): n is a, c, g, or t
  misc_feature (83)..(83): n is a, c, g, or t
gactggaaagatctcctcttctccaagaaantcaaccactagtgacaatgaccagcctcctgactactccttctccaagaganagaactgatgaccaccccaattttacagcccactgaggccctgtccccagaagatggagccagcacagcactcattgcagttgttatcaccgttgtcttcctcaccctgctctcggtcgtgatcttgatcttcttttacctgtacaagaacaaaggcagctacgtcacctatgaacctacagaaggtgagcccagtgccatcgtccagatggagagtgacttggccaagggcagcgagaaagaggaatatttcatctaatgactcccaggccccaaggagcttattcctggctccatcgctaacacgttgactgcttattatgggaaagttttctctgaagccagggagaagcattgattgatgtgggcaaatccaagctccagccaggtcgcagtcccaaatgccgacatcactgactccagggaccagggacatggagaaagctgtttatgatatctttaaccaggccctcttactagagctggtgtttgtgactggccaacaagatgtggctatgccaggggacatctgagtatgtgcccagtcatcttttttcacaggttgaagggagagaaaagattttgagttaaggtcattggctgctctactctgtcccctacctggtcacctagtgatagccccagtggagatactgtccatacaaggtcttcccagaggctggataccacagtaaaaggccaggccaggaggggtaggagactatggagatcttacctcctgataaatgtgctacaccccctaatctgagcccttcctttccgtgttccccaacaacctcatgcttacgtgatttttattcaaattaaaaattttcattgctacagaaatc

SEQ ID NO: 209068 - DNA, 280 bp, Homo sapiens
catggctctcagtcaagtcttgacgctcctgcttctacagacaggatcttcttcgatgctcccgcaccggacatgcaaccttctggttttagtcctagaggattagagtagaaatcaagagagctgccgttcctcctcccttcaagaataatgatggtgggcatctggggggcaaggggctccccacaagcattctgatcaaaatcctctttgattatggggaaaagtgatgaatttgtgtaaaaaaattggagagaataaataagaaaatacagttaca

SEQ ID NO: 209069 - DNA, 149 bp, Homo sapiens
agtctgagggagctctggggtcctatttcctcttttggatgaggctgtgagcatggtggattagagacagccccttaaagtgagcccagatatctcagcaagttttacgcgtctctatttgggggagggattcgcctattgaaaacaag

SEQ ID NO: 209070 - DNA, 382 bp, Homo sapiens
tatatgtggcctaagacaattattcttccactgtggcccagggaagccaaaagattggataccctgatataaaactttttgtcctgttacattaaaattcattggcttttcactttgaatggatcttctgttcatgagtaatttcttactatttcttgctaagcaaccaacattggttgcttagaaaatactgattcagtgtcttaggatgatatttcaaatattgatatagtagcaactaatcacatttaattaatatcaccatgaatcttatcagaaactctcagaatattggagatgcttgtcaaggtttttttcacttgactgttgtctttgataacagatactattagatgtttgaagtgatgagtgcactttgttc

SEQ ID NO: 209071 - DNA, 172 bp, Homo sapiens
tctgctcaaaggacttcctttaatgtttcttgaggttcatatctgaattcttttagcttttgtatgtctgcagaagtctttatttcacctttgattttgaaagatattttcacagggtaaagaattctagattggcagtttttttctttcactgatttaaagatgttcctct

SEQ ID NO: 209072 - DNA, 287 bp, Homo sapiens
ggcagtgtgggggaatcagttgcataatacctcacctctgctttctggggtgcaaagtcttgggtaagaaacatgcttataaaatttatcatagtaacctctaggacagcctggcttacccatgatctcattgggtcccatggagacaggtgggattggtagggactcgtcccattttacaggtgaagaaactgaatctcagtgaagtcttgtccaaagccacacagtttgtaagcagtaaagcctgaaaccaaaccagatcttccgactacttctcatgtgtccaa

SEQ ID NO: 209073 - DNA, 143 bp, Homo sapiens
tcctggctcagagagagcacatgtactctctcctctccaaaagaacctggatgcccgtcccacatgttactttctccattctaagcagtgtggttccaagtccaatttagcatgaatatttcaaatgtaatatgtcccagatg

SEQ ID NO: 209074 - DNA, 573 bp, Homo sapiens
acacgcaatataaaaagcctatctctattaaaaggttaaaaaaggttacgcaattggtaacacatccattccttttctcactctgcagtcccatccatttctcattctacagtcccctcaccgctcctaaggaaccatcagtgttgagatccaacaattactttccatattttattttaaactacgcagaagccagtgtcttgtacagtgaatgccaactacggtgctgcaagagcctagaatagaggcaaacgtgaatttcaaccttgatttttctaaaacgtgccaatacaacatacttttctaaagtataaagaatggctaaaggaagacgcaaattctgagaagctactagctaaatttcaaacttttcgatttgaacacatcttttaaggaaacagggctatatattttaccatacaggttcttttgaggaatctattacccaatagaaatgttatccgatcttagctttgagagccactgctatagtaagtaaagcagccagggtgttatttgtattttcctccatttccagtactcagaacagtggccaggtggtagttcaaatca

SEQ ID NO: 209075 - DNA, 550 bp, Homo sapiens
atcttgatgtatgggtatctcagagaggtgctcacccttcccagatatagttgtttactaatatgggaaatgagaacttcatacaagaatgaaataaagtaattacaaaaccaactgtcagtgtcagatgtgttgcaaatgagtgacaaggaatagcggtgctgttctacaactccactccgaacagcattcttatggctcagaacagggagactacctcgtgagatagtggtttggtctattactagactcttccttgggtgctgtaaccgtggtctttattaactgacggccatcttgggccattggattgatatcccacattgaatgtaggacatcttgcctgtcattgacagaataatggataagggtcagacttttcccccagcatgttctatcccatgatcctgtgttattttcttcctaacccttatcactaaataaaattctcatgtacatttatttaatttacgtatacgttgacttgactcttacatccccaagctagaaccgtggagcagtccctggcattcactagggtctcaggtag

SEQ ID NO: 209076 - DNA, 536 bp, Homo sapiens
cacaactccaaatataaatgggaaatcttaaaatcttggggatttcctagaaagaaaaagaaacagaactttcacctgacatgaacaacattggatcctggacaacaatgaataacataacatcttcatagttagcaaggaagaaaagcttggtacaatctaaaccctgccgaagtaccagttatttgtaaaggcaatcgtagggcattttcagacatacaagaacttggaacatttactgttcatattccttggatgacaaaattattcaaacatattttccagcaaaaattaaaggagggtccaagaaaaaggacaacatgggatacaagaaattgaaaccccaaagaagtgaaagaagccagcaagagattaagaggattcatcattttcagatgcccaaaaggatttccttggaccaacatttcaaatggcatgaggatttacatttattaatattccctggctccagtcatattaattggttctttttttaatgggggttttccagtaaaaaaaaacaaaaaacaaacaaa

SEQ ID NO: 209077 - DNA, 689 bp, Homo sapiens
tgtgaccgcacacctacacacacacacattccaaactgtcaagtgtcacctttcttgggaatttttaaaataattttctttttacctagcagaatcaaacattttttaaagttcctggtggtatgaagaacacaataaaaagtggcactttgatacagttaatagtggaaatacaaattagcaaagcctttctagaaggcaatcagtaatatttatgaagaacctcaaaaatatttattttccttaactaagaaatgaccagaaatttatccgaagagaaataatcaaggattatgtataaatgttttcataaggaaaatccacagaagcactaattataatttaagtggtttacaactataatttgaaaacccagaagtcaagatgtggggaatatgatagtagcagcaaacaaggggttagggtagaattcaagataggttgtcagtaaggaaaatattctcacttgtgtctaccttgaaatagaccaagaaaaaaatgaagatgctaataataatttgatcagatgcttattaaaattgtgagagttatcaaatcatggacagtttctgaaactgtaatgccttcagcaggtctcccaaagtttgctagactgtatactctttgagtgctctcacagtgccaggaacatatttgttcctcagtaaatacttgttctgtgaaatcca

SEQ ID NO: 209078 - DNA, 368 bp, Homo sapiens
atggataaatacaaagttggaagggaggcattgagatggtcagggaagttacttttgtgcaaagacgtaaaaggagaggagacaggtcttgtggaaacctggggttacaaagtgttgcctgcataggaaatagccagtcccagaggctagtttggtccattgtgatgaaagggttgactgcttgctgtgctagtgccctgtagtgggccaagggcagaagcatggagacaagaggctgggacagtgatctggatgagatggaatggtgatttgaactaaggtgctagtagttgtctttgattctggatatattttaagtatcgccaacaggctttgctgatggattgattgcatgtgggttgagggag

SEQ ID NO: 209079 - DNA, 174 bp, Homo sapiens
aagatggtttactccctttgagttttattattgcaatctataaaaaaggaaatataatacctaactaacacctggttctctgaagattaaatgggactgtgactggtatttagcaagtacatgggctaaacatttttgccaaagtcattagagagaaaaatgtgtgctttctgt

SEQ ID NO: 209080 - DNA, 354 bp, Homo sapiens
caggttgtccccagggacacatttctttcaagtaggatgactggtatgtttagactgaaaagctgatttactggaagattgctatcaccccctggcctaccatgtcgttggtgtggccagtgtttatcagacagtggtgtttccagcttaggcctgaatggaagaagaaactgaaagaagaaataaaaagagagatgcgccgggcatggtggctcatgcctgtaatcccagtgctttgggaggccgaggtggcagaccatgttggccaggatggtctcgatctcttgatctcgtgatccgcccgcctcagccttctacagtgctgggattacaggcatgagccacctcgcccag

SEQ ID NO: 209081 - DNA, 381 bp, Homo sapiens
aaagctgatctagcaagtatacaattgatcaaatatctgagaatctttaaaaataataactcattggtatactagagactaagattgtaaaaaaaaattgagatgcactgagaacattcttcatagtcttcacttactctgatagaataaaatgctgcaagagtacaaagagtgccatatagttagaaaggttatcacttcgtgatacagaatagaaaataaatcttgcctatgatgagaagttctgagaacagatgccagcttatctactcaacatattttacaactttttttttttttggtgatttctgccatcctttttttcccccaatagagtgttaaatactattgattgtttctaaataactaaattagccttga

SEQ ID NO: 209082 - DNA, 1000 bp, Homo sapiens
  misc_feature (3)..(3): n is a, c, g, or t
  misc_feature (76)..(76): n is a, c, g, or t
  misc_feature (79)..(79): n is a, c, g, or t
  misc_feature (203)..(203): n is a, c, g, or t
  misc_feature (206)..(206): n is a, c, g, or t
gtnagagcaggcgtgaaagagcaagacacagagagagagagagaggagagacagagagagagagaagggggttggnggngggagagagagagggagagagagagagagaggagagagagagagagagagagagagagagagagagagagagacattcaatcagccctcaggaactctagcccctcacctaccatttgactgcnacntcatctctcctataccttttccggcctggctggagtcatcctcacaactgctgatactctcctaattccccactagctggcttcgcatcgatgatcaggcacccgtcagaatgactaatcgtgctgctcactgcctgtcggatgttcatccaagtcttcccctgccattcacagaattcacgctacagcatctggtcaccattacaacgtgcaagccaagcttgcatgctttgatgcacaagccaccatgttgaagaggatcatggagtcaagaactgactgtggctgaaggccaatagccatcaagaaactgaggacctcagtccaacgacccatagaaacaggaacctgccaacaaccacccattgagcaacacctcagatgaaaccttaattgcaaccggcaagaaatcttaaagcagtggatccaagcaaagcctgcctgcattcctgacctacagaacttgtgagataatggatgtaggttgttttaaagagctaaattttgtgatagtacgttacacattaataggaacctaacacaataacaatcaaacaaattaataagaattcaatatcatagatatctttttcttttaataagaattagatattctacattttagcaaaaggtatcagttgcttatgatcatatgtgtgtgaagggacaaagtgtcttagtggcccactggaagtaagaatagttccctgaactacaataaatgccataatcagtgtggtttcaattgcaatatgatattccaaaaaggacatttcataaagttttacaatttt

SEQ ID NO: 209083 - DNA, 1098 bp, Homo sapiens
  misc_feature (940)..(940): n is a, c, g, or t
  misc_feature (1024)..(1024): n is a, c, g, or t
  misc_feature (1039)..(1039): n is a, c, g, or t
  misc_feature (1059)..(1059): n is a, c, g, or t
  misc_feature (1079)..(1079): n is a, c, g, or t
taagaaactcccccactccacccctgccaatgaggacgttgcttagaggtatttctatcagtgttgagtagaagagatcatttcttgatgttgaatttcaggtaaggatgccagcttctgcatatcagggtggtgatgcttgggctgagacaggtctagacagcactgtctgaaagggggctcaaggaagtagctgtgaaaggcccctgggatgttttctgctccccttcctgcaaatcccctggagggagatcctgttagtcactacgggatgtgtgtgtgtgtgtgtgtgtgtgtgtgtgtgtgtgtgttcatcacttgttgcttgggtgtgggaagagacaacaacaacctacagaatccagagttctcagttcatctcccatcctagtccaatcatggcctaacatccttagctaccgatcgcagaggagactgcgcatttgtgttcatgtggccttggatgttggcagattcagattggtgccccagacatctgtgcctgtaactgcagtttcagcgggctcaggaccaggctaaagggcctccaagcttcctccagtttcctggtgcatgcatgtgcaatatactcccgtggcctgggtctttcctgccgcttcttgccagttgggtcagaactagcttattaaccagttttttctgagctttaatcgaactggctccaaccagttggagacttgaaaagggctacgtgatagttatagatttttaaagatatattattattttagagtagtattgagtgtacagcaaaatggagtacagggtccagagatctcatatggcctcaattcctgtacactctcaggtcactccaccaataacctcctacacctctctttccttcttttgttgttggggtctgtgactgcggatataactgacggcaacagtgaacatctcaagccgggacaattcnctcattaagcccctaccaaggggtcggttccagctctatgcccctctgggactttccagggcagcactatgctcacggagccantacgtaccgtctganccctgaccagcgcagaagangaggggtctatcttgggaancaccagcccgttgcttcct

SEQ ID NO: 209084 - DNA, 350 bp, Homo sapiens
ttgcagtgagccaagatcactccactgcactccagccggggctacagagcgagagactctgtctcaaaaaaaaattatatattttacctgagtaaggtgctcagaccttatggtgtaaagtccagtgagtttttataaacagatgcatacatctctgtaaccaacactccatccaatctatagaacgtgttcatcaccagagaaagttcccttttgctcttttccagtcaatcctccacttccttgtcttgagaaaaacacttgtgttttctaccaccatagcttaattttgcccattttagttttcatatagatggaaccacacagtttagattctttttttttttttg

SEQ ID NO: 209085 - DNA, 299 bp, Homo sapiens
cattggtgaggagtgttttacttccaactatgtggtcaaattttacagctgggtctccgggggtgacatcacatgtcagcaggttccatgatgcccctgagccacaaaaccagcaagtttttattagggatttcaaaaagggaagggtgtatgaatacagagtgggtcacagagatcacatgcttcaaatggcagtaaaagatcaccaaggcagaagggcagagcaaggtcacaaggccagggcgaaattagaattactgatgaggtttcatgtcccactgtgcacacattgtcgttga

SEQ ID NO: 209086 - DNA, 172 bp, Homo sapiens
aaaatgttgctttacaaggaagttaagtttaaaagtagaaagcaaagaactgaacatactgacatattgattctttgaagaggaatttagaactaatccatccatccatctacccattcgtccatttacccaaccaccaatctatctatttgcccacccatccatccaccct

SEQ ID NO: 209087 - DNA, 795 bp, Homo sapiens
aaatgagtgcaatattgtcccttcctccttgtcacctacttttattcctcttaccagtttcttttcgatcacaaggtagatattctaggctagagtcttatataactctcttaccattgcctttcaattctaatgaaattcatttgctcatccctttaatacatattacttgaagccctgttctaggtgctagggataaagaggaaaacaaaactgacaaaaacgctgcattcataaaacgtgtattctagtagttgagagagacaataaagtagataaataagtaaactgtatagactttgttagggttaaagaaaaacaataggtagggtgcgggacatggagcattgtgttggagtcttgcagtggcagaacctgtggtcggagaaaacgtcgaggtgattttacctcgggaaagtgagggggtgggaggagtcacataacatctaggagaacattctaggcagaagaaactgaaaggaaaaaggcccggagtgagaggcccctgaggtgttctaggagtagtgaggctacaatttggtaaataagatcatcccatgtttaagtatgtttttcctctgacatttggaaccagcactaatgtatgaactgtgtatgtttttacaaagagcacgcctccgtgtgtgtcattatccccatagcatttcctccctgttacctgtattactaaaacctactcaatcttttaatttaataagcctgtcggaaaaacccctgggcacttggggcacaagggataacacttgtggaaatagaacacaacaatagcgcccc

SEQ ID NO: 209088 - DNA, 499 bp, Homo sapiens
atggtggtggtcacatgtagtccctgctacacaggaggctgaggcaggagggttgcttgagcccagtaggttgaggccgcagtgagccatgtttgcaccactgcactccagcctgggcaacagagcaagactcaacaacaacaacaacaacaacccctaaaactgtcttgtagttgactcgtcttctccctggaaagtggatcttattggtctcattctctgagagtgtcttctccttgactcctaatgtttgatcttttttctctctttcatgcctatagttttgagattccttggctgcattcagtacatgagcatgaaaaacaaataattgttaagtaccttcctcctttgtgcttggctttctgatagggtcatgcatgcttttgttcttgaccgttggagcacactgtgacatgggtactgttatgtccccattttacagttgggcaccctgaacccacagagggttagcaatcaaggtgtatctgggatttga

SEQ ID NO: 209089 - DNA, 495 bp, Homo sapiens
agcctgttgaagagggctcctgccctataaaatgggaggatatgccattgacactggagactaattaaatgctatctcctggagttataagaaatagggaagttagtaaacactggaattaaagaagttgtgaacagagtgtgtaactgctagcactttgataaatcttttctctaaaataaaactcttatacaaccaatctgaaacacaggagaaagattctgggatccagagggacacagcgagattgaccctgagttgaccatggctgagcgcagaagccaaagtgagctggcttttaatgtcagaacttagtgatgaaggttccccacagagaaattcagtacattcccaaccactctagactatgttcgcattccttataaaatatgataaataataccttacttacttgggttgtcgtaaggattaatggaattgtatttgtaattatttctagcacaataaatactgatgtgttttcttcttcttaaa

SEQ ID NO: 209090 - DNA, 505 bp, Homo sapiens
aagaggaggaagatgtacattgatgccactttgagaagaagtggactgtggtggatttgtaatgtatcagttttgccaagctgaatgcacatttcccagatttgccatctttagatagctctaggttagcctgggcaacaggagacacttggaagatagaattcgagtggctgttacactcttttgtatactgggaagggcgttgttacagctcaggcatgatcttcagcttccctgacccttggactggtgggtgttttgcttcttgatctaacattaaggttagaagttgcaggattccagcagggttttgtcacatccaatctggtttaagttctcatattattaggaaagctttagggtgcttcaggaaaacgctttttaaaaaatcaaatttggaaaatatcaaatggaattataggcaataagcataacccagtggaaccatgaatcaaaccctctagagcagggttgtctaaattttggcttccttgggccacactgg

SEQ ID NO: 209091 - DNA, 426 bp, Homo sapiens
ttgcaaaattctaaacaagatgattatatgtatatagttactacagtaggagttattaatctagggttcatgggaaaaattcaggggaggttcgtgattttggatgagaagaaaatgatatcttttttaatggaattctaactgaaatctagctaaaggtaggtaacaaatcacagtagtattagcagtaactaactgactcggtcaccagtaggaatcatctattttcctgtcacattatagttggtgcagatacctctaaatatcatttatgctcaccactacttcaaaatttcaggagttaggccaggcgcaatggctcacacctataaccccagcactctgtgaggccaaggtgggtggatcacctgaggtcaggagttcaaggccagcctggccaacatggtgaaaccccatctctacctg

SEQ ID NO: 209092 - DNA, 262 bp, Homo sapiens
tttgagtggtaaaggccgattaacactcagcgcggtaacaaagaccaggtgggctaacccgaaatgaaatgagaagcctgtggtgatgaggaggcagagaagtaaaatcaagtttgagcatttcgtttaggagagtttgggctctgattacttgcacatgcaaacgaactggaaacaaacagatcagatgtctaccacttcttcgagggaattgcattgccaaagaagtcatgaaagcagactctatactgattaggcatta

SEQ ID NO: 209093 - DNA, 312 bp, Homo sapiens
agattgctactgcactccagcttgggcgacagagcaaagagttcgtctaaaaagaaaaacaataataaataaaagttgtgtttatactatattatagtctaataaatgtgcaataacattatgtctaattacattagacattgcatacagtgttatgcaatgacattttgtctaaaatgtaaataccttagttaaaaagtactttgttgcttaaaaatctgaacaatcatcagagccttcggtgagtcatagtcttttctctggtggaggttcttgcctcagtgttcatgattactgactaataagggtggt

SEQ ID NO: 209094 - DNA, 141 bp, Homo sapiens
agtgatgaaatggtagtggagctcattgagaagaatttggagacccccttgtgcaaaaatggttttcttctggatggcttccctcggactgtgaggcaggcagaaatgctcgatgacctcatggagaagaggaaagagaag

SEQ ID NO: 209095 - DNA, 597 bp, Homo sapiens
accccaaaaatagccagaccaagaagtctaccaaacatttaaagagaattaacaccaacattacacaatctcttctggaaaaaggaaaaggaaggaatatttctaagctcatttatgaggccagtattacccctaatacccaaaccagataaagacagtacaagaaaaggaaaactatgaaccaatatctctgatgaacttaaactcaaaaattatcaatgaaatattagcaaattgaatccaacattgtataacaataattatgcaacatgaacaagacaacattgctattctcacattttatttaggagtatggatgagggtgagagggagggtagggaagatacaagcagtaaacaaataagtatccaaatgaatttcagaaataagtgtcttgaagagaattaaactaagcaatgggggttggagaatggagaagaaggaaacttttgagaaggttacacttaaaccgattcaagaaggagccagcctttcagagatctagaatcttctcaagagacaccattaatgaaatgaaaagcctagctacagacttgggggaacctggaaaaaatattcacaaatgccaaaagtgtg

SEQ ID NO: 209096 - DNA, 508 bp, Homo sapiens
agttgtaccattttacactccttccagcaatgtatgaattttggtttgggagcacatatatttaaatcaggaatctgaaagatcgatttcaccatagtgtaaatggatggagtggaaggaactgaaggtaaggggtcaatgcaggagtccacgcatgagctactaagggtctgcactcaagcggccacacagggtgagaaacgaatgagctattttgggagtgaaatttaagtgaaattctatagaaatagaggaatcaaagttatctcgatttcaagcttgagggaagcctctgttggcggaaaagatgggtttcttctggggtgtgtttacagtgaggggccatctcactggcaatgtggaagaggtcggatctagagaccaatctaaaagtcacctggctagagaagacaatcaaatccagaagttcatagaacaaaataaaggtgaacatagggcagctaaagcctaaacattttgtaattagaaagcagttagggtgtgttaa

SEQ ID NO: 209097 - DNA, 248 bp, Homo sapiens
ctgcatttagaaaggaggcggggtcagaggaatagaaagggatagggctgaagaacacaggtcgctgcatttagaaaggaggcggggtcagaggaatagaaagggacagggctgaagaacacaggtcgctgcatttagaaaggaggcggggtcagaggaatagaaagggatagggctgaagaacacaggtcgctgcatttagaaaggaggcggggtcagaggaatagaaagggacagggctgaagaac

SEQ ID NO: 209098 - DNA, 641 bp, Homo sapiens
ggaaagaaggagagaaaagagaaaagaaaagaaaaggcactatctatgccatatgcttttgtgagactatcaaggcctgcatgcaaaaaaacccagtgcagagttggtggtcaattagctggagtgctttattatttttaataatcagccatgcttagtgggagtctctgaatctgtagttatgactgtagtaaatgggacacaaagggagcagctggacataccggcaagtattataatgtgcagacaacctgcaaatatgaaccttcttttcaaataagaatctcagtgctgtcactatttgttttaggaagtgctggttttaactgaatgaggaagttaaacgcatgttctgttttttgttttcattgcgcccacatgggttgactgtgggttcggttttctctccagattgaacacttagtacttaatgggggaaccaccttggaaaagcagaactgatttgaggtggcttcatccctctcttctcccaccagaaagagatgggagcttccacttcaacctggggtgaagacagagaacaaggtgtcccagcattttgcacagaaccaaagccctggaaattctggtggaagctagacattcagagtcatcaagctaacagtcacttcctgctatgt

SEQ ID NO: 209099 - DNA, 555 bp, Homo sapiens
acatgttaaacacttgaagacttatattttgtggtaagaacatttgaaatgtatactcttagcaattttgaaatatagtataattcattattatcaactgtgatcaccatgctgttcaatagatctcaaaaaacttatttttcctatctagcagaaattttataccatttgaccacatctctccatttttcccacccccagccttttaaaatgttttttatttttaatatgtctgaggttgggcatattttaatgtgtttaaagcattcatatatatatatacacacacatatatgtgtatatatatatttctttaaattagacatgtattttgtttgcctttttttatttaaaaattgcttttaaagaaattatttctatattaagaaaattggtccattgtcatactgggttttgacttttggggttttttttaaacatgcagaatctatgtaatttttacattgtcaaatttatctatataaatatctattttatatctgctgggtatttttttgtattgattaaaatttccttccctcctccaagataata

SEQ ID NO: 209100 - DNA, 697 bp, Homo sapiens
cttattcccagtttgttccagatactgtctactgacagtgatcgttcttttcttggttatgatataaggaagtagataaaagattttagtttgggtttttcattgggttctcatgttctaaaataaatgaccaggaatcaggaagccaacaaaacaaaaaaaacagtccacctgtaaatattacataactcacaccttccatacccttaccctcatataatttaatgttcatttatttgccttggtttagtactccatatagaaggaaagaacacatgctttgttttggtgggtcgttaaattttttcttcttcggaacatgaaaaaggaaggaaggaaactgtattcatttttgtctaagcaaggataatggcctgttaatgcaaataaatggaaaatattctccattatgtcttgaaaatttgtttttcttaagttttattacagaaagttttagtgctatcaaaaaagatttatatggagtacgtttggcttactacctttcattccccctctaagcaagacatagaaaatttctatattaatttatatttggggattaggtttgtttcttaggagaaaagggatcatttcaaagtttgatagtgtcaaagaagaagtttcctatttacaagaaggcatgcggtgtggcatttaattgtgtgtgcatgtgtgtgtgtgtgagatgtgtgtagga

SEQ ID NO: 209101 - DNA, 436 bp, Homo sapiens
ttgggaattttgccaatctgtatgcaaaaatggagctttgtcagctactctgtgtttatgtacagagctatgtcagctactctttgtttatgatagtcttcggtgaattgcactaatcaattagttattgatcatgagccttaaaattctggtacagtggaccagaaggcatgcgcttttcttttgagagaatcaaaaggtacctggagaacatttactaggtggcttggaaggggatctgaagatattctaagaatagcaagaaaaaataataatgctgtaagtaaaaatgcagcttattgcataagagatactgagattttcacaaattacataatacattttcaaatatatttgaatatttttctgatttgtgcatgcctttgttgtactaaaataaacatgtgctgtctaaggtattaaatccaaaaattac

SEQ ID NO: 209102 - DNA, 493 bp, Homo sapiens
atgtctgaacactgcttccaaatgacccctgaaaacacaaccacatcctgccttatccatcttaacctacagttacagcacttcgtcaaacatacttagatttctggaagaatatgcagcagtgcatattaacaggttttcttaactgccaatttaaaagcatatagatttatgtttacccactctgatgaaaggactcacaagcagagaaattgcaggtgataaaaatgtgtgtactaccatgcaccacacagtagaatttaagctttctgcatcaaattattgtccattcataggtatttttgtcctcaaattgtagcttggaggaggctcagttaatgctatcgctgaagtgtgtgttgagaaaagtgctctaaatgattagaatttgagcttcccccaacccagcttggacatgtgacttcacctcctctcgtatgcacaaaacaacctagggccggagaatccaatctgtcagtgatgtccttgtagt

SEQ ID NO: 209103 - DNA, 121 bp, Homo sapiens
caccttagattacagaggaaaacatttcataaagtactccttgtacagtcaagaaattttagaaccaacagaaacatcaactaccctgaccttttaaaaaataaaaaagttggccgggcgt

SEQ ID NO: 209104 - DNA, 320 bp, Homo sapiens
ttattaactcactatagattcatggaccaaggaacactactgagagggccacattttttggccttggagcaattagggtaataagaaatcatgggttcttaagctctgttttcttttaacagtcaccagcctagcagatgtcatcactgactctgcttatttacatggtagggaaaaaatgacaaatatttaactgctttacactctggtatttaggtttgtacccagtcttgaggcctttaggcatttccttagcaccacctttttatcatataatcaatcaagtacatacccaccaatcacaccagtgtttgatatat

SEQ ID NO: 209105 - DNA, 656 bp, Homo sapiens
aggtattcacttaacaggcctgttcagtatggaagacactatttatccccctttaactctcgccaaaggactataccaactgcatgaaagtgaacttttacatctacttaaatggtagatggagcaccttgatcactatgtgacaaccttggttgtcatttttagttgctatttgaattgatttgagcagccctatcttcaccggacatacctgaatttgttcctaggtacccactttgttcctagaaaagggctaactttctactatggtctgaagagtgttcaaagtagactagagcttgggaactcctaacctagaaccatctgccatcccacaaagtgattagatgcaaaagggatactagtcatacctagtgtttctctttctgaaaagagaacttatcctaaaagtagccatgggcctgggacaaagtagccctttccacccccaaaatgattattagattgacgtgagtccaagattgtggagttttttgttttttgttttaaaacagataccaagaataaatgaaacctatttagggattcattctctaattaatagattctaagtaatagaatcggagagagactttttcctctaaccaaactgccaaagttgtttttggctaagaatttcccaatgatctttgcac

SEQ ID NO: 209106 - DNA, 837 bp, Homo sapiens
atcgggcgcaaagttgacagccatcagcaccagaagatgcagttcaagcctgatggggtcacagtgggcacagtcctgggcctgaccgcgctggccgccaccattgccgtggtggtgggtggtgtacctgattcatattgggtgctccaagaccaagagcaagtcagcactcatcacgttctacctgtatgtcatcaccctgatgaagcttatgggggctgcggggctggctggaatccggatttacaggacagatgagaagtcactggatgagtccaaaaatccgccccgcaaactggactcggacctcttggtgggcactgcctcaggctcctggcttatctcctggggctcaatcttggccatcctttgtgccgaggaccacccccactacacctggtacaacctgccctactccatcgtggtgatcgtggagaagtacatccagaacctcttcatctttgaatccattcaccgagagcctaaaaaactctctgaggacatccaaacccttcggatggtcacagtctgcaatggcaacaccatgccccttgcttcctcctgcctcaagagtggaggtgtggccggagacgtggctccctggggcagggacatgccaccagcagccaatggaaatgtgtgcctgagagaaagctgtgacaaggaggagaagcacgaggagagcagctggggagggaacccaagcccagtccaccttcctcgtttcttacagggcaacgccaagagaaaagtcctgaggaatattgcagccttcttgttcctctgcaatactttgctttggatacctcccgcttttggctgtcgacctgagtatga

SEQ ID NO: 209107 - DNA, 364 bp, Homo sapiens
aatgctgggattacaggtgtgagccaccacacccagcctataactatttataaaaagttattaaatcctgttcttgaatttctaattattccaaatgacttgcttcattaattcttgtgttcttcttgaatggcttattttgaatacgtcatggtaactctctgaagccatagattagtagtgtgaatgattcacaagttaaaccaaaatgatccttctcaagcagatgttcatcttttagatgtaaaggaaaaacttaagaaggagaacttttatctcagcatttctgtaagaagttgactgtgtggtcttcttgacctttaaatgaatttttatttaaatataaccattattggatatacac

SEQ ID NO: 209108 - DNA, 229 bp, Homo sapiens
agacaaagaatcgagctcggtaccgtcagacgctgaactatgtgggacagcagaaggtgctcagactgaggggccaggcaaatctcagttgaatctcacttctgtacccactggctagcaagtcacctctgtgagccccaactgccacacctgtaaagtgggcctagtaagactcactgcatggggtgactgcaagtgtctcccgatggcacatagttcagcgtctgac

SEQ ID NO: 209109 - DNA, 900 bp, Homo sapiens
aattaggaagaactgtaggggtgcacctccccgaactttgccaactttgcctctcctgctctgtctctaagccttgtctctgtccttggtcggggccctagctcctagaacagagagtttggtgaggagacgtggaccagtggtcagagttattttgttcctgctatgggcttggagcctgggaaggctgggtctcttgtctccttgccagccaaaagagggtgcttgtcctggtgggaaatgagctgccttcatgcctgtgtccctggaaggatgaatggatgagttagtgtcctgggggtgagagttcagcattcgggagcagtactccaggcactaaattgagagtccagacatgatcaggatatggtcttaaccactcacaagccgtgtgacactgagcaaattacataacctgcctgtgcctgtttcctccactgtaaggagacatggagatgagcagttagcatgcccggtatgatggcggcttttctgctcacttgggggtagtgttcttatttctcactccctcctccaccccgtccacttcttgctttagagacctccgtcctgtgagctcccgagccgtcctgtgtgctcaccttcctgtgtgcactccttccttgttatctcacagcgtggaaacttttgttcttggcagctgacaattcccaggggaaacctggtgggtattttttcaagttctcaattctcctcctcacagggagggtttcccctcagaggagcccctcacctggatcttcaccccattatctttcttcctttgtgccctacctgggtgctcaaggtgtacgggagaagacaggtagagctgtggcctgggggtacagaagggtctgcagtggagggaggctgggaggccctggggacaaggacagg

SEQ ID NO: 209110 - DNA, 583 bp, Homo sapiens
gattggattaaaccaataaagtatgaagtaaagtaaaaatgttggaggagatgcaaactaagctgagtcaggtttatgcaatagagtatttgatgagctgcagaccaagaatactttctaaactggaacttcattatgctgaggttgcagagatgaatgagacttgattcttgccctcctaatatggagatagatatgttaaacagaaagttatggtgaatgaagtttctgaactctatacaggtttagaggaagagataatgcattctattaatatttgaaggaggtggggaggtaacacagggaacaactaaacctcgttttgaaaaatgagcatgaatttgccaaagagctaagagacagtccaggctgagggaatacaatgttcaaagacatgacagtgtggcaagattggcatattcagagtattggtatattgcagaagtacaaaatacaggaaggatgtaaggagtagagaaagatttgctaagacctaattatgaagggctttgtatgctgtgtcaggaccatgaacctgatgcagcatgtgggtaagccactaaagagtgttgcaaggataaat

SEQ ID NO: 209111 - DNA, 525 bp, Homo sapiens
gacggcttcaacggaactttgtgtccctttaaaaaaaaaagaaaagtaagcttaggatatctattagtgttcactgttcgggcaagaggcctaaagggaagcaaattatttgtttgtggttttaaagtggccagaatgccttcaagcacaagtataagaccattagcaaatcacaaggaaccaaagcagttcatcttactcaacaaagctatgatcagttaggaacagccaaactgaatgggacttgccctgggccggaaggtcagtaaaccttagcagtttgtgtttctgagaatcaagaggctcttcgtcccggagtgcaggccataagtccacaggttctgctgtcatgtttccaaaaacattcaggacaggtgagagaaacgaagcacagtgcgtgtgtgtgcgtgttcttccctttgtctttagtcagcacctctaagtcaaaccatccccacttttgctatatacagactaactagaggagaacccaaacaattaaaaagttccgtttaagccgtttat

SEQ ID NO: 209112 - DNA, 493 bp, Homo sapiens
aaacaccattgaagagcctaaggggttttataaacctcaaaatcagcatcacattcatatacacatgagtactagtcacatatagccaagtaatgtgcgttagaccagggggtggcaagctttttttgtaaaatgtggaatagtaaatattttaggttttgcaggtcaagcgctcgctgtcaagatgactcaaccccatccattgtagggtgaaatgactgtggctgtgtgccaataaaactttatttatggttccagttttagtatatttgctgctgaagcaagcacaatttatggacactgaaatgtgaatttcagataattttgtatgtcctaaaatattcttcttttgatttttccaactacttaaaaatgtaggaaaaaagcattcttagttcatgggctgtacaaaaacaggcagtgagttggatttagcccatgggctagtttgcccactctgtattagactcagatgtttggactcatgtcttta

SEQ ID NO: 209113 - DNA, 483 bp, Homo sapiens
ttttctgtgtttagatatgtgtagatacacaaattataaatagtactcagtatattgacatactgtgcaggtttgtagcctaggagcaatagctagaccatgtagccttggtgtagagtaggccataccattgaggattgtggaaatgcactctgtgatgtgatgtttctcacatggatgacattgcctttcacagaacgtgtcctcatcatcaagcaacacgtgactgtactaattttaaaagtatttgcttcttacaaatagtgaagtgtttgcagatagcatggtttatacctagaatttgcttcagaatagctcagtacaaggaagaggtgtgggtaggaataaagatgaaatagatgtagccatgctttcataattagtcaagctatagcgataggtgcacagggttcattcttctaatgtctacttttgttgtatgcttgaacttttccagactaaaagataagcaaaaaaaaaaaa

SEQ ID NO: 209114 - DNA, 369 bp, Homo sapiens
aaaggttagcagaatgattaaaaaatatgactgactacacactgtccactagaaactcagttcccacataataatataggaagattgaaagcaaacagatgtaaaagaaatgccatgcaaacacggattaaaaaaaaaacacctcaaagtagcaacatcaataagataaagtagatatcatagtagagaaaattaccatgaacatatagggacacagcataataataaaataatgaatatactagcaatacataggaatttcaaatatgtaccaaaaaagttacaaaatatgtgaggcaaaaactgatggaactgaaaaaggacagaaaaatgagaattctaatcaaagatttcaacagttctctctca

SEQ ID NO: 209115 - DNA, 527 bp, Homo sapiens
taacttcatagagaaaaattcaatgaacccttggaagaaaatatatggaagtatggttactgacttgggaaagaagagaaaggtacaatgtaactgcacatagaagccagtcctgaaaagaagcaagccggctgaagttatctgcaactcagaagcacttggtaccacccaaggggagataagaggagatctcatcagaggtgcctgaaaagcacctcagccgaaggcctcacatagagagacctaagaatgaaggcacctggactaggaatgtgaatatgtgaaagaacatgaccggccaggggccctgagttattgaatgcaacccccttcagacactgcaacgcacaggctgtgcaccaagcctagtatgggaaggacagcttttcttcatgaggcctgccaggtaaagccagctatgaaacaggaagttgaccttcaccagacactgaacctactggcaccttgatcttggacttcccagccttacaaactgtaagaaataaatgtctgttgttcataagcca

SEQ ID NO: 209116 - DNA, 618 bp, Homo sapiens
cttcagagaagatgaacacttaacatgaatttaggcaagtaagaagttgagtttagcgaaggaagctgcagtcagaagagttcggccctatacgtagacaggctagagaagccaaggtcagaggttcaatcaggcaatcagacagacctaacaacgtggctcaagagagagcaggggactttgcctgcaaatgtggtttatgctcttcccagtctcccagctctttttgccaggtgcctctgcagccagaacaagtttagagacttatcggtgagccctcccttcccccaagagactgaataagcttcacttttacttttatcccagaataatatacatgcatccttctaacaaacataggtaatgagcacccatgtccacaagtagatgtcatggagaatgagacaaataagtgatagacctgtcccttggaaagttgacagtcaggaaggaaaaatgagacacgtaagcaccactaagtaaaacacaagtttcgacctggtacatgccagatgggaataaaggcaaagtgcctgggtcatcttccaaatgccatcatcctcttgtgtccagtctctgaagaaggtcctctgaccttggattacatgaccatctata

SEQ ID NO: 209117 - DNA, 338 bp, Homo sapiens
ccgagaccgcaacactacactccagcctgggcgacagagcgagactctgtctcaaaaaataaaaaataaataaaagaaagggaataaatagtaattttcccaaaccatcaaaagtatggaaaaaggagtaaaataaaccatttacataaaataaagtggcataaaaatgtcagatccctcagttgttccagcaaaatcagactgctttagactgggttagaaaacaaaatccagatacagttgtttacaacaaacatctaaaagaagatagtaagaaaaggttcaaaactacacattgggcacagtggctcatgtctgtaatcccagcactttgggag

SEQ ID NO: 209118 - DNA, 764 bp, Homo sapiens
tatttatagtgctgtggaaatagcgacttagcagcaggcagtcctggctggaagtctgcatctgtggctgccctgacgcactgtcagggctcattgttatcagcttggagaaccaaattatgttgccattgtgtgctcaagccttgggaaaattcaacaactggaataattcgtatcaggagaaattctttctggttctagcgataaactgaatcctctaaaatgtggggaacaaaaagcaagattaagaaaaataaataaataacagtgctaggaaaccagggaagagaggacacaagttgaggtggtgcgtgcacacctgcctacaggtgcacaatctcgtggtttttcctaatccattcagaagttctccatttaagagcgcagtctggttctgctgttcccaaagcgcctttcataccaaaggattccaaagtttcacacccacatccagacatatggggctcttcaaaatagaaatatcagcacagaaccagcaaagtgagtctgaaacgtggccaagggaaccagaatttgaaggactcactaaaaagacatctagattctatcaattttaggagtccacaactgaaatggcactaaggaattataataataaaagcaatagtagtcggtgagcaatgagcagtgctctgtgtgcagtaagtcaatcaggcacaccccacgcagcagtctgatgtgcatgatcctgttccatctcctcactaccttgggaggcacgagctttaacacgtaccttgtag

SEQ ID NO: 209119 - DNA, 388 bp, Homo sapiens
aggctcaagtatatcgggcatatgggaagcatgtaaatgttcaaagaggatgtccagtaatgaggaatccaacatttatcccaatagcaacatgttaaatgctcccactcccttctgaccattgctgctcaagtgtttccttctgaggtaattccttgaaagtgtgtgtacatgaccagtctccatggctaacacatacacatgcatggaacctagaagcattaaggaacaactctgaggtcattagaagctaaaaatactgaaccttcacacttgcccttgagcaagtattctttagcagaaaagccaaagggattataataaaatgaacaaacaacaagcctactcataaagcatgttatgctttatggatagtgcccccccatta

SEQ ID NO: 209120 - DNA, 765 bp, Homo sapiens
aaatgatcactacatttaatacccataagaaaatctgaggctctcaaacaaaagcaggaaaataaacaaatctaataatataggcttcgtataggactatattgtcatttatactcagtttaaaggagagaatctccatatttggtttctcctttgaatagatctttgacttactctagtactaccatgaaaactgaatttattcttttttgaaatttcttggtttctttgcctcttgcagagtgacatttcactttttaatctttcagctgaataagccatataaccaattttttaaagttactgaattttaaacaattatttgtccttttgctttctctttcaggtaaacaattatttgtccttttgctctctctttcaggtaaacaattatttgtcattttgctttctctttcaggaagttgatggcaataaagttatgtcttcatttgccccacacaactcatctacctcacctcagaaggcagaagaaggtgggcgacagagtggcgagtccttgtctagtacagccctgggaactcctgaacggcgcaagggcagtttagctgatgttgttgacaccttgaagcagaggaaaatggaagagctcatcaaaaacgagccggaaggtattgtatttattcttcagtttcatggtgctaccagatgaaagcttccaagagtagaacatcaagttaacagtactgatgagctgatgttgggcaaagcatgctttaatgagcccttagtttcgctcatctgaag

SEQ ID NO: 209121 - DNA, 742 bp, Homo sapiens
gagcgtgcgtgagtgagtgtgtgtgtgtgtgtgtgtgtgtgcatgcgtgtgtgaagaatgcacactatctcctgttggttcagttggagacgatcataggtggctgctgtgacaaagggaaattgtgcttttccagcatgcttactgaccctgatttacctcaggagtttgaaaggatgtcttccaagcgaccagcctctccgtatggggaagcagatggagaggtagccatggtgacaagcagacagaaagtggaagaagaggagagtgacgggctcccagcctttcaccttcccttgcatgtgagttttcccaacaagcctcactctgaggaatttcagccagtttctctgctgacgcaagagacttgtggccataggactcccacttctcagcacaatacaatggaagttgatggcaataaagttatgtcttcatttgccccacacaactcatctacctcacctcagaaggcagaagaaggtgggcgacagagtggcgagtccttgtctagtacagccctgggaactcctgaacggcgcaagggcagtttagctgatgttgttgacaccttgaagcagaggaaaatggaagagctcatcaaaaacgagccggaaggtagctctcattaactttcaagtggaaacaaacaagtattttggcaatactaaacgtaaagtatttccagtgtttaattcacttcaggacaatcacatataaaaataaagcttatctaaatctt

SEQ ID NO: 209122 - DNA, 425 bp, Homo sapiens
gtttctgattgtgtgtgctttgcagtggtatttggatggtttcctgctctctgctagcacaaaaaggcatttctgttacaatggcccctaaccacacaatgacggcattaaggatttatgtggaggtttcattattttctcctcttttgttccttccaggatgtcttccaagcgaccagcctctccgtatggggaagcagatggagaggtagccatggtgacaagcagacagaaagtggaagaagaggagagtgacgggctcccagcctttcaccttcccttgcatgtgagttttcccaacaagcctcactctgaggaatttcagccagtttctctgctgacgcaagagacttgtggccataggactcccacttctcagcacaatacaatggtaggtttctcatggtttattgtgcctacactca

SEQ ID NO: 209123 - DNA, 637 bp, Homo sapiens
gagcgtgcgtgagtgagtgtgtgtgtgtgtgtgtgtgtgtgcatgcgtgtgtgaagaatgcacactatctcctgttggttcagttggagacgatcataggtggctgctgtgacaaagggaaattgtgcttttccagcatgcttactgaccctgatttacctcaggagtttgaaaggatgtcttccaagcgaccagcctctccgtatggggaagcagatggagaggtagccatggtgacaagcagacagaaagtggaagaagaggagagtgacgggctcccagcctttcaccttcccttgcatgaagttgatggcaataaagttatgtcttcatttgccccacacaactcatctacctcacctcagaaggcagaagaaggtgggcgacagagtggcgagtccttgtctagtacagccctgggaactcctgaacggcgcaagggcagtttagctgatgttgttgacaccttgaagcagaggaaaatggaagagctcatcaaaaacgagccggaaggtagctctcattaactttcaagtggaaacaaacaagtattttggcaatactaaacgtaaagtatttccagtgtttaattcacttcaggacaatcacatataaaaataaagcttatctaaatctt

SEQ ID NO: 209124 - DNA, 439 bp, Homo sapiens
ctaattcgtacattagttattaatagttagcatttgttttaaatttgcttatgcttcttccccaaagacatttatgttaaagggcaactttttctgccactctcaatggaaaattgggaccctctgccgcatgaaaggagtaggaaaaaatgaggcaacaactatatcttaacgccggccagattctgtcacctgggaagggcatcatgcctgaacactactaagctgtccattaaaaatggtaatcaggccgggcgcggtgcctcacacctgtagtcccagcactttgggaagccgaggcaggcagattatctgaggtcaggagttcgagaccagactggccaacatggtgaaaccccgtctctactaaaaatacaaaaattagccaggcgtggtggcacatgcctataaccccagctattcggaggctgaggcagga

SEQ ID NO: 209125 - DNA, 383 bp, Homo sapiens
tcattttgtatttgtatgtgagttataattcaccttctaaaaaattatacttgaaataagacaatcacaaaatggcaaatattgtatgattccacttgtatgaggtgcctggcatagtcagattcatacagacagaaagtagaacagtggttgtcagggcctggagggcaggaaggaaagaatgcggagttattgcttaatgggtacaggatttcagtttgggaggatgaaaatgttctagagatgggtggtggtgatggttgcacaacaatatgaatgtacttcatgccaatgaactgtacacttaaaaatgattaaaatgataaattttacattatgcatattttactataattttaaaaattaaaattaaaaaattttaa

SEQ ID NO: 209126 - DNA, 578 bp, Homo sapiens
accgcaccactgctaaaggctacggtaaggatattagataatatttgtcaaacttttcgaactgcctgacatatatattattcttgctattatcttcagtagtataattattatgatcattcctgtaatgagggcttgaactctgactgccacaatgagggaggtacagggaggctgctactcacaagcagagccccaaagggatcaagaggccaacagggtcctggtctgattcaagtttctgaggaatccaaaactacacagaaaaacaaaaccaattccattaaatcataatggagcacatatgtgaattcctatataccccaagtaacttttactcctcaaatatatctttttgaagtggagctgcttcaacaccctgcctcaggcactgaaacatcagggtagcactcatcctcatgaatctgaatctgcaagcctcatctgtgctctcctatggtttcctgtttggccagtagtcacttctccttccttatataacacagatttgactccaaagttctccctgtaggtgcaaaaacatgaccacatatgtacaacatacacagcttaatact

SEQ ID NO: 209127 - DNA, 616 bp, Homo sapiens
gttattaataattaaactgggacagcaggtgtaaaccaaggtggctctaggatatatagtcatcctacttatgtgtcatcctattattttgacaagtgaacatttattgactattgttatactctgagggccttacatataaataacctctcctactactaaaattaaacctgcagtatagatattactaattgcattttgcaaaagaaaaaaataaagctcagaattactaagtaacatgatgaaggctgtaaggctagtaaatgatagaagcaagatttgaaataggcatggttcaaaattcatgctgctcccaccataaggtactgtttcttctgtgatgttatgtaataatttatgtttccatctctatagcaagggtcagcaaacatttcctctaaaggatcagacagtaaatagtttaggcttacaggccatatgatctctgttgcaactattcaactctgtacttgcagcacaaaacaggcatggacaatatgttagcgaatataacatttgttccaatgaaacttgatttacaaaaacaggcagcgagctgtatttggcctgagggccattgttcagcaacccctgatctatactctagaccctataa

SEQ ID NO: 209128 - DNA, 293 bp, Homo sapiens
  misc_feature (77)..(78): n is a, c, g, or t
ttttttcccctctactgtaaaatgagagtgttcagttttaagaggcacattttcggagcatggatagagtctttccnngagaaaacagtctgtctggtgatggagtaattaaaatgatttgcctgcctctgcctctgaaagcgctgggattacaacaggcgtgtaccactgtgtctggcctgatcatgcattttcaatgaaggcaaaattgcccccaatgggaaaaaattggttctcgtgaaatgaaaaaattgtgctctttatgtacaaagcacaataaacgcacaatacat

SEQ ID NO: 209129 - DNA, 471 bp, Homo sapiens
caaagttccagctaaatcctaaggcattcacaagggtgaggtgcaggtgtctgaatatttgggcattaataagccagatagcactattctgtggctttccaaggtcaattaaattctttcccccagtgagaaagaacatcagccttagaactcagctttagttctagcttcaaaccaattggctttggacacttcttaattttacagctcctggtttttctaaccactcttagggctctaaaaaccatttactgtttttttagagaaatcaactaaccattctacgtcctagcattatatttttcaaaaatttccccagtagaagtaaaagcaattttaccagtaacctttactaacttttctgaaattgagatgcctccctagacctaaaaaaagttatttctaaatttagagtcagctactagtagtcgctgtctttattcagagtgatcatagttcattgtagaccag

SEQ ID NO: 209130 - DNA, 148 bp, Homo sapiens
taagtcatgtgacctcctttaaactaatcacagtaagaggaatgagactaccattagtagagactttcccttgagctgggaaaaggatgacttacttgaggtatggatattgaataaaaggtgatttctgtttgtgaagaacatgatt

SEQ ID NO: 209131 - DNA, 285 bp, Homo sapiens
agttgatccagtcggacgctaggatttgcctgggggcccggcctgccagcagtacaggtgaggggacgcaggcttggtcacaagcacccctgctgaccttccctacagacctggcacatttaatcttcttctttggggaggagaagaggatgcattcagaaatgcctttgctgatgaggccctcaggagcttgtactggaatcactcaaaattcccaagtagcctgagtgtcctaattcatttctgtgtacatctgcctaattctcaatccacgtctaaggttag

SEQ ID NO: 209132 - DNA, 182 bp, Homo sapiens
ctctgacttcaagccaggaggaataattctactacaactatgtttttcttttgtgaaagactgctcagaacatgagtagtcaagactacagagttttcatagtctggatgatggtgcaaataaaaggtatgcttctataaaataaagggaatagttaaattactatgataaagcgaggaaat

SEQ ID NO: 209133 - DNA, 558 bp, Homo sapiens
aagtcaccccctttttttgccagcccttagccaactctacattccagctgtgcagaagctccagctgctttcctacaccccctgcaattctctatgtctaggactttgcttgtgcctttccttcaccccctgcaattctccatgtctaggaatttgcttgtgcctttccttccacctccaatgtcctccctccaactggctaagtcccaatgtatgtatataagaatttagaggatacctcttctggatttatcccaggccccaacttcagcccccagccttccccatcaccttgaagctgagtctggctgaaattcctctattccctaccctttccagtcacaacacctaccacactgtttagcaagttcctccttctttttctgtctcagcagctagaccaggagctccctgcaggtcaagaccatgtgttctctgatgctttctcatggcaaggggagacatagggttgcagtagtgagtgggcatctgttctcagaaggcagtgcctggagcactataagtacttaataaactcttgtgaaattaaaaagtggg

SEQ ID NO: 209134 - DNA, 718 bp, Homo sapiens
ggatcacagcgagaaggcaacattttagttcgtggaacagatgttgaagtacaggcagacatagttggttttgcagttgtagattgcattttccttttcaaatctgcctattctggggtacttggaattcagctgcttactaatgcatgagacacataggagtttcctgtggttctgtgacaaatgaccaaaaacctggcggcttaaaattaatttcctcacagttctagaggttggaaatctgaaatcaaggtgttggcagggctccatgtcctacaagggtcttggggattccattcctcaccgcctccagctgctggtggttccacgtgttccttctgtggctgtcactcccctggcttccgggtcacatggccagctcccctgactctgtgtccagttccctctgcttctctgtcatgaccgtggtcattggctttaggacctaggcagatcatccaggaggatctcatctcaacatctttactttgagtctctgcaaagactggttttacaaatgaggtcccagtctcaggttctgagggttgagacgtggatgttgttatttgcagggtgttattttttggtggccacagtcccagccccagcaccgtggaaagcatgttgctttttggtagttagcggcctcttcctggtgtcctctcatggctgtcccacccctgtggcacacagatgacctcctgaataaaacaagacc

SEQ ID NO: 209135 - DNA, 1572 bp, Homo sapiens
gaaaagaagaaacctgagtgagtcagcatgaccaaatattaaaacatcttataaagctacaataattaaaacaatgtggtgctgatatgtggagggtcaatggaacaagatgaaatggccaaaaataaatttaaaatacatgttgaaatgtattaacagcatatgttaaagttaagttatgttaactttatatgttaaattcaagttaattggggaaagatggattattcaatatatgatgaacaactctgtcacccagctaaaaaaaattaagcttgggccatatgccagactagataccaaaataaattccaggaggaccaagtttttaaaagtaaaaatatggaatcatggaagtgcatgaagaagaagtagcacttaaaaaaataataatctcagcatggggaaggtctaagtatggccctcaatcagaaaccaggaaggaaaatattgactattttaaacaaaattatctctgtaccaaaaacagcataaaaggtcaagaaacaacacactggaaaaagaattgcaatgaatatcacagccaaatagttaatttcttattttcaaaaaatagcttctacaaatcgaagagaaaaattctaaggtctcaaaggaaaaatgagcaaaggatttgacaggtggtagaatacagaaaaagaatttaaaatagctcctaaagatatggaaacattactcatgatagcagaagtatcaattgacaaaattactcagattggtaacaaactttaagggggaaagcacttccatgcattgctgtaaattggtacatcttctactgagaacaatccggcagtagttaacaaaattgtgaatgcatatatctctttctctagaaatttctcttttgggaatttattctacatatatattcaaacatgtgtgaaatacttctatacaggtgattgaatttcactttattcctaagagcagaagactgcaaaatagtaaatatatacccaaaagggtctaatggattagtttttggcatatcagcacatgataatactatgaagccataaaaaagagagatctctatatgtattgatgggggaccatctttaagatatactgtggtgttgaacaaaacaacatgctgaaaatgtctcttattcttttagaatcaatataagtctgtgcttgtaaatgcagtaagtatctttggaagtatacctaaaaattggtaatagtgtttgactccagggaagaacagatgggtgccagagtgaaaaaaagatagcttttgctttttatgacttttggattctgtaccacgtaataattttgatgtaaattttgctgtgtgtgtttttacttgttcatgtagtgattttataaattactcttttaattttctatcaatgaatatcctgggataaacccctcatgatcataatgaataatgatgtgtggagagtggggagggtttacatatgaaaaatgtagaaaatacaaaaagtgtctatatatacaaaaatgtaagtgttaacatttttatatttgcttcaagctttttttttaaataaaagaaatgcaatattgcaattaaat

SEQ ID NO: 209136 - DNA, 809 bp, Homo sapiens
ctactactactaaactcgcggcccgtcgatcttctactgagaacaatccggcagtagttaacaaaattgtgaatgcatatatctctttctctagaaatttctcttttgggaatttattctacatatatattcaaacatgtgtgaaatacttctatacaggtgattgaatttcactttattcctaagagcagaagactgcaaaatagtaaatatatacccaaaagggtctaatggattagtttttggcatatcagcacatgataatactatgaagccataaaaaagagagatctctatatgtattgatgggggaccatctttaagatatactgtggtgttgaacaaaacaacatgctgaaaatgtctcttattcttttagaatcaatataagtctgtgcttgtaaatgcagtaagtatctttggaagtatacctaaaaattggtaatagtgtttgactccagggaagaacagatgggtgccagagtgaaaaaaagatagcttttgctttttatgacttttggattctgtaccacgtaataattttgatgtaaattttgctgtgtgtgtttttacttgttcatgtagtgattttataaattactcttttaattttctatcaatgaatatcctgggataaacccctcatgatcataatgaataatgatgtgtggagagtggggagggtttacatatgaaaaatgtagaaaatacaaaaagtgtctatatatacaaaaatgtaagtgttaacatttttatatttgcttcaagctttttttttaaataaaagaaatgcaatattgcaattaaat

SEQ ID NO: 209137 - DNA, 864 bp, Homo sapiens
gggtttatcccaggatattcattgatagaaaattaaaagagtaatttataaaagcacttccatgcattgctgtaaattggtacatcttctactgagaacaatccggcagtagttaacaaaattgtgaatgcatatatctctttctctagaaatttctcttttgggaatttattctacatatatattcaaacatgtgtgaaatacttctatacaggtgattgaatttcactttattcctaagagcagaagactgcaaaatagtaaatatatacccaaaagggtctaatggattagtttttggcatatcagcacatgataatactatgaagccataaaaaagagagatctctatatgtattgatgggggaccatctttaagatatactgtggtgttgaacaaaacaacatgctgaaaatgtctcttattcttttagaatcaatataagtctgtgcttgtaaatgcagtaagtatctttggaagtatacctaaaaattggtaatagtgtttgactccagggaagaacagatgggtgccagagtgaaaaaaagatagcttttgctttttatgacttttggattctgtaccacgtaataattttgatgtaaattttgctgtgtgtgtttttacttgttcatgtagtgattttataaattactcttttaattttctatcaatgaatatcctgggataaacccctcatgatcataatgaataatgatgtgtggagagtggggagggtttacatatgaaaaatgtagaaaatacaaaaagtgtctatatatacaaaaatgtaagtgttaacatttttatatttgcttcaagctttttttttaaataaaagaaatgcaatattgcaattaaat

SEQ ID NO: 209138 - DNA, 242 bp, Homo sapiens
tcataatggtcccctaatcaaggaaccctagattttaagaacttttctcagaaaataatgtcttctaccaaaacatactatgtcctcttcttctaaacatacaaaacctctttggaaaagttctttcacgtgggatccatgaaagcagggaagttgtttgcattattcagtgctgtattcttagcatctagatccatgccgggtagaaggtactttataacatttgttgaatgactgaatga

SEQ ID NO: 209139 - DNA, 427 bp, Homo sapiens
gtctgaataaaagataactgtacaaaaatcaattgttttttctgtattctagcaataatcaactagaaacagtatcaaaagaaaaacattccatttacaattgcaacaaataggtatatatatatttgctcttctacacataacctatttctggaagggagcagaactgggcaattcagggacagcaatggaaggggaacactgctatgttattttaaatactttttagtaagctttgaaccatattaatgtattacctgttcaaaattatacttaataaatttaacaagaaaaccatattgaagggcataaaaataagacctgacaagtgaaaaaacatcaagttttagaaaggatgatttaatactaaaatatacatttcttaatatataacttaatgtaaacctaataaataatttaatacaaa

SEQ ID NO: 209140 - DNA, 168 bp, Homo sapiens
atggctaaattgctaaacttaaaataattgccttatgaacagtcacattgattatgactaaaaaggacagaggatttgtgttctatttttagagtagatatacggcctttgttggggaggctgagggatgcatttaatcaatcaatcttctgaaagtataaactgtgt

SEQ ID NO: 209141 - DNA, 367 bp, Homo sapiens
tgattttatatcacttttggatgagatgaataccttcctaaccaaaacaaagaacaaatggaaaaaaacaactcaaaagcaaatcatgtattattacaacaagctaagaacggcttggatgagtaagtgcctctgctaattaaacacggcttccaattaattcctcagaaatcaaagttatcttctgtggtgaatatttccctacattcaacaggtttagagctataattgtaggtaaagcattcagttacacacttcatagccaatttaggaaggtccacctgatgtctcacagcaattacactttatgagcattttactgggatctcctttttgatggagagatgagtatctgtgaacactgaga

SEQ ID NO: 209142 - DNA, 804 bp, Homo sapiens
aagccaagcatttctattttgtccaaatgtgtcaatcaggggtctgtgcctcgttgtgtgtgtgtgcgctgcgtggctccacggcccccatcctagactgtggtccaggccagggctctgggctcagcagacagccaggctgcttccactggtctgtgaagcttctgtctcaatgctcaaggtggcctcagtgttcagcatggttgccagtgccccggtcattatgtttccattccagaggggagagaggagggagggatggtgggcggtgatcctctgggtagctctctgcccacctcttctgagactcccacgagggctgtgccgtaggccacacccactttgcattgctggcccccagctgcaaggggagcaggaaagtcaccttttagctgagtgcgtggccacacagaaaaatagtggggacagggagaggagaagtgggtttggggggagccccgccctcctaaccctgcctgctgccctctgtccccagcaggagctcccccgaggccatccaagcgcggtgcacccgccacccacagcgtcctccgcgcccacgttgccctaaaccccactgtgctgtgctctctcgcagttcctgcaggcgcgcgttctctctctgaatttgtttcatttcactgcgagttggggtcgcgggggtagatcggagctgcctcttgagaatagcagtgcccaggctttggcccaggtggccggaacgccccttggagcaccgacgccatcggctccgggaaatgcagcgagcacagagcccagtcccttggtctgaccgggggcgct

SEQ ID NO: 209143 - DNA, 575 bp, Homo sapiens
ggtttaattctcagaaaggaaggactgggacttattgctagtgaatcaccatttctcctgttacacccttgagctcctgctttagctcccatctcctccatgggggaacccagctgttctttcactgtagaagtgaagcttgaacaaagatgtcatgtggccagaatcatcttttagtctcaccactccacactgatggtcacatagaggtgtgagttgggaagttgttaaatacaagagggtttgagcttctggagaagaggaaaatgtaaaaatattttttcctttaagaaagataaaaaggtaagcctaaaccttggcggccaccgaagtcagctgttacgcatgtgtagttaaatttcactgtaaatatttcataagggttcttagaatggagccaggttgacatcacagccccaactgtaccaaaggaaccatttcattaaaataagccaacatttccaaagaaacacgaatgtctatggcagagttaacataaggtcagaaaatcctctggaagaaatttcggtatcaatgtttataatctctgcatttatggatttgcagtttgtgca

SEQ ID NO: 209144 - DNA, 255 bp, Homo sapiens
cagagaagttggctactcgggactgggactccttcttaatgaagcacttgttaatacttctcttattaaaaacctcacccatcaaatcataaatacagatcctgttattaatttcaaagatctactatctgtggtatatatatctcacagagcacatataaatgttagagtggccatctgcagaaaggttttgcaaattttgcagttccagccagatgcagcacatcaaatatcacagcaagtgggttggcaaga

SEQ ID NO: 209145 - DNA, 424 bp, Homo sapiens
tgaacctaaatctgggcttggtctgcagccaacctggaaattcactactgcaactccgttttctttttaacgagagcttcatacggttcttttaaactagaaacttctctttcttgtaattgtctctaatggcttccttgttcgaacaagcctttgctagcttctgtctgacccctttggctttgctttctgcctccttttatcctccagcctttcgtatagattccagaggaatcttcctcaaaggctgtgccactccctgttcaaaggctttctgtggctcctcattgcctagaaagcaagtgagtaaggccagatattgttagtggctcacttaccgcattccaggatcttgctctaatttccctttacaacgtcatcaaaacagctcacccccaagctccgacctcaactcccacttgcg

SEQ ID NO: 209146 - DNA, 240 bp, Homo sapiens
agtcttcttctttaattaactttggtattagtgtggacattttattttaggctttctctgcacctgcagctttgctcaacagctgaaggctttgcaaattttagagaggtttgaaaccactaaaccaaccactacaagcactaacagttctcacttttgcaggattcagctttgtctctttaagatcttcacaggtagatagttgctcaccctgctaggcattatgaaccaggataatga

SEQ ID NO: 209147 - DNA, 147 bp, Homo sapiens
  misc_feature (100)..(100): n is a, c, g, or t
cattttagtataaggccataggcaagtcacttaacctctggtatctgagtaaaactaacaccttagaagagtggtgcattagttaatgtttagaaacggnttcaaacacacaccagacttcttcttccaactgcggcaacccttttg

SEQ ID NO: 209148 - DNA, 568 bp, Homo sapiens
cttccagtgatctcactaattaggtaattttaggcttggctcggccaccataattaagaggaaccacacaccaggacatatgcagtagcgtagtaccagtgccattaggtccgtgattgctgacatcagcactcgtgtgtattctgatcattaaaacatttctttttaatgtttccctctatagcaccgtggtagctaagtcagagtggggggttttagtttctctgaattccatccttagaagttttcgctgaactagctcccagctagctgtaggagagatcacagaatattaaattattcagcaaacatttattaaactgcttctatgggctggggacccagggacacgaagctgacgtagatgtggtcccatcttgaaggggcctgtggtaccctgggaaagacggtgaaagaaacaactcaaatgaggtggaggaagggctggctggggatcctgcacaaagtgctgtgccagaggaattcatgtctgtccagtggacagggatcacagggatcaagaaggcacccagagagcttaggagagggcagagaagggcaccggttg

SEQ ID NO: 209149 - DNA, 368 bp, Homo sapiens
cgcaaaaccagtccctggctccaaaaaggttggggagcactactctaggtgttctggagaatactgaaatgattaaagggagaactaggggcagaaactagtaaatgactgtgtcaaggtcacatacagatatgccttattttattcttctctgctgtaatgtattttgcagatactgcatttttataaattgaaggtctgtggcaaccttcatccagccagtctattatcacaattttttcaaaacgtgctcactttgtgtctgtgtgtcacattttggtaattctcacaaaatttcaaactttttcattattattacatcagttaccatgatgtgtgattagtgatatttgatgtcattattgtaa

SEQ ID NO: 209150 - DNA, 698 bp, Homo sapiens
ttaggagtgtgatatggctgcaaagtccatccaagagccccttagacagctcccaggtctgccagaaaaaagcaattcatctttcctatacaggagtttaaggtcattttgaagtggatgaattgggaaacattatttttgtgaattgaatatattgtaggaaatcttgtatgctctaatctgctagttaatatactaatcaagaaaaggtaataaaaccacatagctaaaaagaaacatattgatttcagcgacttctgctaaagccagattatgtgaagattaaatctaaaatgtcagcaaaataatactgaatcgatctttcatcatctgtgtggcctgttttattgactcatttctttattgttattataccaatgaagcatggaaatgctgtcatggaaaaatccaaatggcttattgtgttgccaagcattttattagagtcccttgtcaatttttccttgaaaataaagttatttttcaggaagaatgccttggctatgtccataattctaaccatatcaacatcgtttttaggttgattgattttaacagtgttagatcaatgaggcatagctcataagttaatgatcacaaggttggggaaaattgatctcttctgaaaaacgtgttatcacacctagtgattgattagtgttctacaacaatcttccatgcagcataatcttctgtga

SEQ ID NO: 209151 - DNA, 192 bp, Homo sapiens
ggaaatggctgcaattatttagcttgtgttgagactcctttaaaataagactttgcagctcattccatcaagaggcacagactacttctctacctcttgaatttggtttgggccttgaccaacagaatatagcatatgtagaaagccatgtctcaaaatctcctgtatgctgctttctctctccttcccctc

SEQ ID NO: 209152 - DNA, 393 bp, Homo sapiens
ttcatcatgtaaagcacttgggcctttctaaaagatgcaaatcactctttattattttgatgagctaacaagatgaattcatctctagaacactataaaaactaaattgtgaaaaatggcgccaaccatataacctgtccttgatcatacctattatttggtaactctgtggggaaactagaatcttttagaagtattatttgtgtcctaactatttaagtggatgatttaccctcctctaggaaacttaatattgagagtaggctgagaggtgatcacgttaatctggaaaatttttcataaattaaggaaattgagtttaatagttacagcaaattctccacatgcatcatgtttctgtactgagtgctgaactatacaataaacaaggaa

SEQ ID NO: 209153 - DNA, 516 bp, Homo sapiens
attttgtgagttggtacatattttggaagctgtcaaaatctaagtagaaaacaaatcacaaaggaagagaaccaacttgagaccatcttcagaaaaaaattacaaattcagttcaagagtcggaagtgatgtcaaaggacagatgtttctccttagtaaacaaactagagctgaggtttcccatcgtgcgacaagaaaggtgcatggaaatgagtaaggtgcagataactttaactgggtgcctccatttcctgaattcctaaaaaggcagccccagcatcactcatgagctcagaagtgaggatggggcaagtcctggggcaatagaaatcagctgcggaccaagaagagagtgggagtggcaccacgcccaagaggagtctcagaaatatacaatagatgaaggaagcagggttcccacctcactgccattgaaacaatgctaaatttacatatttttacacacattttatggatattttggtgtagcaaatgatctacctcctctggcctcat

SEQ ID NO: 209154 - DNA, 284 bp, Homo sapiens
gttggtgctagtgttcccatttacagaggcagagactgaggcttggagatggagaatcacctatccagagtcactactgggtttggaatccaggcctgtggggtgtgaaactgaggtccccccagcactcctgctgcagggatgtggcatccccccccggggtgtggctggggcatgctgggacctgcaccctctcctctccgccacactgggccttgctaagccttggagagccccctagacctacctgcagtgacttgttccaggaagcgcgtcctggccag

SEQ ID NO: 209155 - DNA, 534 bp, Homo sapiens
gtgtctggccaacaagcattttaaaatgcctactgtgtgccagccttatgcctggcacttgggtaaatagtgttaaatgacacaatgtccctgccatcccgatgctggtaatcatgggaggcagatgacaaatgagtaaacacatgccaaatgtggtaagtgcacactgatggaggcagattgtttgctgttaaggagaataacagtgaggaaggagacccactttttttttttttttttttttttttttgagacagagtctcactctatcacacaggctggagtgcagtggtgcgatcttggctcactgcaatctccgcctcctgggttcaagtgattctccttcctcagcctcccgagtagctgggattacgggcgcccgccattgcgcccagctaatttttggcatttttagtagagacagggtttcaccagggtctcaatctcctgacctcgtgatccacccacctcgacctcccaaggtgctgggattgcaggcgtgagccaccgcgccgggcctggggtttaaatggt

SEQ ID NO: 209156 - DNA, 863 bp, Homo sapiens
gggtgggaggagggagaggatcaggaaaaataactaatgggcactaggcttaaaacctgggtgatgaaataatctgtataacaaacctgcatgacacagatttatctatgtaacaaacctgcacttgtacccctgaacttaaaagttaaaaataaactttttcaaattctcaaaaataaatgagaattacagaattagaagccaaacacattgatatttactatgaaatagaagatcagtatattagtttttatagtgagaaataaaatataaagcaaagtaagcattcgggtcttctagtgttctgatatcactgtaattgaaatttgtttgcatgtggaatttatagtagttaataagcgcagattatttttctggctggcattgtgctagttatttaacatatgatatctcatttaattctttcaacaaccctagcaggtagttgttatccttatttcacttaagaagaaacagactcagcatgggttaaataatttaccaatggttaaaaagccaagtaaggggcagaaacaggattttgctcatatatatgactctaaacacatacttattctcttgtaatatgctgttttctcaacattgcatcactgatacttagagctacaagaattattaggtacatgtgttctgaaagaagtctgaaaatttaccaatttttgtatatacaatgcttgtgaagtatttaaataaaatgtagtgggcacattcaaaaaaaaaaaaaaaaattttgggcgggccgaaaattttaaacatttggcgcgcgccggagaaaggtgttcagaaacggcgaagggggtcccaaaaacgggggcggaacaggtgggttgtaaaggaaacgg

SEQ ID NO: 209157 - DNA, 550 bp, Homo sapiens
cttaaaatttttgtttatgtattacttgtgtacagaattgctcttttcatatgagataagtggtatatgaaagtagcaaaaatatgcactaagtcaattaccaaccaaactttgaacatcgtgtgttatttcattccagcaatggctagatgcctcacctccaagatcatcagtgaaatctttaaagtacactataagggaaattttaagctagctattttgaagctaagcctatatttatcacaagcaattacattctttcttactgtacttcaacttgttattccttgtcacacatatatgaaatttttatatcatccaaactatactgtactaattagaactagctacaaggatggcctttgaagtattatttataaaagctggaaagaaaaattagaaacaacataaatatctaatggtaagggatgggttaaatgaacttgagtatgttcatgcatggagatactatgcagtcaacagtgaaaaatgttcaatatatacttttaagtaaaaatgctcatatgtttaaaatactggtacacatttc

SEQ ID NO: 209158 - DNA, 782 bp, Homo sapiens
cattgctcccatcagcgatctggatactctaaagaaaatttagtgttatattctaaggaataatcctgccatatttctgggctctgacctgatgggagcaagactggcgccatcgtgctctcatcagtaacaacatgacctactgtaagtagtaacaattctgatttatgagtcctggaacgaggtttttgctttataatgaagttacggaatctttgggttggaaaggaccttattaaaagttatggctgatttttttttttaaagaagctgctaagcattggagctcagaatatatgctttttaattcactgaagtttaaaaggctagtctactagaaaagactcaaatagagaaaactctccttgctgcttttcaatctaggtgtgcaagctctacagctactactggctccatagttagcattcataccaatgcatacagattatccagtagatagcatagttatctatctactattactagttatctgtaatatctactattatccagtagaaagaatctgctgacatctgtattgttttctgtgtcctttaccccttctgaagttgtcatctctaattcttgtttatgtccagtaagttattttattgaaaagcagcctgttttgaaagatgtgtttttctcccacagatctcctgtgtctcatgatcaggtgtggagttgttaaatatttggtctaattcttgtttatttctataagtcattttattgaaaagcagcctgttttgaaagatgtgtttttctgccctggatctgtt

SEQ ID NO: 209159 - DNA, 288 bp, Homo sapiens
gcaacaagttttatcaagcagaaaacactatatagtaggcatgtgacaaataattattttacgtaaatctcagtgtgtcaaatttgcttaacaatgtccatcaactgactaagttctctagcacttctaaatacttccttaatttatattcttgttcaaagtttggtgaaagattcagcttaccccaatttcctgaattagaaagaatcttttgcctttagatcacccctcaaaatttcttaaaagtcttcaagattttaattattcacaacttaaaacagagattat

SEQ ID NO: 209160 - DNA, 554 bp, Homo sapiens
acgatcaggatggagagaagcagccagatatgagatctttaggaaacagaatgatcagaattatcaggtgataggttagatgtgagtgcatggagagggtaaggaggccaggtagattcctgggtttctcttgaacaattaggcagacaatggggtaaagttagtaccgtttgctgaattagggtagccaggagcagaagcaggtttgtgagagaaagagaaggtagggctgcattattgccaagtagatatcaaagtggaggtgtccagttttacaaaaacgtcctttgtagcttaggaaagagatcagggctgcagacgttaagatggttatctgccagtgctatctaaataggcaacaacaatcattataatagtattcaaggggaaaaactggtagcctctcactgaggcccaagaaatcacaaggcatgaattctcacattaaaatgcttgtttccaactcaccaggctgtatacattcaatatgtgtagcttttgtatgtcaatcttagttcaataaagtagtttttaacaatatggtgcacaaggta

SEQ ID NO: 209161 - DNA, 642 bp, Homo sapiens
caaaaaatgtagttggaaagaatgaataagacttagtatttgatagcacaacagggggacaatagtcaatagtgatttaattgtacatttaagaataactaaaaaagtataactggattatttgcaacacaaaggataagtgcttaaggaggataccaaattttccatgatatgattattacacattgtatgcctgtaccaaaatatctcatgtaccccataaatatatacacctactatgtacccacaaaaataaaaatttttttaaatgttttaaagaatgggtaagagtctaacctaccaaatgagcaccaaagtttctacgcattaaacaagaaaaccttgttgtatcctagatcatatattgaagttcatgcaaaaaccattgctctctagagcagaattagagacaaaacacctgaagaaacacaaggaagcaaaaccagaaactgctgcaacatcctcaagccatctaagaagctccagcgttttttcaatgtggttctaacagtgtgtgattaggatgctgcaaaattctcacacttggtcagactactcagttcttcaacatgacaatttactatttttagtttttttgtaccaatgttctattcctatttggcatgatacctaaaggaaaac

SEQ ID NO: 209162 - DNA, 110 bp, Homo sapiens
gcttaatgctgtgtggcttgactaccaaaagccttgctgcttccactctgtggctttgttaacagaagctttccttcctccacgtcctcaccccaccccgctgaaggcag

SEQ ID NO: 209163 - DNA, 1017 bp, Homo sapiens
tgtcctcatgaatggggttggtgcccttataacagaaacccaagagaactgtcttgctgcttctattgcatgagaaggcaccacctatgaaggagagcaagccctcaccagacactgaatctgctggtaccttgatctgggacttcctagcttctggaaccattaggaaataaattcctgttgtttataagcctccctgtttatggtaatttgttatagcagcccagcagactaagaaaggggaaagagtcctctttgtcataggaaaaagtccaagagagaccagatgcaagcttccagttgttctcctcaactggagttatacgagcagtgcctaattctccttgcaaggatgtgtgacaacacacttagggtattgccacccaagaagactcacctgagccttggtgtccagcatagttagaggacgttggtcatatagtcatggctgaccatctgggtagctgagcctccttgcagaggtagcttgcagaggtccagctaatgttgagtggcccaaggtcctcaccataaatcacagttagcacagacaagctggcatggctcaggcaggaagctgcaggtgcttgaggaaggacactatctatagaaaccatgagtagcctccaaggtgggctgaggggtaggcagggcaccaacagccccagctacactccctcagggacagtcttgccatttcccgtttttcattcttataaacaatgccctggtgcaggggtcagcaaacttttctataaggagtcagataatcttttttttttttttgtattcccttttggcaatttgtttaattgagataaaattcacataacttaaaactcacccttttggtgtatacgattcagtgctttttagtatattttcaagattgtgcaaccaacaccactatctaattccagaacatttttatcaccccaaaaaggagccctgtgccaattagctatcacaccccattccctctttcctctatccttgataaccactaatggtaatttc

SEQ ID NO: 209164 - DNA, 345 bp, Homo sapiens
cgtgaacttcaaaacctgattggctcgctctccccagtaaaaaatctttagtattttaaggaaaggtacagttaacaatttcttacccaaaatatttgatgctagatgtgacattttttggattttaggaagataatgtggtgagtatatctgtttatgtaacacccccagtgggtcctgggcagcaacccataatcaaatgtactaatatttccattaagtgagatgaatggggactataaagcttcacatcaattttggccaccaaattttgttactaaaacttttgcttttcagagccctttggatttctgaattgcagaccacggatcgcggacctgtatg

SEQ ID NO: 209165 - DNA, 225 bp, Homo sapiens
ttaaagcaacaaaagaacatgccacatgtagagttaatgtaccatatattacctgaaaacgatagacttctattgccgtgaaaactacttgacagcattttccaggaagccaaattgtttggtttttaatttacaaaatcatgatataggaagaaaacaaacctcacacatatgtaggcacagaaaatacttttatgactgttgacttgggaactggaagtaaca

SEQ ID NO: 209166 - DNA, 230 bp, Homo sapiens
taatacccaacgggagcaaatcttactgaaatgttaagatcgagatgtcgctcttagaaaagccttggaaaattgtcacagcctctgaataagccgctgacaatctgcattgtcaattttcattgaatatgtagagtttttaatatttccttaatactcttttttttttttttttttttgggaaagtgctttcaccgttgtcccagggtggagttgcgggggtgcttccc

SEQ ID NO: 209167 - DNA, 521 bp, Homo sapiens
agctaacaataggcaccttcagaattatgatgattaattggctcgtgttttctcaacactgtcaattgttcttgaggtcactattgttacccctacttctatgcacccaccatgtatgcatggaatgtgctagaaggggaagaggtagtgggaggtgatcctggggcaaatacagctaagacctccccccatcctacatgcactcattcttctctttcctctgttagtctggaaggggttggggctgttggaagaaaaggaacataaagcagagagaaggatgcagtgagggtgtctgggactgttggcaggcagcagtcgggtttgggggctacagggctctgcaattgaggaagccagaggtggatgaagagttggccacacctctcccctaaagctgcagaatcttctgactataaaaagagctggtgcattcagaatcctctacaaccagtccttcccctgaccttcccagaagcttcgaaccctcagtgctgagctgccaagacgagctgggtgac

SEQ ID NO: 209168 - DNA, 298 bp, Homo sapiens
aaacatgaaccaagaggtttatttgattgtataggtcaaaagacttgtggggcttgagggcctttcaaatcggaagtccagcttatctatttatagcaagaaagaggacagaaaataccatgggcatctgaaatgtactgttttataaggtggcatttgtgatttttctttagaagaaaaaaaagagatagagctctaggcatagtgtttgactgaagtggaataccacatgtgttttttttggtgtgtatttgctttagcaaagtaataaaacaaaaatttataaagcgaaggtttt

SEQ ID NO: 209169 - DNA, 316 bp, Homo sapiens
tctgttcatttcaccccatccccaactctgaacccaaacaggtttctacttgtcttttcctgtattctacttattcttttatatcgttactttaaaaatcttctctaacatagtgagacattcctcaatcttcaaaaatttctggaactattaataatccttaatatctaaaacaaaatataaactctcaaagagggcaaaaacccatgttatttgatgacaagtgactaaaataaatcctggatcataatagatacttaatttaccaatgttgaaaaattaaaaaaaatattgatgaaggaaggaaggaagaaag

SEQ ID NO: 209170 - DNA, 377 bp, Homo sapiens
tcaaatctgtatatcaggctagcagagaagtgtttcccaaagcgctgcaccagagagaagctgatctgagggcacgatgggaaatgtatcacgaacactcactggctccccagtgtgtatttatccagatgtccttttgggatgggacaggaccggtttttaatgactctgagctgccttccctaggcactaggagcctacattttgctgactgtggaagctctttgtgtgagctccacgggcagctgtgtgcaaggaagatccagctcttgtctcatccctggaagcttggacaagtcagtttccccatctctgtggggattataacctctctcatggggacttggttgtaacagattcttgtggactattttgtt

SEQ ID NO: 209171 - DNA, 442 bp, Homo sapiens
ctaagataagtaagaggaccatattcttagaaattgaaggaagggatacgggctgctttcaggacaaggatataaagatcaatttgtcatatttcattttgcaagaatttgattccatgtcttacagttgggtaaaatgttcaaggggtgccaggtatggtggctcacgcctgtaatcccagcactttgggagggtgaggtgggtggatcatttgatgtcagaggttcaagaccagcctggccaacatggtgaaaccccatctctactaaaaatgcaaaattagccgggcatggtggcaggcgcctgtaatcccagctacttgggaggctgaggcaggagactcacttgaacctgggaggcagaggctgcagtgagccaagaacgtgctactgcactccacccagcctgggcaacagagtgaggctccgtctcaaaaaaaaa

SEQ ID NO: 209172 - DNA, 441 bp, Homo sapiens
cacaaaaggtagcaaaggatagacatataaatcagtggaatagaattgtgagtccataagtcaacctgtacatttctggtcaattgatcttcaacaactgtgccatgataattcaacagggaaataagaggcaattcaacaaatggtgctgggacagctggatatccacatgcaaaaagaataatgctggaccactatcttcacccaatatacaaaaattaaaatggatcaaagatctaaatagaagagctaaaacaatacaactttagaagaaaacataggggtacatcttcatgaccttcaatttggcactaatttcttaaatatgacatcaaatgcacaagggagaaaggaaaaaaaacagataaattggatttgataaaaattaaaaacttttgtgcatcacagcacattatcaagaaggtgaaaataacctacaga

SEQ ID NO: 209173 - DNA, 351 bp, Homo sapiens
actccatcggccactgacagtcttattgcattatttcaacggcacaagcaatcatttacacttgttattacccaggggcatttcaaactgttactgaaatgcatccatccctggagtaaccatctgtgaatggtaatgccataaggtagagagactaaatctaattgatatgcaaaaaggagaatttcagctgtccagctatggagattcaaattcaacctttaataggctgaggatttcagctaaatttttaaaatcatgatatctagttcaggcactcatcttttaggtttctcacagattaaagtacagccgtcttccttgaagtaagaacatctcaaagtcaaaaat

SEQ ID NO: 209174 - DNA, 549 bp, Homo sapiens
agcagggctatcctctagtggccagtttgggaagcttggccaatctgtataaacagtccttacgtcttttacttttgatcgtcaccttcatgagagagacagagacagcaaaagtggaactaaagattccacgtggggcagtagtagtcaaatgaactagaaatggaggaggagggtacatttcttatatagcaatactctatccaacaggactttattcctttgactcttgacctaaatgtcccctaagtaatgacttcccaggccaccctatcaaaattttttacctccccacacctgatacttcctgtatttcctcccttatttaacttctatccttagcacttattactatctaacatgctatattttactcatgtatttgtttcacgtctaaagccctctttagaatgtaagctacatggagaatagggatttttgtctctttcattaccaactatatctccatagcatctggaatagcacatcataaaccttcatgaatatttaattgacaaatgaattgtataattataataagtgcctatt

SEQ ID NO: 209175 - DNA, 547 bp, Homo sapiens
tccgcggacgcgtgggcgccatcacgcccggctaatttttttgtgtttttagtagagacggggtttcacctgtgttagccaggatggtctcgatctcctgacctcatgatccacccgcctcggcctcccaaagtgctgggattacagagttttgtgctatcatcaccagagccagcaattcaacctaaattctgagtgtaatggaagccgttaatcactatcaagttcatcatttttttttcatggctggagtgcagtggcatgatcatggcttcctgcaacctcgacctcctgggctcaaggaatcctcccacctcagcctcctacacagctgggattacaggtgtgtgccaccaccagaagctatatatttttttttttttttggaaagttggagtctcactgtattgccagggctgatctgtatctcttgccctcaagtgatcctcctgccttggccttccaaagtgctgggattatatgtgttaaccactgcacctggaataatttttgatgcagatgcaaacctaatgaaatataaaaagat

SEQ ID NO: 209176 - DNA, 4956 bp, Homo sapiens
  misc_feature (2865)..(2865): n is a, c, g, or t
gctcgcgcgcacctgcgggtcggacccgctgcctaccgcgtgcccggcgtcctcgtcgcgcgagttgccggtcccgcggggcctgggctgcgggcccacgggtcccggggatggcgtcggagccgcgctaactccgtttctccttggaccaagatgactgatggaaaactctccacctctacaaatggcgtagccttcatgggtattctggatggtcgaccaggaaacccccttcagaacctgcaacacgtcaatctcaaggcgccccgactcctctccgcgcctgagtacgggcccaagctgaaactcagggctttagaagaccggcacagcctccagtccgtggactcggggattcctaccctggagatcgggaacccggagcctgtaccctgcagcgcggtccacgtgaggaggaagcagtccgactccgacctcatccccgagcgggccttccagagcgcctgcgcgctgccatcctgtgcgccaccagctcctagcagcaccgagcgggaacagagcgtgcgcaaatcctccacgtttcccaggacaggctatgactcggtaaagctctatagcccgacctccaaagccctgacccgcagcgatgatgtctccgtctgcagcgtgtccagtcttgggacagagctgtccaccacgctgtccgtcagcaatgaggacatcttggaccttgtggtcacgagcagctccagtgccattgtgaccctggagaatgacgatgacccacagtttaccaacgtcaccttgagctctatcaaggaaacccgtggcttacaccagcaggactgtgttcatgaagctgaggaggggagtaaattgaaaatattggggccatttagtaacttctttgcaaggaacttgcttgctagaaaacaaagtgcaaggcttgacaaacacaatgacttgggatggaagttatttgggaaagcgccactccgagagaatgcccagaaggattcaaagagaatacagaaggaatatgaagacaaggctggaagacctagcaagccaccctctccaaagcagaatgtgaggaagaatcttgactttgaaccactttccaccaccgcactcatcctcgaggacagaccagcaaatctcccagcaaaaccagctgaagaagctcagaagcacagacagcagtatgaagaaatggtggttcaggccaaaaagcgagagctgaaagaagcccagcgaaggaagaagcagctggaagaaagatgcagagtcgaggaaagcattggaaacgctgtgctcacctggaataatgagatcttacctaactgggaaacaatgtggtgctctagaaaagttcgagatttatggtggcagggaatccctccaagtgtgagaggcaaagtctggagcttagccattggcaacgagttaaatatcacccacgagctctttgacatctgtcttgcccgagccaaggagaggtggcggtcccttagcacaggaggctctgaagtggagaacgaagatgctggtttttcagcagcagacagagaagccagtctggagcttattaaactggacatttctagaacatttcctaatctctgcattttccagcaaggtggtccatatcatgacatgttgcacagtattttgggcgcttatacttgttaccggccagatgtgggttatgtccagggcatgtccttcatagcagcagtgttgatcttgaacttagatactgcagatgcctttattgccttttctaaccttctgaataaaccctgtcaaatggcgttttttagagtggaccatggccttatgttgacttattttgctgcatttgaagtattctttgaagaaaatttgccgaaattatttgcgcatttcaagaagaacaacctaactccagatatctacctaattgattggatctttaccttatatagtaaatctctgcccctcgacctggcctgtcgtatctgggacgtgttctgtcgcgatggggaagagttcctgttccgcacggccctgggcatcctgaagctgttcgaggacatcctgaccaagatggacttcattcacatggcccagttcctgacccggctgcccgaggacctgcccgccgaggagctgtttgcctccatcgccacgatccagatgcagagccgaaacaagaagtgggctcaggtactgactgcattgcagaaagacagccgggaaatggagaagggaagtccgtccctccgacactgaggctgcagcgggaattcgcactcggcaccaatcagagccccatgccgcggcccctctgttgtttcagactgacacccgggcagccgagaagaacagacgctctttaagtttgattcctaacactggagttggccttaaacaaaacaaacacaaaaacttttaaagaattaaaccaaggcttagccttaagcagctcagtggaaggatgagctgctgcggaccacagccagccactgcatctgctgcacagttgaacgatgggcagtggctcacccccactcctttatttcagcaaaagctaattaaattgtaatgtttctatgtcaactactgggaagtatgttacagtcttagccaggatgcatgagagatgttatttgggagacttgagatgctttggctgatatttacatgttttcgataagaaagggatcgctgattgagttattgagatagtttttccagagctggaggtcacgtttctaaaactcacctacgaaagatagcattaaaggaacaggggctctctgaggatggccactgatgtgtgtttgtggatacctgggcatcgacccagcctgcaggtgagctctgggccatgttgccttgacacagtcacagtgtagaggntgcaggtgcacacgtgggctccagtgggactgcgctctgggagactgctccctggcatcggtcctgcggaggtggaaagttcgagaggaggagctatttgcgaggaagccctgtggcaatagagataggcttaaaagcggagagaacacagagtggaatcagccccctgtaagtaaaagggtagagaaagagatgtgtggctgggccctctcccacctgcctgttcagtggaggccagggcagcagcccagaacagcacatgtgggggaggtggccccttgtgccagcagtggctcctctctgcctttgagccctgcacagctggacccatcctaagtgccagtgagtccctcacacatttgactttagaacgtgtgcttcatgacccgttgtacagacggaggagcgagcaacacacgtctaacagcctagacaatctcgtcagatgctcatactggaccatcagcctccccattttagctgactttcccagggtcgttggcaaattttttgttctgtcttttccttgactaattgtagaactttgtgtgaggactttggttatccaaaatcacagaaatgaaccgttttgcagctgcgcagtctaaagggcaggccagtgtctggaagcagggcccacgtggcggtccgctggcaggctggtcctggggagcattctgcggacccggtcacgggcttggttagtcatgcgtacatgtgtgccttggggtgctctgcactccacggcccttctcagccacacttcccaccccagggggtgcccccaggctgatctcatttctgatgttgagggctgtttggctctgtctgtatagcttgtaacaggagccttgggctaggggctggggaaggaaagccgagctggcattcgttctctggactttttatgcctgccatacccgctaatgctcctcgaggtgcaggagcaggttgctgagccagtggctgccccgtgccctccttcccagcactatcatgtgtcacgtttcccggactctgcccctacatctcagctgaatctccagggaggctgcagagcatcgtggagaccactttctgcctcggcctttaaatgctgactcacctcctctcggaggaggcgtcctgtcttcacgggggggtcccggtggcctccagacgtagccatttcctgacatcaagatgttgaatgtaatctggtctgagctgggcctgtgggaggggccgcctgaggcctgtgcgctgttgtcctcgcagatgtacttatttttgttcatgttacgggcgttccgttccttaaagatgtatatattttcttactgtacataaagatgttccttaagtcgtacagaaggtggcgcggcaaagggcctcgtgcagtgtgttcagattgcccctggggatcttctgtgtcttcagcgcccagccctgcgtgttcctggtgaagcagtttcacatcagtctctccagatagcactacgatgtattccgcttctgaacaggatcccatgccagtgtggaacaccttcccaatcttagttcagaagtggcttgtatgacctgttcaggggtcacatgaggtctcgccagtttcctgggtcctcttcagaggccagaaagttctaagttctgagtccccggccagggtcccttaacacctcggcacagaggctgttggcaagtgtagaggctgcctctgtgtgtggtttaagtaaactggaaatgagacattgacgtgctgctcctccagaggtctgcacactccacttcacatgccgttgactctcacagtctaagacttcagggccgggacctttgtccagcctgcacagtagagtgaggctgcctctcccgccaggcattgggatcccatttagaaacggcattcacttcagaaggtactttttaactgctcagtttttgactattttaaatagtttgctgaaaactcctgataacacttgctacatatcatgttttaattgcttgtacagttaacctttaattttatttagtaaagtgtatcaaagtaggacttttttgaattgtaaataggtggttttattaaataaaagtcaatgtaaaattgtt

SEQ ID NO: 209177 - DNA, 4048 bp, Homo sapiens
  misc_feature (1957)..(1957): n is a, c, g, or t
tatcatatcgtcgaccaggcgtcgcggacgcgtgggcgctgggcatggatgcctccgtgcgcgcgcctctaaggacccggcgtacatggaatatgaagacaaggctggaagacctagcaagccaccctctccaaagcagaatgtgaggaagaatcttgactttgaaccactttccaccaccgcactcatcctcgaggacagaccagcaaatctcccagcaaaaccagctgaagaagctcagaagcacagacagcagtatgaagaaatggtggttcaggccaaaaagcgagagctgaaagaagcccagcgaaggaagaagcagctggaagaaagatgcagagtcgaggaaagcattggaaacgctgtgctcacctggaataatgagatcttacctaactgggaaacaatgtggtgctctagaaaagttcgagatttatggtggcagggaatccctccaagtgtgagaggcaaagtctggagcttagccattggcaacgagttaaatatcacccacgagctctttgacatctgtcttgcccgagccaaggagaggtggcggtcccttagcacaggaggctctgaagtggagaacgaagatgctggtttttcagcagcagacagagaagccagtctggagcttattaaactggacatttctagaacatttcctaatctctgcattttccagcaaggtggtccatatcatgacatgttgcacagtattttgggcgcttatacttgttaccggccagatgtgggttatgtccagggcatgtccttcatagcagcagtgttgatcttgaacttagatactgcagatgcctttattgccttttctaaccttctgaataaaccctgtcaaatggcgttttttagagtggaccatggccttatgttgacttattttgctgcatttgaagtattctttgaagaaaatttgccgaaattatttgcgcatttcaagaagaacaacctaactccagatatctacctaattgattggatctttaccttatatagtaaatctctgcccctcgacctggcctgtcgtatctgggacgtgttctgtcgcgatggggaagagttcctgttccgcacggccctgggcatcctgaagctgttcgaggacatcctgaccaagatggacttcattcacatggcccagttcctgacccggctgcccgaggacctgcccgccgaggagctgtttgcctccatcgccacgatccagatgcagagccgaaacaagaagtgggctcaggtactgactgcattgcagaaagacagccgggaaatggagaagggaagtccgtccctccgacactgaggctgcagcgggaattcgcactcggcaccaatcagagccccatgccgcggcccctctgttgtttcagactgacacccgggcagccgagaagaacagacgctctttaagtttgattcctaacactggagttggccttaaacaaaacaaacacaaaaacttttaaagaattaaaccaaggcttagccttaagcagctcagtggaaggatgagctgctgcggaccacagccagccactgcatctgctgcacagttgaacgatgggcagtggctcacccccactcctttatttcagcaaaagctaattaaattgtaatgtttctatgtcaactactgggaagtatgttacagtcttagccaggatgcatgagagatgttatttgggagacttgagatgctttggctgatatttacatgttttcgataagaaagggatcgctgattgagttattgagatagtttttccagagctggaggtcacgtttctaaaactcacctacgaaagatagcattaaaggaacaggggctctctgaggatggccactgatgtgtgtttgtggatacctgggcatcgacccagcctgcaggtgagctctgggccatgttgccttgacacagtcacagtgtagaggntgcaggtgcacacgtgggctccagtgggactgcgctctgggagactgctccctggcatcggtcctgcggaggtggaaagttcgagaggaggagctatttgcgaggaagccctgtggcaatagagataggcttaaaagcggagagaacacagagtggaatcagccccctgtaagtaaaagggtagagaaagagatgtgtggctgggccctctcccacctgcctgttcagtggaggccagggcagcagcccagaacagcacatgtgggggaggtggccccttgtgccagcagtggctcctctctgcctttgagccctgcacagctggacccatcctaagtgccagtgagtccctcacacatttgactttagaacgtgtgcttcatgacccgttgtacagacggaggagcgagcaacacacgtctaacagcctagacaatctcgtcagatgctcatactggaccatcagcctccccattttagctgactttcccagggtcgttggcaaattttttgttctgtcttttccttgactaattgtagaactttgtgtgaggactttggttatccaaaatcacagaaatgaaccgttttgcagctgcgcagtctaaagggcaggccagtgtctggaagcagggcccacgtggcggtccgctggcaggctggtcctggggagcattctgcggacccggtcacgggcttggttagtcatgcgtacatgtgtgccttggggtgctctgcactccacggcccttctcagccacacttcccaccccagggggtgcccccaggctgatctcatttctgatgttgagggctgtttggctctgtctgtatagcttgtaacaggagccttgggctaggggctggggaaggaaagccgagctggcattcgttctctggactttttatgcctgccatacccgctaatgctcctcgaggtgcaggagcaggttgctgagccagtggctgccccgtgccctccttcccagcactatcatgtgtcacgtttcccggactctgcccctacatctcagctgaatctccagggaggctgcagagcatcgtggagaccactttctgcctcggcctttaaatgctgactcacctcctctcggaggaggcgtcctgtcttcacgggggggtcccggtggcctccagacgtagccatttcctgacatcaagatgttgaatgtaatctggtctgagctgggcctgtgggaggggccgcctgaggcctgtgcgctgttgtcctcgcagatgtacttatttttgttcatgttacgggcgttccgttccttaaagatgtatatattttcttactgtacataaagatgttccttaagtcgtacagaaggtggcgcggcaaagggcctcgtgcagtgtgttcagattgcccctggggatcttctgtgtcttcagcgcccagccctgcgtgttcctggtgaagcagtttcacatcagtctctccagatagcactacgatgtattccgcttctgaacaggatcccatgccagtgtggaacaccttcccaatcttagttcagaagtggcttgtatgacctgttcaggggtcacatgaggtctcgccagtttcctgggtcctcttcagaggccagaaagttctaagttctgagtccccggccagggtcccttaacacctcggcacagaggctgttggcaagtgtagaggctgcctctgtgtgtggtttaagtaaactggaaatgagacattgacgtgctgctcctccagaggtctgcacactccacttcacatgccgttgactctcacagtctaagacttcagggccgggacctttgtccagcctgcacagtagagtgaggctgcctctcccgccaggcattgggatcccatttagaaacggcattcacttcagaaggtactttttaactgctcagtttttgactattttaaatagtttgctgaaaactcctgataacacttgctacatatcatgttttaattgcttgtacagttaacctttaattttatttagtaaagtgtatcaaagtaggacttttttgaattgtaaataggtggttttattaaataaaagtcaatgtaaaattgtt

SEQ ID NO: 209178 - DNA, 1887 bp, Homo sapiens
  misc_feature (1817)..(1817): n is a, c, g, or t
  misc_feature (1826)..(1826): n is a, c, g, or t
gctcgcgcgcacctgcgggtcggacccgctgcctaccgcgtgcccggcgtcctcgtcgcgcgagttgccggtcccgcggggcctgggctgcgggcccacgggtcccggggatggcgtcggagccgcgctaactccgtttctccttggaccaagatgactgatggaaaactctccacctctacaaatggcgtagccttcatgggtattctggatggtcgaccaggaaacccccttcagaacctgcaacacgtcaatctcaaggcgccccgactcctctccgcgcctgagtacgggcccaagctgaaactcagggctttagaagaccggcacagcctccagtccgtggactcggggattcctaccctggagatcgggaacccggagcctgtaccctgcagcgcggtccacgtgaggaggaagcagtccgactccgacctcatccccgagcgggccttccagagcgcctgcgcgctgccatcctgtgcgccaccagctcctagcagcaccgagcgggaacagagcgtgcgcaaatcctccacgtttcccaggacaggctatgactcggtaaagctctatagcccgacctccaaagccctgacccgcagcgatgatgtctccgtctgcagcgtgtccagtcttgggacagagctgtccaccacgctgtccgtcagcaatgaggacatcttggaccttgtggtcacgagcagctccagtgccattgtgaccctggagaatgacgatgacccacagtttaccaacgtcaccttgagctctatcaaggaaacccgtggcttacaccagcaggactgtgttcatgaagctgaggaggggagtaaattgaaaatattggggccatttagtaacttctttgcaaggaacttgcttgctagaaaacaaagtgcaaggcttgacaaacacaatgacttgggatggaagttatttgggaaagcgccactccgagagaatgcccagaaggattcaaagagaatacagaaggaatatgaagacaaggctggaagacctagcaagccaccctctccaaagcagaatgtgaggaagaatcttgactttgaaccactttccaccaccgcactcatcctcgaggacagaccagcaaatctcccagcaaaaccagctgaagaagctcagaagcacagacagcagtatgaagaaatggtggttcaggccaaaaagcgagagctgaaagaagcccagcgaaggaagaagcagctggaagaaagatgcagagtcgaggaaagcattggaaacgctgtgctcacctggaataatgagatcttacctaactgggaaacaatgtggtgctctagaaaagttcgagatttatggtggcagggaatccctccaagtgtgagaggcaaagtctggagcttagccattggcaacgagttaaatatcacccacgagctctttgacatctgtcttgcccgagccaaggagaggtggcggtcccttagcacaggaggctctgaagtggagaacgaagatgctggtttttcagcagcagacagagaagccagtctggagcttattaaactggacatttctagaacatttcctaatctctgcattttccagcaaggtggtccatatcatgacatgttgcacagtattttgggcgcttatacttgttaccggccagatgtgggttatgtccagggcatgtccttcatagcagcagtgttgatcttgaacttagatactgcagatgcctttattgccttttctaaccttctgaataaaccctgtcaaatgcagagattaggaaatgttctagaaatgtccagtttaataagctncagactggnttctctgtctgctgctgaaaaaccagcatctttcgttctccacttcagaggctcctgtgct

SEQ ID NO: 209179 - DNA, 261 bp, Homo sapiens
tctgtcgcgatggggaagagttcctgttccgcacggccctgggcatcctgaagctgttcgaggacatcctgaccaagatggacttcattcacatggcccagttcctgacccggctgcccgaggacctgcccgccgaggagctgtttgcctccatcgccacgatccagatgcagagccgaaacaagaagtgggctcaggtcagcgggctttgtgttcttggcttcccacagcgtagccggcaagtggcgtgactcaggaagg

SEQ ID NO: 209180 - DNA, 3887 bp, Homo sapiens
  misc_feature (1796)..(1796): n is a, c, g, or t
tacatgagtataactaccgcaactacgtttctacatctagtgagtttacactgaagatgtttgagatcgagcagtgatatatgtgtgtgtgtgtgtgtttatgcttggagtttctttgtgtttattctcctacttgtccttgctttccactgatggttattgatgagaggcaaaatgttagattttgatttcagactctggcaactctctcatgatactctagaattagctggtgccataagatattttgttctctcagacaccctgcactctgttcaatactctgaagctgcactctgagtcaagatgtgattaggtcagtgtgcttctgaaaaacttttttccgtgttttgttcttgtaaaacttcaaaggctcgtaattgtcctacattcgtgcccttgaggcatgtccttattttgggcctcttttgacagatgctggtttttcagcagcagacagagaagccagtctggagcttattaaactggacatttctagaacatttcctaatctctgcattttccagcaaggtggtccatatcatgacatgttgcacagtattttgggcgcttatacttgttaccggccagatgtgggttatgtccagggcatgtccttcatagcagcagtgttgatcttgaacttagatactgcagatgcctttattgccttttctaaccttctgaataaaccctgtcaaatggcgttttttagagtggaccatggccttatgttgacttattttgctgcatttgaagtattctttgaagaaaatttgccgaaattatttgcgcatttcaagaagaacaacctaactccagatatctacctaattgattggatctttaccttatatagtaaatctctgcccctcgacctggcctgtcgtatctgggacgtgttctgtcgcgatggggaagagttcctgttccgcacggccctgggcatcctgaagctgttcgaggacatcctgaccaagatggacttcattcacatggcccagttcctgacccggctgcccgaggacctgcccgccgaggagctgtttgcctccatcgccacgatccagatgcagagccgaaacaagaagtgggctcaggtactgactgcattgcagaaagacagccgggaaatggagaagggaagtccgtccctccgacactgaggctgcagcgggaattcgcactcggcaccaatcagagccccatgccgcggcccctctgttgtttcagactgacacccgggcagccgagaagaacagacgctctttaagtttgattcctaacactggagttggccttaaacaaaacaaacacaaaaacttttaaagaattaaaccaaggcttagccttaagcagctcagtggaaggatgagctgctgcggaccacagccagccactgcatctgctgcacagttgaacgatgggcagtggctcacccccactcctttatttcagcaaaagctaattaaattgtaatgtttctatgtcaactactgggaagtatgttacagtcttagccaggatgcatgagagatgttatttgggagacttgagatgctttggctgatatttacatgttttcgataagaaagggatcgctgattgagttattgagatagtttttccagagctggaggtcacgtttctaaaactcacctacgaaagatagcattaaaggaacaggggctctctgaggatggccactgatgtgtgtttgtggatacctgggcatcgacccagcctgcaggtgagctctgggccatgttgccttgacacagtcacagtgtagaggntgcaggtgcacacgtgggctccagtgggactgcgctctgggagactgctccctggcatcggtcctgcggaggtggaaagttcgagaggaggagctatttgcgaggaagccctgtggcaatagagataggcttaaaagcggagagaacacagagtggaatcagccccctgtaagtaaaagggtagagaaagagatgtgtggctgggccctctcccacctgcctgttcagtggaggccagggcagcagcccagaacagcacatgtgggggaggtggccccttgtgccagcagtggctcctctctgcctttgagccctgcacagctggacccatcctaagtgccagtgagtccctcacacatttgactttagaacgtgtgcttcatgacccgttgtacagacggaggagcgagcaacacacgtctaacagcctagacaatctcgtcagatgctcatactggaccatcagcctccccattttagctgactttcccagggtcgttggcaaattttttgttctgtcttttccttgactaattgtagaactttgtgtgaggactttggttatccaaaatcacagaaatgaaccgttttgcagctgcgcagtctaaagggcaggccagtgtctggaagcagggcccacgtggcggtccgctggcaggctggtcctggggagcattctgcggacccggtcacgggcttggttagtcatgcgtacatgtgtgccttggggtgctctgcactccacggcccttctcagccacacttcccaccccagggggtgcccccaggctgatctcatttctgatgttgagggctgtttggctctgtctgtatagcttgtaacaggagccttgggctaggggctggggaaggaaagccgagctggcattcgttctctggactttttatgcctgccatacccgctaatgctcctcgaggtgcaggagcaggttgctgagccagtggctgccccgtgccctccttcccagcactatcatgtgtcacgtttcccggactctgcccctacatctcagctgaatctccagggaggctgcagagcatcgtggagaccactttctgcctcggcctttaaatgctgactcacctcctctcggaggaggcgtcctgtcttcacgggggggtcccggtggcctccagacgtagccatttcctgacatcaagatgttgaatgtaatctggtctgagctgggcctgtgggaggggccgcctgaggcctgtgcgctgttgtcctcgcagatgtacttatttttgttcatgttacgggcgttccgttccttaaagatgtatatattttcttactgtacataaagatgttccttaagtcgtacagaaggtggcgcggcaaagggcctcgtgcagtgtgttcagattgcccctggggatcttctgtgtcttcagcgcccagccctgcgtgttcctggtgaagcagtttcacatcagtctctccagatagcactacgatgtattccgcttctgaacaggatcccatgccagtgtggaacaccttcccaatcttagttcagaagtggcttgtatgacctgttcaggggtcacatgaggtctcgccagtttcctgggtcctcttcagaggccagaaagttctaagttctgagtccccggccagggtcccttaacacctcggcacagaggctgttggcaagtgtagaggctgcctctgtgtgtggtttaagtaaactggaaatgagacattgacgtgctgctcctccagaggtctgcacactccacttcacatgccgttgactctcacagtctaagacttcagggccgggacctttgtccagcctgcacagtagagtgaggctgcctctcccgccaggcattgggatcccatttagaaacggcattcacttcagaaggtactttttaactgctcagtttttgactattttaaatagtttgctgaaaactcctgataacacttgctacatatcatgttttaattgcttgtacagttaacctttaattttatttagtaaagtgtatcaaagtaggacttttttgaattgtaaataggtggttttattaaataaaagtcaatgtaaaattgtt

SEQ ID NO: 209181 - DNA, 1584 bp, Homo sapiens
gctcgcgcgcacctgcgggtcggacccgctgcctaccgcgtgcccggcgtcctcgtcgcgcgagttgccggtcccgcggggcctgggctgcgggcccacgggtcccggggatggcgtcggagccgcgctaactccgtttctccttggaccaagatgactgatggaaaactctccacctctacaaatggcgtagccttcatgggtattctggatggtcgaccaggaaacccccttcagaacctgcaacacgtcaatctcaaggcgccccgactcctctccgcgcctgagtacgggcccaagctgaaactcagggctttagaagaccggcacagcctccagtccgtggactcggggattcctaccctggagatcgggaacccggagcctgtaccctgcagcgcggtccacgtgaggaggaagcagtccgactccgacctcatccccgagcgggccttccagagcgcctgcgcgctgccatcctgtgcgccaccagctcctagcagcaccgagcgggaacagagcgtgcgcaaatcctccacgtttcccaggacaggctatgactcggtaaagctctatagcccgacctccaaagccctgacccgcagcgatgatgtctccgtctgcagcgtgtccagtcttgggacagagctgtccaccacgctgtccgtcagcaatgaggacatcttggaccttgtggtcacgagcagctccagtgccattgtgaccctggagaatgacgatgacccacagtttaccaacgtcaccttgagctctatcaaggaaacccgtggcttacaccagcaggactgtgttcatgaagctgaggaggggagtaaattgaaaatattggggccatttagtaacttctttgcaaggaacttgcttgctagaaaacaaagtgcaaggcttgacaaacacaatgacttgggatggaagttatttgggaaagcgccactccgagagaatgcccagaaggattcaaagagaatacagaaggaatatgaagacaaggctggaagacctagcaagccaccctctccaaagcagaatgtgaggaagaatcttgactttgaaccactttccaccaccgcactcatcctcgaggacagaccagcaaatctcccagcaaaaccagctgaagaagctcagaagcacagacagcagtatgaagaaatggtggttcaggccaaaaagcgagagctgaaagaagcccagcgaaggaagaagcagctggaagaaagatgcagagtcgaggaaagcattggaaacgctgtgctcacctggaataatgagatcttacctaactgggaaacaatgtggtgctctagaaaagttcgagatttatggtggcagggaatccctccaagtgtgagaggcaaagtctggagcttagccattggcaacgagttaaatatcacccacggtgagtggcctgcatgatcctggggagtccacctccaggccctttggcttcttctctcccttttgccctgttggaaagaatggcagccattgccacgaatctgtgtcttttgagagaccaggagactgtgtccttcaggagagaggcagttgggaggcctg

SEQ ID NO: 209182 - DNA, 390 bp, Homo sapiens
atcttaacaaacttaaaagaattggaatcttacaaaatgtgttttctaaccaaattgaaattaaactagaaattaataacaagaaaatttccaaacacagaaattacacacacttctaaatattatgggtcaaaaaggaaatcttggtagaaataaaaaatacattgatctgcaagaaaatgaaaatacaacattgttaattttgtgggatctaattaaagcagccccaagatggaaatttataacagtaaatgaacattgggaaacagaaaaggtttcagaacaattgtctaatctctcgtctagacaaaaagagcaaaataaactcaaagcaagcaaaaggaaggaaatagaaaagataagagcagaaatcaatgatgttgaaaatat

SEQ ID NO: 209183 - DNA, 405 bp, Homo sapiens
accctcaagctcccttgcagactagtgggcaccaaagtttgggaaataactgtgggagaaaaccttaaactttagaaattttattatgtagtgatttttttctgcatattgggaggagattgccagcattccttttctgggcgatcccctagccccgtgggatgatgtgaggacacctagagcaggaggaaggacccactgtgggaaaagggtgtgtggacagaggctgcgcagaggcgggagggcctccagaggaggacgtgtccgcggggttggggaagcacctcttgtgtcccatgcagcctgaaccctcctgcagctggaagggtttaggtccaactgcccaacaacatggagtgactcagagaaagctgatggagaatacagggtaccagggcatcacct

SEQ ID NO: 209184 - DNA, 344 bp, Homo sapiens
agcactatgtctactcactaaggccaaccttgctatggccactgttgagtgcccagtctaccagcagaagagaccaacactgagtgctttatatggactcattcgttaagaagagtgaacatcacccgaggactttgcattgtcttctggggaaagggccttcagggcagagttgaggctttccagaaggagaagagattctgccagtgggcagccattcaattcatgcccaagaggtccagcctgcccttcattagggcttgccctgcagacttcagacttgtccaaccaaccccacaattgtgtaagccagtcatttgcaataaatctgtttatatatctcc

SEQ ID NO: 209185 - DNA, 371 bp, Homo sapiens
caatcaaacttaatctagagtgttgctgtcattgaagaattttgtagatgtagtaaaagtccgtagtcagttgactttacgcaaggaaacttgacttagaaaacctggatagattgcttctcggccttttggctaagatcaagtgtagaaaacctgggtgggactgattaaatgtgtttgaaaggccttcagggcagagttgaggctttccagaaggagaagagattctgccagtgggcagccattcaattcatgcccaagaggtccagcctgcccttcattagggcttgccctgcagacttcagacttgtccaaccaaccccacaattgtgtaagccagtcatttgcaataaatctgtttatatatctcc

SEQ ID NO: 209186 - DNA, 1160 bp, Homo sapiens
aactcctggcttcaggtgatccatccacctcggcttcccaaagtgcggggattacgggtgtgagccactgcactttttaattttttaaagacatgacgtcttactatattatccagtctggcctccaactcctgggcttaagcaatcctccttcctcagcctcgctagtaggtgggattacaggcatgagccaatgcgcccagcttaaaaacttacttaggaaggaatgtctgggactaacaggagatgtatctgtcttccttaaaacaggttttgtagtgagtccctcttgctgtgtatctgctgcttcattgtggtccccttcctctaccttttttttatgactgagcttttttgtactgtcagagtttaatttaagagaaggatagcagttggactgaacattccaggatggagacaataaagttaatttgtctctcacattcagaggtagaagtggcaggctttgtcagtgtttcagcaggtaagaaatcttgactagtaggaataagtcagaatctcagggactctttatacctgttcaccctgtcctgggaccccgctcagatttctccacaccagagtggccttctctggccaccttctaagagagacctccccatctcacctgtttccccttcttacgtagttttatgtttccttagcaatggatagcagttgatgtatcaaaataaagacttgcactgttcgcttaatgccttcctcgaccaacaagcaagttctagaacagcaagtgctgtgtcttgtttcctacggactcccctgagctgtggtgcctggcacatgattggagatgggcaggtcgttgttgagtgagtgaatgaagccatacaaatacgaacccagatattgaggccactttattgttaaatgttttatcaacaattgacacttctatcctattttcatgttgttatataatatgactatatatgtactcagactcccaagtaaatatttgtgcttactttactctgacctaaactggtgcctggcaccagagtaggctcacaaaatgcttttctcacagtgaccgcctaacaaacctagacattagctgaggtttatagagcactgtgtcattctaaatagcctgaagacatagtttctattattcctgtttccagttctctttctaa

SEQ ID NO: 209187 - DNA, 1060 bp, Homo sapiens
  misc_feature (93)..(93): n is a, c, g, or t
gggtcctcttcctctaccctttttttatgactgagcttttttgtactgtccgagtttaatttaagagaaggatagccgttggactggaccttnccggatggagaccataaagttacttaggaaggaatgtctgggactaacaggagatgtatctgtcttccttaaaacaggttttgtagtgagtccctcttgctgtgtatctgctgcttcattgtggtccccttcctctaccttttttttatgactgagcttttttgtactgtcagagtttaatttaagagaaggatagcagttggactgaacattccaggatggagacaataaagttaatttgtctctcacattcagaggtagaagtggcaggctttgtcagtgtttcagcaggtaagaaatcttgactagtaggaataagtcagaatctcagggactctttatacctgttcaccctgtcctgggaccccgctcagatttctccacaccagagtggccttctctggccaccttctaagagagacctccccatctcacctgtttccccttcttacgtagttttatgtttccttagcaatggatagcagttgatgtatcaaaataaagacttgcactgttcgcttaatgccttcctcgaccaacaagcaagttctagaacagcaagtgctgtgtcttgtttcctacggactcccctgagctgtggtgcctggcacatgattggagatgggcaggtcgttgttgagtgagtgaatgaagccatacaaatacgaacccagatattgaggccactttattgttaaatgttttatcaacaattgacacttctatcctattttcatgttgttatataatatgactatatatgtactcagactcccaagtaaatatttgtgcttactttactctgacctaaactggtgcctggcaccagagtaggctcacaaaatgcttttctcacagtgaccgcctaacaaacctagacattagctgaggtttatagagcactgtgtcattctaaatagcctgaagacatagtttctattattcctgtttccagttctctttctaa

SEQ ID NO: 209188 - DNA, 242 bp, Homo sapiens
tgagatgaaagccatctctctgtccttgaatctctgccgtgatttagaggaaagagttaaatagacttatttcaaatcccaactctgcctcttccctactctgtggtcttgagcaagtcaggtcctcaatttccttatccataaaacgggcagataacagtgcccacctcatggggctgttgtagggatgaaatttgaacatgcaaaataaagccctcaacacagtgcttagcacatagtaa

SEQ ID NO: 209189 - DNA, 412 bp, Homo sapiens
ctatttcaactcttctttcttagatctttgaattatgggatattaaaaataaacctagaggatattgcaatgaatttttggagcagctggaaaagaaaccataaaacgagtgattacaatcagcaaagtgtgataacagctgaacgcattagacccatccttaaaaagccagaccccaccccctcccctcttgagcctgttcgatagagaaggggatgtcacacaatacaatccaaacacatactctgtccatattgggttaagaaaatatagtgctggtcattgtccccaaatgacagacatccacagatggaaagcaggagaatctgacttccacggtgcttctcattccaccagacagattctgtttggaaaacacccacctgcactaggatctggcctgagtactatt

SEQ ID NO: 209190 - DNA, 356 bp, Homo sapiens
cccagttcaagagtttgataacatcatagtccctcattctgagttgcttgatttattaccagtataattgaactaatctcagattttactcccccttccctatccccagtttaatatgtaggatagagagagtggtcaacctcagaatccgaaaaagaacagtgcatatttgccatgtgtgtttccctttaagcattataaacatccagagttttagacaaattattacgttggtacaaaagtaactgcggtttttgcagtctttatctttgctaaaattattcagcgtttctggaaagtatttgccttatgttcctaggcctatcatgaggttttaaaaatgtatactaattact

SEQ ID NO: 209191 - DNA, 433 bp, Homo sapiens
gacaagagttgcactatgttgtccaggctggtctcaaactcccgggctcaagtgatcctcctgcctcagcctttcaaagtgctggtattacagagagatgccaactccctgtggcgacgtcacagaagcatttaccaagatgcagagttgaatttggcctgtgagcagtattcactgaactcagctgggtctttggcgatacacactgatgggtgatttttaattataactattaatcttctttaaagtcaaagaaaggacattttgtctttttgcaaaaatatttgctatttcatctttgatatcagtggagaccttccttccccagtcttttctgaaatgcctatggcattaaagtgtaatgattaccaacattcatactacaagaatcaatttcgagagttgtaaacttattaaacattaaaataaagca

SEQ ID NO: 209192 - DNA, 510 bp, Homo sapiens
catgaaccaccgtgcctggactcctcttccccttttaaagatcatccatcattgtatttctcagaaatttgtttctaaagactcttatctctcttatgtcttccccttagggtgtggtggctctcaaccaggggtgcttttgcccttcaagggccatttggcaacatctggagacatatttggttgtcatgactgagggaaggatactgttggcatctatctactaggtaagggcctgggatgcagctctccaccctacagtgcccaggacagcccctcacagcaaggaattagcacaaaatgttgacagtgccaggtaccatggggccagcctatagacccagcttctcgggaggctgacatgggaggattgcttaagcacaggtgtttgagtctagcctgagcaacattgtgaaactctgctctatttttttttaagtgccaagatgaagagatcctatttggggcaactttgtatacctcgtaatcacctgaagtgctcggtaaaaa

SEQ ID NO: 209193 - DNA, 247 bp, Homo sapiens
agttcaaaggccaactcatttgctactgctggagcgggcaaacaacgcacactcacagaaactaaataagtgaatgaggaaaatggagtgcacaaagacatgagaggacagaccagtgagaccagaatgcagtcaacaagagaggggttagggtcgaaaaggcccaggaaaggggtggggtgctaccgaattctgacttttttcctttataggtatttacttatatctggtctcagagacacacagg

SEQ ID NO: 209194 - DNA, 797 bp, Homo sapiens
tccacctcccgggttcaagcgattctctgtctcagcctcctgagtagctgggattgcaggcatccgccaccacgcccggctaatttttgtattttttgtagaaacgggatttcaccattttggccaggctggtctcgaactcctgacctcgtgatccacccgcctcggctcccaaagtgctgggattacaggtgtgagccaccgtgcctggcttcttttgatatctcgttatctcctgttgggaccacagcatttcactaatcagccacttgtagtttttgattctggcttccttcagggaagacatgctacagtcatcctgactagaggctctggagatccctcaagccttttctaaggatgcgtcctccgtggactttttgattgtagcttaactaaagagcttgtgccagtttgtatgcaggaatgcctctgttgtctgccggctgttccgcagcctcgctggtgtcctagtaagctgggggctgcaccgccacctaatgtctgcgtacgttactacaagctctggtttatgacggatggctttgttctcagtagcttccttacctggggtcctgttacttcagtgtttatattcaggcaagacagaaacttgtcccttagcagtgccctgaaaagtcagaacgttatgagccttgtgttgtgttacaggaaaaaagagaaaaaaaaagtcagaatgttagatggatattcccatactttctctccccaggagaaaatggaagtgtggttttctcacagtgatactacatcatggcaggatagggcctcaggtg

SEQ ID NO: 209195 - DNA, 540 bp, Homo sapiens
  misc_feature (468)..(468): n is a, c, g, or t
aagtgtttagctacgggaagatgatcatcttctccttgtctaatgacatggaaatcagaacaagccaacacagatggtgaaataaaaagataaagcaaatttggttggttgaacctacattttgcaatgctacagatttatgaacacttttggttaagcagccattcactgtgattcatagagatctaaggtaccggtcctcaaattccatacttctgtctttcccaaagtgggccagtgaatacttcttcacctgttatacacaaatgtcaatcaactgccaatgttctccacggacaagtcagttagtaatatgagacaatgaatgaaagaaacagttacactaaactgttgcatgtaactgaacacaccatctaagtgccagcaggcatactgaggaagtgaccttattcagcaaatattttttaagaactcatgacactgaaggataggattccatttggggantccatttggggattccatttggggattccatttggggattccatttggggaatccatttggggaatccatgg

SEQ ID NO: 209196 - DNA, 488 bp, Homo sapiens
  misc_feature (416)..(416): n is a, c, g, or t
aagtgtttagctacgggaagatgatcatcttctccttgtctaatgacatggaaatcagaacaagccaacacagatggtgaaataaaaagataaagcaaatttggttggttgaacctacattttgcaatgctacagatttatgaacacttttggttaagcagccattcactgtgattcatagagatctaaggtaccggtcctcaaattccatacttctgtctttcccaaagtgggccagtgaatacttcttcacctgttatacacaaatgtcaatcaactgccaatgttctccacggacaagtcagttagtaatatgagacaatgaatgaaagaaacagttacactaaactgttgcatgtaactgaacacaccatctaagtgccagcaggcatactgaggggattccatttggggantccatttggggattccatttggggattccatttggggattccatttggggaatccatttggggaatccatgg

SEQ ID NO: 209197 - DNA, 1820 bp, Homo sapiens
ctcattcttgtatgcttttctcagaaggaaagaaaacaagaaggcttttgaggggacacttgctgggacaggcactaagccttctacagtttgatagctctaaccagcagatacagacttctcagtaggaaggggtgaggcagctgtcctgagccaggagctccaccatatcgtgtcccatcctgttaaggcaattttgagaggctgctctggaatatgtctcaatggtggatgtagggaaacttcacaggctttgatgggactgaggtggtgtctgttgtgtgaagacaggagctgaatgctcaggatctaggctgcttttcttgtggtcagttgggttacctgtttgggaccaagtccatgtttactaaggaggctgaataaattctacagaggaaagtggagctcccaggatgaccgaggaagggtaagaaaagggatctcctttacagaaaagggctcagataagaagagacaattcaaacaaaaagccgagaccccctcctcccattccagtgagaagcacaggcaaagacaggaaccagagtcgagctcacatgagggaaactccaagaaaaggaaaatcggttccaaggacagctgccaagacagagctggtagaattttgcctttttcccccaaagggaaaataagcagttgacttttatagagggtttgagcagcaaggtgactgaaaaaatttttgagatcctggcactcagagaatatttggggactcagaaggtgttaaatttcacttcatttaagtactaatatggtcaggatggaggggaagattcaaatgttcacctgaaggtgcatgggaggttttggaaatgagggtcggtgggaactgtgctggcgagtatctcactcacatgcttcttttgcggggatctgtccaggagaggagcacagcttgatgttgaaaaagaaactaaagtcctccactttgcacagcaataaactcaaggagacctgtgatgcccaccacagagggcctttcatgactcacactgggtgcaccaagcagcacaggtctcagaccctaggagttcaatggctgtcatttcagaaaagcttggtgactttacaagctgtgtcaaggccatttatcaagacctatactgggtatcggtgcagcaggtccattctccactgacctgggagcagctcactcagcttgcccggttctggcggcctctatgtgctcaggtgcagaccttctattttatagccacccaggtaggttatgtcttccctgctaagaactggcttgtttcagccacattgcctggcctggggatccagccctggatagagaagcccatcccttgcctgggcaggagataactgagcctgtcagtgggtcagatgaggcttgagctgggtgcaccctgaccccattcagcagaaattgcaggtcttggaatgagagcaagaacctgctataggaaagtagcttgaacaatatactcaaaatggtgaaccctgcatttcacagagggctaagattataaacaaattttatgtttcttgttagacatttgatgtctttcagatgtctggtgacagtcatgcatttctatataatcagacaaatattaggatgtaatcattcatatgcctttgcaaattttaaattgtagaaaaataaataaaaagttatatgtttctcttttaattcagaaaaggctgtagcctctaactttcccacgctgagcccatggaggactaatatccacaaatctttaattgtactccctgtgggaaaatgttaatatatttttacagtttaataaaattatggtgaaatcact

SEQ ID NO: 209198 - DNA, 1720 bp, Homo sapiens
ctcattcttgtatgcttttctcagaaggaaagaaaacaagaaggcttttgaggggacacttgctgggacaggcactaagccttctacagtttgatagctctaaccagcagatacagacttctcagtaggaaggggtgaggcagctgtcctgagccaggagctccaccatatcgtgtcccatcctgttaaggcaattttgagaggctgctctggaatatgtctcaatggtggatgtagggaaacttcacaggctttgatgggactgaggtggtgtctgttgtgtgaagacaggagctgaatgctcaggatctaggctgcttttcttgtggtcagttgggttacctgtttgggaccaagtccatgtttactaaggaggctgaataaattctacagaggaaagtggagctcccaggatgaccgaggaagggtaagaaaagggaaccagagtcgagctcacatgagggaaactccaagaaaaggaaaatcggttccaaggacagctgccaagacagagctggtagaattttgcctttttcccccaaagggaaaataagcagttgacttttatagagggtttgagcagcaaggtgactgaaaaaatttttgagatcctggcactcagagaatatttggggactcagaaggtgttaaatttcacttcatttaagtactaatatggtcaggatggaggggaagattcaaatgttcacctgaaggtgcatgggaggttttggaaatgagggtcggtgggaactgtgctggcgagtatctcactcacatgcttcttttgcggggatctgtccaggagaggagcacagcttgatgttgaaaaagaaactaaagtcctccactttgcacagcaataaactcaaggagacctgtgatgcccaccacagagggcctttcatgactcacactgggtgcaccaagcagcacaggtctcagaccctaggagttcaatggctgtcatttcagaaaagcttggtgactttacaagctgtgtcaaggccatttatcaagacctatactgggtatcggtgcagcaggtccattctccactgacctgggagcagctcactcagcttgcccggttctggcggcctctatgtgctcaggtgcagaccttctattttatagccacccaggtaggttatgtcttccctgctaagaactggcttgtttcagccacattgcctggcctggggatccagccctggatagagaagcccatcccttgcctgggcaggagataactgagcctgtcagtgggtcagatgaggcttgagctgggtgcaccctgaccccattcagcagaaattgcaggtcttggaatgagagcaagaacctgctataggaaagtagcttgaacaatatactcaaaatggtgaaccctgcatttcacagagggctaagattataaacaaattttatgtttcttgttagacatttgatgtctttcagatgtctggtgacagtcatgcatttctatataatcagacaaatattaggatgtaatcattcatatgcctttgcaaattttaaattgtagaaaaataaataaaaagttatatgtttctcttttaattcagaaaaggctgtagcctctaactttcccacgctgagcccatggaggactaatatccacaaatctttaattgtactccctgtgggaaaatgttaatatatttttacagtttaataaaattatggtgaaatcact

SEQ ID NO: 209199 - DNA, 1432 bp, Homo sapiens
ctcattcttgtatgcttttctcagaaggaaagaaaacaagaaggcttttgaggggacacttgctgggacaggcactaagccttctacagtttgatagctctaaccagcagatacagacttctcagtaggaaggggtgaggcagctgtcctgagccaggagctccaccatatcgtgtcccatcctgttaaggcaattttgagaggctgctctggaatatgtctcaatggtggatgtagggaaacttcacaggctttgatgggactgaggtggtgtctgttgtgtgaagacaggagctgaatgctcaggatctaggctgcttttcttgtggtcagttgggttacctgtttgggaccaagtccatgtttactaaggaggctgaataaattctacagaggaaagtggagctcccaggatgaccgaggaagggtaagaaaagggaaccagagtcgagctcacatgagggaaactccaagaaaaggaaaatcggttccaaggacagctgccaagacagagctggagaggagcacagcttgatgttgaaaaagaaactaaagtcctccactttgcacagcaataaactcaaggagacctgtgatgcccaccacagagggcctttcatgactcacactgggtgcaccaagcagcacaggtctcagaccctaggagttcaatggctgtcatttcagaaaagcttggtgactttacaagctgtgtcaaggccatttatcaagacctatactgggtatcggtgcagcaggtccattctccactgacctgggagcagctcactcagcttgcccggttctggcggcctctatgtgctcaggtgcagaccttctattttatagccacccaggtaggttatgtcttccctgctaagaactggcttgtttcagccacattgcctggcctggggatccagccctggatagagaagcccatcccttgcctgggcaggagataactgagcctgtcagtgggtcagatgaggcttgagctgggtgcaccctgaccccattcagcagaaattgcaggtcttggaatgagagcaagaacctgctataggaaagtagcttgaacaatatactcaaaatggtgaaccctgcatttcacagagggctaagattataaacaaattttatgtttcttgttagacatttgatgtctttcagatgtctggtgacagtcatgcatttctatataatcagacaaatattaggatgtaatcattcatatgcctttgcaaattttaaattgtagaaaaataaataaaaagttatatgtttctcttttaattcagaaaaggctgtagcctctaactttcccacgctgagcccatggaggactaatatccacaaatctttaattgtactccctgtgggaaaatgttaatatatttttacagtttaataaaattatggtgaaatcact

SEQ ID NO: 209200 - DNA, 1532 bp, Homo sapiens
ctcattcttgtatgcttttctcagaaggaaagaaaacaagaaggcttttgaggggacacttgctgggacaggcactaagccttctacagtttgatagctctaaccagcagatacagacttctcagtaggaaggggtgaggcagctgtcctgagccaggagctccaccatatcgtgtcccatcctgttaaggcaattttgagaggctgctctggaatatgtctcaatggtggatgtagggaaacttcacaggctttgatgggactgaggtggtgtctgttgtgtgaagacaggagctgaatgctcaggatctaggctgcttttcttgtggtcagttgggttacctgtttgggaccaagtccatgtttactaaggaggctgaataaattctacagaggaaagtggagctcccaggatgaccgaggaagggtaagaaaagggatctcctttacagaaaagggctcagataagaagagacaattcaaacaaaaagccgagaccccctcctcccattccagtgagaagcacaggcaaagacaggaaccagagtcgagctcacatgagggaaactccaagaaaaggaaaatcggttccaaggacagctgccaagacagagctggagaggagcacagcttgatgttgaaaaagaaactaaagtcctccactttgcacagcaataaactcaaggagacctgtgatgcccaccacagagggcctttcatgactcacactgggtgcaccaagcagcacaggtctcagaccctaggagttcaatggctgtcatttcagaaaagcttggtgactttacaagctgtgtcaaggccatttatcaagacctatactgggtatcggtgcagcaggtccattctccactgacctgggagcagctcactcagcttgcccggttctggcggcctctatgtgctcaggtgcagaccttctattttatagccacccaggtaggttatgtcttccctgctaagaactggcttgtttcagccacattgcctggcctggggatccagccctggatagagaagcccatcccttgcctgggcaggagataactgagcctgtcagtgggtcagatgaggcttgagctgggtgcaccctgaccccattcagcagaaattgcaggtcttggaatgagagcaagaacctgctataggaaagtagcttgaacaatatactcaaaatggtgaaccctgcatttcacagagggctaagattataaacaaattttatgtttcttgttagacatttgatgtctttcagatgtctggtgacagtcatgcatttctatataatcagacaaatattaggatgtaatcattcatatgcctttgcaaattttaaattgtagaaaaataaataaaaagttatatgtttctcttttaattcagaaaaggctgtagcctctaactttcccacgctgagcccatggaggactaatatccacaaatctttaattgtactccctgtgggaaaatgttaatatatttttacagtttaataaaattatggtgaaatcact

SEQ ID NO: 209201 - DNA, 455 bp, Homo sapiens
ctagaaacagcactgctagattaggtaaaatttgactctttcaaggtaaaaagagaaagggctgcaacacagtctcccctggcaaggaaactgggagctctttggcagccagggccatatagacatggattctggagaacagaggagagctgggtttgatagctacttcagctcctttgtgtccaggatgaactaaggcttctagggtgtttggttggagacacttactcaaactcttattttatcaacagaaccagagtcgagctcacatgagggaaactccaagaaaaggaaaatcggttccaaggacagctgccaagacagagctggtagaattttgcctttttcccccaaagggaaaataagcagttgacttttatagagggtttgagcagcaaggtgactgaaaaaatttttgagatcctggcactcagagaatatttggggactcagaa

SEQ ID NO: 209202 - DNA, 390 bp, Homo sapiens
cattgatgttttctctatgttagaatatattgggataaattgcaatttgttgtggtcatagaaaaatgtgtgcacatgcatgtgtgtgtaattgtgtgtatgtgctgaagaaagaaaaaggccataaaatcaagctgctgttataccattaaagcctcttaacagaaaactattactgagcatgaactgccagccaaaggtcttggcttggcttggtttgcagacagataaagaatttgtgatgggtacttagcttagattctgtagaattaatctacagaacacttgtgcagaccgtaaatagagatgagtgcttgctctctgatttggaagacagctaattagatattatgaaagcttacattgttgaaagaaggtaaattagaaaca

SEQ ID NO: 209203 - DNA, 174 bp, Homo sapiens
aatgttcattcatgtggattaaaaaaggtagagatccactttacaaataaaattttaaatcaaattaatttctcaaattttcattacatacaaagaacagcaaaaaagaaataatctctttctctctaaaccaaacaaaaccctgccttatttaccgctactattctagcatta

SEQ ID NO: 209204 - DNA, 211 bp, Homo sapiens
taaaccgggcaataagaggtatcttgtgtttttttaatgtactttctgagcatagaggagcaaagagcaccttccaattacccaacagagctcagctttgaagcttcagtgtggcctcaaggactatccatgtctcataaactacagcaggcagaacaataccttccaagatgaaagtgacagtctccatgctaaagagaggtgaaagagc

SEQ ID NO: 209205 - DNA, 412 bp, Homo sapiens
atcctaggacctgccatcttttccagaattcgccttatcaatgtactgtcctctctatcttcctccctaactaaaaattccttctctttaacctgcttcttcagatgtccatgccttctcacttctccttgccaaacctctcaggggtgacggtccaccccgactgccttattctacctctccttaacctcttgcaatttggattctgccccagtcactttgtggagagttttcttgagaccagcctctcagagagaacatcagctgtcagatccgacagcctcctcattttccattattttcagctagctcaagacaggacccagccctgctgggtgaccatctcctctcgaccttcctccctgcccttccggcctgcaccatctcctacccatgcctcggggcattccct

SEQ ID NO: 209206 - DNA, 437 bp, Homo sapiens
acagaacccactgacagatgaaggagccagatctaacagggcagagcagtgatgttccaggccaacagtctccaattttctgatcgcacactctatgaacagacgtatatttagaccacctcccacacacatatgtattaaaatgcttacttaggaattacatgcatattgccgtacagatttattgatacattctaaatgaaatgggatagttcccttgaccccttcacaggactcagcccacagctctcagcccctcatgggaggagcagcatgcaggtgagtgggtgcaggggctggggtgagtgcttttgggcatcggcaggagtagaactctgtgcagccccccggcagcatctgggtggggctacctgtgacccctggagccctagagggcatatgttacagtgtgctcttagatttgctgtccacagatg

SEQ ID NO: 209207 - DNA, 247 bp, Homo sapiens
ccattattttccaggaaataaaatcaaatttatttttagaacattttaaagcaatagccccagttagagccctgtgctatgactagaatagtttccctaatctaatattcatggatgactgactcatgttcaatattgaattttataagtttctttctctttcttgtaattataacttaggcatcccaggataaaaaagcaaaaacgagagtgaatgtgaagtaaatgaattgtatttccagtgaca

SEQ ID NO: 209208 - DNA, 505 bp, Homo sapiens
agtcatgagacacgggacacatcccatcagttctcatcttttcagtagacacagtcgtagtgccaaatacaggctttgtttggagggtaatgcatacaccgtgctcagttccaagttggccacatagtgagtgctcaagatgtgatagagatggctttggttctttttatagggctggtttgggctcatactttgttagtatagctcatgattaaaggtttggggattctgtgaagtgccttatgcctgtaatcccagcattttgggaggctgaagcggaaggattgcttgagaccaggagttcaagaccagcctggagaatacagcaagactcccacctctacaaaaaatgagccaggtggtggcacgtgactgtagtctcagctactcaggaggctgaagtgggaggatcacttgaacccaggaggtcaaggctgcagtgacctatgcttgtgccactgtactccagtctggcgacagagggagaccctgtctcaaaaaaaaa

SEQ ID NO: 209209 - DNA, 642 bp, Homo sapiens
aggagacggtaccaggggcagagggcaaagccaggcctctctgggcaggtttggtttcttgaccacacagcaggcaagggccgactcacgttctgggtgaagtcttggtgcacagccacacccacccactcatgtcacctggggctgacacttgccaccgtgatgaccacagagggcccgaggagctggaagtgttgactgcctggccccgtcagggaagttgccagcctggcttagagtcctgtcgggggatgtgttatgtgagctgcacatgccatcttaagtgttctagtcagcacgttaaaaaaaaggcaaatttacttcatggaccccaatgtgttcaaaataccatcctttcagtagtggcactctcccatggctggtggctgctgtgtggggcctgggtgatgagcggtgggcagccacgcagagacctctgagaagagtggtccaggccacgagagcagccagtgcaaaggccctgagccacctcgagcggcacaggggccctgagtgagggggtgtttgcggccaggcctgagtccccagtggcaggagggtgaagagtcagagcagtcgcgtgttcctcataagtgcgtaccgagtgcctgctgggtgctgagatgtagcagcagagagggg

SEQ ID NO: 209210 - DNA, 573 bp, Homo sapiens
tgacagctaccatcaagtaagtaaaaaacccacgcttctaacaattttttgcttatacccggctatgcatgccagagcaaatatttagagtaaattgtgggaactaagaacacaaagtatgttgatttctttattacagctagcagatatctaagaatattatcacaggtctttgaataaattttgcttctaagagaagttactatttattcttaattagatggggaggaaaatctctttgaagaggagcctctacttcactatttgcagtaagaatcatgaaagtttaatttttgtaccaacatccatgttctctatcacctgcataagctaagtgaggtggacattccactgcaaactaatagcagaaataaaaactccctctctccacagctcctagttataaggctgtcttctcaagaggggcagtatgtcaacatttctcatccaataagtgagggtctctcttctttctctcagaacccactcatagaacagaagaaagcccttcacctctcggcctcatatacacagatcatagtctagcaacaggtagctgaggtcaggatgcac

SEQ ID NO: 209211 - DNA, 150 bp, Homo sapiens
ttgcctgctcacatacatgtcaatcagcatgtgttcctgggggccgtggtcctgttcctggctccctgtgcgctcatcttggtctcctacatccgcattgctgcagccatcctccggattccctctcctacaagaaggcgcaaggcatgt

SEQ ID NO: 209212 - DNA, 337 bp, Homo sapiens
attttgaaaaatgagtagacctcactttatctgtagcgtcgcctaaatttcccagtcatacagtcattgctctaaaatattctatgttggacatagattctgtgacacaattaataacaaattaaaattaaagtaagcttttggcacttacaaattggcttgatcaaatgaggccccttagtcccccagttaagataatttattacggcccaatagaagttgaaacagcaccttcaaggattaaaatttattatataaaaccgaattaataaaagcgtgattatcgacaccacatctccatttagcaacccaaaagttcttcctgttcccaaatctg

SEQ ID NO: 209213 - DNA, 547 bp, Homo sapiens
tacagtgaagccaagcgtaagataagcagtgttaaatcatcatctctgccaaatataaatgagacagacgtagggcaggttgtttttctttagagcagctcttcaaaggccatctagagttggacttttatagaaaaaggaagatttctctaagatctccagatctaagatttcacagtgctatcacttaattattttgattagttcattttaattttttcttagaaaatattctaacagattttaaaataagtagaaagagacaattagcctcttggtcatcataataaaaaaagtgagttgagttcattaaggaattgaatagagatgaaatattcccggcaggagaacattctcttatagttcagtggcataagataaagatagaaacaggagcttttaaagggactttatgggtggctggcttgggtgattttatccacatgtggcctccattgcagctggccccagagtcacatttctagctctgtcctttgtcttgggacctaaactttttttaaccccatcttggcagctccaactgata

SEQ ID NO: 209214 - DNA, 748 bp, Homo sapiens
aatgattatagcttcctttcagatttgcaacagattttgatctaaatattgagtataaaaaaaaaaagttaaatttaaaggatgagactgataacaatcataacttctcaaatctaaatgaatatttcctgcagataagtcaatatatatgacctcaactgggcagctttactcactcttctctaacataaagacacgctcttcccatgaaggttcacatctgtatacattacaattgctggcattttaagaggctaatgaaacactctattttgcgctattgacagaaggcagatttctaaaaatcagagttaagatgttccataataaacacgggttaactttgtaaaataaaaaggggtgggggcagggatgatggtagggggagaagtattggttagtggtcaagaatgccttgatttggattcttgctccgtccaccgggtgacctgacctctctgggagccagctcctttagtgtaaaatagggataatagcgctgttgctgttcaattctggagggttaaaagattctgcgtgaaaaggactgtagcagcactttaacacaataaatgttgaataaatgtaagctattaatatgaaattagaattgaaatcctgtctcgagataccattttgcttaattgagagaacttgtcatgtctctgtccagcacttgatctgactcttagctagaaaggttcatactatcagctgtgcctatctcactggcttagagaaaggataa

SEQ ID NO: 209215 - DNA, 361 bp, Homo sapiens
cccctttctcacaaagttcaatggcatatctaatttttaggtttagaaagagagaaattaagaagatcctcgtatgtttctctcatttaatagcaccacctgtatcttgcttgcacctcctcagtgaacaactatagagaatagggctgctttggtaagttctttactcaatacacacacgatgagcacctatggcatgccaagcactatcctaggtaataaaagagccaaggggccacgccagcttcttctccactctccctctctcactggattcataagtccacatggaaatgctgtggcctcaggactaaagaatgaagtctgggccagcgacaggccaatgctcatacagccctaa

SEQ ID NO: 209216 - DNA, 348 bp, Homo sapiens
  misc_feature (322)..(322): n is a, c, g, or t
  misc_feature (324)..(325): n is a, c, g, or t
  misc_feature (329)..(329): n is a, c, g, or t
ttggtgggtgggtggatggatggatgaatgaatgggtgggtggatggatgagcagttttagaggacaaggattgggtattccaagccatgcagaaggtgagaggaaagatacagagataggaaatctttgttgaagagcatgagtacaaccagaaagttcaaggaagccaagaagagggttggggaataggagaaaagatctgtattagttcactttcatgctgctgataaagacatacccaagactgggaagaaaaggaggcttaggccgggcgcggtggctcacacctgtaatcccaccaagggggagggaaggtacttncnncttntatttaaacaggcagcaag

SEQ ID NO: 209217 - DNA, 307 bp, Homo sapiens
acagtaccccttggaggtttgctttaatttctgacataatttatacgtcaggaaaagactgatgctcctctagttaggttgggtcaaaatccccagtcgatgccctgtggcagttcaaaggcccctgctgagactccatggctttccaggagctcacaacattccaagggtcactttccgatctatgtcttacttccacacacctgaggtctccacgttgatcctggatctatgtcttacttccacacacctgcggtcttcaagttgacctaggtgtacaggaacccttctgaatattataaaatta

SEQ ID NO: 209218 - DNA, 784 bp, Homo sapiens
ttgaggtcaggagttcgagaccatcctgaccaacatggtgaaaccccatctctactaaaaatacaaaaattagccgagcatggttgtgcatgcctataatcccagctacttgggaggctgaggcaggagaatgcttgaacctaggaggcagaggttgtagtgagctgagattgcaccattgcactctagcctgggcaacagagcgagactccatctcaaaaaaaaagaaaagaaaagaaaaaagttgggcagaggatttaaatagccatttcttcaatgaagatatataaatggccaataagcacatgaaaagatgctcaccttcattagttattgaagaaatgcaaatcagaaccacacctaattgaatggcaataataataaggaaaaggaaaataagtattggcacagatggaaattagaaccctaatgcattgctggtaggaatggaaaatggcacagctgctgtggaaaagtttggtggttcctcaaaatgttaaacgtagattgaacctgcaattccacttctagctgtatacccaagagaactgaagacatatgcccacatcaaaactcgtccaaaaatgttcacagcatcactattcacaacagccaaaaggtagaaacaacccaatgtccatcaactgatgaatagataaacaaaatgtggtagtacatccaaagagtggaatactaattcaggcataaaaaatagttcagccaaaaaggaatgaagcactgatatatgctacaacatggatgcatcttggaaatactatatact

SEQ ID NO: 209219 - DNA, 552 bp, Homo sapiens
aagacatagtcttgctctgtcacccaggctggagtgcagtggtgcaatctttgctcactgcaacttctgcctcccgggttcaagtgattctcctgcctcagcctcctgagtagctgggattacaggcacacactaccaggcctggctaatttttgtatttttagtagagacagggtttcaccatgttggccaggctagtctcgaactcctggcctcgtgggattcacccactttggcctcccaaagtgctgggattacaggcatgacctgctgtgcccagcctggtttttttgtttgtttgttttgttttttaaacagctgttccacttggacttgtgactgcccttaggagcagtaaggctgagcttggaaaaccctgcagaggtggggaagcttgcactctccaagcatctctagggggttttgggcacaagtccagcaggaaaacaggcctcagaaggacaggtcctgacccagcacccactgtgcaaccctctcacagctgtggttaccatttcgaggagcccagccttcacagcacctgttcccttg

SEQ ID NO: 209220 - DNA, 1189 bp, Homo sapiens
ctgaacagaggactcagttaaactgtacctggactcctgacccataggactgtgcgataataaatgggtgttgtcttaagccactaattacatgtcaatttgttacagagcaatagaaaacgaccacagactttggtacttggagtggagtgccactgtaacaaatgactaaaatgtgaaagggggctttgaaatcaggtactgaattgaggctggaagaattttgaggagcatgatagagaaagcccaaattgccttaaacagactttcagtagaaataaggactttaaggacgctgctggtgagggctcagaaggaagtaaggaacagattattggaaagtagaggaagggggactgtagcgttgtagttagcaggaaatttgagatttgagtccttgttctgaattatttgaaagatgttattcagacttaccatagtgtgcaaacaactatttattcggaatgtggtagcattccaataagacatcttttggaggcaggaaaaaggtatagagtaattttttacacttgcagaagggaaaactgcagccatatttaagttttaagtcacaaaatttttggtaatttgttacatcaataataggaaattaataaagaagacatgctgagcactaccccaaaagtagagacattcactgcactgtcattgtttattttgaaactgtaaacacagggatatgtcgtaccagaggactgaagacataacctgcatacaaagtgagcttgaatggttgtaaaccattttttaatttactctccacaggaactctatagctgagtttgtgtgtgttgggtggtattggtataactggaagttctctaaatttacctttatggacaataggattcttattaaagagaatgtgctaatttgaagctgacgtatacatattaataaaactcaacagtaacttcatcgattgtatagagcttggaccaagaaaatatttttctggggaaaagtattttatcattaacattgtttaaaattgccaaagcatgatgaaaatttaagcagacaaagttggtttttctgtttttaaattttctacagagaatacaccttttttatagcctgcactcagtgtggacaattctcattacccaactttgctacatcattattgttttcacaaatttgtcattcagataaatagtatcataac

SEQ ID NO: 209221 - DNA, 472 bp, Homo sapiens
atgctctttagctgttcatcaccatattaatactaggaataatgacagctaattttaattgagaacttcctaactgtggcccagttacagtaaaataaacactattagatacatcccatcgattattacagcaagcctatgaaacatactgtattacacagccagtattagaaatgaaaaactcatgggaaggatatgtataaaacttgctcaaagttacccagctaataagtggctaggacacgattaaacacctatgtagttttctttcctgagctgaaatcctaaatccttggctgtatggcccctcattcaaaagtcctaaactggctaaaatttatataacagaaaattcacagaatcatttccttctacttttccactaccagggctgttaacagtcccaagcaaaagggcaaaaattttttctacttgagataagaaaaatatagagtgtgacagaaggtattct

SEQ ID NO: 209222 - DNA, 255 bp, Homo sapiens
taagttgtgttaaggaaaagcagaaaacagagttgcctttggttaagagttccactatttttataagcaactgactttttggggaaagttgctttaagcatttttttttctgtgtgtatgtgtgagatggggtctcactctgtcacccaggctagaatgcaggagcacaatcatggctcactgcagcctcaaccttctgggctcaagcaatcctcccacctcagcctcccaagtagaagaggtatcacagccaca

SEQ ID NO: 209223 - DNA, 496 bp, Homo sapiens
agctctattttcaatccttcctttagtgagagccgctaatgatttcctccctagtttacttaagaagcaagagaccatgacaatgtctttcttagaggtagaccaacgtggctaacaaaggtgtgtagaaattgtattccagttactcttatatgtatttatgttatccattgtggccaaagcaatgtaaaatataacagacactaatgaaaaacatgacaacggtgcatgtaaatttaactgtggggcctggcgtggtggctcacgcctgtaatcccagaactttgggaggctgagaacaggcggatcacttgaggtgaggagttcgagaccagcctgggtaacatggtaaagccctgtctctataaaaatatgaaaattagccaggtgtggtggtgtgtgcctatagtcccagctactcaggcggctgaggtggggtttgaggctgcagtgagccatgattgctccactgcacagagtgacaccctgtctcaag

SEQ ID NO: 209224 - DNA, 274 bp, Homo sapiens
gttgttcctccacatatttgaatatttgtgcttgctagtgccatattccatattccatttcatattacctctctgttcccgtatataataaactcactaaagaagactgtcccatgcaagtgatttgtattgagcaaagccttcccgtacatgcactattttctagattctcaccatttgatgcctttcacttgccattcaattttgtgcaaaacatattgatgtcaaagaataatgttttctgaggagttggtctgccaaagttgtgggagtt

SEQ ID NO: 209225 - DNA, 440 bp, Homo sapiens
agaatcacttcgtgctgagagagattcagttttgcctcattcttgccattgccctcaaatggctaaatactagattcagagaagtaaggctgtacacccaggcataagtgcttgcattaatggacatgccacactcagtgccctacagttttgattccatctcttcctcatgtggttgtgacttacctggctggcaagtttattcatctgttctcacgctgctaatagagacatgcccgagactgggtaatttataaaggaaagaggtctaattgactcacagttccacatggctggggaggtctcacagtcatggctgaaggtgaatgaggaacaaagtcatgtcttacgtggcagcaggcaagagagcttgtgcaagggaactcccatttataaaaccatcagatcttgtgagacgtgttcactaccatgagaacagt

SEQ ID NO: 209226 - DNA, 429 bp, Homo sapiens
acttcccccaacttaagatgatcttaatttgcttacttgtttactgtccatttagctgctgtaaaatgtgagctccaaatcagtggccatgtctggttagttacccatttcctgggacctagaacgggcctagctcagagcatgtgctcactattgatggaatgcatgttgaaagaacgcatgaatctcatctccttttgtgggtgaaaaactcatcctattctcactcctgattaactttccttcttttttttttttttttttttttttcaaaacggagccatgatctgtcacccaggctggagtgcaatggtgtgatctcatctcgctgcaacctctgccttctggattaaagcaattctcctgcctcagcctcccgggtatctgggattacagttgcacgccaccacgcctggctaattttttgta

SEQ ID NO: 209227 - DNA, 560 bp, Homo sapiens
aggttttaaaactagcaaaaattatataacaattttctaatcttcatgcagtaatgcaaggttgtaggcaattttatgcttctgaaattcagcattatgcctggtactttattatcctattatgagtatcttttaaattgagatattataaaagaacattatttaaagtaaattatagatagatcagtatttaatagaaattaatccaaatcttatttgttgctcttaaaaaacttcttttttttctctaaaatcgttaggcatactatgttctttactgtgtgtatgtaattcttacctcaagggaaaacaccaattagacttgattagagagcagattccttggagacaactagagaaaccctcattaaagtcaatgattataaagatggcaacaagttaaagatggtttctcccataactggtatcccaagtcagtaaatgctctctctcagtaggtgttcccatattggtgcttctctatggaagacacatttttatagggaaactcagctgaagttgagtctgcctgtggcagttgtccccagtcccacaacaca

SEQ ID NO: 209228 - DNA, 346 bp, Homo sapiens
taggtgattgggttgggatcttttatgtatgaaaacccagtttttaattttctcttgtgaaatccatcgtctttctccttgcaccccatctgtgatgcttcctctgccacacgaggctttctgtgtgagggggggctcttcctggaggctctcttttgctccattgatcgatttgcctgttctcttggttttcagttaacttcatggatatgccattaacttctctccatggttagaaatttaggttatttccaagtttttcatatttggttaatatctttgtggccaaatctttacatacattctccttaaaaatcatgtcactgaggcggaaggattacatgag

SEQ ID NO: 209229 - DNA, 290 bp, Homo sapiens
acggaaccacagcatagaatactataataagcgccggcggtgatactaacacgaagattatgtatgttcatcaaataaggagttgcaagaagaacacagaaaccagatttattgtatacatgaaaaaataaaaagtactactcaaggaggatggcgctctgaaggaagactgacatgttcctggaaggaaaggctgaaaactggggtccatatgtgatattttctcatgtcaattcctctacattaactcagtttcctaagttgccctgattccagtctagtattttctt

SEQ ID NO: 209230 - DNA, 585 bp, Homo sapiens
tccccttttcccaacccctctcatctttcttgaatgtgtgtgctcttttgatcttttatttcctgccatgggatgatacagcaagaaggctcaccagattctcgtactttggtattaaactaggcgtccaggatattaagaattcaaggagattggaaccacctggaccatctggatatcccacagaagaccacactgacccattattacactgatgatatcatgctgattgggcaagagaagcaagaggaaggaaggcccacagaagttgctgtgtgaacatgtgtggagatgtgaatccatatagctcaaagggtggactgtgacacctatgagagctacaaatgaagacttaggagtgttcatcaaataaggagttgcaagaagaacacagaaaccagatttattgtatacatgaaaaaataaaaagtactactcaaggaggatggcgctctgaaggaagactgacatgttcctggaaggaaaggctgaaaactggggtccatatgtgatattttctcatgtcaattcctctacattaactcagtttcctaagttgccctgattccagtctagtattttctt

SEQ ID NO: 209231 - DNA, 517 bp, Homo sapiens
gatattttagcagctaagtgctttgtcattgcttttgtgagttgtatatagagccaacgttacctaccatatgtaaaattagaaattttctgtttgatccaatctttcctccatccccccgatatacatatatatatatatatttatctctgtgtatatatatatatttgtgtgtatgtgtatatatatatttgtgtgtgtatatatatatatatttgtgtgtgtgtgtgtgtgtgtgtgtgtgtgtatgtgtgtctctgtctgtgttacatatgtctctatttagaggctatttaataatttaaaagctcctttacatagtatctccaccagttgagactgtaccagggccctgtatgagggctcctgcttctttttaaaaagccaaaatctgggacctttgtggctgccattcttattttctcagaatattgtccttgagaggattaactgcccaattttacctagaataaaccttatctttgccttttcagcttttgtttggtgggagagcgtc

SEQ ID NO: 209232 - DNA, 325 bp, Homo sapiens
atgacaaattaccttagaagagaataagaaacttaaagtgctccccccacaataatagtcctggctcaaaaagtttagtgatgaaattctacctaacctgtaaaaatcagattacctgtggttcttaaactttactagaacattaaaaaagaggaaattgtcaaaattgatattataaagtacaacattgatctaaaaccttaaaacctattgtactgcagatcattctcactcaatgagtatcagtgtaaaaacttttaagtattagcatgtggaatccaaagcacgtttttaaaatactatatcatgaccaagtggggtttat

SEQ ID NO: 209233 - DNA, 492 bp, Homo sapiens
gctgtctggagactattacagccagtttacctccacaattcaaattccaaaccttgcaaaggagatcaagtcagtctttaggctcagcctactagcaagaaacagcaagagtgcaggacacttcctaacagcgctgtaggactcgggtgacagcaaaataaagaaaatccaaataaatacgatcccaaaagatcaattttcactggtctgctatcttactggatttgctgaataaaatgcatgcctaatccatgatcaaaataagttcaattgatccggaacgtgctcctttcacatagcctgcctgttgaaggtgactccctgcaagcagcccgtaagcccaataatggatttccctggctattctaaggaacgaatcgatgtattttacaatattgcacctccatgtcgttgtaaattttgttattattcctaccagcaaacgttcgagctcgaagcccgcaccgagtgtctctgaatggctctccctaa

SEQ ID NO: 209234 - DNA, 237 bp, Homo sapiens
taatcactagaaccatcctaatcatatgaccagcaaatttttcaaagtactgtccttatgtttcatctcagttcatcttgactttacataatatgactgtgaaataaatagattttactatactcagttaaaagaacaatgtgacatagcttatggaggagtgaaaatggcatgactaggtttcaatgccagggtgtgcgggaggtaggattagactcacagtctatgagacccact

SEQ ID NO: 209235 - DNA, 326 bp, Homo sapiens
ctctaatttttctctctgtggacaggataatcacttcaaacaatttactactttttaaaatttaaaaacaacgcatgaatatagttaaaaaataaagccaaattcaaaagtgagcacaatgataagtaggtctctctactaagtcagctctttatttctcaaggatctcttcctataagcaaccacatttaccagttgattgtatatttttcagaaatagtttatatacatatatgtataagatatataatatgcatttttgataattcatttcttctatataggaatgcttttaatatatagacttgatcataacatacaacaaa

SEQ ID NO: 209236 - DNA, 384 bp, Homo sapiens
aaagaaaaggaaaaagaaaacaaaataaaaattacgttgaaaggatttggaaaacctgaataaaaggctagttgtgtagaaaaaagaaaaattatcaaattggttatgagacagatgactgaaaagactaggtaaaattgtgaaattgtgcaaaatgatgtgtttggattttcatggtctttttctttctctaaaatcaaacaaacaaaagtagaaactatagaccaagatttatagaagaaagatggggcagaacttcggtcagtgggtacttacaaagaaaaggcctaggccctatgttagatgactggcagatgtttgtaaatttatgtattttaagttaaataaaatgttttagatagtacatgttatttgtaaagcatt

SEQ ID NO: 209237 - DNA, 671 bp, Homo sapiens
tggccatcctcgtctgccaccgagtcctcctatgttctctttgcccttgtaggttaagacttttataaaactttcaccttgtttgtggtaagagacaggaattcacctttgtttcctccagacagtcttcatctccggcctctgcagctcccctgctccaggcttttgcatcagattaaatggtaccatcctcttcccagtttcttaagccaaaaatgaagacgtcatccttgactttgctctttctctcatgcaccatttccaatccactggcaaaatcatgttaattgcaccccgaagacagcacgagtctttccattttccactgcatatgaagtcaacacctaacccaaagccattgcctctcctggatgaccacggtgcctcctaaccaccctccctgcatcccctccagctccaggggacccatgctccatgctgcctttgcagtgatctttcttaggtgtacctcgggtcacacctctcctgtgcctgagcttccaggggcttcccactgctcttggaatgaaaacccaagctcttcatcggggctcacgggtccctgcatgacctggacctgcaccaacctatggatctcctctcatgctgcccctgctcagccaccccagcctcaacccactctcagaacaggccagcctccttcccactca

SEQ ID NO: 209238 - DNA, 406 bp, Homo sapiens
taaagcccttaaataattccagacatctgtgtcatctcatcattgatgtttgttggttgtctttcctggtttttcatatgctgaataatttggggttgtatcctgaacattttcattaggtttttttttttttttttaataagactctgggtcttgttttaatctgccagttttgctgtcattcaaattcagtcttcatcagtatgcctgtttctatttacttttcaaagtaaataactatgaatatccttaaataactacactacccatctctccaggttttattgctactttcagtggaaaagatagagtggaatgtgcttgctccattgtacctagaaccttccttccagagaggattttacttttgctttattcaaataacactagctcctgaacaattttt

SEQ ID NO: 209239 - DNA, 173 bp, Homo sapiens
tcttgattttaggtgactgtttgaatccactgtttttcctgataacctgcagctaggattgaagattatacttcctgtttaccctgagtcaggggagaaatgttcagttcattgtgacttgactctagacctttaatggggtttgtttggatattcaaactgtgagtaggtga

SEQ ID NO: 209240 - DNA, 413 bp, Homo sapiens
tggaacttccgggggaactattagaccgcctgcttccaaagctggtcaagagatcagggataggaacatgctctggaaactacacagtcctggaaagacgggagggctctgtggccaccagattgtcactctgaggacctggtttctcacttctcacaagatgcctcaggggcgaagcttccgaactcctcaggacgagggaggaagctactccccggtgtttctctggagtcactagtgggtttttatctcatgaactctgtgaacctggccactgatctcatttcctttttgctttggccaccatgaagctcagatcagaatttgcagctcactccaagcaattctgtagcactgggttctaattttaccttgtgccctttaacaaatgccacctttattttctctttttt

SEQ ID NO: 209241 - DNA, 249 bp, Homo sapiens
gatatttcagttcatacacccccttgaaacttggagcagagagcagagcttgcaagggtaggatggtaatcactgaggagtatgataactgagggggcagaagaaacattacaaatgtaattatcacactgtatattaaacagtgattggggtttatttatttattcatttatttatttattttgagacagaatcttgctctgtcacccaggctggagtgaagtagtgtgctcatcatggctcactgca

SEQ ID NO: 209242 - DNA, 202 bp, Homo sapiens
aggcggatcggtgtctctcccactctgcagtgcccccagtggctggaacatagaatgcactcagtaaatagtgctgtaatgaacgaacaaatcaatgagtctctgtctcgtctcttctctgtttgctctgtgtctccctttctgcctcgctctcactctcgctctctctccccatgtgtcctgcaggggtcttgtgcctgga

SEQ ID NO: 209243 - DNA, 186 bp, Homo sapiens
gtgacaatgctgagcccaatcactgtgccttgcagagcagatgccctgtgtacctccctcctgttaagaaaccagagggtttttaattgcctgattattaagaggctgttcttgctgctcctgctttcctgggaagtttcccatctagccgccagtgagtattcattatggaaatgaagtgcacat

SEQ ID NO: 209244 - DNA, 239 bp, Homo sapiens
cagctcactggggagacaccaaatggtagaaacttggtctctgagcagcatcgcctttgcagcagcttctcctcacctcctccatgcctcgatttccctgccccatcatcccatcagcttcactgtactgctggagtaacttcctacttaaaaattattgataggccaggcacagtggcttatgcctgtagtcccagcactttgggagtccaaggcaggtagatcccttgaggtcagga

SEQ ID NO: 209245 - DNA, 661 bp, Homo sapiens
ttttatatccctcctaataaactgaaatgctgggtttcatctaggaaatctcatgccctgcaagttttttcatataactataaaatatcagaatgtggtagattttttatgtgctgatttcatgaatctcattagaaaatcctgttacttttttgagattgaaattttacactgctacctttgttacagaagatgattttttaaaatgcgtttttgattatcatgtagaactacagaaatagtgatgaatagagacatctgccagcacacatacagattgataatgactttatttgtactttggcctaatgtgtatcctgacagatcatcaaaacaagaaaagaaagagctcagcagacagtaagaaatggccagatgctcacagaatgatgaaaagtcattgtctcttatcttttaatgttcaaattatgcaaagaagacacttttattataaattttaaaaggaatctaacttatcaaacttaactgctacttcagggatatgccaaacattctggtctcgaaatgtttggttctcttcatcttctgtgttcatcctctcctttttcactatcagcctttctgcaaactagatgttatctctacctgggaaccttgaagatctcaagggctcccagaccattttgtaactgtttcccta

SEQ ID NO: 209246 - DNA, 206 bp, Homo sapiens
gggtggcagccgccacttcctgatgtgacagggaggcgataccttgcctagattaggtgcttactgtgagagacgctgagatgaagaacatggcctagaaaggggctcgtatggctttgtcgaaaagccacctcgatgtccaggcggagcaggtctctgcgatgcctctgccctttggactctaaatccagatagttcacgtttcc

SEQ ID NO: 209247 - DNA, 502 bp, Homo sapiens
tgccagactgattagccttctgcatctggaacataaatgttttcaggcagcataatgtgcaagaggtcagagcctaaagctttgttattttttaatttctccaccatgtcaactctgttacagggaagcccagcagagggaattgtatccattttggggctacactaccccaatgctatgctgcagccaagctgaacttctaagtttctaaatgtaactcacttaccttcaggcctttgtacggggagttctttttgcctgaaataccttctgacatcttaacattacgcttagatgtcagttacaaaaaagctttttctagactctctcacatgtcccactccacacccctatatctcttcccaccaatgtactagggtaggtatcctgctaggtacttccactgcaccctctacttttcttccctaatgattaccactatattgtaattgcttaatttctttttcctatacccagataaaaatgtgtatgaaggtggagc

SEQ ID NO: 209248 - DNA, 255 bp, Homo sapiens
ttagaggcggtgagccatcgcgcccagcctgaaatggaggttttttatgttttatttattttgttttgtaaggcagggtctcacgctgttgcccatgctggagtgtagtggtgcgatcaagtatcactgcagcgttgaccttcctggggtcaggtgatcctcccacttcagcctcacaagtagctgggactacaggtgggcaccatcatgcctcactattttttgtatttttttgtagagatggcgccatgttgc

SEQ ID NO: 209249 - DNA, 520 bp, Homo sapiens
tgggcagccagtcatcaaagcagagagacgtggcggcatgtgggcagcatgcccaggttccttgctgactcagcacttatttctgtagttttaaaaaagaatttaatgtttttggttgtatttttttgggggggtgagggtgggcaaaaacatggggggagttctgagttgttagaaatgtttctgaatcaagtttgtttgaagacacgtgtgcctttgtacccattataagatggtcataagacccaagaactgataagctttggttttttttttgttttgttttgttttttgcttcatttacccattcatgcctagggttccattattggaaccctaagcttgtgggagttatttctatcctactgctcaaggtcatcaccaagatctgatttttcataaaaaacatttgtgaccttcggcataaatgggttaaggtgccatccctgaaactgcaatgcagatatgttcagataacttttattttttaattaaaaataaatctttcaaaaggaaagag

SEQ ID NO: 209250 - DNA, 130 bp, Homo sapiens
ccagagtttaacacccagtcctggagtcacctcctccaggaagctttctgtaatcctacaaactgggttagatgtttctttttagtgatgctatgtttccttacgaatattgctgtcccttcattttaaa

SEQ ID NO: 209251 - DNA, 318 bp, Homo sapiens
caaggttggccgtttccttcagcactgtaaagatgtcattctattgtcttttggtttccagtttctgttgaaaagtcagccatcagttttattgctgctcctttgaaggtaatgtgtcttctcttcctgtgactgtcacttttctcaggtttttcagtagtttgactataggatggtaggcgtgtttcctttgatttatcctgctttgggtttctgagattttaaaatctgtgcgttgatgtcttctcataaattttggaatattcttggccattatatcttctgccccatgtattgcttcttctctggtctcttgct

SEQ ID NO: 209252 - DNA, 327 bp, Homo sapiens
aggcaaaagagactgtagccttgacccagatgacactttggactttgtaactttgagttaatgctgaagtgagttaagactttgggagactgctggcaaggcatgattgtattttgcaatgtgagaaggatatgagattcgtggggtcagggacagaataatatggtttttctctatgtccctaccaaaactcatgtggaattatattctgtgatgtcagaggcggggcctaggtggaaaaagatttagtcataaaatggtgcaggtagatccttcacgaatgataaaggaccatcaccttgataaaggaccatcacctcctgatag

SEQ ID NO: 209253 - DNA, 953 bp, Homo sapiens
cctgtcttgtctgaagccacatttccccagcaatgtcacatatgcatttcttgatcctggtcatttctcctcttgggagatgaatcataaagaaaatgagatctgtgtgccctggtgactatggatgcaagagtctgctgccctggagggaacagctggaaaagtagatggtgaagacgtgtgggggggaaacagtggagaaggcatctttgcaggggatcaaggtgacagagtgattagttacactgttttgacatgtgagaacagggggttataaaaatggatacaggaagagggagagaaagtaaggaccaaaacatgaagccagtcatgaatgtttttacataaaaagcagcagatttacggcaaatatgtgatgtttccacattttctgcctctagttagcaggggcagcacaaagagcattactgtggagctgaactttgggtaaaagattaacagccagtcctttctctccagtgtctgcttccttctgggcttgccctgggggaaaaggagggctggcatggatatgcctgcagccctcaccctagatgttcttccacgcctctctgttcattcattgcttagtcattcctcaggcatggattgagaccactgtgtgcccaggaccgacctggcctaggatggacatagagatggaaaaggcacagggagcaggtgacagagacaaatcaaggtcatggagaatagcagagtaagatagaagatgaaggcaggagatggggttcttgagaaagcgagagcaggactgacccgtgtctgcctcacctgttattgctgtagcctcttctccttggagtatccctcctgctcttgcatcaccttaggaacttggatcagagaggaaagttacggcctggatatgttgtagtaggaggggacaaacatgtttggagacagaaatgcttggggagcgggtgtttttgggg

SEQ ID NO: 209254 - DNA, 455 bp, Homo sapiens
agaatcatcatccaatattcaaataccagctgccttcattttttttcttaaactctgtgtcaatgagctataatatctacctcaaaatattttgtttataaatctcttctatcccaatgtcagatgctagaccacctgttttcatttctattaactacctacacattttctactcgttaattctgtacagtatcaataattctcatttctctgcttcttaccctgactgcaaaatgagtggttagtgtgtctggctcttgcaaaaaacccaaatctaccttctgatgagtcacctagagatgagaatacatgtagggcagagcttttcctgccaacctggtcatctgctggaacgtgatgccccagtcaacaacacagggattaataattttattattattattattgttattgttattattgagacagggtctccctgtgttgcccagggtgga

SEQ ID NO: 209255 - DNA, 239 bp, Homo sapiens
gaatgctatggctgatgagggaagttatgtctgcgggatggtagggctcatggtttgttgttttctctgcataacagggagataatttgccaacccaaccagagcactcagtgtcttcatgctgtcatgtgccccttcgcctgtcaccatgcccttccctcttctcgggctgtcctgtgtgtctcttagttctcattttagatacagccttctccaggaagcctgccctgattccttca

SEQ ID NO: 209256 - DNA, 323 bp, Homo sapiens
tacgcgcacaggatatcgcaccccagacctcagtatcacgcagttgccatgtaacaaacctgcacatgtaccctctgaatctaaaataaaagttgtaattttatttttatctgtgtttgttactgtaatagccatctctcccacctaagagtaaagtttatctgggcaaaaaccatgtttatttttgtacacttttgtaattctggcatatagctatgtgtctagacacatagcaggcattaaaaagtatctactgaatgaatgttaacttcctgctggataaagtggctctttcctataatggccctaaagagaaaaattat

SEQ ID NO: 209257 - DNA, 522 bp, Homo sapiens
gactgatttgagctgatagttgccatgcaggaacgcaggccaagtgtggctagttcttccaagttttcaaggggatctggaaatagggatataagaaatctcttcagttttacaagttggcagcatcttccattttttaagaaacacactgtgtgagccaagcaaaacacgtctgcaagctggcagtggtccacagtgtgccgatttgtaaactctgtcctcagactttagcattcactatagcaagaacagcaaacacatacctagtgcttactctgtgcctggcactgttctttttctttttcttccttttccttttcctttcctttcctctttctttttctttctttcttttctttcttatctttcttttttttttttttgagacagagtcccacactgtcacccaggctggagtgcagtggtgcgatctcggctcactgcaacctctgcctcctgggttcaagcaattctcctgccttagcctcccaagctcctgagtagccgggattacaggcgcac

SEQ ID NO: 209258 - DNA, 828 bp, Homo sapiens
tgctgtcagcaggcctgggttttagtccccacactgcccctcactgggctgtgtgactctcggtcagattcttcctttttctctgattgtcagtttcttcatttgtcaaataacccaccctccttgagagtgtcgttttattcccattttacagatggcccagagaagggaagcaagacagtggcacccaggagcccagcaccaagcccagggctgtttcccctacacctggccatcatctttccaggggtctgggcagtgccagtccaaggggactaattgtaggcaatgtggatggtttttgtagaggcccagacttctaaagacaggcggtccaggggctctcatgataggagaatgggaatggccaatccaaagaagagaaagcgcgaccaagaactggtattcagattgggtggcccaggggctctcatgataggctggctggagagagttgcagactgagcccctccctgtccctgcactcatctctgggcctgcctgagagctgattgtgctgcggccgcatctgatctgggcagactggtccctgcagacaccagcgtccatcagggccacagcatttcccagggccacatacctagatctctgcttcccacgtgcgtgtgcgtgtgtgtgtgtgcatgcacatgtgtgtgtgcctacatgtgtgtgcgtatgtgtgcatgtgtgtgtgtgtacgtgcgtgtgtgtgcgtgtgcgcgcgtgtgtgtgtgtgtatgtgttttgggtcagggagggggctgagttaggaagtctggagcacagcactgcagcaggggtgggggctctgttgaggtgtgtctt

SEQ ID NO: 209259 - DNA, 475 bp, Homo sapiens
gaccccagcgctccggaaagtacctctgcttcctgccaccattccactctggccaaacaggctctactctcttctgatgggaggaggccgcaggcaggtggttcagtggttagggccaaccatctacttcagttcctgtctggcccagatctctgaccttgaccatgccctagtgggtgtatgtatacctttagtgcaagggtggtgtgacagttaatactgagtgtcaacttgattgggttgaaggctgcaaagtattgacctactggaagtgtctgtgagggcattgtaaaaggagataaacatttgagtcagtgggctggggaaggcagacccacctttaatactggtgggtaccatctttctaatcagctgctagcgaatataaagcaggcagaaaaacatgaaaaggtaagattggcctagcttcccagcctacatctttctcccatgctggacacttcctgccctctaa

SEQ ID NO: 209260 - DNA, 803 bp, Homo sapiens
  misc_feature (732)..(732): n is a, c, g, or t
  misc_feature (743)..(743): n is a, c, g, or t
  misc_feature (747)..(747): n is a, c, g, or t
  misc_feature (763)..(764): n is a, c, g, or t
  misc_feature (770)..(770): n is a, c, g, or t
  misc_feature (773)..(773): n is a, c, g, or t
  misc_feature (776)..(776): n is a, c, g, or t
  misc_feature (785)..(785): n is a, c, g, or t
agtttcagtctcatctgcgtccactcggcctcagttcctcatcactgttcctgtgctcacagtcatcaattatagaccccacaacatgcgccctgaagacagaatgttccatatcagagctgtgatcttgagagccctctccttggctttcctgctgagtctccgaggagctggggccatcaaggcggaccatgtgtcaacttatgccgcgtttgtacagacccatagaccaacaggggagtttatgtttgaatttgatgaagatgagcagttctatgtggatctggacaagaaggagaccgtctggcatctggaggagtttggccgagccttttcctttgaggctcagggcgggctggctaacattgctatattgaacaacaacttgaataccttgatccagcgttccaaccacactcaggccgccaatgatccccctgaggtgaccgtgtttcccaaggagcctgtggagctgggccagcccaacaccctcatctgccacattgacaggttcttcccaccagtgctcaacgtcacatggctgtgcaatggggagccggtcactgagggtgtcgctgagagcctcttcctgcccagaacagattacagcttccacaagttccattacctgacctttgtgccctcagcagaggacgtctatgactgcagggtggagcactggggcttggaccagccgctcctcaagcactgggaggcccaggccatccgatncctgcacgganctgngcttttgcctgggccnngtgctnggncgngggatattngggcccgcctctcttgtg

SEQ ID NO: 209261 - DNA, 849 bp, Homo sapiens
agtttcagtctcatctgcgtccactcggcctcagttcctcatcactgttcctgtgctcacagtcatcaattatagaccccacaacatgcgccctgaagacagaatgttccatatcagagctgtgatcttgagagccctctccttggctttcctgctgagtctccgaggagctggggccatcaaggcggaccatgtgtcaacttatgccgcgtttgtacagacccatagaccaacaggggagtttatgtttgaatttgatgaagatgagcagttctatgtggatctggacaagaaggagaccgtctggcatctggaggagtttggccgagccttttcctttgaggctcagggcgggctggctaacattgctatattgaacaacaacttgaataccttgatccagcgttccaaccacactcaggccgccaatgatccccctgaggtgaccgtgtttcccaaggagcctgtggagctgggccagcccaacaccctcatctgccacattgacaggttcttcccaccagtgctcaacgtcacatggctgtgcaatggggagccggtcactgagggtgtcgctgagagcctcttcctgcccagaacagattacagcttccacaagttccattacctgacctttgtgccctcagcagaggacgtctatgactgcagggtggagcactggggcttggtgcaagcgggtctccagactgggaggccagaagcaatcacatgtctgagaccgggaaggggcttgcccgggccggatgggcgaagcgcaacgagggcgcaccaagcgggggggagaacccgccagagcgcgggacgagagcctacacaagcagaccgtcg

SEQ ID NO: 209262 - DNA, 288 bp, Homo sapiens
agtataatgcaggtagaccacacatagtctaagaaattcagttttagatattgccatccttccagcttctgttccagtttttttaaactctgtacatacacctgagcatcagttaccatatgtatgctgagagtatctgcattccttttgtaacttagtttttttctccagagttgtagatttaagacctttttttttttttgagatggagtcttgctctgtcgccaggctgtagtgcagtggcgcaatctcggctcactacaacctccgcctcccaggttcaagcaa

SEQ ID NO: 209263 - DNA, 336 bp, Homo sapiens
cgaggtcttgctgttttgcctgggctagtcttaaactcctggactcaagcagtcatcccacctcagcctgctaaagtgctgagattacaggcatgagccgctgagtctggcctaagaatttattaattccagtttttttgtagatcccattgggattttctacagtagactatcatgttgccgtaaaaatacgaacagttttatttcttccttttgatctatatgccgtttatttcttttcctatttttattacactggctagatcttccagtagtttgttgagtaggagaacacactgccttgccttgtccctgatcttaggggaaaatactgag

SEQ ID NO: 209264 - DNA, 454 bp, Homo sapiens
ggaaagggacgaatcagaatggcaatatacatggagaggagggactctttagtcttgggtgtgttaagaatgacattcagtgcagcctctttaccacctccccacttacactgcagtatgtcccaagacctaccaaccatgtaggattattcctggattgtgaagctagaactgtgagcttcgttgatgttaatcaaagctcccctatacacaccatccctaattgctccttctcacctcctctcaggcctatcttttgctgtgttcacctctgaccagagacaaatcagatatgtgttcatctgctgtgggaacccctttatcccagaaagccctcttccttgtgccttatcaaacaggacaaatacgttctgttttatgtcttgaattgcattctaatgttattaaaactcatttattgtgttactattaaatgtggtaaaaacactaaaaa

SEQ ID NO: 209265 - DNA, 581 bp, Homo sapiens
ttctggcaattattagtatagggataatattgatttttgtacatgaaccttgcatctagaaaatttgatgaattagtttattagcattaatagaatgtatgctctctagagttatcttggtaggcaattaagtagtttccaagtagggagagtggcataaatctttcatagtttatttattatgaaggattattttaatattatcttgaagctttaattataagcatataatcttattatttttatatcttctcggtatatttttgattttgttgttatgaagtttccttttcatccttattcattgtttctgagtttataatcagacaacaactatcatatactaacttcttatcagacattgttctaagttctacaaatgtacaaaaccacttaattctcacacagacccattagacaaatactattattatactatgcttattaaaaaagccaaggcaggtgtaccacctgaggtcaggagttcttgaccagcctggccaacatggtgaaacctcgtctctagtaaaaataccaaaattagccagccatggtggcgggtgcctgtaatcccagctact

SEQ ID NO: 209266 - DNA, 268 bp, Homo sapiens
ctaacttgaccttccaacagatgagatgaccgaggagcagggattcatttaagagcccggctccaacctaatcagctaccaagctgctatccaggcaaagattctgccagtcctaaaccttggctctaggttcattttttgatgcacacgagaaaagccgcatctgtatctcagtcaggcggggtgtgtgatcccatgcgcttctctctcatcttccttcaaacctcttcatctttcaattcattcattcagcaaattatgtgccagg

SEQ ID NO: 209267 - DNA, 531 bp, Homo sapiens
tctgcctcaaaaaaaaaaaaagaaaaaagaaaacgtctgtttatattttttgccaattttgtaattgggttgttttcttgctattgagttgtttgcgttccttatatatttaaaatactaaccccttatcagatgtatggtttgcaaatattttcttccattctcgagattttcccttcattccgttgattttttttcctttgctttgcagatatttcctttttattttgatataatcccatttgtcagttttcattttcatggcttgtgctttttggggtcatatccaagaaatcatttaccagaccattgtcatatagcttttcccctatgttttcttctagttttatagtttcaggtcttacatttaagtctttaatttattttgagttgatttttctgtatggtgtgaaacaagggcctaaattcattctgtatgtggatatccagttgtcccaacctgtttattgaagaagctgtcctttccccgtgtcatgctcttttcatcattgtcaaaaatcaattgttctg

SEQ ID NO: 209268 - DNA, 226 bp, Homo sapiens
acacaaaaggacaatattgtatgtttccactaatatgaggtaactggagtagtcaaattcatagagacagaaaatagaagttaccaagggttacggggaagaggcaatgatcagttactgtttaatggatacagagtttcagtttgggatgatagaatagttcagatctggaaatggaccgttgcacattgtctattaatgccacttaattgtacacgtaaaaatg

SEQ ID NO: 209269 - DNA, 260 bp, Homo sapiens
tatagcattccaccgcatgaatacaccacaatatacttattaattctcttactgattggctttctcaactgattggttgtttccagtttggggctattaaaagaatgctgctgtaaacttcttgtacatatctcttgggacatgctccaaaagtttctctagggaatatacctaggagaagaattactaaacaatactatgctgttttccaaaatcatcataccaatttatactttcaacagcctggcggtaacgtgcaa

SEQ ID NO: 209270 - DNA, 443 bp, Homo sapiens
acacacaccctcaacataggcctagcatagtgtgtcctcagggtaggtattcaagtcaatagctttatggacaagggacattagaagcccttcttcagattaacgattatttctttattggggtatggtaatacctctgaaatgtatgaagcattccaaatatagatacatctttaaaaaaaattttttttttgagatggagtcttgctctgttgcccaggctggagtgcagtggcataatcttggctcactgcaacctctgcctcttgggttcaagcaattctcctgcctcagcctcctgagtagctgggactacaggtgggtgccaccacgcctggctaatttttgtatttttagtagagatggggtttcaccatgttcgccaggctggtcttgaactcctgaccttaagtgatccatctgccttggcctccctcctggga

SEQ ID NO: 209271 - DNA, 445 bp, Homo sapiens
gccgagatcacaccattacactctagcctgagctatagagcaagactctgtctcaaaaaaataaataataaactgaatttttgtaaataagtatctggtgaggaccactgtaaactgcaggaggataggagattagcatatctggctccttgagacccataactatattttatttagaattatctctctggtacttcacatcgtgtcacaaattaggtaatacacgtagtggaatgaattagcaaatgatgagtgcattttcataaaccttcggaggatgagatgggtgcccttggggggtggtgagtgctccctcccagaagtgccaggcgtggtctggccaaccagcgaggcagtggctgagctggctttaatgtctttccaatcctggcagtcagttctatgaaattcaatgagtatttaaaatgtcttgttggatggtttg

SEQ ID NO: 209272 - DNA, 222 bp, Homo sapiens
agggctgagggccactttgctctggccaccacatgctgggagcacttgctgaacttctctgcaccactcaacactgttggccattctttccttcctgaggctttcatggcaccatacccccaagtttcctcattaatctatggttgctctttctcaagatacttcactgacttatctcttagttctttgagtcttaggattctctagagttttgtatttttc

SEQ ID NO: 209273 - DNA, 271 bp, Homo sapiens
ttttctgaatccctcaaagaatgcttaaccttgaaaacaattttcagtaattattcagggcagatataggggcatggctccagcataaaatcctaaaaatctatctttaacttctactagagtgaagagtctcgtttttgtttcctataagctagagagaaaccacaaaacacaaattctgaaaatacttttgtggtcaaaagtgtatgctggtcgggtgcagtggctcacgtctgtaatcctcccactgttaaatttgactggctttaaa

SEQ ID NO: 209274 - DNA, 520 bp, Homo sapiens
cagactctggatttcttccccttagctattttccccctgagactgctgatattagaaaatggtaccgctcaattgttcaaaccaaatatctcctagttgcctttgattccttgcattttgatatggtttggctctgtgtccccacacaaatctcaccttgaattgtaataattcccaagtatcaagggcaggaccaggtggaggtaattaaatcacaggggcagtttcctctgtgctgttcttgtgatagtgagcctcaccagatctgatggttttataagcctctggcatttcccctgctggccctcattctctctccttccaccctgtgaagaggtgccttccactatgattgtaagtttcctgaggcctctagccacacagaactgtgagtcaattaaacctctttttataaattacccagtctctggtattttttcatatcagcatgagaatgatctaatacacatcccctcaccactccacatccaggtcattcccatatttctccatctttata

SEQ ID NO: 209275 - DNA, 543 bp, Homo sapiens
tcaaagtcatgaagccataaaacatagcttcttattggcacatccaaaaataaaaaagataactataaaaacattaataataaagacctgtaatgatgataatagacgagtgcttgaataggaaaatcacctgctccttgtataaaataattggcctgagaaacctagatctgtggtttagagaaagaattggcatacaatttagactgatcaacaaatgaattctctagttgtggagaagctgtgaacataacctctttaagagttaattctactgttttctaccggatggaacgtttgtgtcacaagaaacaagccgccatctgaggcagagccaccctcttgaccatgacaatcactgccccaccaagaaatacatttgtgtgaatctttctaagagacaaaggcccactactttcaggtcaaactctggggatcattaaatagcctcagattccctgaaatcacaccagtgtttattctttagaatttccaagttgagtatggggctgggaagaagtaataaagatttttgcacacact

SEQ ID NO: 209276 - DNA, 496 bp, Homo sapiens
atacagaatgtgagatcccgttccagccagtggaaaccggacacagcagtagggtggacgcgtcaggttataaatgaccctgtctcctttgttcagtatactcttgtggcaaaactcctggcgagtgtaccctttctgcaggaagtaaaaatggctttactaaataaattaaatttatgttcaagtgctatttctttatggtaccgaagaacaaacatttcagagatcagtaagatctagtgctcaagaccgattggccctagccaagagtacgtgacatttcatctatacaggagaaaaaccagagtgtatgggtgcagatgcagggaaatgtccaaatgctacagtgggaactgatggaagtatctaacttgtcatgaaataggaagcaggacatcagccacaagtgaggatggggatggagatgctggaggtttgaagagagaagagaaataataataatacaattatttaggggagagggagaatgatgaaa

SEQ ID NO: 209277 - DNA, 914 bp, Homo sapiens
agaaagtccatcaacaggaactccgtgagatcgcgaatgcctgcaaaatcctccaagatgtacggcacgctgcggaaggggtcggtctgtgcagacccgaagccccagcaggtgaagaagatcttcgaagcattgaaaagaggcctcaaggagtatctgtgtgtgcagcaggctgagctggaccacctgtctggacgccacaaagacaccaggaggaattccaggctggctttctattatgacctggacaagcaaacgcgctgtgtggaaaggcacattcggaagatggagtttcacatcagcaaggtggatgagctgtacgaggactactgcatccagtgccgcctgcgcgacggcgcctccagcatgcagcgggccttcgcccggtgccccccgagccgcgcagcccgagagagcctgcaggagctgggccgcagcctgcacgagtgcgccgaggacatgtggctcatcgagggggccctggaggttcacctgggcgagttccacatcaggatgaaaggcttggtgggctacgcacgcctctgtcccggagaccactatgaggtgctcatgcgtctgggccgccagcgttggaagctcaagggtcggatcgagtcagatgacagccagacctgggacgaagaggagaaggccttcatccccacgctgcatgagaacctggacatcaaggtgacggagttgcggggcctgggctcgctggctgtgggtgcagtgacgtgtgacatcgccgacttcttcacgacgcggccgcaggtcatcgtggtggacatcacggagttgggtaccatcaagctgcagctggaggtgcagtggaacccgtttgatactgagagcttcctggtgtcacccagccacacgggcaagtgttctatggacaccggaagggtctccat

SEQ ID NO: 209278 - DNA, 296 bp, Homo sapiens
ctgcagggatggttagaggccctcgtggcctagccccaggcagccagctgagccacctccggggctttgcaggacatgtggctcatcgagggggccctggaggttcacctgggcgagttccacatcaggatgaaaggtaacagggctgagagggggtgggcggaggcctttctggaggccctgagacttctgctgaggggcacgggaattggccagaatcccaggggtctgagcccagccctggcttttgcatccatgtgacatgtgacttctggcaagtcccacccctctctgag

SEQ ID NO: 209279 - DNA, 566 bp, Homo sapiens
  misc_feature (514)..(514): n is a, c, g, or t
  misc_feature (517)..(517): n is a, c, g, or t
agtgttgggtcttgttttttcattcattcagtcaccttgtgtcttttaaattggagaatttggtccatgtttacattcaatgtaattaatgataggtaaacactactgccattttattgtttgttttctggttcttaagtcctttattttattcttactatctttctctgtggttatcttccctggtaatacattttaattcattgctttttatttttactgtatctattataggtttttgctttgtgattgttatgagacaaaaaatcttatagttataataacttgttttaaactggtaactttcatcacaaagaaaagaagcaaacaaccaagttttttagttgtttttagaagaaactaaaaaaccctacaatttaactcatcttcccccactttttgactttttaatgtctccatttttaactttttatgttgtttatctctctctcgctttttttttttgagatgtaatcttactttgtcacacaagctgggttgcagtgagccgagntcncaccattgcactccagcttaggcgacagagtgagaccctgtctcaaagg

SEQ ID NO: 209280 - DNA, 373 bp, Homo sapiens
gtgtacaaatctgaaatataagggtctggtcttatatttactaatacttaggtcatgtctaccttaaatgtgtctgagtgtttatgacagagagggacaaagagaaagagaaagagagagagagacagagagagagagagagagagagaaagggaggcagaggggaagaggaaataatacaaataattatgtaattgatgataatcatttttaatcaaccgcgagagagagggggaaagggagatttccagaaaagaggtttatcatagtttcaagcaaaaaacaaacaaacaaacaaaaaaccctctgagttgaagtttatcaaaagatggcatcagacatacagcctccataattaaacctgctgcgtgta

SEQ ID NO: 209281 - DNA, 568 bp, Homo sapiens
  misc_feature (14)..(14): n is a, c, g, or t
  misc_feature (19)..(20): n is a, c, g, or t
cgacttagaggatnccccnngcaccactgcaataagacgagtcccaaattgtttggtttcctggtgcatataaaagttatgtttacattattccatagtctattaagtgtgcagtagctttatgtctaaaaaaaagcacataacttaattaaaaaaagcttttgctaaaaagtgctaatgatcccctgaatcttcagtgagtcatctttttgttggtggagggtcttgatattgatggctactgactgattggggtgatgggtactgtggcagtttctgaaaatgtgacagcagtgaagttgctgcatcagttgcttccttcgacaaaaaatttctctgtagcatgtgctgccgtttgatagtattttacccacagtagaacttctttcaaaactggagtcagtcttctcagaatttgccgcaattttatccaccaagtttatgcaatattctaaatcctttgttgtcatttcaacagtgttaaaagcatcttcagcagaagtagattccatctccagaaatcactttctttgctcatccataagaagcaacccccctccctttaatg

SEQ ID NO: 209282 - DNA, 389 bp, Homo sapiens
catctccattgcaacaaagcagataagatgttaaggattaagtttaacaaaaaatgtgtaaaccctacatgagaaagagtttaaaacaatccttaaagacaacaaaagtagatgtgaagaaaggagaaaaaaaaagagctcttggttttgaacttaagataactcaacatcataaagttaatttataaacagcataatgtcaataaaaacaccaacgagcttttttgtggagttagataagctgatactaaacttcacatggataaacaaacaggaaggaagacccaggaaaacactaaaaatgaacgtttctgaaaggagactaagccctatcaggcattaacacataccataaagcctctgaaagcctttacaaaacagtcacattc

SEQ ID NO: 209283 - DNA, 348 bp, Homo sapiens
aaatgtcaaaatggtctgctaaatggagaagcattgagaataatcacttctttattagttgggtttcatgtaataagttttaagctttgcagccctcattttagcttacattgggccatatgaagtcttttaactgggtgttcatggaatcccattccatcaagccagtttttaacagccaaagatttgctttgactttaattcattatttgttgtgtcagagcatttaattccaatatggtatatgttacagcattgggtactatgactatgagaaatttaggcaaggcaacaaattaaggcatatctatttttctctattatatttagttaccattttaagaatat

SEQ ID NO: 209284 - DNA, 848 bp, Homo sapiens
agcggggggggcggcccgggactgcaccgggaccagcgcctccccgcttcgcgctgccctcggcctcgccccgggcccgggtggatgagccgcgcgcccgggggacatggaagcgctgacgctgtggcttctcccctggatatgccagtgcgtgtcggtgcgggccgactccatcatccacatcggtgccatcttcgaggagaacgcggccaaggacgacagggtgttccagttggcggtatccgacctgagcctcaacgatgacatcctgcagagcgagaagatcacctactccatcaaggtcatcgaggccaacaacccattccaggctgtgcaggaagcctgtgacctcatgacccaggggattttggccttggtcacgtccactggctgtgcatctgccaatgccctgcagtccctcacggatgccatgcacatcccacacctctttgtccagcgcaacccgggagggtcgccacgcaccgcatgccacctgaaccccagccccgatggtgaggcctacacactggcttcgagaccacccgtccgcctcaatgatgtcatgctcaggctggtgacggagctgcgctggcagaagttcgtcatgttctacgacagcgagtatgatatccgtgggcttcaaagctttctggaccaggcctcgcggctgggccttgacgtctctttacaaaaggtggacaagaacattagccacgtattcaccagcctcttcaccacgatgaagacagaggagctgaatcgctaccgggacacgcttcgccgcgccatcctgctgctcagcccacagggagcccactccttcatcaacgaggtaggtcatgggggcc

SEQ ID NO: 209285 - DNA, 214 bp, Homo sapiens
gcagcctcaacttcctggactcaagcaatcctcctgtctcagccttgagccaccctgcctggcccctaaggcacagttttaaaaataagtaaatagcgaggcgcggtggctcacacctgtaattccagcactttgggaggccgagctgggcagatcacttgaggccagtaattcgagaccagcctggccaacatggcaaaacctcgtccctact

SEQ ID NO: 209286 - DNA, 367 bp, Homo sapiens
cagagcttccgctctacccacttcactatacttctcttactacaggtacacagcccttttatctctgctttcctgaagcagcctttgtaagtggaaggattgtactgaaggctcagcagcaatagagctaatgaaatggaagctgggcagtgctgagtccctgggtcacagttaccgagaggaaaagtgggctggctgagatttcatcccaggctgcctgctacaaagctcctcatctgcctccctcgaatcaagtgctacatccaataatagggactaaacccacatctgtagcttctgagtcgagagatctgaatagagaaatcagcagttaaaataaaattaaaatagctctgaacatttaaaa

SEQ ID NO: 209287 - DNA, 420 bp, Homo sapiens
tgtattaccgtctccttcattgttttttggccaggtaaggatttctagattagacattgttttctctcagaattggaagatgttgctgtcttgcttttcagtttctagcttccagtgttgacactgagaggtccaattgctgttcagatttctgacccttggtttgtgaactatttttctttctctagaacttttggagtccttttattcctggggttctaacatttccaatatgctttgatgagtttgttgttgttgttgttcattgcgctgggcacccactgggtccactgaatatggaaattcaaatcttgcattttagtaaattttggataaatttttttgattattttattctctttcactctgtgctctctttttggactttttttttttttaacttatactttaagttctggg

SEQ ID NO: 209288 - DNA, 554 bp, Homo sapiens
taccaggcagtcgggcagtgtagcagctgaggaatacagatggataagttacgttttcttccctcaagaaattcactttctattaagaagatcgacattttaaatagaaggcagtgaagacacttccgagctagaagtatgtattgggtacaagaaggcccaaaaaagggggaggtcggcttttcctgaaggtgggactttccccatgcccacctctggacattccagagagattgataggacctaatttggcatcccacaagaggagaggagaatgctttctctgtctttggttgcctctcccattcccatgctcctctcccatttggtggctgctcttaagtggcctctcactccccccagcacactgggacgctgccactgactggcatctctggagcctctttcctggaggctcagattcccatcctctgggtgttgtctggcccttttcttcctaagtgcattgtgttcttgcccattttcctgcccacttacaaaggcttatacggttaagccctttgcccaaggtcacagctggttagtaacaaaag

SEQ ID NO: 209289 - DNA, 390 bp, Homo sapiens
aggttctcactatgctgccctggttgggtctgttcttctcatgtggctgtgtggtatttcctaagtatttttaaaatttttctctcattgataccctataaaaatgcaactgttaaagaatttgtctttctttctcattatattctttccagagtatataactaatttattcagcattcattcattcagcagatatttgttgagcactaactatgttcaggcactgggcagggatatcgggataccaagatgaaaaatagtttttgaagataaaatttttaaaggatcaatttccattaggtgcacatttgaagagctcatcctatgctaagcatcatgagaataactgaaaagaggtagaatagttccttcctttagtaaacttactgt

SEQ ID NO: 209290 - DNA, 472 bp, Homo sapiens
ggagacgaccaagttgatagcatggagcaggtctcttcgccaccaaccagcaggaaaagcatttctctggacctcaacatgtagtctgacgcaggactgcggaaaattcctcatctgaatgccccgccccttagggaggagggagcagccacgcctcctagagggaaccctcccagatctggatggtgatggaagcctccctcctatctcccagtcgctcttcttgatacattctttttaagttttttttcagtattatttaattaagtaacagagttcttatagcattttgtgaaaactgaaactctaggataattttttttttaaatgatttcctttgttacaaaatttcatcagattttcctattatgggtaaacttaaaaagccttttcttaatactatactgaagttttaaacagaaactaaagatagaaagttttagaggatattattctctgctctcagccaaaa

SEQ ID NO: 209291 - DNA, 683 bp, Homo sapiens
ctggtgctaaaacatgtgaatccactgcgaaatcatgttacttcatggaagaaaatcccaaagctctcgcagcctcttgtaaaatagaggtttcattaaaggatggctctaagccttatagatagaaacgtggtattgcatttgtacacacttgcagtcacacatgtgcacaaatacacacacacacaacctccctccactccccaattcctgcgcagtccaattccctactccagacagaggatgccagctccaggggaagttgcctctgaacgcccactcaccagaaaaaaaaggtggctcttgccagcaattgcacccacacttcccagcagtcctggctgttgccattcattggtcaggtatgatgctgcctgctcacctttgacagccttcccagcagccaaccagcccagagagtctccaaaccagagccaccattcttgcgaagtgagttcccacccacccgagagggagatccttagctcctcatcatcgccagtcatgatgatgagatactctggaagacatccattctgtggaaaccccacaaggtgaggccacgtctaaatagcttacaggtgagtgtccttcctccctgcctgaccactggcttggatggagaggcggttgcatggccaggtgagggggccgcggggctgtgcactcccacatcacatttc

SEQ ID NO: 209292 - DNA, 2408 bp, Homo sapiens
ctggtgctaaaacatgtgaatccactgcgaaatcatgttacttcatggaagaaaatcccaaagctctcgcagcctcttgtaaaatagaggtttcattaaaggatggctctaagccttatagatagaaacgtggtattgcatttgtacacacttgcagtcacacatgtgcacaaatacacacacacacaacctccctccactccccaattcctgcgcagtccaattccctactccagacagaggatgccagctccaggggaagttgcctctgaacgcccactcaccagaaaaaaaaggtggctcttgccagcaattgcacccacacttcccagcagtcctggctgttgccattcattggtcaggtatgatgctgcctgctcacctttgacagccttcccagcagccaaccagcccagagagtctccaaaccagagccaccattcttgcgaagtgagttcccacccacccgagagggagatccttagctcctcatcatcgccagtcatgatgatgagatactctggaagacatccattctgtggaaaccccacaaggtgaggccacgtctaaatagcttacaggctggagtgctgtggtgttatctcagctcactgcagtttcaagctcctgggctcaagtgatcttacctcagccttctgagtagctgggactccaggcatctgaaaaccagcagtaatcctgcctctgaagtttatcaggaaaggagcttaaaagagaaccaaattcagcctgtgttggaactctcagtcccagaggggtgtggtttgtagctctccggcctgctgttggacttaggctgtgacccacagaaggacgccagaaagtactcaagacattcacggtgccccggtcagcactcgccatgacgaagacttctacatgcatataccacttccttgttctgagctggtatactttcctcaattattacatctcacaggaaggaaaagacgaggtgaaacccaaaatcttggcaaatggtgcaaggtggaaatatatgacgctgcttaatctgctcttgcagaccattttctacggggtcacctgcctggatgatgtgctgaaaagaaccaaagggggaaaagacattaagttcctaactgccttcagagacctgcttttcaccactctggcttttcctgtatccacgtttgtatttttggcattctggatcctctttctctacaatcgagatctcatttaccccaaggtcctagatactgtcatccccgtgtggctgaatcatgcaatgcacactttcatattccccatcacattggctgaagtcgtcctcaggcctcactcctatccatcaaagaagacaggactcaccttgctggctgctgccagcattgcttacatcagccgcatcctatggctctactttgagacgggtacctgggtgtatcctgtgtttgccaaactcagcctcttgggtctagcagctttcttctctctcagctacgtcttcatcgccagcatctacctacttggagagaagctcaaccactggaaatggggtgacatgaggcagccacggaagaagaggaagtaattgcacaccattttccaagaaccaagaaagaagaaaacacaagagatttttctcatcttttttttttttttttctggtggagggaggtggtggaggaacatagcaaagtaggagggacagagagtgatacttaaatttaataagaggttcgtgaaggtagcttaacttgagaactcttggttttttgaaaggttgactgcacatgccaaaaacaactcctgctatctcagaattaattatctttgaccttcgtggaggatggtctctggttaaaatctggccaaagaaactcacataaacttggtgttagagaacatctagagagagagagaggaacttagagtcatttaaactcttcagtttacagagaaggatgctgaggacctagatgagaagttacctgcaaaaggcaaaagggttacttagtgtcagaaccaaggcaatgacttctctctcccagatctcctagctactggtcctgggccatttttttttttaaataatcccaacttttctttaaaagacaagcatttcagtaagctagttattttcatgggttgctcatccatttttttcagtgatctaaaaatgtagggagatggctactactgaagttgtctgtctacttgggataatagcaaattaattgaagacaatgggaaagtaagttataaaaaatactgggaaatctgtttctcttctgagcaagcattcagggcaggtataaacatcaaacatagtgacattgtcaaaacctcttccatttgaacattgattaattcatcaaataaatggtatagtaataaattttgcttgcagaagaaaaaaaaaa

SEQ ID NO: 209293 - DNA, 1427 bp, Homo sapiens
ctggtgctaaaacatgtgaatccactgcgaaatcatgttacttcatggaagaaaatcccaaagctctcgcagcctcttgtaaaatagaggtttcattaaaggatggctctaagccttatagatagaaacgtggtattgcatttgtacacacttgcagtcacacatgtgcacaaatacacacacacacaacctccctccactccccaattcctgcgcagtccaattccctactccagacagaggatgccagctccaggggaagttgcctctgaacgcccactcaccagaaaaaaaaggtggctcttgccagcaattgcacccacacttcccagcagtcctggctgttgccattcattggtcaggtatgatgctgcctgctcacctttgacagccttcccagcagccaaccagcccagagagtctccaaaccagagccaccattcttgcgaagtgagttcccacccacccgagagggagatccttagctcctcatcatcgccagtcatgatgatgagatactctggaagacatccattctgtggaaaccccacaaggtgaggccacgtctaaatagcttacaggctggagtgctgtggtgttatctcagctcactgcagtttcaagctcctgggctcaagtgatcttacctcagccttctgagtagctgggactccaggcatctgaaaaccagcagtaatcctgcctctgaagtttatcaggaaaggagcttaaaagagaaccaaattcagcctgtgttggaactctcagtcccagaggggtgtggtttgtagctctccggcctgctgttggacttaggctgtgacccacagaaggacgccagaaagtactcaagacattcacggtgccccggtcagcactcgccatgacgaagacttctacatgcatataccacttccttgttctgagctggtatactttcctcaattattacatctcacaggaaggaaaagacgaggtgaaacccaaaatcttggcaaatggtgcaaggtggaaatatatgacgctgcttaatctgtctagctcaagaacaggactgctgggtttgacatctaccagccaggaagctttaggcagctcttgcagaccattttctacggggtcacctgcctggatgatgtgctgaaaagaaccaaagggggaaaagacattaagttcctaactgccttcagagacctgcttttcaccactctggcttttcctgtatccacgtttgtatttttggcattctggatcctctttctctacaatcgagatctcatttaccccaaggtcctagatactgtcatccccgtgtggctgaatcatgcaatggaattctgttccaaatgatcgttaatgtagaggacgggagctgctgattgtgggcagggttaataaaattcatcagatcaatggccagtataatg

SEQ ID NO: 209294 - DNA, 1827 bp, Homo sapiens
agcctagtccggcatgctgcctagcccagccacgtctcatcctattcatggcagagcggggactctcaccctctcccagcaatgtctaaagtcaggcatctgaaaaccagcagtaatcctgcctctgaagtttatcaggaaaggagcttaaaagagaaccaaattcagcctgtgttggaactctcagtcccagaggggtgtggtttgtagctctccggcctgctgttggacttaggctgtgacccacagaaggacgccagaaagtactcaagacattcacggtgccccggtcagcactcgccatgacgaagacttctacatgcatataccacttccttgttctgagctggtatactttcctcaattattacatctcacaggaaggaaaagacgaggtgaaacccaaaatcttggcaaatggtgcaaggtggaaatatatgacgctgcttaatctgctcttgcagaccattttctacggggtcacctgcctggatgatgtgctgaaaagaaccaaagggggaaaagacattaagttcctaactgccttcagagacctgcttttcaccactctggcttttcctgtatccacgtttgtatttttggcattctggatcctctttctctacaatcgagatctcatttaccccaaggtcctagatactgtcatccccgtgtggctgaatcatgcaatgcacactttcatattccccatcacattggctgaagtcgtcctcaggcctcactcctatccatcaaagaagacaggactcaccttgctggctgctgccagcattgcttacatcagccgcatcctatggctctactttgagacgggtacctgggtgtatcctgtgtttgccaaactcagcctcttgggtctagcagctttcttctctctcagctacgtcttcatcgccagcatctacctacttggagagaagctcaaccactggaaatggggtgacatgaggcagccacggaagaagaggaagtaattgcacaccattttccaagaaccaagaaagaagaaaacacaagagatttttctcatcttttttttttttttttctggtggagggaggtggtggaggaacatagcaaagtaggagggacagagagtgatacttaaatttaataagaggttcgtgaaggtagcttaacttgagaactcttggttttttgaaaggttgactgcacatgccaaaaacaactcctgctatctcagaattaattatctttgaccttcgtggaggatggtctctggttaaaatctggccaaagaaactcacataaacttggtgttagagaacatctagagagagagagaggaacttagagtcatttaaactcttcagtttacagagaaggatgctgaggacctagatgagaagttacctgcaaaaggcaaaagggttacttagtgtcagaaccaaggcaatgacttctctctcccagatctcctagctactggtcctgggccatttttttttttaaataatcccaacttttctttaaaagacaagcatttcagtaagctagttattttcatgggttgctcatccatttttttcagtgatctaaaaatgtagggagatggctactactgaagttgtctgtctacttgggataatagcaaattaattgaagacaatgggaaagtaagttataaaaaatactgggaaatctgtttctcttctgagcaagcattcagggcaggtataaacatcaaacatagtgacattgtcaaaacctcttccatttgaacattgattaattcatcaaataaatggtatagtaataaattttgcttgcagaagaaaaaaaaaa

SEQ ID NO: 209295 - DNA, 1247 bp, Homo sapiens
agcctagtccggcatgctgcctagcccagccacgtctcatcctattcatggcagagcggggactctcaccctctcccagcaatgtctaaagtcaggcatctgaaaaccagcagtaatcctgcctctgaagtttatcaggaaaggagcttaaaagagaaccaaattcagcctgtgttggaactctcagtcccagaggggtgtggtttgtagctctccggcctgctgttggacttaggctgtgacccacagaaggacgccagaaagtactcaagacattcacggtgccccggtcagcactcgccatgacgaagacttctacatgcatataccacttccttgttctgagctggtatactttcctcaattattacatctcacaggaaggaaaagacgaggtgaaacccaaaatcttggcaaatggtgcaaggtggaaatatatgacgctgcttaatctgctcttgcagaccattttctacggggtcacctgcctggatgatgtgctgaaaagaaccaaagggggaaaagacattaagttcctaactgccttcagagacctgcttttcaccactctggcttttcctgtatccacgtttgtatttttggcattctggatcctctttctctacaatcgagatctcatttaccccaaggtcctagatactgtcatccccgtgtggctgaatcatgcaatgcacactttcatattccccatcacattggctgaagtcgtcctcaggcctcactcctatccatcaaagaagacaggactcaccttgctggctgctgccagcattgcttacatcagccgcatcctatggctctactttgagacgggtacctgggtgtatcctgtgtttgccaaactcagcctcttgggtctagcagctttcttctctctcagctacgtcttcatcgccagcatctacctacttggagagaagctcaaccactggaaatgggtttctgttcagatcttgcaaagatggaggctagaatctgttggaatctgcttccagtggcccgattggaagtcaccagccaagcaccaactggtcaagaatatcaggtgaaatatcagggctataaaaatatttctagcccttgctactatctgacagcagttaaaggaataaaacaagtcggggtgaatctaacttcctatctgccaactaggatactttctactgggaaaaatgcttctcaatcaagaaaatatttataataaacataattttccaattacaact

SEQ ID NO: 209296 - DNA, 512 bp, Homo sapiens
ggatgagtttgagtttaggggtagcggagcctcttgttcccaactgaaggcactcacgaaacctgaactgcacccacttggaggaaagtgagacggggcttcccagtgagaacccagggagatgcgtcaaaggctacagagggaacaaacaaacaagcaatttagtttagattttttaatgcagaaatgaagtgttccgcttgtttgcttttaaaatggagaacagagaacataaaatgacttcacaaatgaaggaagtaattagaaaaaattcctccagttctatgtgatggccagtaaaggaagagagagcacagaaaagatagaacgggaagggcagatgggaaggaaggagagtacgacacagagatgatgacgcaaagagagagagtgaagaagagatgaacatggaaccatccctccacacacacacattttgatcttatggaaaacctgctttgtaaaattaaagtttgtcttttgttgtttttacactgtaagagagcgatttg

SEQ ID NO: 209297 - DNA, 538 bp, Homo sapiens
cgttatttgccaaataacaactaggccagaattccagccctaacattgtattaaaatacctgacaatactagtaaatatagtttatgatgtcccaggcactgtgctaatggtttgacaagcattttctcatttaatcctcctcactaccctaccaggtagatcctattttgctttccgttatcaaatgaggaattgataaagaaaattttgtttaaatatactactaatgtaaattggcatatagcagtgctaggatttaaacccacgcctgtctgatttcaggatccacacgatgaccaacatgttggaagtatgcaatagagtttgcccagctcttcacacttccattttgggatcttggccccatatctgctttgattcctctcctcatatgtttaatccctctcagagtttagggaatattttaaaaatgaagttggggatttccttgctctcacttttggtctatgccagttaagatcacattttcctgagccatctctcctatttttaccgaagtataaaatttgatataaa

SEQ ID NO: 209298 - DNA, 493 bp, Homo sapiens
gatctgagggaattttttcccatttaaaatatcttaatgataatgcaatctagtgactattcatggtttactattaaaattatttgtaaatgaattgaaaaataggcagggagtttgttacatattcccggaatacttatataaatgacatttttttttcaagagtgcatttaaaatttattaggtatctacatcttaactaatgtagatttcttccacttttgagaaccttttgctcattaactggaaacaagaaaaataagaacttcagtggctttctttcagaagataggcagctggactcatgtttctcagaatctcttctcctcactccagtgttaatcactgtaagaagttgaccacaaggctgagagcagtggctcatggctgtaatcctagcactttgggaggccgaagtgggaggattgcttggggtcaggaattcaagaccagcctggccaacatggcgagaccctatgtctatttaaaaaaa

SEQ ID NO: 209299 - DNA, 201 bp, Homo sapiens
gactgggcataagataaaagtaggattgaagatggttgtcttgcagagatacatttcagccaggaactgaaatgtgggtaagatttccgcaagggaaggggtagggatggctttccaggaggtatagacaagcagataacaagtttgagcaacaggaagatcctgtggacttcatggcttgtatcttgtcatatatgaagg

SEQ ID NO: 209300 - DNA, 250 bp, Homo sapiens
cgtgcctggcccagttgggctattttcattgggaagaggagtctcaattatctccggtaaaaggggacacatactgttaaggatataggtggtgcagaattggaaagccttctggaggggaggcagccctgggaattcattatcctggggtctctgcttttctttacatgtctgcccagggctactctcactctcccagcagattttgtcctgcatactatagtttatttactcaaaacttcagtttgca

SEQ ID NO: 209301 - DNA, 272 bp, Homo sapiens
ggctcaagagatccaccctcctcagcttcccaaagtgctgggattaacaggcctgagcactgcgcaacaactattgaaacccttgtgagttaattggataattttgcctttttctaaacctttgagttgagactcctttatcactctcatttccagcacctcagtcttcctttttccttcccatcacctaatcttttcttcttcttctttttttttttttttttgagacaaggtctcgctctgtcacccaggctatagtgcaatggtgtgca

SEQ ID NO: 209302 - DNA, 494 bp, Homo sapiens
tcatataattctgatgtcagccccaactcactggcagctacatgcacctggtgcttctaattttctttcacctctgtagaggacatttgggcttcaattatttgtttttctgctctattaattagtggtcatggtcaacaatctattttatatcttctacagttttgtggatttctttccccttcactcacttcttcccttgttctcattgcccttatgagtttataccatctttattcctttactggtattttgttagactttccagaaagagtaaaggtaaatgagtgtgttcatgctgtcatatttgaccagtagcttaaactttttctctatgacacaattagaatgataacattacaattcatatattaaagatgcctataatcttcaagtatttgagttttgtggtttttgccttttttaaaaaattgccctattaagtagtcattgatacttgttaaatttaaactgttaaaagaaagaaaaagata

SEQ ID NO: 209303 - DNA, 278 bp, Homo sapiens
caccttgctgctatgtcctcccggggggaccagtgctgtgtcttcaagtgacagagggatgtaagggcaatgaaagggcctagctcgttcctgccaacctttttatgaggttactaatcccatgccctcatgacttaatgatgccccacctcttaatactaccagactggtggttaagttttaacatatgaatcttggggaacacattcagaccacagcagatatattgtagaaaagaatagtccgtaaattcccagcagtaacacttcgcatatttt

SEQ ID NO: 209304 - DNA, 404 bp, Homo sapiens
ttcccctttcctccgtgttgaaactgttcagcgttgatctactacctttctatacagaaacaaccaagatattttaaacggcacaattgggtacttacctatctatcactagctatttatctatcaatccatccatttatcttacctatcgatctcatctatcgatcatctatttatctatgaatgatctctttacctatcaatcatctgtctcttgtttacctatccatcacctatctactgtttatctctacttatttatcaatcaatgtatcttatccatcatccatccattcatctatcatctacttacctatctagctatctatttatcaattatctatctatgctgtgtctccctattatctgtctagcctctatggtctatctctgactacctattt

SEQ ID NO: 209305 - DNA, 673 bp, Homo sapiens
tcactgcatagttagatccttagcactgtgtgtctgaactcattgctaatagcttaagtagctccgcatccccactcctcttgcctgaactgttctccatctgcctgtgactgccagatcaaggcagcagcatggtgtggtggtttaagagtgtggcctcctgacccagatagcctgcattcatattggctctgccagttactgccttcttgggcaacatgtacatccatttgctcagctataaagcagggataatagtaaccgcatgaagttatcgagaggtgaattaatacctgtaaaacacttagaatgtgcctggtacgcagtaagtactatgttttacctgcaatcattatcattattcagtctttaaaaactttatatggattggccgggcgcagtggctcatgcctgtaatcccagtactctgggaggccgaggcgggcgaatcacaaggtcaggagatcaagaccatcctggctaacacagtgaaaccccgtctctactaaaaataaaaaaaattagccggacgtggtggtgggcgcctgtggtcccagctacttgggaggctgaggcaggagaatggcatgaacccaagagatggagcttgcagtgagctgagactgcgccactgcactccagcctgggcgtcagagtgagactccgtctcaca

SEQ ID NO: 209306 - DNA, 506 bp, Homo sapiens
cgccatttacaactatcttaaatatttttataactccagagcttggcaaatattcaggtaatgcttatatgaatttaaagggagaagccaggatagtataaaagcaaacattttctaagagtgcaaaagaagccttaaaagcagtgcctatcttactaggaataagaaaaactattacctaaaaggcaaaatctagagaaaatagaaaggactttaatatccaagagaactaaaaatactggttctgggatagcctgaggtaagaagcaaggggacaaacttaaactataaaaaatctatcttagtgacacgctacggcaaaataagagcaaacatcaaatagataggtgtaatggcaaaagtgtgttgggcacctatctgccatgcactgcactaggcatatagtagccaactattctgtgagcactcattacctgccaggtctatccagcactttacatgcattatctcatttaaccctcagaactcttgtgagcagacactat

SEQ ID NO: 209307 - DNA, 819 bp, Homo sapiens
atccttagagattttgagataattgcgtccgataaccctttctccctcaagttgcctaggtactatctaggttccataccacagggcttgaaaaaccacggagaatgtgaaataaaccttgataatctgtagtttatatttgctgttcgttaaaaatggcttctgtagtgtgtcaggaatttggaagactttatagttaatctcatcccttaaattttaaaagctttaagtcaaatgaatggtttttattttctaaattctaaaactatattgattcaggtatctttgtgtataattctcagtaataacttatgccctcaccaaatttgtggaattggaaataacaaattttaagaagaatttttgtgtctgtgattctgtatattggaggtacattttatggaagattgatttatgcatatgaaacttatcagactgagttgttagtattaaatgcttcaatttaccataataagccattttaagtgtgtatttggctaatactgaatgtgcatcttgcttttaaaatttgactttaacaagcacatgcgtagcaattttgtaataatcttactttagtaaagtgacttgagcactcacatactatttttttactctaaaacaaaatgttgctagtactagattggcatgtcttttattacagataatttagaaactattacaatgttcttgttatctgcagattaaaatttgtggtttttctattcttttgattttaaatatttaaaaagactcttgagtgtaaaaactgtggtataagcactcaggtaagttataagaagtatctaataagatgat

SEQ ID NO: 209308 - DNA, 417 bp, Homo sapiens
gccatgagccaccatgcctggccaatctaaactttttaagcacagagagacaagtggaaaattctacacttaacctcatgtgatggggtcacagtcaaaatgcaggcacataatacacaatttattccgtgtccccaagggaaaaaaaggaccctcccagctcctttctgctgcaaaatagcttttctgagcatgccagatatatatgtcatattttttactaagtgctcttgtgtgaataagtgtaagaaaatgattgcttgtcagtagcgtataaattcggaatcaggaatgaaagacaactacagagtgtccttgtgggtggctgagacagggacaccttgcttcctgatggttcaatgtatacaaactttgttttatgtggaaaattattaaaaatattgtgtaaatttacct

SEQ ID NO: 209309 - DNA, 215 bp, Homo sapiens
caccctcccaaggtttcggcgccaacagcctcagcattgacagtggccatgacatgcaagaatggcacactggaaaatgaaagggaagtagccaggagagaggagagccgagtttaaataaaagccagactcaggagagcttagcttctgagacggagttcatcccacgagcttggaaccgtcaaaaagaaaagaaatatttctgtgaaaaatga

SEQ ID NO: 209310 - DNA, 2079 bp, Homo sapiens
  misc_feature (1881)..(1882): n is a, c, g, or t
atccccgggtcgcgctctaagtgaggcgccaagcggtctccgcctcagggtctgaggctgcgaaaggggcgtaacgatgagcggttcctgccagaggtctggggaggataaaaagcaggaggaagaggcgacggcggcctgtggacgtcttgcaggggtccccgaagccaagcagggtcccaaggccgattcagactccgacctagagacggaaggtgctcggggcaggggccaggcccgtctcctccccttgggggcttctcccgcaggggttgtgggaggtgggctggcgccgccgaggaggcaggagacctctgtccagcagggcacgtagccctctgcggggcgtctccagccccctgccctctcctcggcgctcctggcggcatcaggaactttaccatgagaaggcgcttctagaaggaggttaaaatggaaaatcccgccagacagtgcaccaaaggctgtcccgccctgaaatgcaatcagagctgggttttcccaatccacaggcacccatggacttggagaactggtcggggacaccctgtacctgaggtcttgctggatccatagcattgtgcccatcttctgctttctgtgccaagggagtgccccagagctgaacctgctgcacggtggcctggggccccagatgtggacctgttggagaaccagctgggagtggcaggagcccaggccctctgtgccgccctcacagtgaaccaggccatgcggaagatgcagctgtcagggaatggcctggaggagcaggcggcccagcaccttgatgaactcctgctggcccacacagacctgaagtccctggacctgagctacaaccagctgaatgaccaagcagatctgtgcatgggactgcagggcttcctcatcttccacagctttgggggcggcactggctctgggttccgtgtctctgctcatgaagcggctctcggtggactacgggaagaagtccaagctggagtttgccatttgcccagccccccaggtctccatggccatgacggagccctacaactccatcctgaccacctacacgaccctggaacattctgactgtgccttcatagtcgacagcaaagccacctatgacatgtcagcacaacctggacatcgagtgtcccatgtacaccaacctcagtcgtctgggcagatcgtgtcctccatcacggcctccctgtgattcgatggggccctgaatgtgtacttgacagaattccaaaccaacttggtgccatacccccacatccacctccccctggccacctacgccctggtcatctcagccaagaaggcctaccatgagcagctgtccgtggccaagatcgccagtgcccgcttcgagccagccaatcagatggtcaagtgtgaccctcaccatggcaagtacatggcctgctgcatgttgtacagaggggatgtggtcctgaaagatgtcagtgcggctgtcgccaccatcaagagcaagcacaccaaccagtttgtggactggtgtccgattggatttaaggtaggactgggtgatgtggagtccttgtgccatcaggaagcaggagacctgcagaataatgctgcccctgaaggcccgcatcctttatggagacaaccccttttcacgtcagctaggttgcaaggataataattttagtaatttatttcctaccgccttatactttaccaaatactttatgttccctcataccttaaccactaccctttaaagttcatggggcaatattaccagtatcttacactttagaaaacagaggctgaggctgggcacggtggctcatgcctgtaatcccagcactttgggaggccaaggcaggcagatcacgaggtcaggagattgagacnntcctggctaacacggtgaaaccccggctctactaaaaaatacaaaaaattagccgggtgtggtggcagacacctgtggtcccagctattcgggaggctgaggcaggaggatggcgtgaacccgggaggcagagcttgcagtgagtcgagattgcaccactgcactccagcctgggcaacagagcgagactacatctc

SEQ ID NO: 209311 - DNA, 1936 bp, Homo sapiens
  misc_feature (1738)..(1739): n is a, c, g, or t
atccccgggtcgcgctctaagtgaggcgccaagcggtctccgcctcagggtctgaggctgcgaaaggggcgtaacgatgagcggttcctgccagaggtctggggaggataaaaagcaggaggaagaggcgacggcggcctgtggacgtcttgcaggggtccccgaagccaagcagggtcccaaggccgattcagactccgacctagagacggaaggtgctcggggcaggggccaggcccgtctcctccccttgggggcttctcccgcaggggttgtgggaggtgggctggcgccgccgaggaggcaggagacctctgtccagcagggcacgtagccctctgcggggcgtctccagccccctgccctctcctcggcgctcctggcggcatcaggaactttaccatgagaaggcgcttctagaaggaggttaaaatggaaaatcccgccagacagtgcaccaaaggctgtcccgccctgaaatgcaatcagagctgggttttcccaatccacagatgtggacctgttggagaaccagctgggagtggcaggagcccaggccctctgtgccgccctcacagtgaaccaggccatgcggaagatgcagctgtcagggaatggcctggaggagcaggcggcccagcaccttgatgaactcctgctggcccacacagacctgaagtccctggacctgagctacaaccagctgaatgaccaagcagatctgtgcatgggactgcagggcttcctcatcttccacagctttgggggcggcactggctctgggttccgtgtctctgctcatgaagcggctctcggtggactacgggaagaagtccaagctggagtttgccatttgcccagccccccaggtctccatggccatgacggagccctacaactccatcctgaccacctacacgaccctggaacattctgactgtgccttcatagtcgacagcaaagccacctatgacatgtcagcacaacctggacatcgagtgtcccatgtacaccaacctcagtcgtctgggcagatcgtgtcctccatcacggcctccctgtgattcgatggggccctgaatgtgtacttgacagaattccaaaccaacttggtgccatacccccacatccacctccccctggccacctacgccctggtcatctcagccaagaaggcctaccatgagcagctgtccgtggccaagatcgccagtgcccgcttcgagccagccaatcagatggtcaagtgtgaccctcaccatggcaagtacatggcctgctgcatgttgtacagaggggatgtggtcctgaaagatgtcagtgcggctgtcgccaccatcaagagcaagcacaccaaccagtttgtggactggtgtccgattggatttaaggtaggactgggtgatgtggagtccttgtgccatcaggaagcaggagacctgcagaataatgctgcccctgaaggcccgcatcctttatggagacaaccccttttcacgtcagctaggttgcaaggataataattttagtaatttatttcctaccgccttatactttaccaaatactttatgttccctcataccttaaccactaccctttaaagttcatggggcaatattaccagtatcttacactttagaaaacagaggctgaggctgggcacggtggctcatgcctgtaatcccagcactttgggaggccaaggcaggcagatcacgaggtcaggagattgagacnntcctggctaacacggtgaaaccccggctctactaaaaaatacaaaaaattagccgggtgtggtggcagacacctgtggtcccagctattcgggaggctgaggcaggaggatggcgtgaacccgggaggcagagcttgcagtgagtcgagattgcaccactgcactccagcctgggcaacagagcgagactacatctc

SEQ ID NO: 209312 - DNA, 2806 bp, Homo sapiens
  misc_feature (2232)..(2232): n is a, c, g, or t
gtttgggttcctgtattttcaccagagggagttagtcctgccccagttcagctggtcctcaaagtgtatatagctctttaaccatcagcaagtgtctatcagaacataatcttgatttcagctgctactaaatatctaccaggagactgcttgagagaattgcctgatgggtgctgagtccaccattcctgagatactttgaaatcagtggcttaacccaagctgtgtatcgggaccctctcaccgtggtcccaatggagtcacttttcttaggcgcccccctttaccttgggctctgagcttcctctgcctttcatctctgtgggatgaagccccaccgcccttcaggatgcaaagccctcttctctaatgtgagtgcagggccaggtgcagtggctcacgcctgacctcccaacactttgggaggccgaggcagggggatcccttgagcccaggagtttgagaccagcctgggcgacactgtgagaccctgttgcctgaattgccctgggagatttcctcagcttgtgctgggggcatgtggccccatgaagcccgtagtcactgttcaccctgagagacgctggctttcgggctcacacacctgctgcggggcagccccaggaaatggccaccccatttctcctggagctgcgcgtgttctcagaaactgtggtggccgttctgttttgtttgcatcttataaacgtttacctgatgacattttcctcttcaatttagctgctagaaaatttaaagtcaggttggtggctcaccagtaatgagagtttagagtagaagtaaactttatgacatagtcttagactcttcactttcttctcaaccaatatgattcacatttactttattttgctgtaccgtgagtgtctctgtgtttcctgaattccttctggaataaggcaggttgttagtaagcacaggtttctggtccatctcacagcctcaggcagtgggcattgctgtcggtgctccctttccgggttacctgtggtagctctcaagttgcagggctgcgatttgaagcctgatttagtacaccgtgtttctgttgtgttctgtggtggtttgctcctcacatgtgagcattcaccgtggccctgtgtttttccaccacacctctgcctggtggcatcctactggatgtctcagccgagccactctgttctgaagatgcccttgtcctccacccctttgctttgggctctaagcttcttctgcctttcatctctgtaggatgaagccccacccgcccttcaggatgccagccttggcaacattgtgagaccctgtttctacaaaaagtaaatgagtgtagtggtgcacgcctgtattcccagctacttgggaggctgagatgggaagatcacttgagcctgggaggttgaggctgcattgagctgagatcaagccacggcactccagcctgggagacagagcgaaaccccatctcaaaaaaacaaagaaagtggatgcgcgctgctcctgccattggatcatcgcagcatttttcttttctctgatatgcacctttttcctcatcgtgggggctcacgttttcatagttccctctcactactaggttgtgagctgcgtgaaggaaggttcatagttgtgttgtatgtacaggcacacaaaatttgtccttggataaacacatatcctcttccttcttctctctgaatttctttattttaagaaaaaaattagagatggagtctcactgtcttgctcaggctggtctcaaactcctaggctcaagtgatcctcctgcctcagcctatactaatatgaattcctatactaatatgattgaaattagtttgatttctataataattgtgctcccagattgggcttctgttttgatagtagaactaaattattaggctatttcaagaaattaatatattactggtagaaaaactgaagctacaaaatggcctggtttctcacttcagttaaatttgtgcttctgagtgcttgtattctaggtgaaaccacactgagaaggtatttgtggcccatacactgattccttcatgagacttgtttgcacaggagagctgctaaaaattactgctctcagggaggtctgtggtgaacaggtatgaagaagaagactgttctctgcccttctttttgcaataaaatgttccaaactatcttgagtttgatcccttttcgggtgtttggggtttttttaacattcanagtatgacacagccgcatccttgccagggccggagggagggtggatggacttataggtgttgcttgtggctgggtgacttgcttctgccaacgagattttcacagacacggcacaagcagaagcctggaatgtgtggcactgccaggcctgccctcttaggctcttgattttccccacgagatatgcgtgccccagggaacggcggctctggctgtggaatgagaggcgtgtggagcaggcatggttcccaccctcagcctagagtcaaggccagactagatcagcctaagcccagccacgccacgggtgcagcagtgaagagcaaatgccaactgtccatgacagtgactttcaaaggggcgtgtcatgtgcctcatcccagcaacagggaaggcacttctctatcagtcagttggtaaatgattattgacaatgtgtgggaaggtggagttatttgagtagatttggcctctattctcatggagcttcctttctagaggggaaggcagatgatggatgaataaatataaatgattctaataggttggtgcagcagtcattaaaagtaatggc

SEQ ID NO: 209313 - DNA, 596 bp, Homo sapiens
ggaggggctggggacatgggaggggctagggatgcaagctttcctgagttcccacagttctctgcccctctcctgtctcacggggtgtgggccacctgtggcttgcggttgtttcgcgccaagctaatatcttgttcttcccaacagagaggcccgttgaggcttctctgtcctccatggggaacagcattggcctaaacctgcagacaccattgcaaagggaagtcagctcaggcaaacccgctggtgaagaagaattccagtgtggggacacagagactgacatttcttgccatgggtgatttaattttgggcctcagtttttcattcccccctaagagtatgacacagccgcatccttgccagggccggagggagggtggatggacttataggtgttgcttgtggctgggtgacttgcttctgccaacgagattttcacagacacggcacaagcagaagcctggaatgtgtggcactgccaggcctgccctcttaggctcttgattttccccacgagatatgcgtgccccagggaacggcggctctggctgtggaatgagaggcgtgtggagcaggcatggttcccaccctca

SEQ ID NO: 209314 - DNA, 1725 bp, Homo sapiens
aagggattttcctgcctcagcctcccaagtagctgggactacaggcgcgtgccaccatgcccgactaatttttgtatttttagtagagatggggtttcaccatgttgcccaggctggtcttgaactcctgagctcaggtgatctgcccgcctcggccttcaattgcagaagtttttgaagggagaatatttgatcctcacataaaatgtccttgtttctgaaagaaaacatggtaaaaattgttattgagtccatgtctttgccaccttgttggacttgatttccctttctctgtgttcctcccgccctcagtctctctcagtctgtccttttttgtgtgtggagttgtgggcaggtcattggactgggactgactttaccagttttcaggctgtggggctagtcagtcattctctctgagccttctacctctaaagttgagttctttttttaaattctttttgtttggtttttattttttccttgccactatacaagcaaggatagataaagctttttattattattgttattattattatttcgagacagtctcgctctgtcatccaggctggagtgcagtggtgtgatttcagctcactgcaacctctgcctcccgggttcaagcgattctcctacctcagcctccttagtagctgggactacaggcatgcgccaccacacccggctaatttttgtatttttagtagagacagggtttcaccgtattggccaggctggtctcgaactcctgacctcaggtgatccacccaccttggcctcccaaagtgttgggattacaggcataagcgaccgtgcccatccccgataaagttgagttctgaatttcctctttcactgtattctcggcagctactggttggtttattctttttttttaatcttttttggtttattcttcttttgatctttgaagagaaggagaaaaaagatctgagtttggctctcccatcttaagtgcagcttttagttgttttatagtcatagacgctattgcactggacagcatgcatcctggatgtaaacaatgcggaaaaatcaatggagtgaccatcttggggtcagtggtgttgcataaagcaccagtggtgtgctgttctgtgtcagtttcctctgcgccacgtgctttcacagtttgaattaccagcatctctgtggtggcttcagtacattctccattgtgcttcaacctggaagcacattctgccgttcagaaagactgattccaatcatgtaatgggaccacacgagatccatgctccaattatatgaatagcagaaggtccatttgactcttgtagttcaagagctgtttctaagtaaacagactttccagagctcgatgaagtgaagaagcccttctttcaattcctgggcagaattcagtggttttcatatcatctgaacctgctgtgctgctgtttattctatcactgtcagccttgaaaggaaaaaaggaataatcttaccctcctgcccttcttattttatatcttccatcttatccatctatatccatgtagtcattccttccgagttccctggttttaatccaaaagactctgtttaacagcaatgtcttggcagaccaggtgccgcttccgtgccatttgagggctctgagtctttgcttcgtcttaggaagataaagataatttggcagaaagtcagagatggaaatagcagtttgggatgataaaagat

SEQ ID NO: 209315 - DNA, 628 bp, Homo sapiens
  misc_feature (479)..(479): n is a, c, g, or t
  misc_feature (512)..(512): n is a, c, g, or t
  misc_feature (553)..(553): n is a, c, g, or t
  misc_feature (574)..(574): n is a, c, g, or t
  misc_feature (627)..(627): n is a, c, g, or t
atttctaagtatctgtacttcttaatatcttaagtgaattctgattctaacattccaaatatattctatttaaggaagtgagcacatggttttctatcttcattacctcctaccttcattacattattttttgatagttttaccataaaaatgtgttcattattacccatatattttctcttcaactaactcatctgaaaaggctctaatcaatgttcacctgtaacctatacccgtagttctcttagtgtggttcacagatcagcagcaatatcatcgaggaccttgttcaactgcacattctagagctctttttaggcttatttaataaaaattccaggtcccagcaatctgtgttctagcatgtcctacaggtgtttttgatggacactaaagtttgaaaatcaagctcttgtccaaagctactggtcaatgtcacatcttcatcttgcttggccttccataaaaaaaaaccccantttttaattttaaaaaaattttttggggggggnaaaaaaaaccttcacttatacattggaatttgatataaaanctccaagcaaaaaaaggtccnaggaccatatgaataccatgtctacccaccaaagccatggggaccttaaagcna

SEQ ID NO: 209316 - DNA, 463 bp, Homo sapiens
tgcaagcttagtgttctctgaagtcctctataatttatcatctattgcagctcacatttagcataagctacaagcttatattgttaatcattcttctatgtttatgtgctgactcacaaataaatgggcctatgtggactttattttcataatcttaataatatctacataacttaataactttgttataaatctgatgtttcataaaattttgtgttatcaactatgttctggtagaagaattacacatttttgcttaactttttctgactttctattgcctatcaaatacagtaagtccttacttaacgtgaggatttaatatgttcttgaaaactgacctataatgaaaccagttgtaccacaggctaattgatataaataaatagttatgtttctatggcacatttctggtcacaaaaacatcaccaaactcagaaagacccaaaacacttccaatgtt

SEQ ID NO: 209317 - DNA, 215 bp, Homo sapiens
ccaacatatataatgcttactgtgcgccaggcactatctaaatgtagtaattcattttttccccacaaaaccttcaggaggtaacattgcacagcaagtccagtatcccacacagcttctttctgtacctcctgctgctcttaaaagcagagaagacagtgttggttgcattccttactcttaatggaagcattacaaatgttccatggaagcga

SEQ ID NO: 209318 - DNA, 444 bp, Homo sapiens
cagggttcatgctcctatgacaatctaatgctgccgctgatctgacagaaggcagagctcaggaggtggtgcttgcttgcccactgctgtgtggcccgtttcctaacaggccatagactggtaatggtccgtggctgggggggttgttaaaatttatcttaaaaaaaaaaatagctaacgtttgttgggtatttaagtgccaggcaccagcacttagtatgtattaactcatttaatctgcataattatgtgtggttggcactttgccgttttagagaatttaaatagcttgctcaaggtcacacagctaactaaagcgggtgggagaagcagacagtttggctccaggacctgtgatcttagccattgtgtaaattgccaagtagcctgtcttaaagctgtgttgctgaaaggaccatggaacattttaaaatgtattacatg

SEQ ID NO: 209319 - DNA, 766 bp, Homo sapiens
tatgcacctccctttctgtgtgtcctgggaaatcaggcatctgctctgtgagatcccacccttgctgaagttggcctgtgctgatacctccaggtatgagcttataatatacgtgacaggtgtgactttcctcttgctccccatttctgccattgtggcctcctacacactagtcctattcactgtgcttcgtatgccatcaaatgaggggaggaagaaagcccttgtcacctgctcttcccacctgattgtggtcgggatgttctatggagctgccacattcatgtatgtcttgcccagttccttccacagccccaaacaagacaacatcatctctgttttctacacaattgtcactccagccctgaatccactcatctacagcctgaggaataaggaggtcatgcgggccttgaggagggtcctgggaaaatacatactgctggcacattccacgctctagggaaggatcatggcttgcctctcaccattcctcctccagataaaattctctactcactcattcctgctccaaataaaattctctactcactcattcttcaatactgtactctgagatgatagatacattttttaaattttacttttattttcaactgtgaatctggtgtgtacaatgatcttgagttaaactcatttggcacacatcatcctgactttggaaacccatgttataaaaataaccagatgggggaaaagccttgaatgggtgttgtagactcactctgtggtaggcatcgtcctg

SEQ ID NO: 209320 - DNA, 387 bp, Homo sapiens
tgggatgtgatgtcactttcaagattaggttataaatagactatggcttcaatcagagggttttctctctgtctagctctcttttgggtagttcattctgaggaaagccagctgccacgttatgatgtaggcctgtgaggtccacgtagcaaagaacatatggaagatttctaccaccccctaactaagcctttagatcagaccgcaaccccagccaacaaggtagctacaaactcttgagaagccttgagacagaggtactcaatagagccattcctatgagaaacgtaagtatctgctgttttacaccgctaaggttttagctaatgtattatgccataatagataagttatatacaacctttatcaaataataaaagtaaccat

SEQ ID NO: 209321 - DNA, 376 bp, Homo sapiens
gccatttggaaagcctgctagattctgcacaagccttaagaaggcagcactcaaatgcaccagcaatcaaatgcgccacctgtagacatctttagctgatgctttcagcaaggcatgctgaaacccaaaagacaggcgacctgcacagaggctcaagaagagacagagaacttcaatcctgtgagcctgaagactcaaggccagtgagggaaagagaaaggcaatctctgagacttcagttttacttaaaacaatctgttttaaatggaaatgggactgagatggcattcataggaagttaactgttttggaatataagctcatgaagatgattattagatcagttataaaaaataaaatgaagtcaacgttttat

SEQ ID NO: 209322 - DNA, 275 bp, Homo sapiens
ggggaacggggaacattagtggttggaaggagaggagcctgacagcagaaatcagaaagcaaggaactcacgatacaggctagaagagccagcttaatgaagggacaaacactgctttctattagcaccaaccatcttctagtgacaactgtactaggaaagcctggcgtgggtttttaaggaatgtggatataagaatgcagaaggagaagcagtcttgaggcacctccttccagagcaccgctcctctggctctcccctgtgagaggcctcaa

SEQ ID NO: 209323 - DNA, 798 bp, Homo sapiens
agttcaatgttggcatctagggcatgtactcttgccacttatgttttattacctctctgaatagttgtgtcttaattgatgtactctgttgccatttacattaatcccatgactcaatggtgagcagaatgagaaaagactagaaaaatcaactcatcattccttttaagaaatttgttaactgttttatttatttttgttaagctcctgtggttggacagtacaattagttacttaatattttattttctcctctacaaaattaatctttttaataactaccctcttttgactagttacttctattcccaaaacaaaatgtattcactaagttcctatgttcttgtcaaagaaaacgtcagacgtttctgaagaagtgattggggaatcagggtgggaggaaaaacgtattcctgacagtataagaaatatgtttgcattccagtaaattatttttaggtatattttgatatcactttgttctgtaacctacttttatctttttctagccaagaacacactgatgccaaaatattattataagtcgaaccatattctaatttaacttttttgaaaaaaaatgataatatatgcaaaatgagacttagagttgtcttaacatcactgatttttggaattctaatagtcgtgaataagagacattcatgtcatttgataaaataattaaagtataaatttaaggtataacaattaaagtatgaatttaagccagtattatattccataatcctgaaaatatattggttacctcataatggcataatgtttatttccagt

SEQ ID NO: 209324 - DNA, 803 bp, Homo sapiens
tctagaacaaggagttgatgtcctgctgctatcaccgtttcttctccccggcacatagccaggaggctggtgggcactggcagcccggtggtaaggagatggggaccatttcttccctctcttcctctgtcacttcattatcattctgtagttgagctcatcttgctcaatcatttaaaatgccctgccagcatttctcaaatttatattccttgccctgacctctgtcccgacctctagatgatgacccgacatctccatgaggcattcagcaggcatcacaaacttgctgcctcctccccgccactcctcttgcggccccctccttccagtcactctggcacctccttgggccatcttgacgccactcttcctcttacatcccacatccaaccccatcaggaaatcctgtcagctccaacttggacaagcagccaggatccggccacttctcacctcccatgggtagccccgggtctcagccaccatggtctcctgctgggactcttgcagtcgtctcctcccttgtcccatgcttccacccttgcccctggttctccacatgtaccctgcgtaaatcaggttagggcgacaggtgagacctggcctggcatcgggagacctggttctaatctgtgttttgtcaccagtttgctgtttgacctcagaccagtgtctcatactcttggtatctccattaagtgggagcttgttggagatggcaaactcatcatccttctaaccctctccctgccaccatccatggcaagtacactcatgcagggatcatcatagaacagacc

SEQ ID NO: 209325 - DNA, 1230 bp, Homo sapiens
tctagaacaaggagttgatgtcctgctgctatcaccgtttcttctccccggcacatagccaggaggctggtgggcactggcagcccggtggtaaggagatggggaccatttcttccctctcttcctctgtcacttcattatcattctgtagttgagctcatcttgctcaatcatttaaaatgccctgccagcatttctcaaatttatattccttgccctgacctctgtcccgacctctagatgatgacccgacatctccatgaggcattcagcaggcatcacaaacttgctgcctcctccccgccactcctcttgcggccccctccttccagtcactctggcacctccttgggccatcttgacgccactcttcctcttacatcccacatccaaccccatcaggaaatcctgtcagctccaacttggacaagcagccaggatccggccacttctcacctcccatgggtagccccgggtctcagccaccatggtctcctgctgggactcttgcagtcgtctcctcccttgtcccatgcttccacccttgcccctggttctccacatgtaccctgcgtaaatcaggttagggcgacaggtgagacctggcctggcatcgggagacctggttctaatctgtgttttgtcaccagtttgctgtttgacctcagaccagtgtctcatactcttggtatctccattaagtgggagcttgttggagatggcaaactcatcatccttctaaccctctccctgccaccatccatggcagacatcactaatcaattatgatgtggcttcctgctcagtctagagctctggggaccctggaaacactcaggctgggagctgagtaaacagtctctctggtccttctcttatgccccagaagacctggatatacatttagaggaacttgaacgcctgggctcgaggaaacatgtgcatcacctagaggaacttgtatacccataccccagtcgacgagagtatacagctgaaagaacttacacctgagtgccattgtttacagtaaggatgtttgaaacaagtgtctgcagcatggcagtggttacttcatgctgtgattttgactagtaagcaatgaaatgaacaacttgaggtctgtcttattgtggattccccaaagaacatgacccgagactgattcaagggcaagtagcatacttgggaggtcaccccaggaagcatcaataggagagtgggggagtg

SEQ ID NO: 209326 - DNA, 356 bp, Homo sapiens
gtcctgtgcactgtagggtgtttcgcagcatccctggcctctacacactagatgccaggagcacccctgtcctcagttgtgacaacccaaaatgtctctagacattggcacatgtcttctagggggtaaaatcacccccaagttgagaaccactgggctcaggttagggcgacaggtgagacctggcctggcatcgggagacctggttctaatctgtgttttgtcaccagtttgctgtttgacctcagaccagtgtctcatactcttggtatctccattaagtgggagcttgttggagatggcaaactcatcatccttctaaccctctccctgccaccatccatggcagacatcac

SEQ ID NO: 209327 - DNA, 321 bp, Homo sapiens
cctttgggtattcccagaaataactggagttggacatattcaaagacaaccaactaaacatccaggaaaacatgacgccatgagtagggctagcagacaaaagaaacagactcacagaggtttcagatattcaactcactatacacagactaaaacaattctagctactcttttcaaagaaatagtcaacaagtttgcaaattctaaccaggaactggaaactataagaagtgtcacagaagaacttctagaggtgaaaagtacaataactaaaaattaaagagcatataagtcgctttaaccacactttgaacacagctg

SEQ ID NO: 209328 - DNA, 1147 bp, Homo sapiens
ctcaagaccagcctgggcagcatagtgggctccacctctacaagacattaaaaaattagccttgtgtgctggcaagcgcctgtagtcctagctgctcgggaggctgaggcaaggggtttgcttgagcctagagatcaaggctgcagtaagctgtgattgcaccactgcacttcagcctaggtggcagagttagaccctgtctccaaaaatacatttttttaaatttaaatctggcagtttctaggccagtggttcttaatggatattacagatcagacttctctgtggagtttataaatatacagatatgtaggcactgctttggacttcatgaatctctttgcttgatattcttggtattaaaaaattatgtctgaggattattatgttatatcctaaaaatttttctgcatagaaatttgtccatttatctttatataccagatccaatattcagacttatttgaaaataggcttaatcattatcctgagggacattttgtctaaaatttgcttgaatggctttattatctttgttttgcctgccacaaaaacaacaaaatctcctttcaattgagttatttttatcatgaactctctttagactgttcacatttgaaaattataactaatatttgcctccagaaaagtacatctgtttgctaatattagttcctggtgactttcagtgaacgttttgcaaacttgaattaggcaacattttaaagaagaaaaaaacatgactaacatgctaaatttaaaacataaaagtagatctcttagagccttgaagcttgtaatcaatagaattttcctaattaaaaagcattgggtaaattatctactacttccaatgacttttgcaggtacagcctctgtatggaaataatctttaattttttataggtataacagagaagaacgcattaacatttaagatgtttaattccaaataggaaataattcagttttctgtgttaagaaatgtaaggccatcctagagtataggagttacgtgattttcttctgtataaaaatctcatttaatagtggctgtattatcagatacttatttgattatagtaattcatcagacacatctccttcgtttggtgattatctcattgatctttgtcacacgtgagtg

SEQ ID NO: 209329 - DNA, 773 bp, Homo sapiens
agacttccttgagtcctcaggtttgggagttcccctcctagagggagtctctctggctcccaggctcaggcataacttcattctttccactcgtttccacgcatctcctaattgggctaccagcacccctccttgatgcaggcagggagaagtggacagggcagaaagggctgggtaaattcatgagcagtaaatgactccatcaacagtggccatcaagggaaacaggccatgttccagccatggaagctgggaagggacactaatcctctccagagatcagtatccctcagccacttaggcttgtggcagaggcactgtggccctgtccccagtaagttccaaatacactgatcttgccagctgctggtaagcaccttgcaaaagaagagaatgagagcccccgcttttccttgagtacagtgaaagctccttttggagaggtaggttccttatggtttaccagcaccgcagctggcccagggttggtggttagcacatttgtggaatgaactaagatgtagtgaaaaccagtccacagctcgtagccacgtgtctctcagccagcccacacctgaggccaccactttgtgtttaggagtggattcactgtactttggttatcagagattaaactcccttggagaattacatcatcaaatgaaaatgtaaatgtgtttaaaatgaaaggcgatgcatatccgtgttgggttgcgccagatccgtaagtgtgatcctctggtccgggagcgagggttccgcgactttctgtg

SEQ ID NO: 209330 - DNA, 541 bp, Homo sapiens
aaacctgtggaaatattcgttagggaaaagaaaatgagaaagaataagtgaagactttaggtttaggatgctttaggatggggcagatgtcctcaaagaacaatggggacagagtagggagaaaacgtacatgcagcctggggacctgatccccttccacggtcatattgcctctgctccttctgtctgatttattccgcattgggacatttgtctatcattctccaattgtttcgtgtttatgtgttctgtataccctgatcgtcagtatgtttttcaagggaaaggatgctgtcttttactttgtatatgtacccgtcattttgccctaaacaaccttgtatgcaacaagaactaacagtctatctctaagaccatagtaattctaagcacttagattctgagttttgtgttgaaaccacagttgatcctccattgttattgagtctgtgctttctaagttcaagctgtgacaccgagaactccacaccctgccacatctggaagcatcccactttctgctgtcattttctggccctcc

SEQ ID NO: 209331 - DNA, 803 bp, Homo sapiens
cagggtagaactgctttccattattgattacaaaagaatcagccttccagaagataaatctactcccttcatggaacctcctcattgcagcagctgcttgggcactattttctcctgtaggcaggtaaaaatatgtgcaggcttttctggcttggatcgtacagtctctttaaagcttatagactctgattattattattattattattattattattttgagacggagtctttctctgtcgcccaggctggagtgaagtggtgcaatctcggcttactgcaagctccgcctcccgggttcacgccattcccctgcctcagcctcctgagtagctgggactacaggtgcccgccaccacgcccggctaattttttttgtatttttagtagagacggggtttcaccatgttagccaggatgatctctgtctcctgacctcctgatccgtctgcctcggcctcccaaagtgttgggaccacaggcgtgacagactctgattattaaaagaaaattgggagatcatctagtcgaatcctattttaccaattaagacacagtggggatgggagttagttaataatttttccatagtaacagacatagtaacacagtacgtttgtagggaagctgaactcagaccttcaggcttatttcactgagccacgctacttcaggtgttctcagcaaagcatgggaagtaacaagtgttcgaaaccctaagacactgcaaccttagtgtagctttgggtgccatccatccacattcagagaattcagggtctacagaaacagtgtggatttgg

SEQ ID NO: 209332 - DNA, 589 bp, Homo sapiens
attcaatttgccttctaagatgtgttcatatttctattaaggtccagctagaaatgtctagatgcatagctaaagcatggagactgcaatctgaaggccgcatggctgccctgctggcacggaggttttggaatccgactgcccctagtgggctctgactcctaaatggctgctgcacatcataccttggtctcctctgtgagttccctccatctatggcgtgtagagacatattccaaaactccatttacaaggtctatttggactgcaaaagactgaatgataaggtcactggaacagtcagctggcacaatcataggaaagcacgaatttcactcccatgctgataaactgagagaggtttcagtccacactgacagactatcagactagaatagccatccaacggtcctacacaaactcgtacaacccacaaccagcttcaacagaacagtcagtgtatgagacaaaggcacaatgacaaatctaaaagacggcctctctcctctcgctcacgcctctgcttgtgttaccttccaaatgtgtgcctttgcccacagacctcgatgggtgacaatcacaagtgtac

SEQ ID NO: 209333 - DNA, 467 bp, Homo sapiens
agttattaccagagctattcagagttcacaactggaccatttgaatttcctcttttttgtgtgctctacctacctttcaatgaaagttttagtaataatgaaatggtcaatagtaggcaagaggatgaaagaagagaagtaattctcaatggctttctcagctattgattaaacatttccatttaaaaatagaagccacatccatgatgccttaacaaagcattgtatgtcaaaatttctgtaaaatggttttagtttcatgcagagtattcacaccattagtatttggagtggttttagatatttaagtgaaaataggttatttcagattcagacatttctgggaaaataagttactttaatataatctgccattataaattataaatacatatgtattttttaaagccatatagcatttagctaagggaagatggaaaacataaaagcacaccacaagactaaat

SEQ ID NO: 209334 - DNA, 345 bp, Homo sapiens
atgttggtggggttgttaaagagtttttctttcccaagccaagaaatgagcaaggctttgaaactatattctcttaataccttttcactaaaattttagtcttgaacagactgaaacaagcacataaaatgcccagaattcatcaccttaatggcatcttgaagacactatgtattaatttgttatagccagacctgcataaaggctctggtttacttgaaagtcaatgtctcagaattttcttcagtgctgtgagctatcctgtctcatcaataaatttctttattgcttatgtcatgcaccaccagtttctattgctgacaaccaaattaaactaacttatat

SEQ ID NO: 209335 - DNA, 308 bp, Homo sapiens
tgaggaggaggaggaaagggagtaggcaagaaacattttaattccatctcttattaaatatgtccacatcatcatcatctcattccactctacccacagacacacaatccaccaatcagaaagtcatttccaatagcaggttcaattttagattgcacagacctcaagggagaattaagcctttcagtcattcagattagtggaacaaactttcactccactatgtaatccttgaggcctaaaacttcagtttaaaacccgtgaatagttgggacactatgggcacgcgctaccacacccagctaatt

SEQ ID NO: 209336 - DNA, 332 bp, Homo sapiens
tgtgagagagacaagaaaagaatgatgcaaggttttagcctgagcaactggaagaagagagttgccgtcagctgagatgaagacaatgaaagcagctttgcggacgcggtaagtttgagatgcccgttaacgagacatccaggtggggatgctgagtaggcgggatgcaaggctctggagttcatgggaaagctccaccaggaggtagaaatctgagagtcatcagtgaattgatggtatttaaaatcagaggagtagatgaaatcagcagtgaagtgggtgtagatagaaaagacagggggccccaagactgagtccagggcagtctggag

SEQ ID NO: 209337 - DNA, 610 bp, Homo sapiens
ccatcacgtctggccatttggtagttttctgtagtggttacatttgagtcctcttctctttctcatttgtgtgtctgctctctaccaatgaattttatactttaaattttttttttttgaaacaaggtctttgctctatttcccaggctggagtgcagtggtgtgatcttggcttactgcatgcctctgcctcctggctcaggtgatcctcccacgtcagcctccctagtagctaggactactccatgtactcagcctccctagtagctaggcaccaccattcctaactgttgtatttttagtagagacaggatttcaccatgttacccaggctggtctcgaactcctgggctcaaatgatctgcgcttgttgacttcacaaagtgctgggattacaggcgcgagccaccatgcctggccactttaatgtgttttcatgacgatagattttattctttcacttccagatgtaggacctccttaaacatttcttgtagagctggtcttgttgttaagaattccctcagtggtgacaggcaggaggtgtcaagctgattctcaggctcttggatggtgcacgcagccactgatagtgcgttgcagagttggg

SEQ ID NO: 209338 - DNA, 490 bp, Homo sapiens
taatttttgtttaattatactctaaattctggaatacatgtgcaggatgtgcaggttttgttacataggtatacacaggccatggttgtttgctacacccatcaacccatcatctacattaggtatttctctggaattttcaacagatgtaggggccaacaggtatgggggttatggtggcaagacagggtttgagactgggagaagaggaggcctggctaacaaaggtggtctttctctgtagatgaaacatcacaggtagcagccctcagagacaatagatgacaaatgtttctttcagacctttaaatgtgtcagacactcagccgggtgctggtggctcatgcctgtaatcccaacactttgggaggccacagggagtggatcacgggatcagaaattggagaccagcctggccaacatggtgaaaccccgtctctactaaaagtacagaaactatctgggcatggtggcgggcacctgtaatctc

SEQ ID NO: 209339 - DNA, 740 bp, Homo sapiens
cagcccaggccgtgcttttataggcaatgcttgggtaatggagtctcccttagcagcgatcctgtagcatctgctgctctgaaagccctgcctaacacattctgctttgtctgcagcaaggtttacacacacccctggactccaaagactcttttttatgtactttttaaaaaactaactccaatggaaaaagaatgtgtcatggcatgttaaactttatggaaattcttctggagaataacataatttcacggtgcattactctgaaatgacctagtacttgaacaattaatttttaaggtgtagcattgacttccccttgctgtatttaacccatatctgaaattgtcaacaatgccaagggttggacaatgagttgggagaagagcaggagcctgaaaattactccctatctactatgttttcttttatcagacataatgcttccctctttggttcaaaaatgaaaagagaagggagcaggtactttagttagggacacttcataggcagcacagcctggcaggtaaatagtgcagtcctggagacataaactcgacgtcttacctttgtcattaatttactgtgtagccttagagaaactcctttttctctctgtagctaaaatgggggaaggagaggttttgtttgttatgcccccaaaaggaattcagtgatagaaaatgaatagatgtataatatatcctctgattccttgaaataaaagctctgaatgtttt

SEQ ID NO: 209340 - DNA, 230 bp, Homo sapiens
tgaaaaactcgttctctaaacttttacaggaagtttaaataaattacatcatgaacaaaactgcagtatgccagttcctatcctcatgacctcacgattctgcctgagctccacatcaatgaaaggaaaatcggataatgaagcacttagtctaatatctcaatagcaaccaccaattaggattactttttagaaaagaaaaaaaaacctaaccttatatgtaaatgtat

SEQ ID NO: 209341 - DNA, 607 bp, Homo sapiens
caagtccttggccgggcacagtggctcacgcctgtaatcccagcactttgggaggccgaggcgggcggatcacaaggtcaagagatcaagaccattctggccaacatggtgaaaccccgtctctgctaaaagtacaaaaagtagctgggcacggtggcgcgtgcctgtagtcccagctacttgggaggctgaggcaggagaattgcttgaacccaggaggcggaggttgcagtgagccgaggttgcgccactgcactccagcctggcaacagagcgagactacgtctcaaaaaaaaacaaaaacaaaaacaagtcctctgggtgattacaaggcatgctgaagtttgagaatcactgtactaggagttagtcctatatactacatacctcaaatttaagaaacatatatacacataatcagagaaataaattacaaataactatagggctggaagataattctgttaagtgatatctggtacaagtatataagcctctttttaaaaatatacataatttgtatataaaagcaaccctaagcttataaatgagatttgttaaagaagtgtaattgtaaatacattatttggaactaaggtcatattca

SEQ ID NO: 209342 - DNA, 267 bp, Homo sapiens
gattatttacagatatatagtattttggtgggtagaggcatggggaactatttagctcagctggcaaaaagtccaagcaaaacaatccaaatgcctagagtggtgacagttgtgcaatgggtacttcaaagctgtacaacattcaaatacttaaacattgaaggcagtaggtagaataaacatcaagagtttctgcctttatgctgaatagcattagctttctcatctgggaaatgggagatggtagtacctgctctatttatctca

SEQ ID NO: 209343 - DNA, 324 bp, Homo sapiens
tttaaacctgaaggtaagcagtttgttgtccaagaatgcaaacatatacataaaagaataacccgccaggcgctgaggccccctgcctgtaatcttagcactttgggaagccaaggcaggtggtttgcttgagtctaggagtttgagactggcctgggcaacatggtgaaaccctatctctacaaaaactacaaaaattagccaggcatggtggcgcacacctgtaatcccaggtactcaggaggctgaggtgggaggatcgcttgaccccagagggcagaggttgcagtaagctgagactgggccactgcactccagcctggg

SEQ ID NO: 209344 - DNA, 548 bp, Homo sapiens
gtccttcctaaaactgaagtggaggtgccgcaaaaatcatctggtaaattgtttaaagtaatcccaaatgcaactcaaatctacagaatcccaggtgaagctcagtaatctgtatttttatccttctccccaaataattctgatgtgcaggcaagtttgaaaaccactgctttaaagaaaatggatactccccttaccaagcagaaagtaggattttggaaactgatgcaagggaagcaaaaagatgcctcaggaggcacgattacaacaggattgatgcaaacggaagctgaagcttaaccaaagacattaatatacgcccacaaaagaaaatgctaaggaagtcaagtggtctgcatgaattctgaagaaaaatggagaaccaaagaacaaaatttgtcaatgaatttccagcacagtctaggttaagggagtgaatttcttgactgaatggcacagactctgtaccacctgattggctgttaccttaatggaggaattatattacaatgtataggtactttaattagaatgacctggcagttact

SEQ ID NO: 209345 - DNA, 142 bp, Homo sapiens
tacgcctatcgtgatggtactaaataaagtctgccttaccatcttgaacgagtgtcatgagtaattcctctttaataccattttgtccctcctgatacagaagcacctgagactgcagagagtgccatgcaacaggaagatc

SEQ ID NO: 209346 - DNA, 463 bp, Homo sapiens
ctgtggaaaacagtagtaacagaactacttaatccagtaattccaatcccaagaatatatccccaaaattgaaaacaggtactcaaatacatgtacatgcatgtttgaagcagcactattcacaatgccaaaaggtggaaacaacccatatgtccatatgggttgttccagataaacaaaatatggtatatacatgtgatatggtttggctgtgtcctcacccaaatttcatcttgaattgtaccccataattcccacctgtcatgggagggatccggtggaaggtaattgaatcatgggggcgggtctttctcctgctgttgtggtgatagtgaataagttttatgagatttgatggtataaaggagagttctgcataagctctcttgtctgccgctttgctctccttgccttccgccatgtggaactgtgagtcaattaaacctcttctctttataaatta

SEQ ID NO: 209347 - DNA, 267 bp, Homo sapiens
tggctaaacagtataaatgttctaagaaacagaatcattagactcttcctgcactagatctcagttctgaaaaccagtaaaaacattccacaagaataacttagaacatttggaatcatctttttatccctgcttttacccaaaatacacttaaacaatattttcatgtcttgatcgaaaatacacattaccaagatagtgaactaccacattttaaaatattttcccaattaaaattctgcttttaatggacgtggcctttgtatc

SEQ ID NO: 209348 - DNA, 612 bp, Homo sapiens
tggaacagaagaccaaaaagtaacggcacagtgacaatgacagctctaaatacttcctacactccccacaacacggaaaaccagtaccttactcagcagaaatgtaattagtttatgaatctggaattgtagagcatcgtttgcctcccaactaagagactcaaacacaagagaaagttattcattcgtagatatttgttttacaggagcgcttctgaaactgcaattttaaaatgttcagaaagaaggaaaaagacttaaatatgggtctagaggatacatactttagaaaggaggaaaaaccacacacacagtccctatgtgcaggcccccttctgtgcaccacgcaggtggctaagcatactccctacactggcattcttcttctaggtgtggtcacttgtccaatgacgcacttaataaatgctcactgagcccccatttggggtttgtttctgttctatgcacagggataccccagtgaattgttgaaacagacacaatctgcactctcatgaaacagacattctagttggccagagaggcaagcagaaaagaaagatgaatgtgatgaatggttctgaatgtaagatggccacactgttaactgat

SEQ ID NO: 209349 - DNA, 337 bp, Homo sapiens
catatttgttctgggctctggttgtgggtttatttacgtgtgcacacacacacacatacgaaagtcatggacaaatgatttcatcagatcgtggttcccaataacccgagacaccccagggtgccataggaaactcacagaagtgacatggaattactaaacatttcttagggaagcccagcaatgcttgacatccgtacaccgccacacagtattacctcagcagtgtcaatgttctatagtactgtttttagtttttattttttatttttttgagagagtctcgttctgtgccactgcactgaaacctgggtgacaaagcgagtctctgcctctt

SEQ ID NO: 209350 - DNA, 573 bp, Homo sapiens
caaatcaatgagtaaaactggcccactacaaaaacattactacttaccaacctcatacccattaaaatggctattatctagaaggaaaaaaaaaacaaacccaggatagaaaataacgagtgttggctagaatgcggagacactggaatcctggtgctttgtgggtgggaatgtaaaacggtgcagccactatgggaaaacagtatggtggcccattaaaaattaaaaatagaattcccatatgacccaacaattccacttccgggtatatactcaaaataactgaaagtagggtttcaaaaaggtatttgtatactcacattcatactggcattactcacaatagccaaaaaggtggaagccacctatgtgtctattaacaaatgaacaaacgaaatgtggtacatacatataatggaatattattcagccttaaaaaggaaattctgggccaggcacagtggctcaggcctggaatcccaacactcagggaggacgaggcaggcggatcacgaggtcaggagatggagaccatcctggcaaatgcagtgaaaccttgtctctactaaaaat

SEQ ID NO: 209351 - DNA, 300 bp, Homo sapiens
caaagtcctcatttaatgtcattgatagattcttagaaactgtgactttaagtgaaatgatgtacagcaaatcctcaaataatgtcattttgctcaatgtcatttcattgtaatgttgatgaggaaaaaagtggttttgttacacatcatttcacttaaagtcacaatttccaagaacctcttgatgacattaagtgaagacttactattacttagtatgtgataaggatgggcttacggataggttattcattatatgatactaaaataattactagactacttaaaaaatagcaaact

SEQ ID NO: 209352 - DNA, 540 bp, Homo sapiens
gagaatgataaagaaatgaggtaaaatgttaagtactggggaatctgggtgaagagaatgcagggattctttatactatttttgccacttttctgttagcttgaaattatttcaaaataaacactttggccaaattagcaggtaagaaaacattattagagtggttttcctttgagttcattcatgtgttcaataaagttgaacacatggatgttaatgaaccattcggattatatggttcatattttttgctcatttttatgtcatggtgtttttccgtgttgatatgtaaaagctatttttaaacccttcatctgccgtatatgttacatttctttcctgatttctgccaccttctaatgttgttaccaactttcttttccaaccttgggccactggcatatacactcatttctaaatatcagaacttgtagtgttctttgaaatgcaaacagcctatggttcattttgcaactgcatattagttaacaggcaaaaataccttagtaagagaaagtgtcttttccttctaatgaaaaa

SEQ ID NO: 209353 - DNA, 518 bp, Homo sapiens
ctctttctcttagtccttgcatctaaactaaacatcgggctctatccacctagctaaattttagttgagtattatgtaatttagatttaaaaactatgtgaagagcaagactacttagtatttatgcaaaatatccaggtagttatattattttcatctttggcatactaactatggcatactactattcaatttaattctacagaattttaaatgtctagtatttcattaattggctttgtgattgctgaaaaaagacctagactgttttctgagtgctatcctgatttttctgattaactacattgcttgtacagtgactgacattcaaagctgatttgactggctccttaagtttctctgttttgagcttctgggattacaaaactcaatcatatgcagatagtttgccattcatactgacagttctgccaggtcagatggtgcaattatcgtgcatgctgccaagatcattgttattgctaggtgtttggttttcttcttttcaccccttcttc

SEQ ID NO: 209354 - DNA, 115 bp, Homo sapiens
cattgccatgctattggtctttcattacttttaggaaggaagtattactttgaattgcatcctgtgctgtgcaagggttgttggcccaaggacttccaggaacactctgtggccc

SEQ ID NO: 209355 - DNA, 182 bp, Homo sapiens
tttttttcatagtaaatgtatttaatttttgtgaagtccagtttatcaatttattcagtttaccagtttttttcttatgtttttggagtcctatctctgaccccaaatcacaaagattttctttgctttcttttatagtttgtttctttgttttccccagagacagagtgacactctgtctc

SEQ ID NO: 209356 - DNA, 565 bp, Homo sapiens
ttatgcagggagggtggaaaagaaagaatgcttaaacactgaaaaggggattccagttcattaactatagggctctcatggactgcacagattttgtgacagtatagtaaagaaaaatagttataaagactcctcctgttcagtgataaaattcctaaatattgaaaagagttttgcaactgtggatgaatggccattgctgaataaagctaagtgatgacgtgccagctcccttcatctgctgtgaatgtttttaaagggaagtggcagacttagtatgtgtattttttaaagcataatagatgattcaaaatctgatcatgttttctatagtcaatatccatagctactaaagcattatcatattttaatgttccttattaataacaatcagaacttaacctcaaaatccattgtttattgattatttacatgttcaataatgctttcttgaatagctacacaatcaccacaccgtgctaggcactgtttatgcaaaagtgaattaagtaagttttgtgtccccaacaggttgctctatctagtcaaggatataaatatgtga

SEQ ID NO: 209357 - DNA, 324 bp, Homo sapiens
acccccaaagtggagttcttccaaggcacctgcccccaggtggacagtatgagcactatgacagggaaggacggagatccaacgccgcgaatgagcgcagccaagctgctgctcctgagatagcgttcaacaggaagctgtgtttccacacttctccatgagcccagtgaatatggccccaaaacaggcaaatttaatttttttttttttagacaaggtctcactctgtctcccaggctgtgagtgcagtggtgtgatcacagctcactacagcctcgacctcctgggctcaagcaatcctcccacctcggcctcccaagtttc

SEQ ID NO: 209358 - DNA, 623 bp, Homo sapiens
acctgggggagaaatgtgagtttcaggagtttggttgacttctccagggggcggaacattggggcctcaccctgtgtgatccagggaggacactggaatcaggcagatctgggtttggatcctgcttgtatcattttcaactgtgcaaaggagtcaccccatctctctgggcctcaggctcctcatctgcagaatgggggcactaccatagcttccgagggggctgccaggactatctggtgagagggtgcatgtgaagtgcccatctgggcgacgggcacaaagccaggactcatggcagctgctccccctccagctctgtggattctgggcggctgaccccacagtcagctgggggatgacctttgagcttgcagactaatggggattcctcagactccaaacccctatcatttcctacccaagtttgccccagtgccctagacgggggatccctgatggacagactgtggtagcctcatctcttccctgggtctcaagccctcgcagagccaagccagcaagaggtgctggatgagtatttacagaacaaaggatgctggtgacaaccatgtggtaggagccactgcagcttctccttgtacagcaccccggaagttcca

SEQ ID NO: 209359 - DNA, 280 bp, Homo sapiens
tactgatactatgggtgtgatccagtcttactccaaaaaataggtattaagggctgggcacagtggctcatacctgtaatcccagcactaagggaagccaaggtgtaaggattgcttgagcccaggagttcaagatcagcctgggcaacgtggcgagaccccatctctatttaattaaaaaataataaggtatatgacctaccacgcctggggtccctggggctttagcctttacagttacctcagcctggaaagctttttcacagagttctcttcccta

SEQ ID NO: 209360 - DNA, 770 bp, Homo sapiens
cactcctcccacctttcattaaatagaattttccttatctttggtacatgtggtatttcctcataattagattcaagctgtacgttctggccagaatatcacagaagtgatgtgtctttctcagggcatcccatctggaaatacgtcatgtccatctgcccccctattcgtgatgctaattttgattatttggtcaagatattttctgatattatcactctgcagttaattttatatagttactattttttccccacgcaattaataagcaagtgctggagagacattttaagattctgtaaatatcctgctgcacatgaaaagtttccccctagattgagcgtctgctgatgattcttgtgtgatccagcatttactatgttggttgtaaaacaatgcttttctgactccagtattctctccacattcgtaagttggctctcagcattctactgtaaagaaggaccctcctttctccccaggaaggtgtttttgtttttttaaatgaaggagaccgtggaaactcgccagatgacctgtagctcctggagcttggcaaaggctgggcaaacgcccacctgaagactatgcaggcaatcaggacatgacacagagccgggagaggcctgctcttcggctctgccctgaacctcattcggcaggtggaggtatttaggcatttgagggaatctcagctttgggaggccactttgtaagtgatcttaagagattaagtacatccttaattaaaagaaatggtaacacctccg

SEQ ID NO: 209361 - DNA, 465 bp, Homo sapiens
ccattttcccaacagcatgtgctcagttcgtgtctgtcacattttgataattctcacaatgtttcaagctttttcattattacatcacagtgagctttgatgtgacgatcgtcattgttctggggcatcacaaatgcgctcatagaaggtggtgaacttaactgaaaaatgctgtgtgtgttctgactgctccatccgtcagctataccctcatctctctccctctcgtcagaccgccctattccctgagacataacactgttaaaattaggccaaataataaccctacagtggcctccaaatgttcaaatgcaaggaaaacatgcacatctctcactttaaatcaaaagctagaaattattatgcttagtgaggaaggtatgtcaaaagccaaaataagccaaaagctataggtgcctcttgcaccaaacagccaacttgtgaatgcaaaggaaaagttcttga

SEQ ID NO: 209362 - DNA, 350 bp, Homo sapiens
ataacagagagaaaagattgaaaatgaaaatggccagagcctctagggcctgtagataatataataacaagattcaaaaaatctagtagtggtgtcattggcatctatgaagtaaagggaaaaactgattggtgaagaaaaatatttgaagatatagtggatgaaaaacttcctccaagttcagtgaaaaatataaatttacagaaaaaattcaagaagttcagaaaaatagtttaaacccaaacaagacttaagggaaattataacaaagggaaacttgtaaccttaagaatgaggataaagcaaaagaaatgcttgggtatctgaataaatataatttaatgtttttc

SEQ ID NO: 209363 - DNA, 349 bp, Homo sapiens
aactacagaaagcgtgacttgtaaaattgtagacccagaaaaattagggaacaatctcataatactaatgaaaccttttttcccataaaataaatacataattagatatagaagattttttttttggtttaagctatcttttcctatttctatcttaaataatttacaactctcctttaatccaggcaattatcaattctataataaaataacaacaatgggtactgtgtattaaactctaaactagggtccttcatctcatttgaattttgaaatgactccataatatattgttatactcatgctgtagttatagataaagaacgagggctgacctttgacaatcaca

SEQ ID NO: 209364 - DNA, 494 bp, Homo sapiens
tattgcttatcttttaaaatgtgtgtctcctttccccatctaaccaactcaaaggcaggaactctgttgtctctattttaggcttccacagtatctggtgcaatactggtattttaatacttagtacttatcttaggtgtcaattaaatgcgtgttgtttgtatttattgatttcacatggaattaaaaacaggaaatgggccgggtgcagtggctcacgcctgtaatcccagcatgtttggaggctgaggcgggtggatcacctgaggtcaggagttccagaccagcctggccaacatggcgaaaccctgtctctactaaaaatacaaaacttagccgggtgtggcggcatgtgcttataatcccagctacatgggaggccgaggcaggagaatcgcttgaatctgggaggcggaggttgcagtgagccgagattgcaccactgcactcagcctgggtgacagagcgagactctgtctcaaacaaaacaaaac

SEQ ID NO: 209365 - DNA, 354 bp, Homo sapiens
ttttttattatgtgtatttctatgtaaccgatcattcacttgttctctagtcagtaattccatttaattatgaaaagcttgtatatgtgaaagttactgtgcaatagcagttgtcattgatttagttttgttttctggtaaggtataatgtgatagaagtagtagtgtagtgtaggatagagttttacatattggcagatttcactagtttttttttctattgccattcaggcaccaaagccatgtggatgaatatagctgacttgatatcagtaagatcattttgtgtgacacctgcccttttgtttacattggataggttattaaaaagtttcagcatgtaagctcttgtgg

SEQ ID NO: 209366 - DNA, 587 bp, Homo sapiens
gtttcttgtgaaagatcatataataggtctctgagtgagaatttgaactctggtcttcatgactaaagatttgtgcaagctgcccttcatggcattttccttaatataacatttttatttttttgagatggagtttcgctcttgttgcccaggctagagtgcaatagtgtgatctcggctcaccacaacctccatctcctgggttcaagtgattctcctacctcagcctcccgggtagctggtattataggcatgcgccaccacgcctggctaattttgtatttttagtagagacggattttctccatgttgatcaggctgctctcaaactcccgacctcaggtgatctgcccaccttggcctcccaaagtgctgggattccaggtgtgagccactgcgcctggccgataacttcatttttaagtgaaccactttttttcttttaatattttattatggaaatcttcaaacatatataaaaacgaagagaaaagtataactgagcttccatacacctataacctgacttcaaaggttatcaatgcttggctagctttctttaatctatattccgtctgctcccggca

SEQ ID NO: 209367 - DNA, 533 bp, Homo sapiens
agttgcttaacccacactgatgtggcctgttgtacttttgtatgttgttattctcattgaagaaaatttaccttaccctttgcattttattttctctcgtgtataaatattatgtctcttgcatatgatgaatgaatgtttcagaaaggtcactcagttttttcatattgatatgtctgccttttttgagaaagtacaagtgtaacttatgaacttattactcattgtggtgctaacactagcagttgagttagcttttaggtacaaaaagcatatagtaaagacaaataagtcttactttgtgctttgtgtgtgtatgtgtacatgctacaaataagacactgcatctacttaaaatttattttacataacatcttagaactctttaaaaatggtatttttaaagctgcagtgaaatggataactttatgcagtaattaaaatatttatgttaattattttatccgtgacttaagacaatattcaaaatatatttaaaaagattcaatgtttgctgtgtataatgtagatca

SEQ ID NO: 209368 - DNA, 479 bp, Homo sapiens
  misc_feature (451)..(452): n is a, c, g, or t
  misc_feature (454)..(454): n is a, c, g, or t
  misc_feature (458)..(458): n is a, c, g, or t
  misc_feature (466)..(466): n is a, c, g, or t
gattacagatgcatgtgccgctcccggctaatttttgtgttttaagtacagacagggtttcaccacgttgatcaggctggtcttgaactgctgaccttgtgatccgcccacctcagcctcccaaagtgctgggattacaggcgtgagccaccacgcccagcctctcccagcttttctagtcaaccctaatggtgccatgccactggatttaattttaaaaatacaatgttacatcattctctgttaggtgaaccaggagttcttggccagagcagctggagggatgtagctgccgtgaacagacacagaaaatgtggaaggggcaggtttggggtgtcattaaccaggaagttggttttcagtatgttaaatttgagatgcctgtcagacatccaaacagaaatgtcaagtgagttgatcttttttagagtttggcattcaagggagcggnncntgcnttggggancctgagctctaat

SEQ ID NO: 209369 - DNA, 393 bp, Homo sapiens
agtctcctggtactgatgggcacaggcccactccacgtgatcggctcaaaatactaaggatccacgaacaggccttgcagctttctcccaaaccatactcctttctctgggagctgcctgccaagaaggctgcgcatggaaaccttaaaccttgctgtaagccctggccacatcaatggtgcaaaagtagcccctatcaggacctgtcaaggggaaacctgagctgcaagagtaactggagactcaggcagctgacctgcttacgatcccttagttgagagtttaaaccaactgtaactgggcagtacttgacaaccagcttccctaatgagaccaagagttaggagagctgacacacagcaccctcaggtcaggggtgggggagggagtatg

SEQ ID NO: 209370 - DNA, 411 bp, Homo sapiens
agccatcctagaagtatatagcaagtgaaaatgtccttgaaaaatgagttaacacaaagacattttcggataaaagacacttctggccttctgatgactacgagtttcataatataattgccaagccagatcacctaaacactaaacaaacaatactcacgcaaatgaagcttccaattattaacatgctctggaaaataagagtaattattgaatccagaaactagatcaggatattagaaacagaaaagggaacatttggaaaacaaaaagagtcctttgaaattaaaatatatgcaagatgaaagaacattaaaaaagaaaatataacacaaatgaaaaattcaatagaagagttaaaagatagaaattaaagttaccttttaggtattagtataaactgacaaatgg

SEQ ID NO: 209371 - DNA, 659 bp, Homo sapiens
ggataccgggtcggggtgaaggcaagcagcagcacccccagcatggggaagaaggcctgaggctgtctctggccactgcatctctaggccttctcttggagcgggaggtggctgggtttccagggaattttgtgtgagtaaaattttcccatgtcattggagagttaggaagagctcctcttttggggcctttttccaagcgggtccccctcaccccgctacaggcttcttgtcactcaggcttcaataaaggccattctgggggctgcttgctgtaacctagaagacagaattgcctaggatcattagtagagtcattttttttttttcctactctacaggccaattaatttgaaacaagcttctatggtcttttaactgttagcatcaccactgttgtaacaggaccataaacccagtctgccccactctagtcccatgtttttaataactgttggctcttttttaggggtttgggtggggggattcctacctcagtgatccctgctgagcctggctgttgtctgtggtccagaaggttcctttacctgactcactcctctcagatcatgtccaaataccaggagactgacccaggtcctcaccaggtgagtagaggtctggctctgagcgacattaaggaaaagacacagacagag

SEQ ID NO: 209372 - DNA, 418 bp, Homo sapiens
aaatcttaaactaactcaaactcctagtctgcaaattgtattttatcaccataggttaccatctacaaaagaaacagctttcacgctaagtagaaagtatattaatcaaaaagagaaaatcagctttatatcaaaacctagattattagctatatttctattctagtaaagcatgagattagaaggcacaggccaggcacagtggctcagggccaggcgcagcagctcacacctgtaataccagcactttgggaggccaaggcgagtggatcatctgaggtcaggacttcaagaccagcctcgccaacagggtgaaactccgtctctactaaatatacaaaaattagctgggtgtggtggcacacgcctgtagtcccagctactcaggaggctgaggcaggagaattgcttgaaccca

SEQ ID NO: 209373 - DNA, 706 bp, Homo sapiens
gttttttttttataagcatagggtggggtgggacagggccatgggtggtttaggaaaaggcaacattcgagtggaaaaacagggatatgagttctcactttggactgtggtttcaggctttttggcttgaggatggggttttgccagggacctacccttttctgcctagaatttctctgcccccctgtccctgtcactgtgttgcccagggtggtctcaaattcctcggttcaagcagtcctcctgcatgagcctcccaagtagctgggattacagacatgcaccaccacacccagcaagatgcttattttaggtaatagtctgatggtagccactgatctgatagtatatttgcaacagttacagatgtcatttctttcctgaggacttctccactgaactcttgatgtagtaaaagaatgtatacacaatactgtgaaacttgctttccctaaacggcaattatcggttaaaagaatcccctcgagtaatgaacccagtatgcaaatttctgtaatattatgttgatgttaaagtgatgaaaatgttaagactagaaactgtgttaatctgagtaattaaatgtgtgtctatttcaaaagttatttctcattgaaagcaaaatttattgaactgataagttatgaaatagtgtcattttcatgttaataatggcatattaatgttgtcctgaaattatgtcagt

SEQ ID NO: 209374 - DNA, 386 bp, Homo sapiens
ccaatcaacatccaaccatcaaacaatctagacaactttagtttggctgcagcaagtaaaggcagattgtttgatggagggacgtgtgggattgatggagtttttcctttttatatgtttttgtatttttcaatggaatacattagaaagtgttgcatgtttatgggggggatttagttcagtgtgtgttaaggagctagaagaagtgaagaaatgggagaggggaatctagacaactttagtttggctgcagcaagtaaaggcagattgtttgatggagggacgtgtgggattgatggagtttttcctttttatatgtttttgtatttttcaatggaatacattagaaagtgttgcatgtttatgggggggatttagttcagtgg

SEQ ID NO: 209375 - DNA, 177 bp, Homo sapiens
cttcattgtttgaccaacaaaaccttgcccctttgttttaaatgaaaaccgtgacaggagaggcacacgccatagagatcattgcaacgcatgctgcctgcttttcacttttttctgcatctccccttcctgaattgttgagcatgtcccaccctcccgggacatccttcagtcccc

SEQ ID NO: 209376 - DNA, 222 bp, Homo sapiens
  misc_feature (157)..(157): n is a, c, g, or t
ttttttccccataggcctcaatgggctccgaaatgtccctttgcagattcaccaaaaagagtacttccaaccagctgaatcaaaagcaaggattaactctgtgagatgaatttagatgacccataggcctttgggctccctgtcccataacagattntccagagtgtttccaactggctgcccttctgtccgtcttctcgcagccgtgcgcgcggccgcgtt

SEQ ID NO: 209377 - DNA, 349 bp, Homo sapiens
catgcaaatttccattctactgtcattgtccccttcattggccttccatgaatactaagggtggtagttcataggtgccactgtggtacaatgaacaggggtgggaccctcagccaggcccaggcaagtacttgtatggtccttcttcctgacactcaggatggataggtctcctccaagaatcttggggcagagatgctcaggattctctggtggcttcaaaaccaaccaactgcactttggtggaacagaattttcttcccactctgcctagatccctacaactgagaacagagagcagaggagcctgggtcaggctcctggatcactttgtcttgctgtcttgctt

SEQ ID NO: 209378 - DNA, 180 bp, Homo sapiens
tgaaatttatcttgaggaaaccatcgaagagttttaagtaagggaatgatgaaatcagattcccatttgtaattctactctgcagctttgtagaaatggactcaagagaagccagtgtgtgtggccaggagaccgtgtggaagattctcaccttatcaggtgagggtgatggttggtcta

SEQ ID NO: 209379 - DNA, 666 bp, Homo sapiens
gcgcctgtagtcccagctacttgggaggctgaggcaggagaatggcgtgaacccgggaggcggagcttgcagtgagccgagatcacgccgctgcactccagcctgggcagcagagcgagagtctgtctcgaaaataaataaataagtaaataaataaataaataaataaatgtaaataaataaatagattaaaatggaaaactaaaaaaaagtaaaataattaaaaaaataaataaataaacgtagccggccagtcacgatggctcacgcctgtcaccccagcactttgggaggccggggcgggcagatccactggggtcgccagttcgagaccagcctgacccacatggagaaatgccgtctctactaacaatacaaaatcagctgggtgtggtggctcctccctgtaatcccagctactcaggaggctgaggcaggagaatcgcttgaacgcgggaggtggaggttgcggtgagccgagatggtgccactgcactccagcgtgggcaccaagagtgaaactccgtccgaagggaaaaaaaaaaattaattaagtgctgtattctgttatttttgcttcctaccctgagaagaacataatacagctgttgtctttctgcctgcctgcctgcctgcctgcctgtggcagggcctcattctgtcttt

SEQ ID NO: 209380 - DNA, 511 bp, Homo sapiens
gtcaggaggtgataggtgataagtctagattaaggagagtgtcaaagatttagccctgaggcacttcaacatttagacttcaggagaagcccattagatgcaaaggaaacctatagagagtagtgtccctgaagaaaacaaaggagggagggagcgaccaagtctatcaaacattgatgggagagtgagtaggatggccccagatctgttgactttggcaagtgtgaattcagacaatggtggcaacaaaagcatgattgtagtggtttgagagctgacagaactacaggagcaccttgctcaagctcccatattaagtggtagagttagaagtgaaccaaagtcttgattgtggtgatagtttactgggtttatgcaggtcaaaacttatttaagtgatactttgcagtttattttgggtgccattttattttgtgtacagtttattgtatgtcaattatatctcagtaaagctgttaccaaaaaaaataaatgaaccgaagctccactg

SEQ ID NO: 209381 - DNA, 306 bp, Homo sapiens
atttacatagctggattgagaaagaataatacaaagtaagcatgtgacaccaaggttggaaaaaaaatgtgtttttgaatgtttgatgaggattcaaacatgttttaaatgagaaaatcggtaggaggttgaggattgtagtagaagtaccagatgctttttcttttagctgttttttttcgttgctgttgtttggttggttttggttttggtttttttttttttttttttggctgttattgttttaaaagtaaggactaggccgggtgcagtggctcacgcctgtaatcccagcactttgagagg

SEQ ID NO: 209382 - DNA, 546 bp, Homo sapiens
tgtgaaagcatggcgcatgggggattcacaagtagtgagaatgcctagattataggttcacctaggggcagatagcaagggtgagagctccaaggagctgacttgtcttacgaagatttgaattgcaacctaaaggcaaaatgtagtcacagaggcattttatgtagaagtcacataataagttatgtatcttagatcattctggcaccagagagtaagatagattcgaatagataggttacatgtaggaaaaaaggtattttccctgctctcacacagctactcaacacttctgactccagatgtgtggggattttcccacaaacatcaagcagttctgctatgtacaccatctgggtgtccgctaattcaattctgttgacactatctacctggagatagcatcagatcccataggttgaggacttagtcttacaaaactgtcccccacttcagatgccaatcacaagccccaggttgcagtctgtacttctgacaactataaatcagagttcccacaacccctcctaaatcattctattaatt

SEQ ID NO: 209383 - DNA, 389 bp, Homo sapiens
aggtcaccagggtcccttccctggctcgggtgggggtggggggcgcaacccctcacggctcctccccaccaagccgtcgggaccccagcgggggcgcctcgcgttgggcgacagggacgcggggagagagcgacaagctggaagcaagggctgcctgcaaaactttcggtcctccagcggcaactctgcgggaaagaccacccttccttcggccccgcgtcgggcctatccccgtgtgccccgacccctgcgccccaggcttgggcggcgccgctgcatcccggctgccgggcgcgctgcagccttcgctctcccgcacgcggcgctcgcccgtccgcgctgcccctccccggcaggcgggcggccccggcgggcgggcgggcgcggac

SEQ ID NO: 209384 - DNA, 413 bp, Homo sapiens
ttgctcaagacgctggggttagacgtgctccggctacacagcggagtgtcagggggccaagaatatccctctcctttttcttccctcctgctggctttggttgctttcctaaacattgccccggacggcaaagtcggcttcactcttagcccttgttagggaaacgctggatccaagattagctgcgcccttctttgcttcagttgaacaagcaccagagtcgctgatttggcagtgtcggagcgggaggaactggtcttaaaaaggtacctcctgaactcgggaagactgctaaccctccagattattgttttgcatctgtgtgctgttcatgaacatacctcagagctgctcactgcaacttgaaatttcattatatttttaatcacaaagtttgcatcctacccttgata

SEQ ID NO: 209385 - DNA, 535 bp, Homo sapiens
cattgtgattaaaaagataatcagcttgatttttgataaccaaagagttaccagggatatctgaaaaaaaaagaaattcccaactatgaattcacacatgttattttctaatttagattttcacaccaaataatatgtaataagtaaacacgtattttccatattatttctattctattcttctggtgcagtttttcttagaagtgaggttttgtcatgaattggtgctaccataagtagaattttaaaattgactgtcttccaaaacaaaaataaaaaagacagtaaggtaatttttaaaaaactgtttccttagttcacagtgatataatatttatgctgagattgttttaaatgaactctgtgatagaattgttgatttattaatatttggatttgggttgatgttccttttacatttgctgtaggaaatacccacgacatgaggtttgtaagcttttgtgtttttctctattctaaccactctgcttgaaatataatttgaagatgctagtaaaaaatataacaaattccc

SEQ ID NO: 209386 - DNA, 251 bp, Homo sapiens
ttccatagcggattttatacattgacctctgtggttatcaaaaagagcagtccaacgacgtgtcacacaatgagctggtctgatgggagaagatgcgcgcagtcttcgtcccatcaggatcggtatttccattgcccagctgcccaactccaaacctgctgtcctttaacccaattcaaatgccacttctccatatggtggaaggggaatgtggtgaatctggctgatgggacgcaagatgggtaccgaac

SEQ ID NO: 209387 - DNA, 329 bp, Homo sapiens
caggatcggtatttccattgcccagctgcccaactccaaacctgctgtcctttaacccaattcaaatgccacttctccatatggtggaaggggaatgtggtgaatctggctgcccaggtgagtatttctcccagcctcagcactcaggtgcatgccttttgagagcttgttctgcgcaagaaggatggcctttgcagataagggaaggcactttactagctaggcccagggatcatgccctcactgctagactgcctcagttacagcttccagatttcttgatgtggaattcttgctcgcctggggctatgagaatcagggcccattcc

SEQ ID NO: 209388 - DNA, 404 bp, Homo sapiens
tagcccctacaaactccacaaatttaatcgtaccttaataccctacttgtatcatggtaattcctcagatcaaaaacctcctataagagtaactatttcctaagtaaaaggcaatcagttcagcttttcacaatctggcccttcttggatttcttggtctcttattggcaggcctcccttctgctccaacaggtgtgcgcatcactcaggccacacatcatgcccctatgtccttacacccagtgatgctctcctatcatcatcaaagtctcccttatcatgtcggccctgcctgacacgtttctcttgattctcccttaccctactcacatgtcaatataccccatcttccaggactgaatccactaacagaactctgtaaggaatagccaggcatggtggtg

SEQ ID NO: 209389 - DNA, 208 bp, Homo sapiens
gcgcccggccctcttacacatcttttttaacaattggtgtttatttagaattttacattgtgttgtgaaataccttattcctatttcaatatgcctttttactgttcttcataattttgatattatctgttgacatgttatggtagcttgaggcctaaactgttaaaggcctcagtctcccttccctacttccttacaggtgttacaa

SEQ ID NO: 209390 - DNA, 753 bp, Homo sapiens
agtgtttatttattgttcatagtcatctcttacccagggaattccttattttgtattcctgaaatcgaaatattctttcatactcattatttagatgctaagagaaaacttggggaccgctcttcccaacaagattgtctcaaattttgtgcccatctgtgtgcattcacgcacatgagcatgtgtgtggaggagaagaggaaaagaacagagatggaaaagattttgaagtgggatgcttggcaagaggagtaaatagatgataattatgaagaagaaattggcaggatttcttaactgactagattatgggaacaaggagtagagaaacaggtcaaagttggctgaagtccatagaatgtatattttaatttaagtgctaaatttcctccatacatttttcatgaactttgaaaaatttgttggctttatacgaacctgtgaacttcagtgagaaaaacagcatctttatatttttgagcatagtctcaatgtcattaattcttctgcttaaaaatcctcaaatgacttgccaaattaggataaaatctaaattctgttaccaaggccccaaatttctacgtatctgactgcaactgcctacttaaactgatcttaccattattcccattcatataccacccacataggctttatatctgctcttacttaagagtttttatacttcctggtccctcatcctggttgttcctccccagtactcagcttattcagttatcagctcttccatac

SEQ ID NO: 209391 - DNA, 396 bp, Homo sapiens
  misc_feature (324)..(324): n is a, c, g, or t
  misc_feature (339)..(339): n is a, c, g, or t
  misc_feature (361)..(361): n is a, c, g, or t
  misc_feature (377)..(379): n is a, c, g, or t
  misc_feature (382)..(383): n is a, c, g, or t
  misc_feature (385)..(385): n is a, c, g, or t
  misc_feature (390)..(390): n is a, c, g, or t
  misc_feature (394)..(395): n is a, c, g, or t
cagacaatctctgtccccaggaaagctcattccagtgctccagggccacaggccacctctgctccctgtcccctctcttcccagaacccagcagtttggcttgtagcccctcgccatctgagacagttcccagaacccaggttctcagggactcagcagttggagttgagcccagcctcttctctcaggaatgcaggaccctaaggcttgggaactgaggtatcttcgcccccaggaatccagctccttcccctgccagaagcccagatcccagcccctgacctcccgggtctctcgccctcattctcctgctacctccggctncagtggagatatcancatgggggtaccgagctccganttcggaatcatgggtnnnagnngnttccngtgnna

SEQ ID NO: 209392 - DNA, 379 bp, Homo sapiens
  misc_feature (6)..(6): n is a, c, g, or t
  misc_feature (20)..(20): n is a, c, g, or t
  misc_feature (33)..(33): n is a, c, g, or t
  misc_feature (35)..(35): n is a, c, g, or t
  misc_feature (41)..(41): n is a, c, g, or t
  misc_feature (46)..(46): n is a, c, g, or t
  misc_feature (66)..(66): n is a, c, g, or t
  misc_feature (71)..(71): n is a, c, g, or t
  misc_feature (307)..(307): n is a, c, g, or t
  misc_feature (322)..(322): n is a, c, g, or t
  misc_feature (344)..(344): n is a, c, g, or t
  misc_feature (360)..(362): n is a, c, g, or t
  misc_feature (365)..(366): n is a, c, g, or t
  misc_feature (368)..(368): n is a, c, g, or t
  misc_feature (373)..(373): n is a, c, g, or t
  misc_feature (377)..(378): n is a, c, g, or t
aaaacnactggccatttgcnaagctttgcattntnttgcanggtcngactcctagaggatcccccnttgantgatatctccactggaggcccctcgccatctgagacagttcccagaacccaggttctcagggactcagcagttggagttgagcccagcctcttctctcaggaatgcaggaccctaaggcttgggaactgaggtatcttcgcccccaggaatccagctccttcccctgccagaagcccagatcccagcccctgacctcccgggtctctcgccctcattctcctgctacctccggctncagtggagatatcancatgggggtaccgagctccganttcggaatcatgggtnnnagnngnttccngtgnna

SEQ ID NO: 209393 - DNA, 203 bp, Homo sapiens
cacaccacctgagtccagctcaggcctaacacaggaaccccaggattaatgggtaggatgaaatggcagagccaccgcacccagcctcagtaggtctcttgaactgtatttaattttaactttttgttttgaaatagtttcagatttgcaaaaaagttgcaacagcagtgctaacaattcttgagcgccctttacccagattt

SEQ ID NO: 209394 - DNA, 465 bp, Homo sapiens
taatttataaaagaaaaaaatgataaatttataaaatggacttcatgaaaacttaaaaacttctcctctttgaaatatattcttcatgaggtcaggagatcgagaccatcctggttaacacggtgaaaccccgtctctactaaaaatacaaaaaattagccggtcgcggtggcgggcgcctgtagtcccagttacccgggaggctgaggcaggagaatggcatgaacccgggaggaggagcttccagtgagccgagatcgcgccactgcactccggcctgggcgaaacagcgagactccgtctcaaaaaaaaaaaaaaaagaaaagaaaagaaaagaaatatattcttgggaaactgaatatacaagccacaaaatgtgagaaaatatttgcaaagcacatatttaaaacaagtaagtatatataaagaattaccgaaactccataataattaaacagacaactc

SEQ ID NO: 209395 - DNA, 275 bp, Homo sapiens
gcaagaggaagagctgtgcctcagtgtcccatttgtaaatagctagtggagcctgtgttcgtgtgtgtgcatgtgcgtgtgtttgtgtgtggtggcattggtagtggcggtggtagttgtttgaattcagagggtttttgtttgtttgttttgagacggaatctcgctctgtcacccaggctggagtgcagtggtacaatctcagctcacgacaacctccacctcctgattcaagcgattctgcctcagcctcctgagtatctgggattacaagt

SEQ ID NO: 209396 - DNA, 831 bp, Homo sapiens
tgaatatatatgtgtgtatgtacatacaaacacatgcacagcctcagtatctatgttgaaatctggttttgtctttaacacacagacttttcctagcattttgcgggcactttccctttcttcattctgtattgttctgatgaactgtcagtgacacatgctccaagtaagacaaccagattcattctctgtattttgattagagacacagggacaggaacagggccaatattcagctttatgaaccagtatggccagaatggatgttttgttttagtcaatattcattttgattggtgggacctttattatacctgctgtgaagtatgtgggatatgactcctaggctggaattcgtttgaattaagtcatcctttggcagcaacctaaggattcctccacctgtcactgagatccattgagatgattcctgctttctcacatcttggttttgagttaaattctttgagtctgtgaactacctggtattctaatatttctcattttaagtcagagtcaaatactttggttctcaagcaaagagagctagccaatgcagaaatttatactacagaatgattactagactgtagagaagcagagtattcaagatggatgtccagtgagacagatcaaagcacagatgaattcctaatcctattttgtgctgtgaaaggatattcatgatatagcaggatcctaagcccattgtgcactagggtctggatagctcctaccaaaaacaaaggtattgaggaatactacttccaaaagtatatatgatacctgtttataatgaaattgggtaattaaaatttcaaggctacttga

SEQ ID NO: 209397 - DNA, 161 bp, Homo sapiens
tctccttccacagaatgctcccttcaggttaacagcccttttgcccacttaacgaaacattcctagacatggtgttatagttgagacacttgttcccacaaacctcatgctgagatttgatccccaatactggaggtggggcctggtgggaggtgtttggg

SEQ ID NO: 209398 - DNA, 389 bp, Homo sapiens
aaatgtctcctgacggcgacaaaatcactgccataaaactactggtttcaagaaagagaacaacaaattcaaattcctaaacctcctataaaagcacagactgaaaaccagagactttccaagaacacattcaaggagtctctttgtttgcagctgaagggctgagagggccctttaaaagactttaaaagcttaattccgtgagttgccgaattagggtgttaacttaattcataagctcaccaggtctcttatgtgaaaataggacctagagaattttttttttgagacagagtttcgctcctgtcgcccaagctggagtgcaatggtgcgatctcggctcactgcaacctcagcctcccaggttcaagcaattctcctgcctcagc

SEQ ID NO: 209399 - DNA, 180 bp, Homo sapiens
atacatacacacacgcacacacactggcacacccacaagcacacggcctatgggggtgacactgccaggccccactcgaagctccaggtactgccagcaccacactcctccctctgccattcccacaagcccacaacctcacaacctcacaacccacaagcccacaagcccactcctccc

SEQ ID NO: 209400 - DNA, 269 bp, Homo sapiens
caggactggaaaactgcgattataatccaccccttattaccctgaaggatagatacaaggaataaggcttcagagcctcccaaacaaacagacaaacaaaaaactctgggctatgctttatttacctttctagatgtatatattgtaccaagaagaaatatttacatggaatcaggaagcacacaaaagccagctgtgagtgaaatactaaatactatgtataagatatattaggtcctcttagatattagaaagatgatagcccatct

SEQ ID NO: 209401 - DNA, 167 bp, Homo sapiens
acacccattctatgagtccatgggataatgccagcattacctacacaggactttcccttggagctgcattctctagtccaaaaacaggcttagggcttgggcccggagctcaggcctgggatccaggggctgagatgatggggctggtgggtgctatcagggggagg

SEQ ID NO: 209402 - DNA, 472 bp, Homo sapiens
tcactctctcttgcccttctgcttttctgccatgtgaagacacagagttcattctctcttgttcttctaccttctgccatgtgaggacgcaatcagaagacttgaacacttttggaactatgagagaataaatttccgttctttatacattatccagtctcagatgttctgttacagcatcacacaacagactaagacaggttgccataacaaagaaccacagattgggtagctgaaacaacagaaatttattttctcacagttctgggggctagaagtctgagatcaaggtgttgagagggctgattccttttgggagccatgagaaaaggatctgttctaggttctgttctctccccttggcctatagatggctgtctccacatcatctttcctctgtatgtgtctatatctgaattttctcttatgaggacaccagtcatagaggattagcatccaccctaagacctca

SEQ ID NO: 209403 - DNA, 446 bp, Homo sapiens
aaggccttccaccttccagacccaacttaggctttattccaccacctggccctccatccgggcttcctaggctctggccagtcctgctcctccctccagagccatgaccagtcgccggcccaggacagaccgggtgcaactgaggaccctcccggtggtcacctgatcgtactgggggtatcagccggacaccccgcctccagaacccgctgcctctgtccagagcggcccagccccagcaggctggcagctcggtgcaaacaacgggatgcagcgggcgggatgcgagccccacgatccctgggtcggaagccaagggcttaagcccccacgttctttctggctcgcggcgggcacttcgtgcgccccaccttccccgcagttctgagagaggcggtagcagggttcagatggagggaaggacagggcgcggaaaggggagggga

SEQ ID NO: 209404 - DNA, 148 bp, Homo sapiens
tctaggcattcatatgtacaattatttaagtgctgtagatgtagttggtcagagaactgaactaatttttcactagccacaagacatatctcagaaattgcctgcagaaaaaaattcttggttaagttgtttacttggacgaaatgag

SEQ ID NO: 209405 - DNA, 300 bp, Homo sapiens
tggtaggtccctgtgtgccgtcattcatcagagtttggatatacctagataagtaagggcctgccagtaagctttagcttcttgcagagtgtgattacattgtgcaggacaggagaatacacagctgtagacagctatatagcaggcaatgtgggagcttcagttaagtgtgccgtcattcatcagggtttggatatacctagataagtaagggcctgccagtaagctttagcttcttgcagagtgtgattacattgtgcaggacaggagaatacacagctgtagacagccatttaggta

SEQ ID NO: 209406 - DNA, 376 bp, Homo sapiens
tttattgagggtaattgatatataaaataccgcacatatataacagtttgtaatgtatacatttaatgtatacagtttgaacatgtgcatataccatgaaactaacaccacaaatgtctacaactctagcatggtaaattcttatctttcgaagaatattagaattttctcttttagctatactgtgtgactcataaataagcatcatccttgtggaatgtagaaatgtgtttgcttatggatccaaagctagtaaaatttgtttttttttaattgatacctttagtaactcttagtatttatacttttatttaatcgggaagtaggaatatgtgtaaagatactgattttactgaaaatagggaaatgtgaataa

SEQ ID NO: 209407 - DNA, 447 bp, Homo sapiens
ggatatgcttcccacctacacacccaacatagagtcttgtggctggtcaggcacagtggctcacctgtaatcccagtactttgggaggccaaagcaggaggactgcttgaggcaagagtttgagaccagcttaggcaacatagtgggacctagtctctagcaaaaaaataaattaacaaaaatgtgtcaggggtggtggtgcacaccggtagttccacttccttgggaggcggtgacagcctcacccttgacagcctcagccttggaaaaagaaagtactgttaatcttgaagactatggaatcattttgtccctgaccagtggaagaggacctaagcaaccccctttgagggaaagtgggtcacctgggctggaggtagggatgtgatattgttttgtaagctagcatttcctacaaaatatgaatttatactttgaacagatctt

SEQ ID NO: 209408 - DNA, 247 bp, Homo sapiens
agcccctgcctgcctcttggccacttagctactcttctacttatcccctccctttccactgaacttcctggcaatggggtaactgcctcattccagccataatctctccatgccccctgcctcacccccaccagccacacagacagcaaggcacctgtggcacagcctccaaaacacatgatgttttctcagttgccaaatgttctctcgtgagttggcttcctttgtccattgaatcttttttagt

SEQ ID NO: 209409 - DNA, 503 bp, Homo sapiens
cttattatagcaataagtgaaaaaagggcaagatgcaagataatattttggtaaaattccattggtatttagaaaaaaagatatacgtgctgtttgtgtgtgtacaatatacacatgtacatatgtatgtatgtctatctatatttatgtatatagatctgtaggtgtgtatatggaaggatacacaaaagttatctacaataattacttctggggagaagcatgaagacctaggacttttacgtttcttttttttttgagatggagtcttgctggagtgcagtggccagagtgagaccctgtcaaaaaaatgaaaagaaaaagaaaaatagaaaggaagaaaggaaggatggtctcaatctcctgacctgcctggctcggcctcccaaagtgctggggttacaggtatgagccatcactcccagcccctccataaatggtttaagtatacatatattgttgttgactatagtggcaatattgtacagcagcttgtgcctccc

SEQ ID NO: 209410 - DNA, 309 bp, Homo sapiens
cttattatagcaataagtgaaaaaagggcaagatgcaagataatattttggtaaaattccattggtatttagaaaaaaagatatacgtgctgtttgtgtgtgtacaatatacacatgtacatatgtatgtatgtctatctatatttatgtatatagatctgtaggtgtgtatatggaaggatacacaaaagttatctacaataattacttctggggagaagcatgaagacctaggacttttacgtttcttttttttttgagatggagtcttgctggagtgcagtggcgtgatcttgactcactgcaacc

SEQ ID NO: 209411 - DNA, 508 bp, Homo sapiens
aaaccctatacccattaaacactaactccccattcctcctccccaggcccaggcattcttttgagagggggaaaaaaaaaagcctgaagcctgactcacagctcccaaggaccccagggatggcttcatcagaaaagcctgggaccacagaaatgcttgtgatctggggatctaaacatcagagaaaaacacacagtaaatttcccttgaagtaatcctttctacacggtcaggaagctgtagtaagaaatgaagggtgggccgggcacggtggctcacacatgtaatcccagcattttgggatgctgagacaggtagatcacctgaggtcaggagttcgagaccaacctggccaacgtggtgaaatcccatctctactaaaaatacaaaaactagctgcatgtggtggtgggcacctgtaatcccagctacttaggaggctgaggcaggataattgcttgaacccaggaggcggaggttgcagttagccaagcttgcgccatttgca

SEQ ID NO: 209412 - DNA, 267 bp, Homo sapiens
gctatgtggtctgagtcacatagcatgcagttacaacttctgctttttcctataaatgattaggaaaggccacagagatgacaccaaggataagacccctttagatcatcacccctcctcatggaatgttaaagcattcttccttggaacgtagcaagctgtaaccaatcaaatcactgtaatgtgtatagtgatctcgtgtagagagggttgcagccccattcactgtctatataagtaaaaatcttactttcccactttgcaatg

SEQ ID NO: 209413 - DNA, 270 bp, Homo sapiens
caatgaagtaggataaaagtggatatatcagaatggaggagttatcagagaattagacagattaagtcgctcttctgttgctcctttaggacagctagcaaggatctgaaatgacatacatgcatcaatagtccacaggtttcaagatttctggcagagcctttccttgtcttagagaaaataaatgcattttgtcttctctagggccagggtgaattgatggtggtgggcctagtctggcatgggcaaggacaagagttgagttcttag

SEQ ID NO: 209414 - DNA, 330 bp, Homo sapiens
aaacacaaaagtcatgaatgaaagaccagacctagatcactatgcataaaagagaagactgaccaagctcacgggtgttctccaggccatggcttactaaaccacaagagaaaacacaactgtaagcacagattgaagacatcctggaaaacctaaaaactgcctgatggaagctttgagcataatttgtaatctattagtcctcaagataggaaaacacattttccccttttcggaatcccatattgggctagaactcttattaatatactcccagttagtataatttatttaactaaaagtatcagctacagtggtttgtagtatttt

SEQ ID NO: 209415 - DNA, 409 bp, Homo sapiens
cataattgctgggtcctacctccagagtttctgattcagtaggtctggggaggagtccaaggatggatatgcaattttaaaaactcaggtgatgctgaagctgctgttctgggaaccacactttgagaaccagctggcttggtagaagaaaaatctgttcttaatcagaacacgtgggttctaatcccagtgttgatattagctagttatgtgggatagtactggtcacttcaactctgcacctttccttggtaagatggttatatctaccttttctatttcacagatttcttagaaggatgaaaatatgatgacatctgttgaaagtaatttgaaaaagctaatttcaatatgaaatatccaagaccatgggatttgaaagattcctcaataaccagggggaaatgat

SEQ ID NO: 209416 - DNA, 340 bp, Homo sapiens
agaaaccctcagggctagtttttcgcaaaggaaactaacaactgaaggtaacgccccaaacatactctaagttcaaagttccaagaggaggaccagctgaatcaaacatgtccagaatgagaaacagcttacccataacttctgcttcacatacttctgttatgataatgttaatgaatagaaaaaaaatgcatgcttgtgatcaaatgtttgaatcgctggttggcagtggatagagctgcacagaccctataggagcagaggtatttgcccttcaagatttatcttggtccagtgtggaaacacacaagtgcagaccaaccactcattgcagctccca

SEQ ID NO: 209417 - DNA, 306 bp, Homo sapiens
tttagattagtcataaggaagaaatccaggaaaacctcttctgccgtgctagctagggaggagtggggtgacagttaagatgtctcacgacacttgcatccagacatggccaggtagacagagggtggcccaatcaaaaggggcgccagcggccaggtgcagtgactcatgcctgtaatcccagcactttgggaggcagaggcaggtggatcacctgagcttaggagttcgagacaagcctgggcagcacagcagaaaccccatctctacaaaaaaatatacagaaattagccaggtgtggtggtg

SEQ ID NO: 209418 - DNA, 305 bp, Homo sapiens
tttttttccttccttttccttgtgaacttccccagaagacttctgtgatcagtctgttaataattttctctagcacactctctctctgctctttagcaccatataactttctattacagaacttaaacagagctaatattatctttgcctgtatgatcatctgatttctgtctgctttcctcaccagaccataatcaccatgagtgtggggaccatgacgattattttacaaatcttcagcttctggctcaatacaggatgtgaagttaatgctcaataaatctgtaacggtagagttaacgaaa

SEQ ID NO: 209419 - DNA, 682 bp, Homo sapiens
tgcacacccagtgagaacacgcctacagaaagcttggcccggctggtggccatggtgtttcagtggtttcactccactgcgtatatgatggatgatgaagtgggaagtctggtggaaaagctgaagcctcagtttgtcaccaaatggctgaagaccgtatgtgatgttcgcttcgatgtcatggtcatgtgccttcttcctaaacccatggaatttgccagggttggtggctactgggataagtcctgtagcacagtgactcagctgaaggaaggtctcaaccgaatcctctgcctgatcccctataatgtgatcaatcaatctgtctgggagtgtattatgccggaatggctggaagccatcagaacagaagtcccagataatcagttaaaagaattcagggaagtattaagcaaaatgtttgacattgaactctgtcctctgcctttctcaatggaggagatgtttggttttattagttgtcggtttacaggatacccctcctctgtgcaggagcaagctttactgtggcttcatgtattatcggagttagatatcatggttccacttcaactactaataagtatgttttctgatggagttaattcagtcaaagagctggcaaatcaaagaaaatcaagagtcagtgaactggcagggaaccttgcatctcgaagggtaa

SEQ ID NO: 209420 - DNA, 524 bp, Homo sapiens
catccatccatccagccatccatccttccttccttccttcttccttccttcccaccttggcccagcccctctcagccccctctgcatcccatccatcacttctcagacaggcctccccagccaggtagtcacctcctagcagctccatctgtctgtctgtctaccaacccatccatccatctgtctgccagcccatccatcatgccacaggccacttgtccattcttgccacctttcacatgttccctagttaggcccctgtggtatcccccagccagcgcagtgtaggtggggggcgtgtgttcatgtcagtagatatgtctgtggccgccagcatgccttgtgctgagcagagggcaagggacctggatgaggagctggggaggggttggggacaggaagactgggaacctcttggtggggggcacagcagcttccctgtgtattctccctgtggtctgttgcaccataggcatcaatggcctgctcaaaaataaatacacgactggaaaactctcccacct

SEQ ID NO: 209421 - DNA, 319 bp, Homo sapiens
atcttttgattacatttgttaatattattgtacctacctatatctgacttgacttacaattttacttcattaaatacatagcaagtcatctgagaacccaaagtaatcatacagattacttgccatatagttaatttgtgactgtgatatggctgctaaggtagaggtttgaatttaaaagcacaaagaaaaatgtttacttcaatggttacaaatagattaatcatataaagtacatatttctatgatcatgccactgcgctctagcctgagcaagagagtgataccctgtctcaaaagtaaaaacttacaacaatat

SEQ ID NO: 209422 - DNA, 774 bp, Homo sapiens
gattactggctgcctttttagagagaacctgcaaagtggtagatttaccacagttcaaacctggctttccatcttacagggcagagtgacattaaccaaaactacaaggcagacctgtgaaaccacaatgccaagaacccactgtcttaggaaccaaaccaggttcatcctcttgacatagacaggcccatagcagtggtcaagaaaatcagcagtaggaagctaagaaaatcagcaacaggaagctgcttggtgaccacaggatctgatcaagagggccagaccggcagagcactgaccagcatcaggcttacccagcccgatgaacctacttcatactaccagacagccatctccactaagaggcacaaaagagccctctctccaggacaattactaattgactaaaactaccggagtgacacattcattctttagctttattatacatccagtcaggtcatccaggaagttattttatttctctaatgtgcccacaaattgttactctattacgttatgcttccccctccgctccccacaagacagtctcactctgtcacccaggctggagtgctgtggcacgatcttgggcttaacctccttgggctttacgagggccttgatagcctcggcacgtgcactcatggccttggcattgttggcctgcatcttcttcaggccctttttgttgtgcttcttggcaaagcgcatgttcctcaggaacttggggtccacccccttaagagattcgtatctttgtccggggttgtt

SEQ ID NO: 209423 - DNA, 676 bp, Homo sapiens
gaaaccctcttccttccaccctgccctgtggtgtcccaaaggccaggccagcccagcttccccaacagtgaccagatgcatacaaggatctgtaagtgtctcatgaagctagattaccacacatgagtggcagtagacatggttccagaagcagacaggacaccagtccgattctggctaaggagtcctgcagacatggggagccactgaagggcctgatgctggggactggcaaattctgagttgccttcccaggggctgctccagaggagacagggtggatgtattggagagagaagtactaggagcaaaggaaaaaaaatgcatggaagaccattgcactagttgagcaagacgttgagtaggagacaaagtcaggcttccctgccttttgtggctaagacaatcatggacctccctgaaggcaggggcagaacagacctgaggtccccctcactctctctcgtgattctgattgttattgaaagctgcctcctaccacatcactatcatcattcctcccccgattctctacctcctgcttcttttcctcctcctcctattcctcctcctcttcttcctcctctcgtctctctccctccctctgtccctgcttcttcttcctcctcatcctccttcatcttctttctctctctccctaaagcaatatgccttg

SEQ ID NO: 209424 - DNA, 676 bp, Homo sapiens
gatggcacctggcctctcttacttccaaattagacgagaacatactacattttagctgggcacattactatcccaaaccaaactggggtgctattagtaaggaaggaaaagagtagatactgggcaggcaattagaaatctttgcagcaagacattcgggaaaggtattatttagaaaagtaccaaagtctttttgtgtccttgatgtggattgaatagagtgagaaaaattgcctgtgtgccggtttcccagtggaggtacatggagaaataagaattgtttccttctgcatggtaagcagctctccttgtccaattgtcccctattactgaccatggtcccacagcaatatagttctatttctaggaatggactaggaaaaaaatcccagaggagaaactcccacactgatttctacttctaaaattcaatgtatttgtacctcgcgtctctagaaaaattgtgttttagtatatcagcttttgaagacagctgtacctaaatccagccatccaaatgggacaaaggaagccgactttcaccttcagaagcagccatgagtttgtgtctgctgcattgcactttcaatatctaggacagaatttcatacttattatataattacagtaatacaatttgttattaaatagttgccaaacaaaatagaaatacaat

SEQ ID NO: 209425 - DNA, 735 bp, Homo sapiens
acagcttctggcaacccctgagggtcttggaacataacccccaaggataaagagaaagactatttattggatacaatatttgcaaaatgtttaaaatatccaaaacaatactctatacacactgctgaagcttccagtcacatgtatggaaggaaaaagacctaacggggaggaaaaacaagtccaggaaggtggctctctacgggggcagctgggttatcaggttccatttcttaacctgggtgttgcgtacacatgtttatgataatcacttttccacttttcaaatgtttcacaatttaaggagcaacaagcaaaacagtcagtagaatatactactatttgtgttaaaaagaaaaaaggcagaaggaactcacacatgggatgtacctctgcaagcttctaagggagctgctaccaggctgtttggggagggcctggggacagcagtggcagggacaaaccttgtactctatactccattctactgactgacctggcttcccacgtccatctattatctactctaaacagctcgcctccatttacgaatggggaaaccgaactagggggctggaacagacaacctcaggtccaggattagtgacaacagatctagacccaagcattcgggttaccaggaaccagctctgatctgctgggctgctctgatgtcaagatcccctggcagctaaacctagtttggctacctagactatgaactgcctgccaact

SEQ ID NO: 209426 - DNA, 625 bp, Homo sapiens
tcccctttgccttccaccacaatgctaagtttcttgaggcctcccgagacatgctgaactgtgagtcagtcaactaagcctctttcctttataaattacccagtttcaggcaattctttatagcaatgtgaaaatggactaatatacaactgaagtcatttggtaaaataagcttcaagattcctcttttcatctctcactgaagaaatataccccttttcataagaaaatctacaaagagtatttataagaaattggtgcatggctgtgcttcaactcctcagtgcatgatatgaaagaaaatcagatgaggttgcaagaaataaattttgtgttagacatcagagaccatttcttgacaggaaaagttgtttgtgatgtgtgcagcatggtttctcaagatctggctgtataaacaatggacagggctgagaaccaggaagtgcagtgtctctgggatctatgcttgatgcctctaactctgcttagcactgagtatgtaggatagtccccatgtattgacaactcatattaaactgtatatggaagcacaaacattgaagaatagccaaacattcttgaagaaaagaaacaaatggagagaacttgtccttcaaatatcatt

SEQ ID NO: 209427 - DNA, 521 bp, Homo sapiens
acaaggtaaatgaagtcagggtcacagaagggcttctcacccaaccctctcacttcacaagtggggaaaccggcccagagagggcaagtaaacaaacagcgtaaggagtttgtggttgtggaaggttgtgaaatggcccctcaaaagatattcccattctaatacctggaacttgtcagtgttaccattctgatgttgggaagattatcctgcggtatctaggtgggctgtaaatacagtcacatgcatcgttataatcagacgacaaagagagatctgaaaacacacagaggaggccccagtgtggagaccagtagagggaggcttgagaacacgggccttgaacatcggagttggtgtggccatagccaccggaccctggaagaggcgcgtaacagattctccccgccagcccctgagtgagtgcagctctgccaactcttgatgttggcccagggaaactgttttcagacttctggcccccacaactgcgagagaataaattacgttgttttaagcta

SEQ ID NO: 209428 - DNA, 307 bp, Homo sapiens
aattcaagcttctaacgatgtacggggacatgcatcgttataatcagacgacaaagagagatctgaaaacacacagaggaggccccagtgtggagaccagtagagggaggcttgagaacacgggccttgaacatcggagttggtgtggccatagccaccggaccctggaagaggcgcgtaacagattctccccgccagcccctgagtgagtgcagctctgccaactcttgatgttggcccagggaaactgttttcagacttctggcccccacaactgcgagagaataaattacgttgttttaagcta

SEQ ID NO: 209429 - DNA, 250 bp, Homo sapiens
tcttctggatatcgatggggatgcatagaggagtagggtgaggaaactagttagtccgatataataaatttacacagtgcctttggctaatgctccatttctctaggtaaaatgccatctctctcagaatccctccaacacatacgcacaattcctctgtaagtagatgtaagggtagagcctgccagctgcttgtggtgatgtgtataatgtctttatactacctagtcgttgggacagcctctgatgc

SEQ ID NO: 209430 - DNA, 541 bp, Homo sapiens
aataaaggaagggggtggggaggagttcaagtatgccagagcttacagcagattaactattttatgagaacttctggcactctcagaaagtaaaagccactgtggactggagctaaaataaatctttccaacctaaacactgcacaacagcttttctaaatagaggtgaaaaattcagatctggaccactagtcttaagaacagaaacaaggctggatgaattgaagatcctgtcctggagcagcaaagcataatgctttagatatgctctggagccagagtgacaaggttaaaattccagctccaccatatgagagctgtgtgactttaagcaagtcattaatctctttgtgtctctatttacacctccgaaaatgggcagaagatcagtactgagcttattaaaggctgttgcaaaattaaatgaactaatatttaaggcatacagtacagtgcttagcacatgataaattttaattagccatacttctcctccttttccaaggaatccacttcaaattgacataccaaaaggggttat

SEQ ID NO: 209431 - DNA, 297 bp, Homo sapiens
tgggctccagcgctgtttttgcgactgtgcctggaacagagctaagtaaggactggaacctttttctagctctgcctgggggactctttagttggccagctgggtcccacccctcctgtttacagctctcactcctaggggtctggcttccccataaaaagttgattgcacccaggctcctggggaggaagggttgaggaggaggaggaggaggagagggagcagcaggaagtgaggtgtcagctgctttgggtcttaactagcttgggagggcctgatgcagcagcgtttcaggtg

SEQ ID NO: 209432 - DNA, 388 bp, Homo sapiens
tgttggccaggctggtctcgaactcctgaccttcaggtgatccacccgccttggcctcccaaagtactgggattacaggcgtgagccaccgcgcccaacctgtatttacttttttaatgccacctagctgaataatgctttgggttttactgttgtcaataaaaccccttataccttttattgtcctgcttacttataaaagccaaattttaggcgaacttaaataaatcagtgctgaaaaactagttgaacaatcagtcactgacaagttttcaatgttttgagttaaccaagtgggcttttcagattaggttattcaagagcatgagctagaaaataattaggcagacaaaacatatgttctcacacacacaccacttccaaaaca

SEQ ID NO: 209433 - DNA, 179 bp, Homo sapiens
acagtatagtgacatacagtgacaccatcaacttcccaggtgatatacctgtgtaaagaacaacagtctgaaagacagaacactaaattcaatattctagcccagactcagtcactactatttctgaatgtgattactttttaaaaatgtattctggctgggtgcggtggctcatgccg

SEQ ID NO: 209434 - DNA, 409 bp, Homo sapiens
tttttctattgcctgggaaattacactgttccttggcaaaggaaataagttttgaaaacggaaaccagctgtgtagctcagctttaggactacagttacttcatcccctgtgcccattcccttcacagaaggatgcccaactcactgggaaacccattcctaatcatcaaccagtctcactgtttgaaagctcttcctaaagcaaacccacttccacttattttgtgttcagagacgtgaagaattgttgattgttttcttttaatataaaattactccatagtcttaaagaacaataataagttatcttagaatctctataaaggtggtctattccaataataagcttaaaaagcatttttaaaggaacttttttggttctcataaggcacctcttacaagtatttca

SEQ ID NO: 209435 - DNA, 403 bp, Homo sapiens
agggccagagaggaaaattccaggatgagctcttgagatacttaaagctacagaattaagtattcataggggatttcaacagcttagacatctgttgaataacacacatcactaaacatttatcatctgaggatggctctggttacgtagaggataaattcaaaaaaggaaaccacggagaagcagtcttggttttgtttcatgcaagaagggaaggagtgataattcaaacttgatgtggatttagtatttactctgcatgaactggcctgagtattctgtcctggcactcaggttctctcacgtaggatattatatattcaaatgttccagtggttttcaaacagtggtttgtgaccctagagggttggtgaaatcaatgtagtaagttgaactactatta

SEQ ID NO: 209436 - DNA, 862 bp, Homo sapiens
gggatgacaagtttttggggtacagtccaagttaggctggtgtctggaatgagactggggcctaataaaaaggagcatccataggagctcaaatgggctgtaccctgtagcgtcccgaggacaggcccgaattctgagaagggcaagtggtaaaagtattgtccagtcctttttaagttggaggctgagcttggcgaggtgtgtttttaaaagatcattagtccgttttaccttttccgaagattgaggacggtaaggggaaggttctactgaataccaagaacctgagaaactgcttgggtgatttgactagtaaaggctggtccattatcggactgtatagaggtgggaaggccaaaccaaggaattgtgtctgacagaagggaagaaatgaccacggtggacttctcagaccctgtgggaaaggcgtctacccatccagtgaaagtgtctacccagaccaagaggtattttagtttcctgactcggggcatgtgagtaagtcagtttgccagtcctgggcaggggcaaatccccgagcttgatgtgtagggaagggagagggcctgaacaatccctgaggagtagtagaatagcagatggaacactgagaaatgatttccttgagggtaaaggcctggggcaggactggagatctaaggagctacggtggaactaaggcttggaatttggtagcccaccggatatgggtttttaccactgcgttatggaaatctggtgtattcccgttagggaaagtattcccacagactcagggttctacaagattacacgtggtgtttttgttgttttttataatattatatatgggggaagacacgacgaatagcgaatagtcgag

SEQ ID NO: 209437 - DNA, 576 bp, Homo sapiens
cctaacagtgaatttttttttaagagatgggatctcactagattgcccaggctagctagaatgcagtggctattcacaggggtgatcatagcacactgcaggcttgaactcctgggctcaagcaatcctcccaactcagcttcccaagtaactgggactagaggtgtaagtaattgcacctagtttataacagtgaaattctgacgcaggtcatggtccttacagatcacattcattcatttgacaaaattcataaaggtgtttctatgtgccaggtgccagagatacacaatgaatgagaggacacagtccttgccttcactgaagttacagattattctaatgattaataaataaaacatatatttgagattagtcattgatttgcagtgaaacatgaattactagcccttgctgaagtccctgatgaacagaacatcttatattttatattcttttgcactggcaaatgggcatttcagactgagctcttcagagtgcttataaaatacaaacccacacagacaatcacagaaggtgaaagttagaagaatgtttggatatcatcttgtccaa

SEQ ID NO: 209438 - DNA, 964 bp, Homo sapiens
gggagaagacaggcatggagtatatttgagcttttttttcgctggacattgagtctctgacagtgttgggccggtgctgggccctgggaagtcaatggtgagggcctggcgcacttgagaagtgtgcagtgtggtgtgaggtagacattgaataaatggacacacaaaaggtagtgaaatggagggaaatgcagactgctgtgaaggcatacaacaggagggtttaatctctctgggcattagggaaggcttcctggaggaagcagtgctggagctgagagctaaggctggagcaggagttagctgtgctgagggagtgagtgcagaggttccaggcagtggcgccatgagcaggcaggtgtggctggggcatagagagcaggggccaggaggctgtgactagacccattgatggcagtggctctggagacaggctgtctttgcgcatgtgagtgtgtgtgcctgtattgagcatctgtggttgcaaggggtgagttctgtgggacagaaggttcagggagggcatcctggagctgtgtgccagccagggacccctgtgttagctgtgtattccaggggtgtggggagtggcagtaggaagggctgtagggcatcccccagggtgggctgtaagttagaggtgacattggggatctcttgtggtggtacctccaaacccagaccccctccatgtgacagaggtgagcaggtgtcctttgggatctgggtgactttgggatcttgtttctagagatggggctgccctgtcaaggggcttctacctgttgtggcccaggtggcatggagaggggccgggaacaggataccctttcatttaccccttcccctcccaatgtgaacttccagagcctttcccattgttgcctgtgggttgtctaaggagtgagtgtgcatggtggccgtggccactcactcatgcccacctgggagtggcatgtgttgg

SEQ ID NO: 209439 - DNA, 549 bp, Homo sapiens
catttctgggaacctgaatactaggatgcatgaattattatattaatcctatttttactaaatgcatactacaggcaaagcactatccgcggcactgaggatagtgcagggaatgagaaaatgtctctgctttcacagttgaaaggaataaaaaccaataacatgcaagtctggagttgatgctgctatggaaaaaaacaagcagagaagagggatgggcagtgctgctgaggagggatattattttccacaggatgaggaggggctaactctctgataaggtgatatttgagtggagtcctgaaggaaatgagaaaacaaaccatatcaacatagagaagcccattacaggcagaaagaatgaattctaagagtctagacaaaggcaaacagccaacggagaaatgggcaaggtatggaaaggctattaaagacatggccaaacacaacaaaatgctcacccactcctgggaggattataaaataaaacctcaaatcagactggcaaaacctaaaaccctgacaatggccaggcacagtggctcacac

SEQ ID NO: 209440 - DNA, 197 bp, Homo sapiens
gttggagactggctaatgacaggctcattttgttcaacaatgtttcagaaacatttaaatttgttgctagcatttaaaagctgggagatacctacaaaaacccagattcctggcatctgttgaaaaatctgatggtcaagcaatattgtttttccatggcagtagtcgggagtttattagaaaacagcaccccaaga

SEQ ID NO: 209441 - DNA, 554 bp, Homo sapiens
tttccttgagacaaccgacaacctgaaaaaagactgacctacaaccaataggactacactaatacaatttgctactatatgtagaagaatgtatacaattaattttaccccaagaccgctaatgatgatgatgttgtgaaaagagaatgtactaccaaaatctatcctattggcaaatttaccagtaacatgtacaaagatatagaaagaatattcatctacagtgacaaaagaggacagtaaatattcactacctgacaaaattaaaattcaaagagctttttcatcaggtgaaaaaaaaaggaactgatgtatcaagaaaaacagtcaacttgcttaagttatttaactaagaatcctgaaatcttggacttttctgaacaccattattactcaagcagcactcttggtgaagaccctttctgtatattagagagaaagcaacatcatgagaaaagaactccttaaacttcctaggagcaaatctccaaaccaacctgtatctaacatccaaactttccttcctacacctactgctactgcggttcgcagaa

SEQ ID NO: 209442 - DNA, 463 bp, Homo sapiens
cgaactcctgaccttatgtgacccgcccacctcagccccccaaagtgctgggattgcaggcctgagccaccgcgcctagctccatggccttttaaatgggctcaagacttttacgtgttgaaaacaaacaaaaacaagaaactccttcaaccccatgaacctcttcagctgtgtccctactctcatcccacagccacattccctgagggaattgtagtctctgcagtcccgttccccagttactcctcaagaccctgcaccccgctcatccagagtcagaaatagtggagagttcttggtcttgcttggtgtctggtctgtcctcccagctctgaacgaccacatcctctgccaacatcaagcaggacttcagctggacaggatgtggctcatgacagccactttcacatggttcccagaaggggagccaaagggtaggaggtctcagaggtggcagccttca

SEQ ID NO: 209443 - DNA, 765 bp, Homo sapiens
agggcatctccctggcatcccttgacataattctcgtcggttggtcagtggcccccagttggagccgtcttactgctttggactctctgccttggtccgctccatgttgataaaacccgagcgttcctgtgatctccacagactctccgaggagtcgtgccgaattcggcacgaggtggtggagccctgtgtcagtggacttgcagggaaggcagtctcggcagggtagcacgagacgagaaaggccggaagagccacagagagcaggtcgtgttggcgcaggaggcagggtgtcctgatttgccggcagccccagcgctgatgtgtgcgctcagctgctttgagttgttctcttgtttaaggagaagagagacttgatgaactggcctgataatgtcgatgcgagctctgttcacacgtgtgctgtgagggatgtgtggatttcactctgggcttttccagtaaggtagctgtgttatgggttcagttgtatgtgtggttttttgttgttgttgtttgtttgtttgttttgagacaggagtgagaatctgtgtcggggaagaaaaaagaagtggaagtccttccctgtgttcctgattttcattattagaataaagcaaaaacttcccactttaagaaagaaaaagccaagaaaatccccttggctctgggtccttagacagtgttgtatagggtgctctgagcagcctccatgtcttcactcttgcccaactcccaagatagaggtccattctatttaatatt

SEQ ID NO: 209444 - DNA, 567 bp, Homo sapiens
tatatatttgaatatatattctttttatgtatatacatataccctaaaaatagaaaaatgattttctaaaaacagaaatatggagcactatacactatacatacacattcattttaaaataatcttcactagtgagcacattaaaatatatcttaatgaacattatgaacaaaatataattttaacttatgaagtgtgctagacagcacactattttctacgtttattctaatagaatgggttatggaagagattagaattgaataatttgacactattttgtaaacacttaaatatgttaggcatagtgtaagtcctcaagagaataagactgtcccttttatataaaatatgaaaaggggaaaaacatggtgttgttgataagatacttttcaagtgaaaatgcgactgagattatctaatcggttacccttgcaggtggttggatatacacctgcactgaatcttagacctaagaaatgacagagctgaacatcttcatgggtttcatgacagagccacagcaaaatgatttcctgagatcaatatgtggttgagagaaagctg

SEQ ID NO: 209445 - DNA, 486 bp, Homo sapiens
tgggaatgcaagcctctggagataccttgcacatttgtccccacagtgagaagttcctcttatctttgagccaatcctaccattatttcttttttatgtcatatataaaacacaatttaaaatagattatatgtctaaaatttacaagttcgatttactcatcttctggaagaaaatttaggataaaatctttgtaatcttggcttaggcaaatttttttcaacaggacatctaaacataaaacatgaaaaaaatgatttagacttaaaactttatgctcttataaaatttgatttcatttaagaaaatgaaatcaacacacagactggaaaaaaatatttattgtttatccaaaaggaacttgtatccataatatataagtgtccttgcaattcattaacattatcaagtaacaactcattattatgtacaattaaaaattggtctgtaatcccagccctttgggaggccgaggtgggcggatca

SEQ ID NO: 209446 - DNA, 841 bp, Homo sapiens
agggagcggggggcgggtgttccagggctgagggtaccgagacccttctgcgtgcgctacactcccgggaaagcaagcccagggcctctggactcctgggtgcccggggcgttcggcgcgcccagtgcgccgtccgcatccaagacaccctctgggtaataaccgcgctgtgtgtgtctgagactccctcgacatacagattgttttttcaagagcgaaccccagctgggtttacggggtcgctcggtggtccgtttctacagccctcggccctgcgctctggccacttggcttgtttttgtttcactgttccccggagtctctgcctggggagtgaaggagttggatccatgttcagtgagcacttggatgtaccaggaacgagacaggttcaaaactcaaccctgagagttgtgcccccattttaaagatgagctaactgggcttagccagacattgaggagaaaccattttctttcgtgagtcccgcgggtgtcgaagccggatcccacgaagggatggtggcatcagagtctggtgcggggaggaaatgtctctctgtggtctccgcagccagcacctccccggcaaggttctgagcttcgccgggagcgggctggggccagaagcgcacgggctcttcttggctcacagtaataattaaccgcattccagcagggcttgagagtttgcagagtgatgttcactagctcaccagatcgagatcctcactagaacccccaagtgtagacactggacttgtgactaccctatttttcagacgtggacgctgaggcttttaaagaagacggcctttgcttgtcccaggttaccaacaacc

SEQ ID NO: 209447 - DNA, 181 bp, Homo sapiens
acaatggttgaactagtttacagtcccaccatcagtgtaaaacttttcctgtttctccacaaccacactactaggtcatctggagtgaatccagctagctttgcaaatgctttcctgaaacagtcgaaccaggaagcgttcttggcagctcaggggccctcctcggtctcccaaagggctg

SEQ ID NO: 209448 - DNA, 418 bp, Homo sapiens
agaactagaatgagcaaatgactgtcgtgagttgatccctctatttgggactagtgggatatgcacttgcggtgagcagggctgtgattcctggtgctgtttgctgcgcggctggccgcgacaatgggctggactcgaaagaaagagaagtgaaagtctctctttgtgaagcgtttgccttatcagagaaagtggtaccagagaagagacacgagaactgctctctagggtgtgggcagtaagaagactgtggggtgcagaggtcagagctagaccgactctgagtcccatcctggctttgtgattaatatgaataaaacaataatacccttatttcatggtctgtagcagtgctgtccagcagaaatataatgtaggctttttatgcaattgtacatttcctaagagccattatttt

SEQ ID NO: 209449 - DNA, 315 bp, Homo sapiens
gcattgaataatttgagagtctgagaaactgaataaagtgaccttgtcaaaacaaaacaattagaaataacaattaatttcccagtagtgaatacatacaaagttaaaactattttctcaataaccacgtagaaaggacttaggtttggaatcatagccctagcttccaattttagctctgctactctgtagtatggtcccaggcaagttacttacctctttgagccttctctcctctattaaagagatcactatcaacaaccttgcagtgtggaggtgaggattaacaatagtatttataaagcacttaccagt

SEQ ID NO: 209450 - DNA, 571 bp, Homo sapiens
tgcctaagcacctatcattgaagaatgggaaacttttaaggagccaaagtaaataaaaacacagcatatgtgttgcttttgagaaaagagactgaacataaggagactatttaagacactattgcaacggtcccggtgagataaaactaagaatatgaattagtgttgtaattgtaggactagaaatgagagaagagtgtaactacatatgtaaattccacaggtcttggctgtttgtattcccctgaaaagggaaggttgagaaatatgaggcagagacaccaagcaaataggaaggagaaatcccatcattgctagcattctcagcaatgcttgtttttctttcttcagttggaaaacaagacatttgttaaattatgtctctcctctttccttttcctttccccgttctttctctcttcctacctgcacagaactacacagacataggcatgcacacatacacacgtaagcaattacaatcaatataatagcagtcatcatcctcactgccaccatcaccaccaccatctttaaaccctgccatcctgtttcagattaataatgttaa

SEQ ID NO: 209451 - DNA, 308 bp, Homo sapiens
aagagtcctgggtgcgggattcctggtagccgactcgtcgtctgaccagggccgtgcccgcatcttcctaaggcactggttccggccctggggagactggaattgagacgacagggcctccgctgaccagtccttggacacaacgcggagcggggctgaggggccgccctgccaggcctgcgctgccgtgcttttaggtagcagcgaacagttagcctttgaaccggagcccggggtggaatacggggagacggaggggctcaccacacccacgcttcccggagagggcggcggaggcgcgcggccgc

SEQ ID NO: 209452 - DNA, 277 bp, Homo sapiens
gttccaatctgggaccagtttttatattcagcagggttttatagaactccagcacagtgctgctagactttacttgattaacgcctaggtgaaaagttttatttacttagtgatatcgacgtttattaatgtcagtagtaatcatatgaactttaaataactgtgaagtgttcagtcattttgaatgtgtgtatagcagctattcatacattttggactacttgaaaatctcaacatatagagcactataaatactcaaaaagccccccccccccca

SEQ ID NO: 209453 - DNA, 373 bp, Homo sapiens
tttccgctaggcatgagagggaggaaagaggccaagaatcttaccccagaaggggtgggaaataggtttctcctctccccaacaagacagttgtttatattttatctattttgtaagtaaatgatagagtttattgtcacgagttaggagtgctttcatgaacagccccctcttgctcagcaatgactagctgaagaaggcttaacgttatctttcccaaaatgcaaatcatgttttttctctacaatattgctaacagtcctgttgaacaagtaagttcatttagtaactgaaaaggacacgttgccatctgtgtatcacggagggttatcagatgctagattgcttgaaagtagatgtcttctgagagctt

SEQ ID NO: 209454 - DNA, 585 bp, Homo sapiens
caggatggccaagacaagccactgggtcaattcaatatccaggcacgatttttcccttttgaatttacatttgtttaagttttaatcctaacccacttgatgaattcaatttgaattcattttgaattcttaatatcacaacgtatttcctcattttatgaaaaggggagacactgtattatggaagaagtcttggcccagaagctaatatatgtggtttgtcatttctattgtgccactaaatatgtgatattagcactaatcgaaattttatgtatctatttgaaaatacaatcaaactatataataaggctataagactagatgttcataaagatacctcccagagaaaaattgtcttttgaatattttctattgtcctcggctcaaatgctaatgagtctcttcgtctttagtcaacataagacttgaaattgtttccattggcaaccacctcacaattattagttaaagagaaaccagctctaggctttgaataatccatcatttttagaattatttatgggtttcaattcctcatttgattttctttttaactgaaatataaatggaaggaatatgaac

SEQ ID NO: 209455 - DNA, 446 bp, Homo sapiens
gtcttcaactcctgggttcaagtgatctgcccacctcggcctcccaacgtgttgggattacaggtgtaagccaccacacatggccaatttttgtattttttgtagagacggggtttcaccatgttgcccaaggtggtctcaatcacctaggctcaagctatccacctggcttggcctcctaaagtgctgggattacaggagtgagctatcatgcgcagtgctgggattacaggagtgagctatcatgcgcagcccatgtcacgtgtttcctaataggttttcaaagaattttgccacagtaagaagtttttatttcacatattcaagtcccacatacctgatcatggcaaaatggcaaattaatgatgtagttgaagagaaaccagcaaagagctgtagatgctagctcagaaatgagtaacatttttagtctttgggatgtcagt

SEQ ID NO: 209456 - DNA, 501 bp, Homo sapiens
attttgctaatatacccacctgtgaaaccaaggacaaaaattagaattcagctacaaataaagaccctgcacaaaggtcttggccttctgaaaacatccagaaaagaagtcaactgacgatattcaaattataccacagttaaaggaatatcagcctacacaaatgagaaaggacctgacccgtagaagaactctggcaattcaaaaagccagagtttctcctttcctccaattgattgtgctggttccatagcaaaggttcttaaccagactgaaagtactgaaatgacagacatagaattcagatatggatagaaatgaaaagcatcaagattcaggagaaagtcaaaattttattctaatccaaggaatctaaggattgcagcaaaacaatacaggagctgaaagatgaaatggccattataaggaagaaccaaatggatctgatagaactgaaaaaacacactacaaaaacttcataataaaatcacaattattgta

SEQ ID NO: 209457 - DNA, 290 bp, Homo sapiens
ctctatatcttaaaaatgtttctagaaaaattctgccatattaaatgaaaggtactggccaggcatagtggctcatgcctaatatcctaacactttgagaggctgaggtgggtggatcatttgagcccaggataccagccgggacaacatagcaggattccatctgtaaaaaaaaatttgccaggtgtggtagcttgcacctatagacccagctacttgggagactgaggcaggaggattgctttgaaggtcaaggctgcagtgagctacaattgtaacactacactcca

SEQ ID NO: 209458 - DNA, 251 bp, Homo sapiens
tccccacttgccatttttgtttctaatgatccctggatcaccacataatcctctaacattgacccactgacctggaactaatgtagtagacctggatccactgactcactgatctaatgtagtctctactagtctctattagttttccttacttcaagaatgcaaacaaaatgtcgaatattatcccctaaaattaaagtaaaactcctgacaatgtttaaaaaacaggagtgtataactgtcattacact

SEQ ID NO: 209459 - DNA, 670 bp, Homo sapiens
agcgtgcagcctagatccctggcatgcacagttcacaaggttgacactcctataagaatctaatgcccctggtgacctgacaggaggcagagctcaggcagtaatgtgagtgatggggagcagctgtaaatacagatgaagctgccttcactggctgctcacctcctgctgcgtggcctggttcctaacaggctacagacaggtaccagtccatggcccatgggttggggagtcctagattatagtatttggacccaccattccaggagctcactgtgaaataaatgggaccgaatgttcttttagaatctcctttttctatttcttcccatctagtcctttgggatcctgaaaaggtcccagacttagtgaaaaggatagacagacattaggggcaggaaaaccatcagccttagtgaatcgtatccagcacccccagggtatattatcatggcacatactaagaagatgcagatggactttttgtccatcggtgagtctgagggtattcattatgtatttggaattgtgcttggcaactggaaagtagaaggaaggccatcttgggcagtgggggaagggcagcagccaccaaagcacacagggaaatgaatgcttttggctgaagacaggagaatcttgtctggtcatcccatccattgcaatgttt

SEQ ID NO: 209460 - DNA, 525 bp, Homo sapiens
ctgctctaattcctaaagctaattatatattaaggacaataatagtttgacgaacgtgttggaggttcctttttggaatttcctgatgagtaaatttctctctctctctctgagtctcctaatagccttgcataaatctctggcttacacagagttaatttatagtttttaaagcttgctcttaataatgctattggtaaaatctaatttaaagggctactcttggtcaagtctaggtaaggccactgttaaagttggagtagaatttcattatagtatctgttttctgtgtcctagatcctgtatatttttcttaatcaaatgaaagtataggtgaattaactcatttgtatgagcactatataaataaagctgggttatttagctttagagattatttagaggttgtaatcctctaaatgtatcaactctttggtactagccagacatggaatccacaaaaacaacatagaaaaaatatgaaaatgtttggggtttaaaaaaaatctaaacagtataagtaat

SEQ ID NO: 209461 - DNA, 288 bp, Homo sapiens
cctggccgccccagggcagcaagacccagtgctatgtagttctccaaagtcctatttactttagtgattctgattctgtatttttaactgggaaaaggattctctttcaggaaagcaaccacttctgatgctatttaggtattattctccttatacttataggagaaaaaattgatgttaatgaacaggaaatatttgccaaattatcacacaaataatttttgtatcattttaaaatactccttattgtactgagcttgttggtattttaataaaaattattggcac

SEQ ID NO: 209462 - DNA, 559 bp, Homo sapiens
atcatatgggtaagttttatatcttgggagtaaaacacactttgtaaggtgaaattatttaaagagttgtactacaggaaatatcataggtattaaatatctattatttgatttcatttattctgagaaggctagggaagttcagaggaacagaagaaacacctggaggcatactttttgatagaagatcctccagttggctatataaatgacctgaataagtatttcccaaatggtggtgtatattttatttgcattagactcacgtgggggagcctgttaaaatcaaagatttctgggtcctaatccaagagatttggattcagtaaatctgagttgaagcccacaaatatgaatttttacagatgctctagggtattcttatacaaatggtccaaactctgcattcttcaaattattcttctgcatattgaacttgacaatcatggctaatataaaactgctttttaaaaaggtatatataagaatggtttaagtttgaaggcaaatatgtattttatatattacatacttcccagattaaaaatttgagtacatc

SEQ ID NO: 209463 - DNA, 116 bp, Homo sapiens
atgaggtaaaccctataaaatttattgattgatttgttggagagaattaatggtgaaggagtcaagaattacattatgtttttctctttttttttttttttttgagatgaagtctc

SEQ ID NO: 209464 - DNA, 612 bp, Homo sapiens
tcattttaaaatttttcattgtgtgtatacaaatacaactgatttttatacattgaacttatatcgtgtcaccttgccaaatttattagctttaatatgtatgtgtgtttattatttagggttttctctatataaaattaggtcatctgtgaacagagatacttttacttcttccttttcagtatggatgcattttatttcatcttcttgcctacagcattcttttttgccctggctataacctccagtaaaatgttgaatagaagtggtgagaggtagacatccttgtcttcttcctgatcttaggagcaaagctttcagtctttccctgttaagtatgatgttagctattggtttttcatggatgccctttatcaggttaagaaattttcttttctgtttctaatttgttgagaatttttatcatgaaaagatgttggaatttgtcaaatactttttctgcatctattgagatgatcatgtgggtttatgctaatatgctttattatgttgataaatttttatatgttggaccaacctcacatttctgggataaactctacttggtcatggtgaataacccctttcatatgctgttagattccatttgct

SEQ ID NO: 209465 - DNA, 595 bp, Homo sapiens
caccactaaatatacactaaattttccaggaatgtaactactatgtaaataagggaaagattatactttgttttgtgtagaactttatgaagatttattcaccattttagaaaatcatatcgccagtggcattgctacatatctgagtgaccaacacaatacacctgtattggcctctatttataggtgtcatattcacacaaataaagccacgtgtacccacaagcacctgatggctccagtttccaatgtgctgtgagcatttacatttgtcttctgagaatttacacagaaatacatattttattaccataatgttccttttatttttctttcatattacagttaagactttgtagacaggtcagtagattttatctgggaattttatttcaggatattaaagggagtcacagggtatgacagggttgagaactagttacaaaccatcagtctattgttaagaactgtaaagagaattctaattcctaaacttggtaactattcttttatactactcacttcatcaataccacaagttgaataatatacttaactaaaatgtaaaagaacgaatgaaagaaacaaatgaaaa

SEQ ID NO: 209466 - DNA, 320 bp, Homo sapiens
tccgttaatctgactggccccaacctgggcagaaaaggaagggcggtttttctttcttttcttttcctttttcttctcttttctatgtatgtatgtatgtatgtatgtatgtatgtatgtatgtatgtattttgagatagaatctcgctctgtcgcccagtagatggagtgcagtggcaccatctcggctcactgcaacttctacctcccgggttcaagtgattctcgtgcctcagcctcacgagtagccgggattacaggcatacaccaccacgcccaactaattttcgtatttataatagagacgggatttcaccatg

SEQ ID NO: 209467 - DNA, 534 bp, Homo sapiens
tatatgagagctattttttttcattagtcttatcattaaacacatttcttaagtacctactaggtagtaggctttgtgataagcatttaaaaatataaccaaattatgtgtttcccgttgaggaattccctgtcttgcacaatgatagttacatgtattgtaaataaacatcatgaaatttggtagagtgcttgtgcatgttggcaagaagaaaaaatgaactaatatcatcctttataattcagctggatgtccttggtataagaggttgagagcacagaaaacaaagtttcaaaccacaactgtacattgttcagtctgagattatcataatgattgggttctattaactatttggttaagatgtaaaattatgtaatagtgtggtgagaggaaaaatggtggattaaggaacttaaaaattttgtcccttcataaaggtagcaataaaactggccttcaaaaaatgatcaaagtcaactttttcaggactcgagaaactaatcaaaagatcacagtaacctgagttactta

SEQ ID NO: 209468 - DNA, 580 bp, Homo sapiens
caagaactctgggaggccgaggtgggtggatcacttgaggtcaggagttcgagactagcctgaccaacatggtgaaaatccgtctctaccaaaaatataaaagttaaccgggtgtggtggcagatgcctgtaatcccagctactcgggaggctgaggcacgagaattactcgaacctgagaggcagaggctgcagtgagcggagactgtgccactgcactccagcctgggtgacagagtaagactctatctcaaaaaaaaagaaaaagaaacaaacaaatgataaatgtttagagagggggatatggtaattgccttgagttgatcactatactatgtacacatgcattgaaaccccagaaatatacacaatacattgtatcccagaaatacatgcaattattatgtatcgattataattttttaaaaaaatttttttaaaagaaagaaaggcttaggattccatctttctataagggatacgtatagggtagaaagcttctcactgcagtgggtgatgtattgccataaatgggctgaacaatgttttgcccctgtgaaggagggcacaataaggctgt

SEQ ID NO: 209469 - DNA, 401 bp, Homo sapiens
cagctggggtgggagtaggtttggcctgaaggccatgcctgctaactcctacctgaggatacagggctagccatttaattttggtttaaaaaatccatgcagaggctgggcatagtggctcacgcctgtaatccccgcactttgggaggctgaggtggtaggcagattgcttgacctcaggagttcaggaccagcctgggcaacatagtgagacctcatctctgcaaaagaatacacacacacacaaaaaaattagccaggcatggtggcacgcacccatggtcccaacaactcgagaggccaagtcaggaggatcacctgagcccaggaggccgaggctgcagtgagccgagatcatgccactgcactccagcctaggtgatagagcaagaacccgactc

SEQ ID NO: 209470 - DNA, 770 bp, Homo sapiens
  misc_feature (209)..(209): n is a, c, g, or t
gatcctggttttccttgaccactggccctgggacgtgggtgcatggactcgtaaagctgctagggcccctagaaaccacctgggttcagcctctcccacaataagagttcttgcccttcataccctctacctggatggatggtctttgggcagggaattaatgacagaatgagcagtccctaatggtattgggcagttgggagtgagtntaggcagcttctctgtaaccgcttctggggccacaccccaaaactctacaccctctgccccagaacaattctgcagagtggtgaagttcacttccccaactcttctccaagtctagctttcctttccttctggctccaaggtgctctgtgtccgtctgtgtatgtgtgtgtctgtgcgtctgtgtgtttatttggggaaaagggcaatcagcaatcaactgaggtttcttaattgtgattatattcctgagaatgaatgagtaggaaaggaataaggatgttgttatgatcgcctgtggattttgtccattcatctcatgctctctgaacagaaggtatacctgggaagataccagctttttctctcagggttctgagtcagaggacaccatccaagaatgttgttagcttttcagttcccgctctgcattgcctgaaaaaactggtatgttgcacgtatgcttttggttgaaattgaacatactctagtgaatgtgccttaaaaatcaagacactagttcagaggaagcacataatgtccagatctatggcgaacacagg

SEQ ID NO: 209471 - DNA, 305 bp, Homo sapiens
ttatgaatgaatgaccctttggttttcaaagggactgcgttattgatgtgataccttccatttatcttttcttcatgtgaactcattcactatcccatgatagtgatctgatggctttatagtgggcctttcccccttttgcttggcgcttctccttgccactgccgtgtgaagaaggacatgtttgcttccccttccaccatgattgtaagtttcctgaggcctccctaaccctgcacaaccatgagtcaattaaacctctttctttgataaattactcagtctccattatgttcttatagcag

SEQ ID NO: 209472 - DNA, 388 bp, Homo sapiens
atcatatcagtggatacaggaatataacagaacgttatttgatgtagccttcttaagccacaggggtttttttgctgagaacttaagaggtcaagatatcccgtcatcctatcctaacccctgcccccattttaaaagattttctctcataataggagtaatacacattgtgaatgtatttaatgccactaaacagtaaacttaaaaatgattaagatggtaaattcttaaataaataaaaatgcagaaaattttaagaagtcactggatacacggccatgagcttttccctccttcatccaacaggtttttaacactttccccatgcaggaaaatgggctttaatagtggaaagcaaaatagtctcatttatatgaaggagaaatct

SEQ ID NO: 209473 - DNA, 414 bp, Homo sapiens
tgtattctgttggcgttctgcaaaaaggtggtcagacctgcagtcaggggaacgatgtttctgtcgatgacggaccgtgtatatgttggtgatcgcagaacatactgtattttcactatatcttttttttttaatctgacaaacttttttgcttttattttaattgacataattgtacatattgatggggtacattgtggtatttggaggagtttgagaccagcctggccaacatgatgaaaccctgtccctactaaaaatacaaaaattagccgggcgtggtggtgcatgcctgtaatcccagctacttgggaggctgaggcaagaggatcgcttgaacccgggaggcagaggttgcagtgagcagagatcgtgccattgcactccagcctgggtgatagagcaagactccat

SEQ ID NO: 209474 - DNA, 1250 bp, Homo sapiens
ttccgaaagatcagccaggtcacagtgagggtcaaaggtgagccacgggcctcagcagctgctgagtggatggtgcgtgggactcaggaagtgacgttctctccccgcccagcccccttcctcagtctattgctccgaatcctggaccacacactgcgtgctgaggctccatcgctgtgctgggtgaggggtggaggactgtccagctgacagccacccaggaggcctgcccaggagacccagcccagcctctccttggaacctgaagaactccaggcagctgatgggacactggggcccaggtcagcccctccccttccctgaggttgcctgaggacgccttcactgttctagagaaggaggccctccccatggctggggacagtcacagcagctgcagacagatgatgggagggagcattctttccctaaccctagaggcgggcgagcattcaccaagtgttgttgttaaagaaaaaaagaaagaaaaagaaaccaggattgtacctgaggtcaggcagacagtgctcaactcagcactgggaagattgctagaagccttgggcctatctaggaagactgggccaacatgcgatcccctctgcaaggtggaggccatgcacctgcctcctgctcctgagctccggtatcctcactgtgacccaggccccactgcagcaaagagacactgggaattagcccttctgtcccctccttgccagaaggtgggaagatgtgttggttgagggcctagaatttttttcatccccaaagactttctttttttaatattattatactttaagttctagggtacatgtgcacaacgtacaggtttgatacataggtatgcatgtgccatgttggtttgctgcacccatcaactcgtcatttacatttggtatttctcctaatgctatccttcccccagcccccaaacccctgacaggccctggtgtgtgatgttccccaccctgtgtccaagtgatctcattgttgaattcccacctgtaggtgagaacatgcggtgtttggttttctgtccttgtgatagtttgctgagaatgatggtttccagcttcatccatgtccctacaaaggacatgaactcatactttttatggctgcatagtattccatggtgtatatgtaccacattttcttaatccagtatcattgatgaacatttgggttggttccagctctttgctattgtgaatagtgccacaataaacatacatgtgaatgtg

SEQ ID NO: 209475 - DNA, 584 bp, Homo sapiens
caaatttaatcttttaagacaatcttataaaacaaaggccacctcccccatgtcatttatatataatcttcatttttcatgaggtaatggaagctggagagttggcccttgaccaaagccttgcagctaacaagaggacaagcctcctgccccacagtgtttcacagccagtaccccaagctcctgaattcatctgtctaatgtgtaatatatttataaacactctacctgggatgtatgcgtaccttctactatggactgttgttaaagacaagtaaatatgcaatcgtggtctttcaataaactaaacggatataaaaataaatatagaatacagccagaagatcaaaattgacatattatctatttatgcttataatatgtaattacatgtaatattgtaaaacactttctaccatttcataaaattctgtgttgttatttagcccagaattcccttgcaatcttttaaaaatagtatctaatagggcttttaatataaatgtcgtagtgaaactgttttatgtactgtaacccaaacatttctacgtagtaacactgttccatatagaaaacaaatatga

SEQ ID NO: 209476 - DNA, 306 bp, Homo sapiens
ccataacattttggggaggagagggtgttatgggctgaattggctgtatttagggttaaggtctttaaagagtatgaggctatgaatgtgggccctaatccaatatgactggtatccttataagaagacaaagacaccagggatgcacagccacacagaaaagaccatgtgaggacatagtgagaaagtgcccatctatcagcaaaacaaggaaaaaggcttcagaaatcaaacctgctgacatcttgaacttggacttctagtccccaaaactgtgagacaataaaatttctgttgtttaagcta

SEQ ID NO: 209477 - DNA, 216 bp, Homo sapiens
tggtttctctatgatcagcccctgggatacagatctgtcacgttacaggcttgttaacttgctacaggactaaggaaatcagtatttattctacatcagaaagacaccaagagttaggagaaaatagcgcagtcggagaaacacatagatctatgagtttgtaacttttccaggccatacacgtataaatgctgttaatggttcgcattttatacc

SEQ ID NO: 209478 - DNA, 900 bp, Homo sapiens
ttcctggggcctctctcaagcacgaggttttgaagattatgccggtgcagaagctgacccgcgccggccagcgcaccaggttcaaggcgtttgttgccatcggggactacagtagccacgtcgatctgggtgttaagtgctccaaggaggtggtcactgccattctcggggccatcattctggccaaactctccattgtccccgtgcgcagaggctactgggggaacaagatcggcaagccccacagtgtcccttgcaaggtgacagacggctccgtgctagtgcgcctcatccccgtgtccaggggcactggcatcgtctctgcgcctgtgctcaagaagctggtcatgatggctggtatcgatgactgctacacctcagccaggggctgcactgccaccctgggcaaccttgccaaagccaccacctttgatgccatctctaagacctacagctacctgacgcccgacctctggaaggagactgtattcaccaagtctccctatcaggaattcactgaccacctcgtcaagacccacaccagagtctacgtgcagaggacccaggctccagctgtggctacaacatgggggttttatacaagaaaagtaaagtgaattaggcctgaaaataaataaataaataggtcaggaaaatgaataaaggggaaaacaaccaaccaaccttttagttacagcttgattcttatttcccaaactatcatagccttagttttacaaaagagaggctgaccttgattgtgcctcacttaggaaaatgactaccttatgctagttagagaagtgataagtctccaaggttttataaataacaaaagcagattaaaaaaaaaataataaaagcctgtattttactcctaatggaagcacattgaaaaac

SEQ ID NO: 209479 - DNA, 528 bp, Homo sapiens
atgtcacttagttcagaaaacgatcttgttttctttcataggaaaactttcttcccagcccacattattggctccctaagtcaggggttatagaaagaaatctgaaatccactgctgcagagagcctgggacattgtctatgcctccctgctttggggcaggagttaggggtgtcctgggcctctacctgtaaatgaggatcctcctttcacagttccagccttccccaccccaccttggccaagctagaccagcggttctctaaacgtggtccctggaacatcagcagcagtatcacctaggaacttcttagcaatgcacattctcagaccccattcccagccctgctaaatcagaaactcagtgggtggggaccagccatctctgttttaacagatgttcccgccagttctgacatgcacaagtttcagaactgtgattccccaaatgtggctttcactaataattttaaaaaaacaaaaagtttaagtaaattaatagcatgttgctaacttttaacttgggcca

SEQ ID NO: 209480 - DNA, 407 bp, Homo sapiens
tggcccagaccccatctctttaaaacaaaaaagtacatgggataaatggggaaaacactcttgagacaagaccaaaacatacagtggctgctaaatgtcagtgccatgagcccagggttctcctacatccccttccgtggtcagggaggactgctgggctctgtgtcttctgtgattctcccctggctctgagccctttgcacctgcaactcacagcgccgctcaggtccctgggggtaaagtgccataggataaaagccacaggagggttttgaaatgctcttttcctctcagataggtatttccgcatctttacggagtctcatcaacgctttttaaacctcccctgggatttgaaccagcgcccatagatacaggtggcttgtcaggtcagctaggtgctgcta

SEQ ID NO: 209481 - DNA, 317 bp, Homo sapiens
gaggacagtggggcactgggcctggcccatgaaaccattcagtcctcctaggcctctgggcctgtgatgggtaaggctgctgggaaggtctctgaaatgcctttgaggccttccaccaccccctggtggttttggctattagcacttgcctcctttttacttaatgcaaatttctgaagtctgcttgaattccttccctgaaaataggcttttcttttctaccatttgccaggctgcaaattttccaaacttttatactctgcttctcctttaaatgtaagttccaacattaggtcctgtctttgctcatgcatatg

SEQ ID NO: 209482 - DNA, 489 bp, Homo sapiens
agcattagtattttcccatctgacgttacaaactatgctgcaatgaagagccctgtgaccatatcatttcacgcatgcaccaagttcctggacgtggtgagtggttttggaaaatgacgaaggttttgccacacttgtgattttgagagcaattgcaaaattacctctcgtagggctgtaccagtttacacccccaggagaaacaatggggagtatctgttttcccacagcctcatcaactccatgcattatcaaactgttttatttttgccaacctgagaggtgaaaaggtgtgtggtcgaatacaagtggccatgagttctgtgcagctccttccatcaagagatagcgtcgatcctcctcctttcaaatctgagctggtcttgtaacttggtttggccaatagaatgagacatattgatgtcccatgagttctgagcctgggccttgagctcctggcctcaagaacttgcagctttgtcagggcgc

SEQ ID NO: 209483 - DNA, 692 bp, Homo sapiens
  misc_feature (678)..(678): n is a, c, g, or t
  misc_feature (681)..(681): n is a, c, g, or t
gcctcggcctcccaaagtgctgggattacaggcataagccatcagacccagcctggctttatttttttaattgtagaatttgcactcatatgtatcagagagttaactattaagttcctttgttttctgctcatataccagggacagggaatttttggataaaggtgctagacaggagaaagctgtgagttaagaaaatagacacaattaagtgaaagagtcccatcttctaaagtaacatctttgctggaagtgaagcctgggtcctggaaacatcccctctgtgtgcacatcctcaaactgcccctcctgctgtgggggtgctgttttctatgttgctgtagctcatccttgcaagtttcctaatcttcaacgtggaacaaggagttacttagttttcaagtggcgagataaggaagcttctgctttccaggtcagcacaaattaattaatgctggcatagtttctaggataacataagtggtgcaagagtcactttgcttgcgatgctcccttgggagatcaacatggtaagtacaaagatgactgagcttaattaaatctaaattctgaatgactcatctcactatgtatttttttctcaacgtttccatcactggccttcttcttgatattgcttattccctcgtgccgttcgcacgaggggagggggagatnaancctcccccggg

SEQ ID NO: 209484 - DNA, 137 bp, Homo sapiens
ttaagaaccaaaagcccaagagagtgttcttcacttttacgtgtacattgtccgtggagacctgtagacctgacctcggggtactaagccacactctgtggttctcgcctctgcatttgctcattttcaccctctct

SEQ ID NO: 209485 - DNA, 408 bp, Homo sapiens
atggaccttactgagtcacagaaagacaccttcaaactatcagctctgtggtcttcctggggtaacagagatagggatgctttgtaaaataacctatctgtggctatcttctgtcttgcctaaccttatctccatcacttcccaagaactcagcccttgactaatatttaacctttcaccttcacagtaatctttcagaaacaagaagaaattctgagaatgaggtggggataggcaggctgcctgtgacacctaatctccttggaacaatggctgcaggccccagatctggcccttcaccctgcagttgggtgatcataccatgtgactgaggggaaagagggtatcagtctcctggtaccacaagacagcttccctcacagcaggctgaaacctgagcctccaccc

SEQ ID NO: 209486 - DNA, 490 bp, Homo sapiens
ggagaacataagcctattcacatattcagtacactgctactacaaccagcatttgagaaacacattaaaactgtctataaccaaggaattcttatagagtgcttaccactaaaaacacttagaagcaaagccaaacaaccctactcaacaaacattatagtcatatctccaaagggaataaatatggcctttataagcaaaagtaaatttaaaaataacaagagaaaatatctccagatgaggagaaagcagtgtaacaattctggaaatatgaaaaaatgtgggtgttatgacattcccaaacaagcacaccaacttggtagcaatggatcctaatcaaaatgaaatttttgaaataccacgtaaagaattcaaaacattaattttaaagatactcaatgaaatcaaagagaaagctgaaaagcaatacaaagaaataaaaaatcaattaaggatataagtgagaaatttaccaaaaagatagatatta

SEQ ID NO: 209487 - DNA, 531 bp, Homo sapiens
aggtggggacctcaggcgacggcagctgggtgagattcagctcacagtgcgctatgtgtgtctgcggcgctgcctcagcgtgctaatcaatggctgcagaaacctaacaccatgtaccagcagtggagctgatccctacgtccgtgtctacttgttgccagaaaggaagtgggcatgtcgtaagaagacttcagtgaagcggaagaccttggaacccctgtttgatgagacgtaagtgggctggtggcctgcctagagtgcctcacccattcaagtattttccaagtacctgttatgttgcctggcagcctgccagatgctggaaggggctatggctgaacaagacaacatagtctatgacttcatgaagcttctgtacgttagtggggaaaatggagtgccagagaagtttatcaaaatggccacctacatttactgctcatagaggctaaagtgttcctgaatatggaatgttccctactctttctgtttaaatgaagtctctctggtagtaaaaagatttgaatgttc

SEQ ID NO: 209488 - DNA, 595 bp, Homo sapiens
  misc_feature (175)..(175): n is a, c, g, or t
taaattcagaaatccagtgaggtgattgacaaaccacacaagttttctgtttgctgtggcgggtgctagtttgctttagttggctggctctggccataataagacaatagcgtgcactgctgctgccctattcgcaggagcagacaactaaggtgctaatgaaagcacacccggnctttcgtgaatgaaagtcacatgacttgttctgtttcctttattgaaagagaaacctttacaaaaatagtacttcatagaaggaagcatagtatgtggaacactaaaccaggaatcaggaaaccaggtttctagttgctgatcttaatgagtcattgtgtgtctatgggagagccacttaatcctgccttctcactttccctgtctgtaaaatgggggtaattataatcctcccctttctgtgtcacaaggccgctggaaggtaaatgaggtcataaacatcaagagtgttttaagctcttctaaaggaagatgctaataaatccagttgttgatacttattgctttgaaaccatgaatgtatacaggaaagacacttttgtaaatgggtgaggtgtgtttcacaaagtgtgctttcaca

SEQ ID NO: 209489 - DNA, 804 bp, Homo sapiens
gaagggaggtatcatacaagattaagggagaccttaggctgtttataggcagaggggaaggagccagtggaaaagaagatgtggtatagaagaaggggacgaatgactgggtgtgctttggagaaaacaggaggagataatattctgaaccatgacaatagaaagatgtaaattagtgcttctcagactttcatgtgcatatgaattacttggggttgagttaaaatgcagattccgattcagaatctggagtttcgggcaggtctgagattctccatttctaacaagctcctacctaatgttgatgctactggttcactgaccacattctgagtattaagggggtaggacaactcttcctttgtcatgagaagtgcatctagaaataagtttggtagtaaagggaagagaaattgttggagttgttgctacttgcatattgaagcgacctgacataaaggtagcaggtcgaatagaaagaaaatcaagtgagccaggtgttcaagttctcagtgactgttagcaggtatatgtccctgggaaggctgctggcaaaagtaatgatagaggactacttattaaagaaaagtcaagaggatgaagataagcagaggatagagtagggctgagctgggtgagaggaataagagaacaatcagaatcataatactttgggagtaattatagataactgggatgaaggaagaaaagagttgagaggtaaacaggactgacatgaacaggcaagaactctgctgaaaccagataaatttcttaggtcattatttttaaatgatttgacat

SEQ ID NO: 209490 - DNA, 274 bp, Homo sapiens
  misc_feature (8)..(8): n is a, c, g, or t
  misc_feature (26)..(26): n is a, c, g, or t
  misc_feature (31)..(31): n is a, c, g, or t
  misc_feature (103)..(103): n is a, c, g, or t
tcgaggancctttgctattaaaaaanacagngcttgtcatattactggtgataagaaagtacttgtcgagccgggcgcagtggctcacgcctgtaatcccagnactttgggagagattatttgaaagtgggattgtttcataaatccagaaaaatatgctaattttgcatacaatgtaaggaaaggtgtttttttaagtacctctctaaagtgcttaatcaagttggaacctttgtgactacgacaagagtcattctgctcccagcacacgcga

SEQ ID NO: 209491 - DNA, 333 bp, Homo sapiens
agagagacacccaaagacagagatggacacccacagatgggagagatacccacagacagagagagatacccacagatggcgaaagacacccacagacagagagagacacccacagacagacagccatagagagaaagagacacccacagatggagtgctgtccccctggtgccagtgagaaagctgaggctgggaatgggtcagcaaccgaatttcagtttacaggcgtatttggtcgtggacatggtcagccacctcagtaaaactggtgagggttattttgcattgaataaacttataagcagaaaaaaaaaaaaagaaaaaaattacaag

SEQ ID NO: 209492 - DNA, 520 bp, Homo sapiens
agaaattgatgcagcttttatgacttacctacccatcccctatttaaacttgcagaaagttagagtggaggcataaaaaaataagaaaatattttggagtagctaggtacctggaaaaaatcaatgagttacttagtctaatttttaggtgaccagagcctagaatggtaatagaataattttctgcagaaaggacatttaaaaataatctgtttttgaatgccagacaggaattattttgtagcaatcagttttcaactgttgttttcaaagctcctttaccaggggaagctgtctgatcatctcccatctctagccagtttcaccctacatcatgagctgtctttgcctttccgtacaccattacatgtaactcttgccctaagttgttccatgcatgtaaacaactttttcctcctgcttttcacacctcaactcaatcttcaagttttgatttattttcacttgattcctttatttagtctcccattgggttataatctcatcaagagaagagagt

SEQ ID NO: 209493 - DNA, 333 bp, Homo sapiens
tgtgcaggtttcacggacaggccattacttcagtgaaccccaatttcttcctcatccattacctatctcaacataattcttcatgaaaacacacatgctctccctgctgatcacgtccagctaatctcacaaaccctaaccccttctacaaagcaacaatgcctttccgtacaccattacatgtaactcttgccctaagttgttccatgcatgtaaacaactttttcctcctgcttttcacacctcaactcaatcttcaagttttgatttattttcacttgattcctttatttagtctcccattgggttataatctcatcaagagaagagagt

SEQ ID NO: 209494 - DNA, 538 bp, Homo sapiens
gagccacaggaggaggggagaggcctggaggacaccaacatgaacaagttgaaatcatcgcagaaggataaagtttgtcagtttatgatcttcacacaatctagtgaaaaaaaccgcagtaagttgtctatctcaaaatgactggaagttagatgttgcaacagataattttttccaaaatcctgaactttatatatgagagagtgtaaaaggatcactggaaaggaagaagttagaacaactgtacaatagagacaaagatcctcaaaatgagaataaaattggaatagatggtatatagcagttctgtgatggcctggcactcaatccagccagcattagtgtgttgattattgcatggatgttcagagcagcaatacagtgtgagttctccaaacaggagttcatggatggcatgacagaattaggatgtgacagcatagaaaaactaaaggcccagatacccaagatgtaacaagaattgaaagaaccaggacaatttaaggatttttaccagtttacttttaattttgcaaag

SEQ ID NO: 209495 - DNA, 883 bp, Homo sapiens
agcttcctttaggatttcttgtgagacaagtcagcttttatttgtctggaaaagtctttatctcacttttatttgtgaagaactgctttggcagccgtaccctcaagaactgcaccttccaaccacccttatatgagcctgctccaaaaccttgccagccagcacttccaggttacgactattgacctccagctcccagtttcagagagttctcccagtctcctggatcacactggtcggaaagctgtttggtagacaaccttcgagtctttctgccttcatactgtgggtataccgttctcccaactgaaaacccgtttattttcttatctgtctactcaaagcctaaccaacaccaaatggcctagaaatgccacgtacctaccagttgcctctttcctcctccagcccttgtgaatgtgaattcacatctctgttctctgtgttccttggccacttagtaccattcacaatatctctcatagctagctctctgccttagggctggcccatgggactaaaattccttgtggtaggtatttttttttcatatttctattcttatagcatctagcatagaacaaacagcctagtatctagtgggtatccaataacaacttatgcaggtgattaggcaagaaaaagaaataaagcctattcaaattggaaaggtggaagtcaaattgtccctatttgctggcaacataatcttatatatagaagaacttaaacactctgccaaaaatccattagatgtgataaacaattcagtaaggttgtattgtatgtatcaaaacatccctatgtaacccatagagatgtataattattttatgttgatcaaaaataaaataataaaagctcttaataaaacagtcatctc

SEQ ID NO: 209496 - DNA, 444 bp, Homo sapiens
tgccttaaaaggaaaactgttgctaatgcataggatttattcttttcctagttcttctggtgcgctctgaaatgttgataattatgttgacttgcagctatgacttggttcagctgttttgattttcatgttatctcactaagttatcaaaaatctgttccaccctccaatctctactccccttcagaaagaaagagtacatgcacttatggtgtatatctctttctttgaccttaaaggattaaagcaaaaataacacattagcttacagacttttgatttttttttttttttaatttggaattaatactaatgagactttgagaattgtattggtggctaccattcctttgctgattgttttcgtactacagttcaattttgatagtttgtgcaaggtattattttctttccatacaaatgtgttgaacagaaaaagtaaaa

SEQ ID NO: 209497 - DNA, 993 bp, Homo sapiens
taacttgtttaggaaacctaagtctgttccctttttggctggggttaggtagctctgaaaggccggtcttcatcaggacctcagatgagcacccaaactggggcttccattcaaattgggtcaggtgaaggttttactagaggggagaaatatgatagtatgatttttttaaacaggtgtttaaaacttatttccagggttttgaactttaattctgttctatgtatctgactcttcaatgtctcaggaaaacactgggtgtttaaggagatggttttaggattgcttcaggttctggaaaaattagtggagttataactcccattcagttagtcatttcctatataaactctatgagatgtgctcaggttgctacagatccgaacttaccccggtgcaggatctgagatggttgatctggcagccctggttcgagcttctctgggtgagcaggaagctctgcagggaagaggcttaatcattaattttctgcagcctcatgccctgcccctctcgacagtctgcctacatttgtgtggtctgaagagtgcggttctgtaatgcgttgggggctcttaagccagagaaccatgtcatgagggccagagtggagcagctctgactgccttcctctcccactgccttgcctggccttggaggtgaggcccagcacagatgggctctagggggcggtgccagctttgggataatggtccatgtgaacagaactggggcagcccatcagctctggggatagtcactaatagtgagtctggggcaatgaggaaggtccggtgtggtgattttcctgaaatagtccaggcattgacctggtctctcatggaccatggatgatctcacacctcatcaaatccaatggggtcccaatgagcatatcctcatttggaactgttgactgctgtggaagagaacaaagaaatgacagcagtcatcgaccctgtgcttcccatgtcaccctatcactacccatta

SEQ ID NO: 209498 - DNA, 227 bp, Homo sapiens
cattgtgcattgcactccagcctgggcaacaagagcaaaactctgtctcaaaaaaaaaaaaagaagacgacgacgacagatgccataacagctcacaggagaggggtgacaagagttaggggaaggggtgaataagagctgcctcccaagcactggaaagtgagccaggacaggtatttttggttttgtctgcacacctggaggtatattcattcagttgagcacag

SEQ ID NO: 209499 - DNA, 188 bp, Homo sapiens
cctgtaatcccagctactcgggagtgtgactctgtctcaaaaaataaatgaataaccctgttttcccatctgccaggctttctgctttcagtccaagccctctgtgccacaggtctctgcccttcctcctgagagccctcccagctcctttggacactgccctgatcccacttgtgatgtgctgtcac

SEQ ID NO: 209500 - DNA, 317 bp, Homo sapiens
aggctgccaccagtgccatgctgcatggctaaaactccaatagacagcatgtagtgcttgggtgacagactttgggacaatcacagccactacaaagtgaaaggggagaatccagaaagtacagagccagaaagggagagcccctaaattctatgtaaaaactgcccaaatctttggctgaccactgaactatgcatgcatggggcagacgctaagcaacctagctaaggataaaataactaagccgagaattgaggtagtgcctcgattcagagacagagtttgtggttttagctcaaccaagctgaatgttggca

SEQ ID NO: 209501 - DNA, 439 bp, Homo sapiens
aaataagggacttttaatagcataacaaaaatattgtcacaattttataaaatatacagatcaatttttaaagtttgtacttccatattaactgatgaatttagtattttaccaacttttttggcctggtttcccattaagaataccgtctttgggccaggtgcggtggctcacggctgtaatcccagcactttgggaggccgaggcaggcggatcacgaggtcaggagttcgagaccagactggccaacatggtgaaaccccatctctactaaagatacaaaaaattagccggtgtggtggcgcgcatctgtaataccagctactcaggaggctgaggcaggagaatcgcttgaacctgggggtggaggttgcagtgagccgagatcgtgccactgcactccagcccgggcgacagagtgagactccatctccaaaaa

SEQ ID NO: 209502 - DNA, 277 bp, Homo sapiens
tctcattcaagctttaaagtctgattctattattcctcctttaaaattgaaattctctatcattagacccttcagaaattacagtaggagttggtggtttgatataggggaatgagtacctaactcgtatttaacatgtttttttttttagcactcagcatattggcacagagtgggctctcagtgagtgtagaatgaatgggcttatcacttgagttcaggttctagctctctcaccaactagacaggtgaatttgagcagttttaacctttatat

SEQ ID NO: 209503 - DNA, 635 bp, Homo sapiens
cagggttctttgggaagcttcaaaaaattcaaaagtcatagtgccttttttcatggaattcactaagtagagacttttttgtaggcatatcattaaatgctggactctcaagttttcgaaatgagaagtctccatctgggaggtataaaaggaaacccccatctggttggttttagcatcttcaaggtgaggatacaattcttaaaattgtctacctatttctgagtcctggttcaaattcctttgtgatgtctatgtcagctgggaccctgtaggccccactgagttgcacatcaccaagtgtgcccatcactgtggttagaggccgtgggctgtgtactacagacaatgctgtaattgcttctgtgaccaagtgagggcggagtttgccctttatgtgatgtaggcaatattctatttttaataagccagaaaaatctgttcaaatccagtaacttcaagattttccaaagactggaagatgtggaggacgtgggcatcagctggaatctgatttctctcccctccacacttgctcttccccatttctcaactgctgtctcccagtgtaattaccatctcaagcattttctgttcgtcccctgtaggtacaccacatcgtgccaacaacccat

SEQ ID NO: 209504 - DNA, 478 bp, Homo sapiens
agagagacacaggaatctggggaaaagggcactccacagaatggagggataaaaggagtctctaggatattagtgaagggagttcccaagataccagctgtacagcagtgctagtaagcaatcagttcagattggagcaaatcagaaggctccaggagaggagagacgtttaacaatagaatagctaaggtgttgaataacccaagagcaaatttactcaattgggggacatttaggatatatttctgataatgcagcaatgcaaaaacccaattattacctctggtgggttgcgtgcaggaaggaaaatgtcatatgacaagactcagctatgaagaatatttgtataattaacatttaaacattagataattgagctaagcaaaaatttttcctgaagtatattgggagagaagagggtgtgtgaaagagctgtatcttaatcttctgtgtcagaggcaggtaacactgaaaattg

SEQ ID NO: 209505 - DNA, 1156 bp, Homo sapiens
caggcatagagaaaaggccatatgagtacacagccagaaggtgtctgcctacaagacaaagagggaaaacttacctgaaaccaaccctgatggatattggatttctaagctccagaactgtgagaaaattaattttatgtgctttaagacactcaatttgtggtattctgttatggcagcctatgctagtcaatttgcattaccataaagcaacacctgagagtgggtaaattataaagaaaagaagttgaatcggctcatggttctgcaggcagtacagaagcatagtgctggcaattgcccctggcaaggggctcaggaagcttacaaacatggcagaaggcaaagggaagccaacatatcacacgtaagctcaggaagcttacaaacatggcagaaggcaaagggaagccaacatatcacgtggcgagaaagacagagaagcggtaggtcccagactcttttaaacaacaagacctcatgtgaactgaggggaaactcactttcaccaaggagatggtgctaaaccactaatgagggatctgtcccatgagccaatcacctcccaccaagacctacctccaattttggaaattatatttcaacatgagatttggaggggacaaacatccaaaccatatcccagcctgagcagactaacagagtctctgaataaatctatgaaaatgactagagtattattttgttgagtgatttcttcttgtattaggattggtctccttgaaaatatttttctcatatctgttataataaaatactgagaatcatactaattctactctaaacttagatatttaagagggttggatttgactgattgctctgatgttgctaacatagtcaaagacttttcaaaactaaagtgtaatattatgtcatgcaaccttgagaaaattacaatggacaaagcagaactataattcacaattcatctcccaaacaaattgtgacaccccttctttcctatccactgaaatatgcctaaaatgagaaaaaagggaaatcttaaaaacaacaacaacaacaacaaagaaaaaacagaaaacggcaacattcaggcaaaaaagaatgtgaggactatgatgctggcatgctaaacttaattaataataaatgagagagtttggaatgatta

SEQ ID NO: 209506 - DNA, 236 bp, Homo sapiens
gcttttctgcgtatttcatgattgaagtgattgagttaaattccaacttggaacagttttattgtcactagagatgcattttagtgttccatgttttttatgtttatatatcttttctcctttaaagattatatccattttaagataaagtaataaattgatatcagcttttggagataaaagaaatattaaagtacacttttttttaaccaaacaacaatagcacacgtgtatgt

SEQ ID NO: 209507 - DNA, 213 bp, Homo sapiens
ccgcaagttgccccataaggtcttctgatgactcatcgccaggtaacttcctgaaagtgactctcccagaatcctagcacaccaggattctaacagtaaaccactttacacatcagtcataactccagatagcttccaccaaaggtaagaagagtgccgtggtataaaaaccatcagagctgtccataaaatgttactgatgggagaagatgg

SEQ ID NO: 209508 - DNA, 363 bp, Homo sapiens
cgagctcggcacccgtaactgagtgataaccaacgaatttttatatctgggaaactttatagcatgctcattggagaaattttgaaaaataaaaaagtactgaaagaggttaaatcacaaaattttgttacctagacataaccactgtaaatattcgggtatatttctccacatcattttttttttctatgcatctataaatacatgaaaagaaaaagaagggtcaggcacagtggctcacatctgtaatcccagcacttcgggaggctgaggcagatggatcacttgaagtcaggaggcggagtttgcagtgagccaagattgcaccactacactccagcctgggcgacagagcgagactcc

SEQ ID NO: 209509 - DNA, 456 bp, Homo sapiens
cccgatgttgaccaattctgtcctaagggttacatgctccccgcaccccactccccatcagctatgtcagccgtggccactggcaccacactgataagggaaagggaacacccttggcagtatgtgacctcagtccttttccctctctgccaatacagagtgtcattgatacattagtgacaaaagggctacttaagacaggaggcataatgtgagatgccagaaagagctgagacatggaaaactgggacacagtggcacctctagctgacttttaaaaaataaatcattaatcaagaaccaaaccagaactgaagtgacagcactccttcctgtctcctcctgcccttgctcacagcacacatgacattactgctgtgacacctgtccctctgcctggtgtttattactgaggaagcccatagtagatccacagctttggggagctacttgatc

SEQ ID NO: 209510 - DNA, 350 bp, Homo sapiens
tattggtgtctcactctagttttaattttcctaatgtctaatgataattaccttttgatgtgcttactagctgttcatctatcttctattgtgacatgtctattcaaataatttgaccatttaaaaaattggcttattatgaatttgtaaggcttccttatacactaagaatgaaagtcctttggtttaagatgaatactgtgaatattttttcccagttcatggcttacctttttgttctcttaatggtatctttagaagaacaaaaatttttaattttgatatgcagaaaatgtctgttttgatgaagtctaacttatgtatttctttcttttttttttgagacgtag

SEQ ID NO: 209511 - DNA, 624 bp, Homo sapiens
cctatatacaataatgagataggagtaagttaattgtagtaagaagagggacaggagaggaacatagccatctctcggccatagcagtcctgaaatccagtcagcacatgttgtcatggcccctgttctagggtctgggaatataattatcttctgtgggagtggttccctaatccatgtttctccaggactcttggttccaccctatgaggtgtcttctcttttctataacaattagcccataatatacagctttctcaccctgcttcctgcctgttgaagagtgggcgcccagaggccttttttcattttgagctgtctctatcctatcccttttaggccaagctgttagtattttttaataaccaactttctttaaaatgttgtgagtttcctgtgaatcttagtggggttcactctatgcctcaaaagccacatctataatagcctttgagacagccctctctgctttgtgcagaacaatcccctgaagattcctagtagtacttttgtctaggtgatagggtgtactaggcaccacctaagtctttctggagtcttaacaaagagtattatggccatttaataaccactctttgcctgcaggggaggtggggcagaatg

SEQ ID NO: 209512 - DNA, 515 bp, Homo sapiens
acagttttaacataatgtttttgataataaattctagtgcaaagagaaccaaactggagggtcacgggatacaactgggagggacacttatttcacccctttttactcgagttaccagccaaatcacagaaatgggctctgcacagtctcgtcaaggtggcctgcagtatccacgaattgtgtggcctgcagtatccacgaattgtgtggcctgcagtatccatgaatcaactgcaagtctcatgtcagctcctgaaaggcaatgggagcgggtgaggaggagcagcttctgcccacgtaattcctcctccctgacctcatgacctgcccagagctgtgcccctctgcccactttcctgggatgactcctagccagggaaggctctcaggtcccaggtacactctcagcctgctctttctgagcacattcctagtcttatgagattaaaggctcttctgcagccagagaatcctacacacacctcctttgaactccagccactctgaaaagcaaa

SEQ ID NO: 209513 - DNA, 461 bp, Homo sapiens
atctttgcagtatcatgcattcatctttggttcccctaactttgtaaaagaaacaagttttttccttcagtcccagaagcaatggccggagtgtgcacctctcagatggcttcccagcagtgtagtaggagacctggttagtgtactgggcagaagagggaaataagatgcttcatgtggccggccgcagtggctcacacgcctataatcctggcactttgggaggctaaggagggtggatcacttgaggtcaggagttcgagaccagcctggccaacatggtgaaacctcgtctctactaaaaatacaaaaattagctgggcgtggtggcgagtgcctgtaatcccagctactcgggagactgaggcaggagaatcacttgaactcaggaggcggaggttgcagtgagccaagattgcaccagtgtactccagcctgggcaacagagggagactccaccc

SEQ ID NO: 209514 - DNA, 166 bp, Homo sapiens
ctgaggtaatgggggctgtctgtgaagccttgcggcaggacagcccaggtaatttgctgagcctgatgggtgtcagggtcagtctaagtgaaagcaaagagaggcggggacgaggggtgcaggggaacagtgaaaaaagcatctttacgatcaagcacggaatagt

SEQ ID NO: 209515 - DNA, 205 bp, Homo sapiens
ataaggaggtattcacattgcacagacattgatgggctcagtgaatggctgggatagctggagaaccaggtttgaggttatgtagtaaaaaccacaaccaaaattatgatgtagaactggtctggtgaggatatctctgctgcattccagaggggtaggtgctggaatgatgctgctgatggcactgggaactgcaggcccccac

SEQ ID NO: 209516 - DNA, 321 bp, Homo sapiens
agcccatagctgtctgtatgtcttctactggagcatttatcacactatatcatagttaatctgttcaattttctcagagattcagttatatataacttctatgagagaagtgcccaggaatggcatttgtcttgtgttaccattttatcactagtgatgaagactatatctggtgcagtaaataattgaatgcatgaatgacttctcagttgattaaacatccttctctttaaagattcttttcttatgcattaatttttttctagtctatttatttgtcttcacactctttgacctctgctttctgattcttatgtttta

SEQ ID NO: 209517 - DNA, 389 bp, Homo sapiens
tggaggtggggtgagtggaggccagaagtgcagttgttgaggttggagaagtagccagagaagatcatgtaaggtgtgactgtgctcccataaaactttatggacactaaaaattgaattttatgtaattttcctgcatcatgaaattaaaaaaaaaattgtttcaaccattggaaaatgtaaaaaattgttcttagctaacaggccatacaaaaacaggctgcaggttagatttggcccatgggtcatagtttggcaattgtgttatatataaattattacactgttttatcttcatcatggtacacatccatacctgacatgttttatttgcctgtgtatacatttattgctttgtcaccgtctactagaatacaagttttttgaga

SEQ ID NO: 209518 - DNA, 749 bp, Homo sapiens
aactgggagcctctgcatccatccgtaactgtctggccgtgacagtggttagagaggagtggcttctgtgaaactctcacaatctcaaatctcccacaagtgcctctttcagctaactctaaactggtaccatagaggaaatggattctgaaaacttggtctccaaccttagacaaattgaataattaatatgtcctctcctgcttcttctgtaactgaatttgcattgggaagcaggcctgtcactctcagactttgtggtttgagtagggctcacttcagcaccaccttttcctcttctcagccccacggactggcatgagactcaggcctggccaactgaatgtcacacacctatgaccatcagttggctcagagatggactcaggacaccatcacagccaatgaaaccctgttagggaaatttgtcagaaccatacaaagaaatagctccacttttccatagagatgagacataagcctggactaactggtgtccaatttgccatcaagagagcatctgagaagacagaggaaaactggggaaagcgaagtctaaggaaggtgagtaaggacaagtccagttgatattacatgaatcacctggacctggaaatcaaggcattgctggattcaaggccaagaaaaattggaagctggcttgaatcaggttctatcacttgcagttgaaaaggtccagactaatatgataacaaaggagcaagtaagcaagattctgccctacagta

SEQ ID NO: 209519 - DNA, 824 bp, Homo sapiens
gtagtcccagctactcgggaggctgaggcagaagaatcgcttgaactcgggaggcggagcttgcggtgagccaagatcgcaccactgcactccagcctgggtgacagagcgagactctgtctcaaaaaagaaaaaaaaaggatagggctgcaccagtccctggggacgtcccaggtgcctccctacaggatccatctccagacactggccttgtagagccttctcagaaggatccatcaactcttttaccctgagcactaggtgagggattcactagggaaggcaggtgacggaggtgacatccaggatcccccctcaggccccatacactcagaagcaagtcacaccactggccgtgcgagagcaggtggtggacgccgcccgcctgcagtggccgctgctcttctcccggctcttcgaagtcatcacactctcaggtaatggcatctgacagggggcagggagcaggtatgggctgggcacccaggggtcccatgcagccttcacactgccgtctctcctggccaggcccccgcctgcccaagacgcagctgatcttggctgttaactggaaggggctttgcttcctggaccagcaggagaagatgctgctggaactctctttcccagaggtcatgggtctggccaccaacaggtgcgggccctgagggaagatctcttcttacacactgagtccttgtgatgcatctgggggctcggggagagatggggagaggggcagtgtgccgtcccgggtaacaggccggggtggagggacaagaatctacgtatgcgatggcttctgtacttcggagccccaccct

SEQ ID NO: 209520 - DNA, 2036 bp, Homo sapiens
gaggaatcgagtagggatgcagagcctggtggcactgtcctgagagaggaggaggctgggcagggccccggcgctggagaggtgccctgcatatgggacctctcagaggtgcacaagagctgtgtgcccaggtacccctgtctcctctcctcctccagcccccagcctactctcctaatggtctgtgtctttcagggatgagatttactgccagatctgcaagcagctctcggagaacttcaaaacaagcagcctggcccggggctggatcctgctcagcctctgcctcggctgcttcccaccctcagagaggttcatgaagtatctactgaacttcatcggccaagggccggcgacctacggccccttctgtgccgagcgcctgagacgcacctatgccaatggggtgcgtgcggagccccccacctggctggagctgcaggctgtcaagtccaagaagcacatccccatccaagtcatcttggccactggagagagcctaaccgtccccgtggactcagcctccacatctcgggaaatgtgcatgcacatcgctcacaagcagggcctcagcgaccacctgggcttctccctccaggtcgccgtgtacgacaagttctggtccctgggcagcgggcgcgaccacatgatggatgccatcgcccggtgtgagcagatggcccaggagaggggcgagagccagcgccagtcaccctggcgcatctacttccggaaggaattcttcaccccctggcacgactcccgggaggaccctgtcagcaccgagcttatttaccgccaagtcctccgaggagtctggtctggcgagtacagcttcgagaaggaggaagagctggttgagctgctggcccggcactgctacgtgcagctcggcgcctcagcagagagcaaggctgtccaggagctgctgcccagctgcatcccccacaagctgtacaggaccaagcccccagacaggtgggcgagcctcgtcactgccgcctgcgccaaggccccatacactcagaagcaagtcacaccactggccgtgcgagagcaggtggtggacgccgcccgcctgcagtggccgctgctcttctcccggctcttcgaagtcatcacactctcaggcccccgcctgcccaagacgcagctgatcttggctgttaactggaaggggctttgcttcctggaccagcaggagaagatgctgctggaactctctttcccagaggtcatgggtctggccaccaacagggaggcccaggcgggcagaggctgctgctctccacgatgcatgaggagtacgagtttgtgtcacccagcagtgtggccatcgctgagctggtggccctgttcctggagggcctgaaggagaggtccattttcgccatggccctgcaggacaggaaggccacagatgacaccaccctcctggccttcaagaagggggacctgttggtcctcacaaagaagcaggggctgctggcctctgagaactggaccctcggccagaacgacaggacaggcaagacggggctggtgcccatggcctgcctctacaccatccccacggtcactaagccctcggcacagctgctgagcttgcttgccatgtcaccagagaagaggaagctggcggctcaggaggggcagttcacagagccacgtcctgaggagccacccaaggaaaagctgcacaccctggaggagttctcctatgagttcttcagggctccagagaaggacatggtgagcatggccgtgctgcccctggcccgtgcccgtggccacctgtgggcctattcctgcgagccgctgcgacagccgctgctcaagcgagtccacgccaacgtcgacctctgggacatcgcctgccagatctttgtcgccatcctccggtacatgggcgactacccttctcggcaggcctggcccaccctggagctcaccgaccagatcttcacactggccctgcagcacccggccctccaggacgaggtctactgccagatcctgaagcagctgacgcacaa

SEQ ID NO: 209521 - DNA, 792 bp, Homo sapiens
gagagcagaacttggactgagtcctgcaggacacaggtattagcttttctcttttatttgctttatgtttcatttacttctttggatcgaatagctccaattgtattgctgttatttggtttttcattttgttgttgggttttttgatgtggtgtttttttgttttgttttgtttctttttgtctttttagaaagagggtttccctctattgccctggctggagtacagtggtggaatcactgttcactacagcctccaacttattcctgggctcaagcaatccttctgtctccatctcctgagcagctgggactctaggcatttgccaccgtgcccaatttttttttaattcctttttaaaaatattttaatcctttccggaaaaaaatatgttttccatggacttgcttatttcctttatacagtccattgtcgttgaattcttatttgaatttgtgatacaccctctcatagggaacataacaaatttcctcccacagcaattaatgacgagtgcgatgagaagcataatgacaatgattaacttgataattaaaaatctaatcaaccaactgttgatgattgtactaaacaaaataatttcatttttacacaaccagttgtatgtgaactatgttgaaaccaggatgcatgactggcggcagaacaaagaagtttggtttaatttctatctatacacccagtaaaatatctgtaataccactggaaaaccttaaaatacattatctatttcttgtaaaagaatgatgaaatgtgaatttgaacagcat

SEQ ID NO: 209522 - DNA, 604 bp, Homo sapiens
ctctctctctcgcctgccaccacataagacatgcctgcttccccttccgccatgattataaattttctgaggcctctccagccatgcagaactactttttcagataaaattatcctgttgtggtagccatggagatgcaacacttggagtgcccttcaagatagaaattcctgattagctgggaagaatgcagtttgctgactggctccatccttccgggtggacaatagaaatcttgaatgcttatggtatgggtgaccgtaaaagaacaaattcaatgtctaaggaggcttttacaccagaacaactccatcttgaaaaggagctgggtgaaatgaggctgagacctactgtgctgcattcccagacggatcaccaaggattcagaccgataccaatgatgcaataaagacatcatttttcctccaggaaaaaaagagaaatatgggtttagtcaccaaggaagaaggcagtaaatagctttgaacactcacatttacactctaatatatctgtgtaaaggatatgaaggatataaataatttagaaattgtgggggaagtaggtatctctaatattgaataaaaagaaaataaatgaccag

SEQ ID NO: 209523 - DNA, 405 bp, Homo sapiens
cagtacatttgttaaaaggcatatattccatttacaagcacttcatataattttttaaagttacttaaaatatgggcccagctgggtgtggtgagagtagcaatgacccaggagttcaaagaccttgactgtaggccaggcaccaataataaatggtcggatggccttgagaaagtgacagctctgctgggtttcagtttccacatgagtgacatgattgatttggagcaggttacttctaatattccatgcagcttcaaaattccacaactgaataattcaggttaaggaatttgtacctaaatttaatagacactgatccagtaccaatatatgccaggtaatattataagcactttacaaagtatttaatgatataataattttaataaagcatagaccgca

SEQ ID NO: 209524 - DNA, 323 bp, Homo sapiens
aaggcccttgtgagtgctcttcagggacagtgctccaggttgggagcacagtgatggcaaaggcctagaggcagaagctggcatgtgtgaggagtagcagggaggtccaggtagactatttggggctagtggaaggagctgaggctggacagacaggaagatcagatcctgtaagactctcataaggacttgggcatttattcggtgtgcaaggggaagccacagtggggttctgagcagagaggacttcagagcagagtttgacaagagaggacttctgtgtaggaggcccaccagttactgcatggcatagaaacagcaga

SEQ ID NO: 209525 - DNA, 338 bp, Homo sapiens
gtatgtttagcctttgctactatgcccccaagtcttgattaatgtagctttataacaacttttgaaatcagtaagtgtgagtcttccaactttcttctcttttgggattgttttggctgttgccttgcatttccgtatcaattttagggtcaggtttttctgtttctgcattaaaaacaccacggattttgacagggattgcattgaatctgtagatgaatttggggagttttgtcatcttaacaatattaagttttcaacctatgaacacaggattttttatttatttaggtttttaatttttttaatgttaccttgttttcagtgtaaacgtctca

SEQ ID NO: 209526 - DNA, 213 bp, Homo sapiens
cttttccccatttattttagtgtccttatggaaatgttgcctggggcaattattactgtgatatgctaatttcctcattatttattaagttggaattctgtaagagttgtttcttctccatttattcagtttttttaaatgtcagcatggacttgaatatttatctcattctttgagttgtaacactatacttaattattttgtgactcattt

SEQ ID NO: 209527 - DNA, 820 bp, Homo sapiens
cactcatcccagggtacatgctggttgcaaactaagcccaagagtggatttggacgcaagttggtaaataacaactaggcttttagattcggagtttggatgatgagaaaagtgaagttttgagtgggtgggaagaaaccttccctgattttggctggtacattcagagactcacagcactaacagacagggcaggctgccggggcaggaaccctggggaaaggtgtgtcacacagggcctgaggtgaagggagagctgctcgggtagcagtgggggagggggacagaggctgggagatccttcctagagatgggagcagctttccacttcaaggaccacaggtctgcaggcccacagctcctaggacagaaacttacaaaactgtcactgtcaggagggagtgctggctctcagatggactctgttcctgagcccctatcttgcttccattcaccttgcaccagctgcccagagaagctagccttgagctgatgtctacctttgcaatattccacctgagtgcatgctgtcttttgctgatctggtcttccaaaatctaagaagcctacaacagcattttgggatatgggacatttagaggtctcattacaagttccatgggacttttagaaaaagcttagatctatggacaactaggagaaggcaaatttaaacttgtttgaagcaacccacacaagagcaggttttcctaacctgggcgggggtgtccataaattcccaagggggtccatgtgaactcaggaggcgatgaacctgctgaaattatgtgaaaagttattcatgaaaaaaattaaaatt

SEQ ID NO: 209528 - DNA, 171 bp, Homo sapiens
atgtagttgcattgattgtgttgtaaagaagaatatatctagcattagtaatggcaatggcaataatgatgacaataatacagattgcattgagccatatatacattatctcattccagtataaaagaagtgcccccagcaacttcttggacgccaaggaggtttccaaat

SEQ ID NO: 209529 - DNA, 390 bp, Homo sapiens
ttggggcaattttggtaatctgtatttctgtatgaaattacccatatcatcttggttttaaatatacagtcatgcgttgcattttcagtcagtgatggactgcatatatgatggtggtttcataagattataatggagctgaaaaattgttatcacctggttatatcatagcaattgtaatgttgtcacacaatgcattactgaagtgtttccggtgttgctggtgtaaacaaacctactgtgctgccaattgtgtaaaagtatagcacgtacaatcgtgtacatacataatacttgatgatgataacaaatgactattttactggtttatgcacttaatatgctaaacttttattattattttagagtgaactgtttctactgattaaa

SEQ ID NO: 209530 - DNA, 474 bp, Homo sapiens
acttgatgagatggggcacccgagaccagccacgcattccacagctgtgccccagggtccaggggatggggctgggggtggtcggacaaaaccactgcccacacttggagctgggggcagccgaacaacaccactgcccacgccttcctggcgagagacggttccagtctccccggtgctggcgtgggcacgccgtgggacagaagcgcagtcattcggcagaggctcccggctgttctcacattgtcagacccaccgtcaaggtcatttcaacggcccctttgcccggccgggcctcctgagttccctctgagcctcagagcagctcgtacacacagctttgggtttctaatggggatggggtcttcaggcctcagccccttctgggcatttcttccgttacaaaggaaaggaaatgtaccgaacactagaaacagtgtttaataaatagcagatttctcttcctgtctgtga

SEQ ID NO: 209531 - DNA, 433 bp, Homo sapiens
aaagggtcacctgttatcttttgctttattttactcatggggtctattcccaagtacttcacaaacacataattcacagggtagaaccagaacatcagctgtgtcaccctcatttggaagagcaaaggaatttatctccctaagcccttctaggcagcacagacttatcgtggactcagaagccagcaggctccttctctctggctctgacaccctgtgtaactgtccctgagccttctcagacagagctgctccagctgcaccaagagtaggccccagttgcataatcagttgttaaaatacttggcttccagctgggcgtggtgactcactcctgtaatcccagcactttcggaggccgaggcggatggatcacatgaggtcaggagttagagaccagcctggccaacatggtgaaaccccatctctacta

SEQ ID NO: 209532 - DNA, 730 bp, Homo sapiens
cgtcgacttttagaggacccccatcggaacccaatgagcccacactagctgggctctcctgcatcccccatcaccctttccggggctggttcttcacctaccacttccaacgtggctgttcaagaatctcatccattttgggctcattttggctcctcggagatgggtcctaaatctagagctccagtcccaacctttctcttaagctcctggctcacatttccagcaatctgctgaacatttccatgtgggtgcttgtcagctccttaaagatagcccctctatcaacaatgtttttgtttgttcgtttgtttttgagtcagagtcttgctctgtcggctggagtgcagtggtgcaatctcggttcactgcaacctctgcctcccaggctcaagtgattctcctgcctcagcctcctgagtagctgggagtacaggcacatgccaccatgcccagctaatttttgtattttcagtagagccagggtttcaccatttcggccaggctggtctcgaactcctggcctcaggtgatccacccaccttggcctcccaaagtgctgggattacaggcgtgagcaaccacggctggccaacaatggatttttaaattatttccacgctcacaaaaaacctttccaagatgacgggttgatgggtgcagcaaaccaccatggcacatgtatacctatgtaacaaacctgcacgttctgcacatgtatcccagaact

SEQ ID NO: 209533 - DNA, 619 bp, Homo sapiens
taagtcgaactctagagcgatccccgaaagctactgtgtgtgtaagagagaagagagagagatcctgcccttgagaaacaacaggattaggacggaaaaaaaccagatgtgaccatagtaagttctatttcataacaaaaacacatattttaaaaattggagaacatgtagtgtatatttcaaatagttacaagtgaggacttgaaacgttcccatcacatagaaataataaatactcaggcgcaggtgcggtggctcacgcctgtaatcccagcactatgggaagccaaggcaggaagatcgcttcagttcagtggttggacactagactgggcaacatagtgagaccttgtctctactgaaaattaaaaaaaaaaaattagccaggtatggagtacatcagatacagagacttaaatctctcgcaatgcttcagggttcttcaactgccaaagggtatcactaaaatgcccagggaaatacaattttcacagaggataaatgcttgactgtgctaggttataggcacctgtattccatttccctagagtatcctcttcactagtctaaagtgtgcgtgtccctggatctttgctactacagaaaaataatccaaccc

SEQ ID NO: 209534 - DNA, 935 bp, Homo sapiens
accagcaagtggtctctgcttttggtttacttctttcatagttgctccattgttttttgtttgtcagacacagggattgtggttgccttcccagcaatctcactgttgttccgctggttcaagataatcacctcctatcaaaggattcattctagacttgccttttcagcttttctatttgatctcaaaagcggctctgtgttatttgtgctaatgctttctccattggagctgataatcaactgtaatcatatttttgacccaaactttgatgatcaccatcaaatgatttattgaatatccttatgtttaagacacagtgctaggcactatgcgaaaatcagctaaagtgtgtgtgtaagagagaagagagagagatcctgcccttgagaaacaacaggattaggacggaaaaaaaccagatgtgaccatagtaagttctatttcataacaaaaacacatattttaaaaattggagaacatgtagtgtatatttcaaatagttacaagtgaggacttgaaacgttcccatcacatagaaataataaatactcaggcgcaggtgcggtggctcacgcctgtaatcccagcactatgggaagccaaggcaggaagatcgcttcagttcagtggttggacactagactgggcaacatagtgagaccttgtctctactgaaaattaaaaaaaaaaaattagccaggtatggagtacatcagatacagagacttaaatctctcgcaatgcttcagggttcttcaactgccaaagggtatcactaaaatgcccagggaaatacaattttcacagaggataaatgcttgactgtgctaggttataggcacctgtattccatttccctagagtatcctcttcactagtctaaagtgtgcgtgtccctggatctttgctactacagaaaaataatccaaccc

SEQ ID NO: 209535 - DNA, 891 bp, Homo sapiens
  misc_feature (542)..(542): n is a, c, g, or t
  misc_feature (579)..(579): n is a, c, g, or t
  misc_feature (694)..(694): n is a, c, g, or t
  misc_feature (709)..(709): n is a, c, g, or t
  misc_feature (718)..(718): n is a, c, g, or t
  misc_feature (730)..(730): n is a, c, g, or t
  misc_feature (736)..(737): n is a, c, g, or t
  misc_feature (739)..(739): n is a, c, g, or t
  misc_feature (741)..(742): n is a, c, g, or t
  misc_feature (746)..(746): n is a, c, g, or t
  misc_feature (752)..(766): n is a, c, g, or t
  misc_feature (768)..(769): n is a, c, g, or t
  misc_feature (775)..(775): n is a, c, g, or t
  misc_feature (791)..(791): n is a, c, g, or t
  misc_feature (801)..(801): n is a, c, g, or t
  misc_feature (806)..(806): n is a, c, g, or t
  misc_feature (890)..(890): n is a, c, g, or t
gaagtactccagttctcagccagaaccccgcacaggtctttccttatgggataccagcccctcatacattgataaattggtacaagggatcagcttttcccagcccacatgtcctgatcatatgcttttgaatagtcagttacttggcaccccaggatcctcacagaacccctggcagcggttggtcaaaagaatgacacgattctttaccaaattggatgcagacaaatcttatcaatgcctgaaagagacttgtgagaagttgggctatcaatggaagaaaagttgtatgaatcaggttactatatcaacaactgataggagaaacaataaactcattttcaaagtgaatttgttagaaatggatgataaaatattggttgacttccggctttctaagggtgatggattggagttcaagagacacttcctgaagattaaagggaagctgattgatattgtgagcagccagaaggtttggcttcctgccacatgatcggaccatcggctctggggaatcctggttgaggccttggctcctncctgtagtcccagctacttgggaggctgagagaggangatcgcgtgaacctggaagtttgaggctgtagtgagctatgattgcaccagtgcactccagcttggatgacagaatgaagtatcactctaaacacccaagctaaaaaaaaaaaanaaaatctcagcaaanaacaaccancaacaccaaaanacaaannanannccanccccannnnnnnnnnnnnnngnngtgatnggggcccaccaccacncctggctagnttttntatttttagtagagatggggttttttcatgttggccaggtttttttggaactccttcttctagtgatccaccttccttgtcctnt

SEQ ID NO: 209536 - DNA, 629 bp, Homo sapiens
aggaaaaagttaatttcatgtgtaaccttaatttaataataataatcattagggctttgttcaagatggatgagcaaaattctgtcaccccttctacatcttagctcacctgtcctcacaaataaacatcactcttgaatactacaatctcactttattagattgtaaatttttatgaggaaaaaggtcctgagctatggcaggcttaattattccctcattcacatcttaggacaaaactgtatgttaaatatggcacacaaatactaattgtccatttactccactggaagtgccctaaggtaccttgggatgcctcagtgaagtgccaaatggaagacattctcattttaaacaggtgacctttttattaagagttttctaaagtccttggggcaaatgaaatcttttctcattattaaaaaaaatgaaatatatctaaatcataactcaaaaatcataaaatagaacatatggaaaagactttcctctggatgcacgacactgttggctccctaaagaactacttttagggaacaaaaaactgttcaagcccaagcatataagtttaggccccttcgtggggagaatggcttataagcggggaacgggaaacgagatggaaagat

SEQ ID NO: 209537 - DNA, 303 bp, Homo sapiens
ggctttgggaggcaagacataaatcgagagcaatcagttgagtattgtatttggtgtggggtcacaggaatataacaatatgcttacaggggtactttgtaacacccatgcagtcatttttcagctaagcaattatttttacttactctattggaaaactgagagaaagctgcagctacatcagtggtgtcctgagacatgcattagataatgtctacggtttatgaacctcgtaaatgcacagaaaagttgaagctgtttttttccttttgctagtgtgtcaggtcaaaggagattatctgt

SEQ ID NO: 209538 - DNA, 457 bp, Homo sapiens
catctgtcctctgctacaacttatacatggaaattatttctataaggatgaatgcaaaatgttgagttgtattccagacttcaccatccaacttacctaccattactgcccctaaacacattaaataacacttaaaacacattgcataaaatagggataataaaagagtgtgtaatcatttattgcaccaaaggcagtagtcataaaagtgtacccccaagatggaatgaggaggcataggaggatgaaggagtggcaagatgaccaatctccacatccattcactgaattggagggcagatgcaaagacagggcaagaagattccatatgaaggaggctgtagtctggtctccttattgctcttaaaattagtaagtatcaactgttttcctctcaattttattaacaaaaatcatggttgttcgtatttgctctctcctggccaaagtttctaga

SEQ ID NO: 209539 - DNA, 597 bp, Homo sapiens
ggccatccatacatcaaatattaaagctaaatcatgttcttgcttcataggtaagaaaatgaatacagatggaaggtctgtttcccaaatcccagtagctcatcttgcctactctgggcactgtgtccaaattccactttgcaggccactccttgaagccacagctacccctaatctggcctctcaccagactcctagacacacatcttgctgaggactggtgccagattacctgaagcaaatgtcaggtgatgaactggaaaagaggtctgagggaagcttccaatttgcattgctgatgccaatttcaggaaccagtaagtgagcgcaaaaaagaagaaggcaggaagacgcagagacaagttctaaaacatcaggtcaactaagcaaggagactctctgaggctgtactggaagcaggggagaatgttcatattctgaatgcacttgctggcaattcactgccagcccagtatggtgaggggctgggttacacccacatctcagaaatgacggcagactcccaaaacaatttacagcaagcatgccttaaaagtgcattagcgggccaggcatggtggctcacgcctgtaatcc

SEQ ID NO: 209540 - DNA, 218 bp, Homo sapiens
cttcatgactttgactttcaacaatccttcaagggaggcattagttcatcattacacctgaagaagtcggaggttcaaagacctcacaacaagcaagtggaaaagtaaatgttcaaattaggtcttcttttccaaaaatcctgttacataacagtataatgcaatgtagctaagccaagaactgtggtcatctgcattgagatttgtttctgttaaga

SEQ ID NO: 209541 - DNA, 372 bp, Homo sapiens
acacaccaggatgactaggcctggaggagtccagggtgggcctcagaccctcacttcttgtctggcacctcccattgccaaaaatgcagacttcagagtaggaccatttttggagccatgtataagaaacagatttctatataggtcaggccttgctaaaattcattttgagaagttcagagatggaatggagcaagacaaaattgaaattctagcatccttttcctcatacaattcaccccttgttttatgaagatgtgggacaaactgaatgaatgtaacttgcttaaaagagcacctgacacacatggatgctatggaagcaccattcgattccatgctttaactataaatgattattgttattattac

SEQ ID NO: 209542 - DNA, 339 bp, Homo sapiens
ataaaatagtctccatattccaggtttgtggcatttttcattaacttttgagttacagccatcctttttccatccccagggaatgtcccagttcctttaaaaaaaaaaaaaaaaactgatccaaaatcacagggcctagaaacattttctcaagtggcatgactgatgcttctgtggtgctacagggatggacagatgcaggagtgggaggtgggctgaggagaggcaaggtaccggggaggatgatgactcatgctttcctttcggctgtgtctctagcaacactggataattgggttgtcatccacaggaaaagcttgggaagcctatttgtgactg

SEQ ID NO: 209543 - DNA, 518 bp, Homo sapiens
ccattatagtcaatccgctgtgatatggtttggctgtgtccccacccaaatctcaacttgaattgtatctcccagcattcccacatgttgtgggagggacccaggaggaggtaattgaatcatgggggctggcctttcccgtgctattcttgtgatagtgagtaagtctcacgaaatctcattttctcttgccactgccatataacaggtgcttttcacctccctccatgactctgaggcctccccaggcatgaggaactgtaagtccaattaaaccactttttcttcccagtctccaatatgcctttatcagcagtatgaaaacaaactaatacaccctgcttccactcccactaacctatcttctgatttcatttgacatttaggaagtgtttctatgagataggacatgagtgatggctgactataaagtatccactcaaactaaagggatttttcagcaaagcatgcatatacatacacgcatatatacacaaagacacacagacacgtccaca

SEQ ID NO: 209544 - DNA, 480 bp, Homo sapiens
agggaggctttggaacaaagactatgtgtttgacccagcatgtgtttatgagaactgaattataatttcatcagcaaattcttatctgtgtcgttttacaaaggcacattctaaatttttgagggaccagctgacttgatcattgtgatactgataagatgaaaaaaagtgaattttgaaatgttgtcattccggttgctttggtgacacaaaccctgtagatcccagagcacaaggtcacctttatcttctcaaagggcatgttatgaaattgcacaatgcctgacactttcatgggagtaacttacccaagcccgttcttgggaaactaccccatcatgagatagctgacctagagagctcaacccatctgaataattggcaggaagcacatacgatctatttgacttcatcagaaaacaagcttctcacttggccttcaggggccttcccagcctcacagctcccatgcggggtcac

SEQ ID NO: 209545 - DNA, 503 bp, Homo sapiens
ggagaatgaatggtagtgtggagtagagaaaagagaggccctaaaagcaagcgtgtggcagtgttcatcagccatgctgaccataaagggagccctgagcagctgctactaaccatctggttgctgggcaagaataactatttggcagaggtggatccaacaggccatcattacttgatggtaaagatgacaatgatgataataatgacaacaacttgtattgtgcagtaaactttttgccaggcataacattaggcctttaacatacatcaattcacttaacccttagacaaaaccaatgacatattatccctattttatagacaaggaagatgacgctcacagaagctaagaaacttgaccaaggtcactccataagtgacagagccatgatttgaacccagatatgagtctatataatatacctatagctctatatacctataaagatggctgagagaaattaaaggagatctaaatatatactacgttcatagatcaaa

SEQ ID NO: 209546 - DNA, 399 bp, Homo sapiens
cagtggcctgtgagttcccaacccagctcagctgtgacagcgcctttgacctcagtgctggtggtggtacacatggaattgattacccagaaaacatcactgactcagacaagcagggcagactcatccgagcaataaaatgatcctcgaatagaatcatgaagatccttccggtcataaacagcaatatgtggagcaggctgaatctacctgctttaatcacaaagtcagaattatttataattagatgattgattttgtagcacagagggtgctcctaaaagtgttttgagaagcattttccctaaataatacaatattgacttgcgtagtaaatccctctctttgtagatagtgtatctgctgcctagggtttgtctgatttagtaaatattccaa

SEQ ID NO: 209547 - DNA, 189 bp, Homo sapiens
tgaggctgccatgagccataattgttccgctgcactccagcctgggcaatgaagcgagatcctgcctcaaaaattaaattaaattaaattagattgaaaacttttctcttatcaccttgtctacttattatctatttattgaagcctgtctcttgttggagtggagggaatgaaaaggtgggcagcaaa

SEQ ID NO: 209548 - DNA, 424 bp, Homo sapiens
tgggctagcaacaagatacctaccccacattagctgtggtacctgctgaaatgtgaccatgtgagcaaagaaaatgagccaaaagaaactctttctgaagattcactgaagaaaacctggagatactctttcattagtagaccccacagagacaggtggagtgtccgttatccagaatgcctgggaccagaagtgttttggatttcagattttttcacacttgggatcctcaacatgtgtatttgttggaaatggctacttaatttaaggaaaagtttaaggtggcctggaaaataagtagtagttgaactaatcaacaggaaccaaaactactttcaatatatagtgtacttatactcaaagagagacggaccattttatggtggaaccctgtctatggtagtattttgtgatgttttatttt

SEQ ID NO: 209549 - DNA, 504 bp, Homo sapiens
catgtcatttttagggtgtgttttttggagccagcatctagctagattgtgtttgcttattgtgtttactggtttatctttttattatgtatgtcattttgttttatgtttttattttattctttctttccaaggattactgttagacgtatgctagaacttctcaaggtattgtttttgacttgttttttaagatttctattttatctttttggcctatattctagatgatttttttctatatcatctttgagtttactaattttttcttcacaatacttcagattggagtttgtctcatacttatgttctcaatttcagtgaattaattttatcgtttcttaggatttccagtttgttctttaaatttatccattcttgaatcattacttaaagttgattttataatttattgttctgttttaatgaatgctgtctctcaattttgctctgtaagaatgctaaacatacttattttaaaaataaaaatgttttcacgttgca

SEQ ID NO: 209550 - DNA, 335 bp, Homo sapiens
tttctgcagtggaactggacaagataattaaggttaaggaggatactgagtattgagagtacagttgagatttaaaatcttaaatttttaatagagcttttcaacttgtttatcccagtttttccagcataagaaagagggaatgcatgcttctgtggaatttcatgtatagatatttgtgttagaaattaccccaaaattcagaaactaaaaatgcgtaacattcagccagatgcagtggctcatgcctgtagtcccaacagtttgggaggctgaggtgggcagatcacttgagcccaggagttcaagaccagcctgggcagcatggcaaaacc

SEQ ID NO: 209551 - DNA, 140 bp, Homo sapiens
gagataaacgttagatcttttgtgtagttccatagcttctgtagacttttgtcattggattcttggaagaagagaagaaagagggtaggactgagaaagtacttgaaataatgggtgaaaacttctcaaatgtagtaaga

SEQ ID NO: 209552 - DNA, 410 bp, Homo sapiens
taaaaatgcaggtacaaacatgcttggaacaaatggaaaattggaaagcctccaaaaagaaacaaagtctcagtaaaaaaatagaagatgtaaagaaaaaccaaatggaattttagaactgaaaaatataaccaccaaaataaaaaagttcatcagtgagttcaatggcagaatagtgaggacagagaaatagaatcagtgaatgggaaaacaggacagtagaaataacctaatatgaacaacacagagaaaacagactgaaaaaaaatgaccagagtctacagaagctatggaactacaacaaaagatctaacagttttgtcattggattcttggaagaagagaagaaagagggtaggactgagaaagtacttgaaataatgggtgaaaacttctcaaatgtagtaaga

SEQ ID NO: 209553 - DNA, 478 bp, Homo sapiens
ggtacctagggcagtcagatttatagagacaaaaagtagaatcgtggttatcaggagctgagtggagagaatggggagttaatgtttaatgggtacagagtttctgtttggggtaatgaaaaagttttggaaacagattgtggtgatggttgcacaacagtgtgaaagtcattaatgccacttaattgtacacttaaaaatggtaatgtggcaaattttatgttacatacgcttaaccacaataaaaaagaagagggaaaaaattaatagactttaatccctataacataaaaggatcagggaattgcagagtagtaggtagtgtgaattctccattttatatgccttctttatactttatatacctttcatatatactaacgcctttgatcttagacctaagaccaaaacaatcctttttcttaacagtaaatacagccatttaggtaacagccatttaggtaacagccatttaggt

SEQ ID NO: 209554 - DNA, 383 bp, Homo sapiens
tagctcggtaccctgccccagacggcttaattgacagtcacccttcaccccgctctccgggagcctgaatctccctctgagtttcttgcaaaagcaaagagaattagatggggtgatagtgaactacacacagctctggacggcatccaattatcttcttcctgatttttaccagaaaactaggctcacggagagcggggtgaagggtgactgtcaattaagccgcctggggtagctagagaccaataaacctactttctaaatcagaggcaatttccttttccacagcgcctgctctgcctctctgtctacaaggacacatgagaccggcagagtcagcggtggccaacttgggcctaacgggcgttcggttgtctcgcaag

SEQ ID NO: 209555 - DNA, 467 bp, Homo sapiens
ttatctacccgttcccactaggcattactcaacagagaaccaatagctaggaacttcctctattcctaaagattttcaagaaaggaagagaaatatcttgggaagtttaggaaacataaatatttaggctcatttattgatgaaagtgggcaaaatgaaatcatcctatgcatcttagtaatactatgtggtatcacaagcagcttgacataacaggctggtatcaattgtcatgggtaagtgctaattgctgaagatctaccaatttgctgtgtgcttttactaaaaatatctttgaaagttccacagccttccaagattttgtattccttgatataacctttaaattgccttcttcacattccctcttgtttgttagtaatgaaatgccaatgatcacagtaccggaaaaaagaaaacggagaagaggacaataaaaaatcatggttatgatttgtggagcaaag

SEQ ID NO: 209556 - DNA, 537 bp, Homo sapiens
tgggcctgtgcagctctgaatgctgcatttacttttgggtcctgcctccaacccagaaccacctgtggcctttaattcctgttactaggagagaggagaagcgattaaaccctgtcagtatattcatttattagctgccctttgaagcttttttgaaagcattttacaaggtatatcccgtcaggttgcttaggaacttttgcagcctccttcttcaacattatcattttcatttgaatcaacactggcagcttgacacctctggacacctggcatggcagtgggaggtacctccaaacactgtctttccgtgtctgcaccttcaacaagattttctctgtaaattcagctccaaaacaatttttataaacacagcattacttttgtgttgttcacaaatcagatttggaaagaggtgcttggggactgtcatgagtctatttaaagataacctgatttaaataaaaacaaaaacaaaactttttatccaaggcaattttctttcaatatgggaaattaaattagcttcagtgtctt

SEQ ID NO: 209557 - DNA, 223 bp, Homo sapiens
tcagccctctgtatctatgggctccacatctgtggattgagccaaacttggactgaaaatattcagaaaaaaaatctgcagtgtttcaaaaagcaaaacttgaacttactacatgctgaatactatgttgaatccacctgaaacaagtaataggtagatgttgtaagtaatgatcgtggagatgatttacagtatatgggaggatgtacataggttatatgca

SEQ ID NO: 209558 - DNA, 708 bp, Homo sapiens
tttctgtctccccatgatttaatgtgaactctgtgagaatgggcatcttgtctgttttgtttttcatctgttaaaaggaaaaaatcttcatacaagttcaatttagcagagtttgagaaagaaaactctgcgtatgggatagctctcagaatcagaacagatctaagaactccaacaagcaacgtggtctagtagtatttataggtagaaaatagaagtgaagtataagacagaagtgaggtacagagcttaattggttacaggtcgtttgtcttatttgagtcattggttgcctgcgattgactgaagctcagctgctgtaattggctgagactcagttgtgttataaaattacaaatgctccttgacttacgttggggttacatcccgataaacccattgtaagttgaaaatgcgttgaatacacctaatgtacatcttagtctagcctaccttaaatgtgcttagaacacttacattagcctacagttggtaaaatagataacacaaagcctgttttgtaatacttacataatttattgaaaactgtactgaaagtgaaaaacaatggttttatgggtaccatcataaagttgaaaatcaaccgctttaagttagcgaccatctgtgtactcttaggttttcatttggtttactgagctaggcagtgattatgtaaggactcaaatgcagaggcatcctgaggcc

SEQ ID NO: 209559 - DNA, 920 bp, Homo sapiens
  misc_feature (665)..(665): n is a, c, g, or t
  misc_feature (677)..(678): n is a, c, g, or t
  misc_feature (685)..(687): n is a, c, g, or t
  misc_feature (692)..(693): n is a, c, g, or t
  misc_feature (725)..(725): n is a, c, g, or t
  misc_feature (733)..(733): n is a, c, g, or t
accgggggacagctgctgttggatgggaagccccttccccaatatgagcaccgctacctgcacaggcaggtggctgcagtgggacaagagccacaggtatttggaagaagtcttcaagaaaatattgcctatggcctgacccagaagccaactatggaggaaatcacagctgctgcagtaaagtctggggcccatagtttcatctctggactccctcagggctatgacacagaggtagacgaggctgggagccagctgtcagggggtcagcgacaggcagtggcgttggcccgagcattgatccggaaaccgtgtgtacttatcctggatgatgccaccagtgccctggatgcaaacagccagttacaggtggagcagctcctgtacgaaagccctgagcggtactcccgctcagtgcttctcatcacccagcacctcagcctggtggagcaggctgaccacatcctctttctggaaggaggcgctatccgggaggggggaacccaccagcagctcatggagaaaaaggggtgctactgggccatggtgcaggctcctgcagatgctccagaatgaaagccttctcagacctgcgcactccatctccctcccttttcttctctctgtggtggagaaccacagctgcagagtaggcagcaaccacntattaaaaaaannccccccnnnccccnngagtctgttacccccccccccccccccccccnctaacgcncacttcctggagtacaaacacaggatttgtaattccttactgtaacggagtttagagccagggctgatgctttggtgtggccagcactctgaaactgagaaatgttcagaatgtacggaaagatgatcagctattttcaacataactgaaggcatatgctggcccataaacaccctgtaggttcttg

SEQ ID NO: 209560 - DNA, 281 bp, Homo sapiens
ctgtagggacatgggtatttgatcagtttgctctcattaatctgctaaccaaaaggagatagagcaccacggaaatgaaataggaaacaactaagttttcattaggaaagtggaagaggagagggactaaagaatgcagtgtagctttgctttgttgggttgtgttcatggccagagggaggccctgtgtggtgagggtaatcagctgtgcaagcaaggaagccagggtggagaggctcagagaagagatttggtgccggtgccaggtagggcaggaatat

SEQ ID NO: 209561 - DNA, 1115 bp, Homo sapiens
gaacgctccaggcctggtcctacatcaggaccttttcatttgcggttcccgaccaggactgcttctcccctagatgcccacgtgacttgttccccctttcctcctgttccctgatcaaatacctgccgattgacaaggccttttcagatcagccccacctgctcacttgctttcctgcctgtccacatatttaccatcagaacagaattctgcccatccgtttattgtctgtctcccccagcaaccactagaatggaagctgcatgtgggcatggcttagttttgtccactgctggatctcagcatccaaaacagtctaccacctggtaagtgctacagaaacatttacgaacaagaaaccagtactggctaccccgcactctgcctgtgctcatcttatcttccacctgaaaggttccccctctctaacttcaccctgcacccttcgaccagtcaatgatccccacagcttggcccactccaaaccccttaaaatccctgaacccaaactcctcaggaggcagatttgaggtttccccccaacttctcatgtggctgccctatgatttaaactctttctctgctgcggttccagatgtctcagtatactggctcgcggcacatcgggcaaatgaacctatcagataacaacggcagatcagatgcctgagcattcagaagcaacagctgtggagcccccgtgggttcagaaggcctggttcccgtctccagaagcctggctctcctccctcctgggcccactactttggcttcttgttcctacgtacaaggagttgcgaagaaggcaactcttcccctccctgaagccaaaggaatgaaacagactagggcgggagaggtggccatccgtcattagttgcggccatcagtaacagcaacaggacacggaacctaaggctgtatccatcctgggcccccagggaaacatcagcgggagcggtactaaggaagtgctcatctcttagagacaaaggcccatggaggggaacagtaaccatcccctcccaattcagaaaatgttaacataagcacttcatttctcatgcagataaccacataagtctattaataagaaagaaagagaaagaaaaaaa

SEQ ID NO: 209562 - DNA, 115 bp, Homo sapiens
ggaagctcagagtttaagcagcttgccaaaaagatccaacaactagcattagctaaaatttgaattcaagacatataagtccaaatccagtactcttttattaaatggaagctct

SEQ ID NO: 209563 - DNA, 598 bp, Homo sapiens
tctttctactttctgtacccttgaccctcctaacactgagctgtgctgacccgtccttggtccttgcccacctccggccctctgctcaccttccggctcctatcccaggcaccagacactgctttccctgcctccgggccctcccgagaatccatcatcctgtaggtcaggtttgctgctcataccttcctgtgcctcagtggtgtctccttgcctacctggtcaagtgacgctcccaagcaaggcttagagggcccttcttggtcttcccctgcccgtgtctcatcgggtcctggctacaccacttaccagctctctggcattggttaactttttcgtgtgtcagttttctcatgtttgaaaaggagttacagtaagcagtgagtgagtcaatggcagtcaaaccttgagttgatggcctggcctctggtaagggcttcatggagctctttctactttctgtacccttgaccctcctaacactgagctgtgctgacccgtccttggtccttgcccacctccggccctctgctcaccttccggctgctccacttgaaaacctccaccctgctcagcctctggctgctgcctcaggcct

SEQ ID NO: 209564 - DNA, 398 bp, Homo sapiens
ggccattgggcttggagtccccattctttagtgttgaggggcatctgaaggggtcatttcagggacttctgttatagttttggacgtgactgaggggtgcttgctggagtagtttcgcgatgacggaggtcttcatgtttggactccatcttttgtgtttgtaagtgattgaggggtggagatctggcatcctgttgcctcttgttttgagggtgactggtggttacctgctagggcttctgtcagctctactgctgtatgcagattgtgagaatcacttgctggggcttccataatctctagtcttagggggactgggaaatggcttgccatgctttctattatctctagttttaagggaccagttcaatgtgatttaaaactctttttatttgaaa

SEQ ID NO: 209565 - DNA, 305 bp, Homo sapiens
gaggtcacctttcctttcccgtggggctgggctgtgtgcctcttctgccccagccatctcccctctccccacctgggcgcagtgccagcctgctgggtgtgaacgggtgtttcccatggggagtggagccaacgagtccccggggacgggctgaagagcagggcacggtaccgatggacacgggaagggcaggcccagctctgccctgtcccttcccaggacctgtgctcagggtggccgtgaatgtcttcccacggagcagctggagggtcctgggcccaaagcgtggggagtgctgtgctggg

SEQ ID NO: 209566 - DNA, 610 bp, Homo sapiens
cttgtgtgtatgaggaattgtgtgtgtgtgtgttttgagtgtgtatatgtattcataaaaacaccgtttatattttttacaaaagaatgctcttgatttcatgttgccctagagtcaagtgtctgccacatttatttttacttattcaacaaactttcataaagctccatttgtgtgttcaagctttatgctaggcagtggggaggatacaggcaagttagacatggtccaattaagtacggaagagagatgtatacacaaataattacaagctatattgtccaatataatagccactagctgcattctagtacactagagtacttgaaatatagtgactgagaaagtttcagctgttatttaatttttatttcaatttaaaatagaaaactgatatttgattcagttattagaaaactttcaagtacatttagaacaatttgggtatgtgaatctactttttcaattatacattttatgaaatgtaaatgcagatcagttattttggaaaacagcttagtgtattagagttctctagagggacagaactaataagatacatacatatatatatatatatatatatatatatatatatatatatatgtat

SEQ ID NO: 209567 - DNA, 423 bp, Homo sapiens
gaaagttgcttatgaaaggacttaaatgtaagtgtagacacactgtctgactcattttctccccattgattttcaccataatttcagagaatttaccacagaaaaacatttgttcccaacacgtaataaaaatcactctcagctgggcggtggctcacacctgtaatcctggtaccttgggaggccaagatgggtggatcacgtgaggtcaggagtttgagaccagcctggccaacatggtgaaaccccgtctctactaaaaacacaaaaattagccggatgtggtggcacatgcctgtaatcccagctactcaggaggctgaggcaggagaattgcttggacccaggaggtggaggttgcagtgagcagagatagtgctactgcactccagcctaggtgacagagtgagactttattaaaaa

SEQ ID NO: 209568 - DNA, 616 bp, Homo sapiens
gcattagacaactcattcaacctctttggcttacagtttcccaagttacacgttctgtccatcatgtaaaactaactaagcctaactaccgctgttgtctttctaacctctccctcaccccaattctaagtcagtaaatgtggggtagggctcaggctgtttgtttgtttatttatttatttattgtctccacacgggattctgatgggcagttgcagttgagactgagaaccactgcccccagggatcatgcgaaatggggttctcgtggaggtgccaggttggccataggagaggagtggaccctttgggaacagcctaccagcaggaggaagtgagaggctggtcttcagtgcctgtctattgtgtgcttccacatgagcgaaagccacatgagcaggggaccccagagatcgtgtacctgaagggttacacagggacttgggttctcagtctttgcacgataagctcgcagctgccaggaatgtctacttcccagatttccagctgaccaccataccctggaaaggaaataataaaactggacagtttctttattaacaccctgattctagcttcactagagcttctctgggaggttgaaaatctgtaacaa

SEQ ID NO: 209569 - DNA, 265 bp, Homo sapiens
taatcctagcactttaggaggctaaggcaggaggattgcttgaacctaggagtttgagatcatcctgggcaatattatagtgagaccctgtctctaaaaaaactaaaaataaattaaaaatatattaatgaaattaaaggcctgtctgttgctcttaattcttttaagaataggagagctgtgtaacatatcttgattatgatctgtttctcactttacattccccaaatttaaatatttttgctctaattctgaatcaatgtaa

SEQ ID NO: 209570 - DNA, 369 bp, Homo sapiens
tgactctggcttaattaactgggaaggaacagatgcttttaaagattatatacataaaattgattctcattacctaagtcttagatgtcttaaaaatatggatatggtccctaatagtttctgggcacttagtcaaagatgacaaaaatagttatattaggcaatatagctgcatactcataaaaaggcatcaaggtatttttactacttggagaatatcatataaaaaagaaagtcctcctgcgaatttattctttcaactaacaaatacagggaatggcttttagtggattatgtgaaagcttgctgaggtctcacctgcacatcaacatcttactcaagttctctctagaaggagtggaacctgta

SEQ ID NO: 209571 - DNA, 276 bp, Homo sapiens
tgttgctcagtggggaatctgcaggcctcgacaggctctgagctgggaaacaggagtggccctgcctgtcctatgacacactgtgagtggagggggctgtggccggcagggacgtaggggagtcacacctgctgaagcccagctcagagtcaggactgggaccaaaggggcagagcccaggctggccatggaggtccgaagtgagggattaaactccagcgtggcagcctctgccactgacagccccagctcttcccgtggccccaaaggctggtg

SEQ ID NO: 209572 - DNA, 575 bp, Homo sapiens
attacagctaacttctcataagaaactataaagaacagaaaacaatgagatcatttaatagatacaggtttctacaaacccataattctatatacaacctaattatctttcaaatgagctgatggaaagaattttcacctaagccaaaggttaaagcatgtgctgccagcaaaagtacattattaaaaaaactgataaaaataataataaaaaatacactaaagggtccatactgtatgattcttttatatgaagttcaaaaatagacaacgcttactctggtgatcaagatcagaattattgttacctttggggtgatgggccttgattgggaggaagcactaggaaatttcagataggctggaaatagtctatatttggatctgggtagtgattaccaggatgtaaaaatttattgagctgcacattttagattaatgcattttactaaatgtaagttgtacccccatgaaccatggtgcgtcccctatttaagaactcagtgttagcttcctttctgtctttaaagatatcaaaccaggtaccacatttaacaggactattaacagacaaga

SEQ ID NO: 209573 - DNA, 249 bp, Homo sapiens
ttcataatgtggatcaaagtgacttaatttccataaatatatgtttctaagtctaaacattagtcaaggattgcattttatgttcatcatcacagaacttactgtttaaaaataaatgctcaccatatggaattactgagggcagagtattgaagttcttaaacataagcaggtggaagatggagaaagtttggaatcacctggctaaagccatccaagaaactggaaggtgcttactgtagaacactt

SEQ ID NO: 209574 - DNA, 640 bp, Homo sapiens
atccaatgaggtggggactattgtatttatgagtcccatttatagatgaggaaactaaagcatcaacaagttgatacatatagctagtataccgaaaactatactcagataaaacattaactttggggcactaagtccttcatttttctttttgtttccctttccttcacaatgacttacactataagtatacacaaaaaaggattaaaacaccctcatggccgggtgtggtggctcatacctgtaatcccagcaattgggaggccaaggcatgcaggtcacttgaggccaggagttcaagaccaggctagccaacatggtgaaatcccaactctactaaaaataaaaaaattagctgggcatggtggcacacacatggagtcccagctactcgggaggctaaggcaggagaatcgcttgaacccgggtggtggaggttgcagtgagccgagatggtgccactgcactccagcctgggcgacagagcaagactgtctcaaaaaataaataaataaaaacatactcatgcttcctagcctcctatgtggggatgaatgaggtagcttcctttaaaagacaaaccacttacctggcagggaagttacactgcttcacaccacaaggccgtgggaaatcttgg

SEQ ID NO: 209575 - DNA, 390 bp, Homo sapiens
aagaaaagacaaagaatctagaatagctaaagtgatactggagaacaaagttggaggactcacactacctaatttaaagatgcacaagaaggttctagtaatcagggcaatttggtattggcaagagaacagacacgtagatcaataaaacagaatagaccccagaaatggccaggcatggttggctcacgcctataatcccagcacttgggaggcagaggcaggcagaatgctggagcccaggagttcaagaccggccagggcaacatggagaaactctgtctccacaaaacataaaaaataagctggacatggtgccatgcgcctgtagtcccagctacttgggaggctgaggtgggagaatcagctgaaaccagggaggctgaggct

SEQ ID NO: 209576 - DNA, 144 bp, Homo sapiens
taattacgagtggggaatttgtaaaatgatatgatgctgcatggcctctgaatagtgccctgctgtatttctccatgtgacaagttataaataaagcccaaacctaaccatcaaacttgaagaaaaagtggggaagagaaaagc

SEQ ID NO: 209577 - DNA, 295 bp, Homo sapiens
tttgctcataaagacaatgggggatgatgaagcaatagaaagaagaaactgggttcctggtgactttgttgagcacagccacccttcccatccagacagcccaacagctccactcctccttccagttaagccactgctgtttgatctccattattacaactaaaccagtatcttcactaatcatatcctgaggatgtaggtgcaggtgaaaatgagcctaacacatgtggggacagaaaaggaatgggtctgagtggaaaaaagggagggtatttgagagtaataggtaaaggca

SEQ ID NO: 209578 - DNA, 604 bp, Homo sapiens
taatgtagggagtagggggcagtattaaaaaaaaaattctactgattgaactttttctcccagccccagagggtccatggtcattatgatggccctaaagcctggctctgacccctgcttctgagccaggtcagagcaaggcctggggtggaggcttctggggaaattttgtgttgttgctttattaaaggatagttttgctgaaatcactctatcccttgggtcatatacactgcatcacactttttataggagaggggctatagaagcctcccctacccttggaggtgacgtagtattgtaagaaaatagtgggggcagagcttcgcctggccaaatatatatgtgttctaattgtgctttacacaaattaattatattgtttgaaggtatcaaagatgaatatttatgaaattatacattaatgaaacactttcaaatgcctttcccgtccccacactgaacacagatacactcactttccaagctaaagtactggaatcatggcaatttcttccaatcagtgccagctccataattgatgagttttcacttccgttatttcatttgagtgtagtgatgatgtggatgttgccctcttaca

SEQ ID NO: 209579 - DNA, 676 bp, Homo sapiens
accacacataaggaaatactaacagatattcttcagacaactgagaaacacagaaagaaataaagaacaataaaaagcataaatatatgagtaaatataaacatttgcaatacaaaataagaataacaatataaaataacaagaattccatgtgctatttaaaatgtatacagaatttaaagaaacaaagcagatcacaaaaaaaacaacagaccatacaagctcttaaaaacaaattgccatattcttaggaaaagattgtttcatgaccatgaaaacaattactagagtgagttttacacctgtttaatcaaagacgactgttagactcgtcaaatttttgaaagccagtcagtcagtaatagtcatgcttctgaaattcagacaatcaagagttaacactctagtgaacaaaggcctacaacatccagatattttttaaataggatgttacgtatctttatattattaaccttaacaataatggtactctttttggataataaataaatgaagaaaaatgtccttgcactagaaaagaaagatacaaatattcttgagacttaataggagctgtcatcaaggcaacactcagaaacaatatacctacagctcctgatcaatctcttgtgcagctctgggttccttttcatatatggaaattagactcttacca

SEQ ID NO: 209580 - DNA, 427 bp, Homo sapiens
ggacagtgatggccagacttggggaatagctgtgggatggcaggatggtaagaaggtttgggagctgagacagattctgaaggcagagccaacagaaccagcatgtggatttgtgtggggcagggttcaaaggaaggagggacacgggagagctctatgggggaaattattgtattgtttccaagtagagaaccctgatgggaaggccttgaaggccagggtaagaagcctggcctttgtcctggggtctcaggccccatctgtttctgaaaagctggcccagggcagcagtggtgtggtgaacggtgcaaggcagaaagaaatggggccagggagggccaggtgaaggctatggcaacaatcaggctggaacagacaatgaccctggctatgagttccagggcccacccttgactactcacagact

SEQ ID NO: 209581 - DNA, 636 bp, Homo sapiens
cacaggataattgtggtgaggctgcttcttcctctactctttaacactaaacaatgtaattcatactatcaacacttccacccctcatattagctgcacctgctagccttgtggccactgctatcctttattcacagcaaatgactaatggatgcagtggctcttcttataaagacaagaactctagaggttaacacaagttctagatttcctctatcataactgcctgtattcttatgggtaagttattttacttttttgggtttaagtttttatatttttgaagtcaagatcactttcactaccaataaaaactataaaagacaaaatattaactacgtgtgtgtacacacacacacacacatctgcttgaagatataggaacgtgaaacagcaggttgtatagaaattcttggccaagatacagaagatggaaagttagagaggtgaatacaataattaaagttggatgcctcaagggataatttcactactttcagagatagagcaaaactattgacaacttcacatggttagagaagcgaatgtgaaagtccatggctcactaaatgtggggcattggcaaatctcttgtacatttagttgggattaagtaatacactaaaagtaattcat

SEQ ID NO: 209582 - DNA, 731 bp, Homo sapiens
tttccatccccactcccaaatgcacagactttacattacagccacactacactccccttgctatcttttccctcttcctcctttcttgcatcctcagcaccctgctcaagggttctttggggcatattttgaccctcggcacctggatgagggcttcctacttgttagtttataatagaatttattcccccatactgtgattgtggatttctacatctgtctacaacttggctcagaattcttagacttcctggcataggataggtcatccatgaatggcagtggtgctgctacctgcccttccttccttcatgtcttccctccacctttctctgcctgtgccctggcacaggagattgagtctcagacatcactgtgttgccttgccttctgttcatctgaaagagcgccttgcaggggatgaggagagagggaggagaccaagggaagggtgttgactgctgcagctttctcccctccagaaaggtcacagctcctcccaaggtgacctttcaggttctaggacctgctccctcctccacccctcccactctcgcttacttagttcactcctccacgatacctctgccccgattctctcaaccggctcacagggttgtaaatagtgcctttagtcaactctgcttgaattatctgtctatttcctgctcgaatcccatggagaccccattatctttaccatgtatcactgagagtgcttatcatcatgc

SEQ ID NO: 209583 - DNA, 354 bp, Homo sapiens
ccatctgaaggcatgcctcacagcagagaaacatcaactcacctgaaagggaagcaatggacagttgcattaatgaaattggatcatgctttctgcttgttattaaattttactttctgatagttaaggaatgcttgtaactgaggaagtaccgacttttctggaaggcatatttcccagatttgtaagaagagttagaaccacaaaaacatggtagcaaaaaaggtaactcaccatgtcttttgggcttcgggtaccccagcctgaaaatttggttctatttcagcaatcaggtaatttagtagtatttgtctttttatattcccatttaaataaatctagactgtattacat

SEQ ID NO: 209584 - DNA, 513 bp, Homo sapiens
agaagagcaaagagggaaaactaagttgaagaaataatggttgaaaatttccaatagctttaagatattaattttaatctcacgttaatcactatgaaaataactgaaaatatacagaaaaggaaatgagaagagtaacataaaaatgttaccataccaaaaaccaaaaatcaattaaacaccaaagtaggcagtaatggaggaagtgaggaacataaaatatatatgacaggctgagcacagtgggtcacacctgtagtctcagcattttgggagactgagggggaagcactgtttgaagccagcagtttgagaccagcctggacaacatagtgagacccttgtctatacaaaagaaaaaattagccaggcatagtggtgcaggcctgtagttccaactgctcaggaggctgaagtgggaggattacttgggcccaggagctagaggatgcagtgagctatgatgacaccactgcaccctaccctaggtgacagagcaagaccctgtctcta

SEQ ID NO: 209585 - DNA, 652 bp, Homo sapiens
tatggcaaggcgttgtgcacagagaactagttctaagaagttgtcagaccaaatggatacatagtgggtacatggccaagtacacatgtgaaatcctttttcccagaaaattcaaaataatatagggagcagggagatgcttcctgctagagacctgggcgggctgtatgatgcccagcttccaaaagatgtcacagcacaagtgtccaaatgaaaactgacttaggaaaggtatgagttgagagtaggcttaaagtcagggtttacttcttacattcagggagagaatgaggatacaaggggaagggttttctgtgctaggattgcttgagaatgagaggtaactattccatcattagttgtattgtgttttgatacagtttactctgtgtgaataatacagctctcccctgggggaataaaagtctgaccacttcaagctttcctttgcctatgtatagtcattttcccagcggatttaccttgcttatagttgctgtcttatccttcactttgaaaggattttcactatgaattgatttcaaagtgttaggctagccaaagcataagaatgagttacattgcaaagtgttggcctaggagaggtgattcctccaattcattaggaagtcagtaattacatgcacactta

SEQ ID NO: 209586 - DNA, 444 bp, Homo sapiens
tatggcaaggcgttgtgcacagagaactagttctaagaagttgtcagaccaaatggatacatagtgggtacatggccaagtacacatgtgaaatcctttttcccagaaaattcaaaataatatagggagcagggagatgcttcctgctagagacctgggcgggctgtatgatgcccagcttccaaaagatgtcacagcacaagtgtccaaatgaaaactgacttaggaaaggtatgagttgagagtaggcttaaagtcagggtttacttcttacattcagggagagaatgaggatacaaggggaagggttttctgtgctaggattgcttgagaatgagaggtaactatttgagatgaagtatatgttaattaccctgatcagaacactatacattatacatatacactatacctttgtatacacatgcacaacttgtcgagatt

SEQ ID NO: 209587 - DNA, 615 bp, Homo sapiens
gtgggaacaccaaggaggaaatgacacactgctggcaggagatggaaagcaactggagtcttcatggagcgatgacatttgagctggtcctcaagtagtgggtgaggattacatccatgcaagagccctgtgaacccagatactgaagtatgtctaatgacaaggatgataagttgatatggaaaaaaatatcacaggtgtttctgctcacagcaagcccagcagtactccaagagcagtacttaacttgggtgtcatgggctatgctctctatacagaagattacattagagtcttgtcttaaaaaccctttttgggaaaattatcataattcatttttttctaatatccaatgacttttacgcttttgctactttgattcatcagtacgttgatgataccttctcctctttgtcccattcctgcttcatgataatttaatgaaattaaagtaatggatttaattagcacctacatctatgattatatgtatatattatttatctgaaacctttggggtgggccagctaccacaattaaaatatcaacttgattcaagttgtgtgaagcacactttaaacttgaaataaaagtgaataaaatctaaaaaaacag

SEQ ID NO: 209588 - DNA, 472 bp, Homo sapiens
  misc_feature (444)..(444): n is a, c, g, or t
atacaatcagcagtacacccagacagagagactggagaaaatagaaaggggcaggagagagagcattaccaaagaaataatataacagaattttccagaggtaaaggacatgagtctttggatttacaaggtctacaaagtacttagcacaaaggactggaagacacaactagatgtgtgtgaagtttcaatagcaccaaggataaggggaatttcttgaaaatttcaagaaaaattaaaaatgtcactacagaggaacaagtatcagaatggtggcagattttctctcctagcaactctgacttatggaaaaccatggagccaagccttcaaagttctcagtaaaaattactttcaatctaggttgctatacccagctgaaaccattaatcataatgaggacagaataaaggcatttttagacatgtaagactgctattgaancttctaaactaggggtaccggccgatcg

SEQ ID NO: 209589 - DNA, 784 bp, Homo sapiens
ctttttcacaaagggtttgccgccagaacacaggtgtcgtgaaaactacccctaaaagccaaaatgggaaaggaaaagactcatatcaacattgtcgtcattggacacgtagattcgggcaagtccaccactactggccatctgatctataaatgcggtggcatcgacaaaagaaccattgaaaaatttgagaaggaggctgctgagatgggaaagggctccttcaagtatgcctgggtcttggataaactgaaagctgagcgtgaacgtggtatcaccattgatatctccttgtggaaatttgagaccagcaagtactatgtgactatcattgatgccccaggacacagagactttatcaaaaacatgattacagggacatctcaggctgactgtgctgtcctgattgttgctgctggtgttggtgaatttgaagctggtatctccaagaatgggcagacccgagagcatgcccttctggcttacacactgggtgtgaaacaactaattgtcggtgttaacaaaatggattccactgagccaccctacagccagaagagatatgaggaaattgttaaggaagtcagcacttacattaagaaaattggctacaacccgacacagtagcatttgtgccaatttctggttggaatggtgacaacatgctggagccaagtgctaacatgccttggttcaagggatggaaagtcacccgtaaggatggcaatgccagtggaaccacgctgtttgagggtctggattgcatctaacaccaaatcgtcca

SEQ ID NO: 209590 - DNA, 173 bp, Homo sapiens
cattgtactccagcctggatgacgggagcaagactctgtctcagaaaaaaaaaaaaaaaaaaagattgactataggcccccattctcctctggtttgtgctgaaaggtctgctgtttgttagttgatgggtttttttttgtaggtgacctgtcctttctctctagctgccttt

SEQ ID NO: 209591 - DNA, 208 bp, Homo sapiens
ggagtcactgggctttttgcatttgtgtctttgtatctttcatcagttctagacaactgtctgccattctaacttctaataatgcctctctcccattttctttcttctttttttttgagccggagtctcgctctgttgctaggctggagtgcagtggcacgatcttggctcactgcaacctccacctcctgggttcaagcgattctcc

SEQ ID NO: 209592 - DNA, 259 bp, Homo sapiens
agggctaggaacaagtgtatgtgcttagagctttgaaatgttgacaacagcagggaggccaaaatgtttggagcagaatgggaatgaggggaaaaggtcagagaatgcacagggggccctgtcatataggccattctaggccattagattttttattttattctaatgtaggccattctaggccattagacttttgattttattctaagtttaattaatacagtatgttccaagagatacaagagagtattttcaccag

SEQ ID NO: 209593 - DNA, 334 bp, Homo sapiens
acataaaaattattagaataaatgaattcagcaaagttgcaaggtacaagagcaacacacaaaaatcagttgtactgctatacactagccaaaaaacaatatgaaagtaaatgaagagaacaatttcatttacaatagcaccaaaaataataaaataattagaaacaaatttaatttaaaaggcacaaggccgggaagggtggctcacacctgttaatcccagaactttaggaggccaaggtgggtggattgcttgagctcaggaattcaagtccagctggggcaacatggcaaaacctagtctttacaaaaaaggcaaaaaattagccaggca
